United States Patent Application Publication US 2026/0103690 A1 - sequence listing, part 49

SEQ ID NO: 234512 - protein, 406 aa, unidentified
MNHAVGIDVSKGKSMVAAVNFTKEVTLTPREFEHTEVGLERLIYNHLLTLDGGVRVIMEATGRYHEPIVAALHEAGIYVCVVNPLVIHDYGNNSIRRVKTDRKDALKIARYGIDNWAELREHTPMDAMRQQLKLIGRQYNFYMKQVVQQQNNLISLSDKVFPGVNEIFSSPMRKDGHQKWVDFFATFWHCDCIARTGQGAFTERYKKWCKRKGYNFSEHKSFDVYVDALGHWTTLPKNAYAKLLVTTACAQLTATLKGLATIKAEFLRIASLMPEYEKVKALYGVGDITAAGLIAEIGDVRRFDNRSSLIAFAGVDPSTNQSGKYESKSGTATKRGSSHLRKTLFQVVSTHLKRSPENEAVFQFIDRKRAEGKPYYVYMTAGANKFLRIYYGTIKPFLIALDTENI

SEQ ID NO: 234513 - protein, 313 aa, unidentified
MLFIGIDVAKAQLAFACRPSGETGTVPNGEDGIRDLVTRCQALTPALIVLEATGGYEAAVVAALATAGLAVVVANPRQVRDFAKATGQLAKTDALDAQVLALFAERVRPAPRLLPDDAVQALDARLTRRRQLVEMLTAERNRLLIARSAVRRDLQQHIRFLERRLRKADDDLHTAVKASPAWRVKDDLLQSVPGVGRVVSLTLLAELPELGRLSHKEIAALVGVAPLNRDSGTLRGKRLVYGGRAPVRAVLYMAALVASKCNPVIRAFYLRLRVAGKPAKVALTACMRKLLIILNAMARSGTPWRTESLLART

SEQ ID NO: 234514 - protein, 421 aa, unidentified
MEVFCGIDWAEDHHDIALVGRDGQLLARRRISDDAAGLALLVDLLAAHGDTATDPVPVAIETPRGLLTACLRATGRQVYPINPMAVARYRDRHSAAGRKSDHGDAVVLANILRTDLASHRPLPAGTELAQAIAVLARAQQDAVWARTQAHNKLRSHLREYYPAFLTAFADARGGIMRPEARILLAAAPTPAAAAKLTPSQLRALLRKAGRSRGIDTQASRLRDAFRAPQMRQLPLVEEAMGRQALALLRQVDAACAAASDLEQAVIESFNQHPDAGIITSFPGLGPLTGARVLAETGDDRSRFAGAKGLKAYAGAAPVTRASGKSIAILHRRVKNQRLAAAGYVWAFAALTASPGARAHYDRRRQAGDRHTAAQRNLFGRPLGCLHHCLATGQLYDENTASPPPPTNPTSPRLDKLNASDV

SEQ ID NO: 234515 - protein, 351 aa, unidentified
MPNAMTDSKLSLVSVVGGVDTHADSHTVAVLDQLGRRLGCAVFPASRAGYGALVDWLAGYGRISAVGVEGTGSYGAGLTRWLSARQITVVEVNRPNRADRRRRGKSDPVDAEQAAAAVLANTATAVPKARTGLVESIRLIHGTRAGAVKARTAARNTFINTVRTSPDAVREALQPLTRARQLKAATGYRPAGDGPRATVKRCLRRLAVRITELTSEIIAADADLDRLTRQLAPDMRSRLGFGPETTAQLLITVGDNRDRIGSEAALAGLCGVSPVQASSGRSRYYRLNRGGDRQANRALHMIILCRLRHHQPTRAYLAGHSIDGKATPHLRRVLKRYLVREVYQLLGDLKT

SEQ ID NO: 234516 - protein, 351 aa, unidentified
MLIIGCDFHTRYQQIAMANDETGELLLERRLDHESGEARAFYRSLPEPVRVGIEATGPIHWFERLLAELGHELWIGDSAKIRASEVRKQKTDERDAALILDLLLAKRFPRIWVPTPAERDLRQLLWHRHKLVSMRTMLGNQLHALAMSQGLCRKKKLFTRKGRVELVSLGLGPWASRRRAELLKLLDQLDPPIAELDCAVLEEAKRREDAVRLMTHPGIGPVTALAFVLAIGPVTRFHRSKKIASYLGLNPSEESSGGRRRLGAISKQGNTMVRWLLIETVHHAVRQDPELRQDYQRLKFRRGHAVAKVAIARKLAVRMYWMLRSGADYAQLVRRQGSPGGTLMNASSSLA

SEQ ID NO: 234517 - protein, 313 aa, unidentified
MLKQSHYKVGCDAHKHFSVFAVLDAQGSCLERTRVNHEPGAIKAFLARFPSGTPVALESVGNWYWIVDEIEAAGCVPQMAHAAKAKVMMGNVHKTDKLDAEGLATLQHLGKLPAVWIAPRETRDERELPRTRMAFSRIRTALKNRMHATLAKYALSLDTDSDIFAPKWRPELMGLVGTLPEETRRCMEQELELLDQVQAHIQCLEVRILEQVRLTPSIQLIQSVPGPAKILSIVIDREVGSIDRFPSPDDFAGYSGVVPKVKGSGGKFHYGRMIKQSNRYLKWAFRVASRSGAEGHRSRQRHRPPPALPQLAQ

SEQ ID NO: 234518 - protein, 367 aa, unidentified
MPRLHRDGEVVHVAFDASKNVLVTGVLRPGEETPTIERVFNDEPSVRRFVKGFPEPGRLRTCYEAGPCGYELQRLLQSLKVPCEVIAPALIPVAPGDRVKTDKRDARRLVRQFRAGELVAIRVPSRHDEAVRDLCRARADAVEDLTRAKNRLGHFLLRHGRIWRGGATTWTFKYRNWLGQQSFDESALRVTFARYRATVECREAELESLESELTNYLEEEPFATPVQRLSAYRGVDRLGGLVLQAEVCDWRRFANGGAAGAFCGLVPSEYSSGDSVRRGSLTHTGNAHLRRQLIESAWAYTNGPSLGVTLRRRQDDVSPDTQARAWASQVDLCRRFRALDKRKPVRGVVVAAIARRLITHLHAEMVA

SEQ ID NO: 234519 - protein, 374 aa, unidentified
MSDLSEAFVAFDTSKLRNAVAIADPGRVGEVRFLGEIENTGTATARLVKKLAAKYQRLTFCYEAGPTGYGLYRQIKSLGHECIVVAPSLIPKKAGDRVKTNRRDAVNLAKLLRAGELTAVWVPDRHHEAMRDLSRAREAAVMDLRSQRQQISAFLLRQGLHYPGKTTWTKAHMSWLASQKLAYAEQRLAFEEMMLAARQAQERLDRLEQAIRTAVPDWSLAEVVTALMAMRGIDLISAAGFLAEIGDLSRFRTPSELMAYLGLVPSEDSTGDTIKRGPITKAGNRRARRILVESSWSYQHPPRVGKEKQEKVAAAPRAVREIAWKAQCRLSGRYRALIRRGKLKTVAVTAVARELAGFIWAISREVTTARVAAK

SEQ ID NO: 234520 - protein, 397 aa, unidentified
MHKKKISACLITIDEQGKEQYEIKEFGTFTNDLFVMRKWLTDNNCPIVAMESTGVYWRPVHNVFEGFMEVILINARHIKNVPGRKTDISDCKWLAGLLRHGLLRGSFIPPKEIRQWRELTRLRRSYTESLADYKRRIHKLFETANIKIDSVVSDLFGVTGRNLISLLCDESELSLANIKKNAKGTLKSKSNELHSSIHGFFEDHHRFQLIGMMEIITNFEQKITEITKRLNSLTAGHQNLLDRLDEIPGINKKSAQSIVSEIGVILDDFICMAALASWAGLCPGNNESAGKRKSGRSSVRSHPFKTILIEVAWAAIKKKGSYYRAKYFKLKARRGAKKAIVAIAHRISKAIYNIIKHGATFKDLGEDYLTTQTKQRAIKNIKNRAKQLGYKLVPCMN

SEQ ID NO: 234521 - protein, 343 aa, unidentified
MQISTIGVDLAKNVFQVHGVDSAGKVVITRQLRRKQVIEFFSKIPPCLVGMEACGTAHHWAREVSKLGHTVRLMPPSYVKGYVKRSKNDAADAAAICEAVTRPSMRFVAVKSTDQQASLMLHRTRDLLIRQRTQLINALRAHLAEFGLVAETGREGVAQLAALITDESNREALAFAMKQALQAIVDQLAALELQIGTLDRAIHAHHRANDMSSRLETVPGIGVIGATAIASTVTDPSNFKSGRDFAAWIGLVPRQHSTGGKERLGGISKQGDRYLRRLLVIGATAVVRHARQHPQKHPWIMRLLAKKPAKLVAVAVANKMARIAWAIMAKGGCYRAPELAAAA

SEQ ID NO: 234522 - protein, 340 aa, unidentified
MTQLTFFVGVDIASASFIACIGTTPWKLTVKAMKFDNHEDGFASFLGWLQAHSLAPEKTVVCMENTGVYSEGLAYFLSASGYAVAVEPPLNIQRKFPANASKTDELDCQYIAEYACRYVDKLAFWKPRAEILEKVKVLLTTRQHFSTQLTGHKNALHAINRKKVSPDLAKQVHQDMIQQIAKHIKTIDKEIRHLIENDPTFKQTLLLLLSVPGIGLQLAAHLLIVMQETLDPRTLAAFIGICPIKHESGTSVFSTPTSRHYGPPVLRKLLYLSACSVRTHKKHFQQYFFRKLAEGKHKKVALNNIQNKILKIACAVVRTQKPYIPNYVSVNPLVFQKTLT

SEQ ID NO: 234523 - protein, 414 aa, unidentified
MLPPDIECVVGIDVAKQAHVVCALEVPSGVVRHPPSRIEATAEGFALLRSWLETWGAPERILIGLEATGPLWEPLYEHLTQAGYGVLLLNPRQTSSWASSLGRRAKTDGLDAQTLARGLLAGWARASTLPSESVQALRTLTRTRRDLIQSRTATRQRLHDELVTLFPEFVRFLSTLPGRTDLGAPAVLALLRRYSSAQALAQVSLAELTTTLDQLSGGRWGGAQAQALQDLAQQSTASSRALAARSLVARTLAQQLQELAAHLTEVEAAIAVLLQDDADGQRLQAIPGIGPQTGATIQAELGDASRFARVDEVVAYAGLDPRTRQSGAFMGQKQLSKRGPGALRHALYLAAFVAARCAPEWRVRYQRLLDRGRAKKEAYLILARALLRVIYHLLRTGEAYDPALLKQPTAPSAA

SEQ ID NO: 234524 - protein, 347 aa, unidentified
MRFYTKQHKFYCGIDLHARKMYLCILDETGEVRLHQNIKTDREVFLKVIEPFREGMVVAVECMFTWYWIADLCNDHEIPFVLGHALYMKAIHGGKAKNDKIDSRKIAVLLRGGMIPMAYTYPAKMRATRDLLRRRNHLMRKRAELYAHIQNTKSQYNLPESLGCIAKPQNREGIAERFTDPSVQKMIDADLAVIEAYDPIIAKMERDIVKMANHHDPVAYALLKSIPGVGKILGLVILYEIENIKRFPTVQDFASYARLVKCAKESNGKKHGSSGKKIGNAHLKWAFSEAAVLFLKGNEPAKRYLDRLANKHSKGKALSILAHKLGRATYFMLKNKKPFNQNKFLGL

SEQ ID NO: 234525 - protein, 382 aa, unidentified
MKAKDVALGRFERTWEGLDRLAEFLEENETKKVVMESSGPYSYMVYMALDSAGFDVWMAHPRDNKTNDQLKTDKRDAERLVKRFVVGEIRAYKLPTDPKIIRLKRLTRFRMKMVSRLISVKNEIRKTLDEVGIDLKKAFSTLGKGAIAIVSGLVRGLSVDAIISSNQSLAKKRDVIDEILKSRGKLDDALIFEIKSLLRLLREIERHRESTEKRIENALSDLEEETKLLTTIPGVGLQSVAIILAEIGGISRFPSPKNLASYAGLVPSVYQSGDEIVYGKLRKDCNRRLRYILYQVALKAIKYSPRLRKFYERLRSRGKKHKQAVIAVARKIAMAIWHILTRRTPWSENLKRGYVPRRRRFKRITMKQALKILRELGYEVLA

SEQ ID NO: 234526 - protein, 348 aa, unidentified
MTVYIGVDFHARQQTISYLTTEDGEIQHIILQHEDPKMVRAFYEQFAGQRVVVGFESSGYAAWFEELLEELGCEIWIGHASYIRQFAKRRQKNDRRDADLILELLYKGDFPRIHRYTRHTREMLQQLRYRHRLVKMRTMAVNMMVFMASSRGITMRKQLQSKRGQARMKALGLPAPLDKQRDELLSLVEELDQKIATVERWLEKETAKDEAVQRLQTHPGIGLLTSICVRYTLEDVGRFTSTRRVSGFAGFDPMEDATDDSRRMGSISKQGSRWLRFYLVEAGQVACRKDADLKRVYLRIKARRGHPQAKVAIARRLLVRAFIMLRDEIDYDEFLRRGVAARSARGSA

SEQ ID NO: 234527 - protein, 342 aa, unidentified
MKDIMIGVDLAKTVFQPHGASMTGQLKYRKKLTRPRFRKFMADQSPSMVVMEACGSAHYWAREMVRLGHDVKLIAPQYVRPFVKRQKNDAADAEAIVIAAQRPEMRFVAPKSQDQQARAVLFRARERLVHQRTELVNALRAVLYEFGHVIPKGIGNIKRIDAILEEPNCDLPTLVCDECRDLVKQIAEQTIRIDAKTKAAKEMAAAADTTRRLQTMPGVGPLTALAVEAFAPAMKNFKRGRDFAAWLGLVPRQHSSGGKERLGRVSKAGQADIRRLLIIGAMSRLNWMGRKTIPEGSWLARMLARKPRMLVAVALANKMARGIWAMLTKNENYRDPAQAVAA

SEQ ID NO: 234528 - protein, 349 aa, unidentified
MTHPPLRRTYQLYVGVDIAAATFDAAWQTLDGAPTSARTFQQTPTELSRFQQVLQTTGVAPAETLVVLEATGSYWVALAVRLHAAGYAVSVVNPAQVHAWAKSLPRRSKTDALDAQLLAQFAAERHPPVWTPPPAIYHELRQRLVARDGLLEMRQQARNQLHALIQWPVVVAAVQQQLEGVIATLDTQIQTLDSTIAAVLAESSWAASAARLQTVPGIGLVTAAWLLVATVHFTTCPTAEAAVGYAGLNPLKGDSGTSVRRRAQLGHGGHGRLRTALYMATLSAAQHNPVIKTFYTRLRAAGKPVKVARCAAARKLLHLAFAVVTKEQDFDPSYQKSPVVSANKAEIGG

SEQ ID NO: 234529 - protein, 414 aa, unidentified
MFYIGIDWSTESHAVTLLGASGEVLESLVIENRLAGFLTLLETIRKHLRKLEPAATSDSVSFAIEDQNQRLTDFLLAQNFQGHLIEPSRMKGYRLRYRSSGNKTDPDDSFILADVLYRDHDQLPRMAPDSEVIRTLKTLLRDREGFVRDSTRLTNRLTACLRQYYPEALGFFDDVAGKTVLDFIAAFPDFAAASRLSRGEVKRFLVEHHCHREAQLERILNVLGSSPTPVPIVVVQTKRQQALAIIQQLRAVQAAVADYDAEIERLGKENDEVQRFRGLPGGGPITSAGLSTLFGEDRSRFTSAMSVQSLAGTAPKTIQSGQFRTACFRFGCNRFYRMLLQQLALGALRRSAWAKQYYRGKRKEGKTHQHALRCLANLLLKIAFAIWRDRTEYSEDRHLAQIMRHRLRPTSNSV

SEQ ID NO: 234530 - protein, 410 aa, unidentified
MSESPYAFYVGVDWASETHQFTVLTPERRLEAERRIEHTGRALSEMADWLTALADGEPARIAVAIEVPRGPVVETLLERGFHVFAINPKQLDRFRDRHSPAGAKDDRRDGFVLADSLRTDRPAFRQVHVDDPLLIQLRELSRAEEELQTELRRLSNRLWEQLQRFYPQVLRLSPAVDEPWIWALLQLAPTPVAARALRRATLARLLARHRIRRVTAETVLAELHSPALRVAPGTTEAAREHIAMLLPRLQLLHEQRGRCARRIEQLLDALEGSDAEHRDVTVLRSLPGVGRVIAATMLAEAARPLAERDYHAVRTQGGVAPITRQSGKSVLVSMRYACNHRLRNALYHWGRVSAQHDPSTRRHYRALRQRGHGHARAIRGVIDRLLVVLMAMLRTGTTYDPARRRVPAAA

SEQ ID NO: 234531 - protein, 423 aa, unidentified
MEIMYERVAGLDVHKATIVACVRVGTGRKVTRECRTFDTTTDGLLALLAWLVECRCSHVAMEATGVYWMPVWKILSDGDFSLVVANAAHIKNVPGRKTDMNDAMWISDLLACGLIKASFVPEEDVQELRSLLRTRKQLGREQTRHVQRIQKTLSEANIQLDSVLSDIMGASGRRMIEAMIVGVRNPRQLAALASAQIKATPKQLYDALHGRLTDHHRFLLKLHLRQWDGLDATIREIDLEVEARIVRMDKEVKAGEAPFCDLIDLLCTIPGVSTLSARTILSEIGRDMSRFPTAGHLVAWAGLCPGQNESAGKRKTTRLRKGAPWLKTMLVQCAWAAKRKKDSYYKAQFFRLQSKRGPQKAICAVAASILTAIYHILKDGTEHHDLGVDHFNRRSTESQTKRLVAQLTKLGFEVKLERTAEAA

SEQ ID NO: 234532 - protein, 393 aa, unidentified
MAALRPMGEVVLQPKEYPHTEVGLERMSLDILALGEDTRALMEATGRYHEPVAAALHEYGIRVTVINPLFIKQSGGGSIRKVKTDKADAMKIAKYALDNWVDLREYTPMEAIREQLKLCSRQYDLYMKNVVALQNNLISLTDKVFPGVNELFTSPERTDGSQKWIDFVIAFWHCECICLVSQAAFTERYRKWCKRKGYQFNERKAAELYMDSMGHITTLPKNSNTKLLITTAAKELASAKATLAVLRSEMTRLAQQLPEYETVRAMYGVGETTAVQLMAEIGDVRRFPRRSSIVSFAGVDPAVDDSGKHISKSNPTTKRGSPHLRKTLYQIVCTYLRKAPADEPVYQFLDKKRAEGKPYFVYMTAAQNKFLRIYYARVKECLIAADTKELSAD

SEQ ID NO: 234533 - protein, 368 aa, unidentified
MRTNTLEAAPAASAKELKNEKPAKAKRMLVGVDAHLRGYQAARKIDSGVIGVVENFRSEEELRLYVAKQTTRAEQVVVVYEAGPLGYTLYRKLTAAGVLCYVCAPDSGEQRKKRRKNNKIDARSLTSKLFNYLNGDQNALQLARVPTEAQEQLRMASRQHDQLVEERKRLGAKGNAMLLSQGFGSWSNWWRPKAWADLSSKLPPWLLERLEIWVDVLKVLDEKIAQAKAAFARSCNGPRPKGVGALSQMQLQSEVLDWSLYSNRRKIACLAGMVPSEWSTGDKERRGSITKVGVPALRRIIVEMVWRIIFFQPQYKPVQKWLEVLRGPNPARKKKAVIAIGRQLIVDLWRLQTGRVTAQELNLIMVTD

SEQ ID NO: 234534 - protein, 346 aa, unidentified
MAMTIVESTRPVTGGVDTHADVHVAAAVDANGGVLGVESFATTPAGFAELHGWLTAFGAVARVGVEGTGAYGAGLARFLRARDLEVIEVDRPNRQLRRRAGKSDTIDAVEAARAALSGRASAVAKTADGDVEAIRVLMVARRSARDVRIKYLNQIRHLGFTAPDELRERLRGVPPDQLARTAASLRPGTGTVMHATKLTIRMLGRRVLDLEADAQQIDERIHELVRRTAPTLLDVHGVGTHTAAILLVAAGDNPHRLKNEAAFANLCGVAPLPASSGKIIRYRLNPGGNRQANHALWRIVFTRMSSDERTRKYVARRTSEGLTTREIMRVLKRYVAREIYPHLVHA

SEQ ID NO: 234535 - protein, 430 aa, unidentified
MRSDMQPHYKCVCGVDVHKEFLQVCILKQEEDPEILRVFNNFSGLRELKQRVEEAGCECIACESTGVYWYRLYLAFEGQTRVIVGNAYQIKSIPGRKTDVRDAQWIAELALNGLINPSRVFPKNDRELRELTRTRESTVHSRTQIKNRIHRIFDSAGIALGKGVKDIFGKSGIHLIWGLLNREDTENIIGTIPSARVKKNADVLREILSGSLSDLQILLLKKNLDMMAHINEHIHALDEQIVARISEQDRVRDIEIACSIPGVSVTTAVTVLAEIGDYRDFKKAERLASWAGLVPSVYQSAGKNYSGKITKHGSEHLRWILVQAAKSAGRTVNSSFRKFFTKISYRSGGNTATVALARKILCILWHLLINRELYIDPINDAKSIKPPVVKKFSKNSPTDVQQAIDFIVKSGFKVIYPDSILEQNLRGVHQ

SEQ ID NO: 234536 - protein, 349 aa, unidentified
MGEVSTIGVDIAKSVFQVHGVDADGTVLIRRRVGRAKILEFFSKLRPCLVGMEACATAHHWARELKKLGHDARLMPPTYVKAYLKRGKNDAADAAAICEAVTRPSMRFVPIKSVEQQSTLMLHRTRDLLIRQRTQLINALRAHLAELGLVAAKGREGLRQLVTVVTECGDERLPSNARFACQAIVGQLHAVQTQISGLDKRITQTHRANPDSKRLDAIPGFGVILSTAVVATMTDPKAFKTGREFAAWIGLVPRQNSTGGKDRLGSISKQGDRYLRRLLVVGAISIVRTARMWPDKYPWVIELLGRRPTKVVAVALANKMARVAWAVLAKGETYRAPTRLSNAAITVAA

SEQ ID NO: 234537 - protein, 451 aa, unidentified
MKKNTYRSIEVQKVTAAQIMAQVVGAVVVFALDVAKKRVLLAITEADGALARLVHFQMPAQLGVVFALARELTDAGKEVQFVLEPTGTYGAPIAEGAHRHGHAVFMLSPKHTHDAASLFDNTPSKHDPKDACVIARLHAQRLARPWEPMPEERRELRAMIAERELFAAPLGEHLGRAEAMLANWWPELLQVTDIHRLASVQRWLVQYPDPASVRAHSEVAAKALRDASRGRLAADTIDEIVKSAQGSQGAVMSEGERRLVRVTFEEIRRLSAHCDEVDARIEAAIERKREYATTRKMVGAVTTAVIVAKLGEVTRYASAHALEKAIGLNLKEHSSGVRQNMEVHITKRGPGMVRKYLYMTAMRLVATDAVVRAWYQRRASFRAGNKSSALVAVMRKLARALWHVAKGEAFDAKKLFDERRLDVVPIAPRRRHQGAAEMTASSSEGGVSVTA

SEQ ID NO: 234538 - protein, 327 aa, unidentified
MKKNPAPVYVGMDVAKATLQVHLNGHQFEFKNDTKGHAQLSKRLAKLTLPQVVCEATGGYEQPVVEACHKANILVSVLNPAHTLAASPAQGKRAKTDPCDAAALTDYGQRFQPEPTPAVPPAVREITELTIWLKQLIDNRAVVKTQAEHQTNAFVGQQHAALLAHYESQIAIVEQEIKKTVHAQAPFQQRVDCLTQIEGVGFRTALLTLVFLPELGAMNRGGTAALAGLAPWTRDSGTMKGKRCIGGGRARVRSVLYMAALSASRCNPVLAPFYQGLKKRGKPSKVALTAVMRKLLIHMNSKLKKLADNPGLDKPAKSNKTKKSLAK

SEQ ID NO: 234539 - protein, 421 aa, unidentified
MQQHMPHADDFAAFVGLDWADAKHDICLQTADADSREFHILQHKPEAIDEWVRTLRQRCHGKPIAIALELDKGPIVAALQKYDGLVLFPINPLTLARYREAFATSRAKDDPSDAQLQLELLLKHRDKLKPLQPQSAEMRALAQLVEDRRTLVNDKVRLLNRLTSALKNYYPQPLEWFRDKDTALFCDFLERWPTLKAAQLARRSTLERFFLEHHVRYTEVIDQRLQAIKSTTSLTRDDGIILPKRLLVQSLISQLRSVRQALENFDEAIAERAHSHPDFALFDALPGAGAVFAPRLLVAFGEQRERYADAAALQKYCGIAPVTERSGNACWVHWRYQCPRFLRQTFVEWSGASIQKSFWARAYYEQQRQKGKSHNVAVRGLAFKWIRILFRCWQTRTPYDEATYLNALQRRGSPLIQNQTQ

SEQ ID NO: 234540 - protein, 325 aa, unidentified
MSNKIMYCGIDISAENFDICMLQPEGDFAWHQLSNDTKGFRQLLKLCSGNYHFVMETTGVFHLPLCLFLHEKHCAYSVVNALQMKRYIQMNLERNKTDKKDAWHICMYGIERRPAQYEMPEQQYFECRTLNSSIETITAEITAFTNKIYAQKKQKTDTAAVLRSYHQIIKTLKAELKKLKAELQKKMLIWQPGLVKQVSSVKGIGSRATATLIVTTQGFKNTHSYQQLISYAGLSPKEYRSGKSIRGRVRISKKGGKQLRHILYMCALNAKVTNSACKALYDRLVAKGKNKKLAIIAVCNKLLKQVFAVVKSGKLYNDNYYKQIA

SEQ ID NO: 234541 - protein, 387 aa, unidentified
MPQLNDLSRSLVALDQDSTIIAVVELSQSSWLVAGVLPGIERQPQKKLEPSAERLLGLLHRWRDEAVRAGKKITRIALAFEAGRDGFWLARWLNARGVEAHVIHPSSVAVSREHRRAKTDRLDTELLKRGFLGWLRGERGHCSMARVPTIAEEDAKRPNRERECLVGERTRIVNRMKATLARLGVRNFKPTLRKAAERLATVHTPEGTPLPRNVLAELQRDMARLGFVVSQIREIEQARQKRLEQETETGPHAMVRQVARVIGIGLETADMLVHEVLSRPMRDRKAVARYAGLTGSPDESGARRREQGLARAGNARVRRGMIQLAWRFLRFQKQSALAQWYRARTADSRLGTRKTMIVALARKLLIALWRFVTTGETLDGVILRPAG

SEQ ID NO: 234542 - protein, 368 aa, unidentified
MNNVKFIGMDVHKKTITIAIAEDGARDSARVYGTIKNDLSELDKVCRKMVSTADQLCFVYEAGPCGYTVYRHLTAKGFDCMVAAPSMIPKKSGERIKTDYRDAIMLARLHRAGELTAVWVPDPQDEAMRDLNRAREDAVIAARKAKQQLNGFLLRSGFVYTGKTKWSKTHFRWISDIAMPHPAQQIALQEYINTVHENTNRVGRLTEQIRQMVPDWRLAPIVHSLQAARGVSLITAVTMLSEIGDIGRFKNPKQLMAYLGLVPSEHSSGDSKKRGSITKTGNKHVRKALVESAWAYRMPPRISRVLSKRQENLPDSACQIAWKAQLRLYGRYRRMMGKGKPKQVIVTAIARELSAFLWAIAKKQPLIP

SEQ ID NO: 234543 - protein, 359 aa, unidentified
MNHLNEEGESEMNITTIGLDIAKNVFQVHGVDRNGKAVLRKKVSRGKVVEFFAKLPACLLGMEACPGAHHWGRELMKLGHRVKLMPAQYVKAYLKGQKTDGNDAEAICEAVSRPGMRFVVMNTQAQQDLQMLHRIRHRLVGERTALINQIRGLLGEYGIIFAQGPGQVRRGLVRLLGDNEAGLSGFALELLSDLHQQLRELDERIAGYDARVERVCAADEPSRKLDALPGLGALTATAMVAAVGDARQFANGRSMAASLGLTPREHSSGGKQRRLGITKRGNTYLRTLLIHGARTVLRHATGKTDRLSRWALELEARRGKNVAAVALANKLARIAWAVLTRERTYQPDWLGRANVQSTA

SEQ ID NO: 234544 - protein, 387 aa, unidentified
MVQINDLSRSLAAFDPISTLVVVVEMSKASWLVSGVVPGVERQPLKKLEPDATALLRLIERWRNEAMRAGRPISRITLAYEAGRDGFWLARWLITRGIEAHVIHSASVAVSRERKRAKTDRLDAAMLMRVFLGWLRGERGHCGMVAIPTMEEEDARRPNRERESLVNERSRIVNRMKSALARLGIRGFKPHLRKAPERLAGLRTAEGTGLPANIIEEFRRDMARLALVREQISSIEKTRAERLERAPDTGPHAMVRLLARVIGIGIETADMLVREILSRKLRDRRALARYAGLTGSPDESGLKSREKGLAKAGNARVRRGLIQLAWRFLMFQKDSALAQWYRTRTEGPSGARKTTMIVALARKLLIALWRLVTTGEVPDGVELRPAA

SEQ ID NO: 234545 - protein, 438 aa, unidentified
MSNKVIFNYDELFISVGIDVGADFSWMSIALPNQQFIGKPYKILHNSMDSLATAVSKIKEAEELYSLESRIFLESTGIYHYPFFCYLRDKGFNCSVINPIITKNSTNINIRKVHNDRFDSKKAALIGLKPDLKVSIMPSDLALNCRNLCREYYDLMDNRSAYVNKLQGELRMAFPQYLGIFSKVTINTSLTLLETYTSPSAFIEADKQEVIDIIRSTARFGLTYAQNKYNAIIQAANEANEFGYIIDSNIKRIRLYISFIRKYDEEINSILESMHELINANEDTDFVKQAHLIETFKGAGFLSAVSLMGEIGDFSVFSKPKQLFAYFGLDPAVKQSGKFEGTKIKMSKRGSAIARRVIHTLALQSISTSRMGEAKNPVLRDYYLEKCKSKPKLVAMGAVSHKVCNIIFAILRDNKPFEIITPQEHIKKYNAAKCDIAA

SEQ ID NO: 234546 - protein, 410 aa, unidentified
MNPLYVGIDVSSKTNVVYLMKPDGSKHSNFPVANSLDGARQLSKRILSAITSESLSDVIIGLEATSVYGDNLVCFLREDGNLAPYNKKIHVLNPKQVKKFKDAYPDLPKNDYVDSYIIADALRFGRINNEVYIDDYRYKALQNLTRARFFAVQNQTKEKQRFLNYLFMKYSSMTQEKVFSDTFSTTALAVYEEFDSADELAYMDLQELTSFIKEKGKNRFPNPDEVAKAIQAAAKGSYRLPKTVNDSVNQVLSIAISSIRALDAQIKAFDKAIADQIQLIPNTLTSIKGIGPVYSAGIIAEIGDINRFPNQAALAKYAGLAWTQYQSGNFEAQNTHLIKSGNRFLKYYLGEAALSVVRCDSEYKRFYNLKYKEVNKYQHKRALALTARKLVRLVFQLLKDNRLYIPPENR

SEQ ID NO: 234547 - protein, 398 aa, unidentified
MPEFTVGLDWGAREHSVCVVNASGAVRARWRVPHDREGLDRLLRDLRHITDPSMLPIAIERPSGLLVDTLIDAGHPVIAIHPNVVKASRARYRASNSKSDDADAYLLADLLRTDAHRFTPVHPRSDEMRAVRALARARDDLLRQQIMLTNQLRAHLDGCHAGGARIFSDLNSPIALAFLQRYPTLTSTRGLGEKRLSAFLSKHAYCGRRSASELLARLRAAPERQPGPHEEEAARSITLALTSVLQTVGERLTLLTRELEHASSETAIGHLIMSFPRTGRLNAAQIVAELGDDPNRFADRDHLASEAGVAPVTRASGKSHHVSSRYACNKRLKNAITTWANNSRHADPWAKRMYDRARARGHRHPHATRILARAWTRILYACWHNGTPYDPTLTTPTG

SEQ ID NO: 234548 - protein, 415 aa, unidentified
MEVLVDRCAGLDVHQKTVMACVRTSARNGGRAQQVREFRTFTDDLRRLRDWLVGEGVTQVAMEATGVYWRPVWHVLEDEPSLELLLVNAQHVKAVPGRKTDVADASWLAQLLECGLLRGSFVPPPVIARLRDLTRYRKKLVEDRAKETQRIQKLLEDAGIKLDSVVSDVLGKSAREMLEALIAGQRDPDALADMARTRMRPKIPELRRALAGRFGEHHALLLQVHLDHIDHLSSAVDRLDAEVEKVIAPFDEQVRRLCTIPGVGVRTAEVLIAEIGVDMSRFPTAHHLASWAGLCPGNHESAGKRRSGRARKGDAALRSGLCEAAWAAVRTKDTYLSAQFRRFLRRFGKKGEGKAIFAVAHTMLVIVWHLLANHTDYQDLGADYFARREDAKTREHYLVRQLEALGHKVTLEPAA

SEQ ID NO: 234549 - protein, 387 aa, unidentified
MTVPDQVFKIVPRHYDIFGGLDVAKKSMAVTFTDHEALMRSLRLPYSSAHLLHYVRKHFPDQRVAFVYEAGPTGFGLHDELITAGYRCLVVAPSMVPTAPGDKVKTNRLDSRKLSVQLRGGQLRSIHVPGPRYRELRHLVQLRDTQVGQLTATKCRIKSLLLCEGLAFPAAPESSQWSARVLSELCELPCSPAVRFKLDQLIGTLHFHFNSAAAAQKQIRYFCQNDPELRQSIRWLASLPGIGVIVATHLVARLGDWREISNVRQIAAFLGIVSSEHSTGEKENRGRITRAGDSRLRNKLIQSAWTAIRKDAELRAFYLRIYHRHPKKIAARKAIVAVARKLTTRIYAVLKEQRPYVLRPENLPAPLTAEETLGPRGRLDGPQNEQP

SEQ ID NO: 234550 - protein, 393 aa, unidentified
MRLWGKPRPKSSVLNVEIDVEQVTASVLPLSITHKSIVLLRTFFGSAAAILYLTVCLNLALSGPLGVLTMIFFLGFDTAKTKYDVSLIDEQGIEKWADTVPNDETAVAQLLLSVTGHYGEGSFTCVVESTGTYHHPLLDACDLLDMPCLVYNPLLTKQQIKATIRGKKTDRTDATMIARLGLRGEGRLHTPEPYRTVKYQVRSANKLSSLTSSFKLHNDHMAKVLGDELSGTTKELMQAIQTAIAAARKQLYQDMATSAEGEIYRLLQTVTGIGPYVAASLIGEIQTMERFPTAKALVAYAGLDPKIRQSGKVLNSTGRLTKRGSPHLRRSIFIAASVARQFDPNMKALYDKKRAEGKSYTVATCVVARKLLAIVRAVWLSGQDYAANYTTKS

SEQ ID NO: 234551 - protein, 428 aa, unidentified
MYYTQNEKILQVGEEKIIVGIDVGSEKHYARAFDWRGMEYSKKAYVFTNDAEGFAGFFEWITGIMEKSGKETVMPAMEPTGHYWFDLAKFIQDNGMQPVLVNPLHVKRSKELDDHLPSKNDRKDPKTIAKLVIEGRYAYPYMPEGIYAELRNATVLRFQAEAELTRIKNRIQRWFAIYFPEYKDVYGSFSAVSSMMILKKAALPCDIIALGEEKINEIWREAKLRAVGKKRAKTLVEAARRSIGHTEGHETARLEIFLLLEDYDRLQNRLEQIMELIETLVSKVPYAKKLMQIKGIGIKTVSGFIAEVGDVSRFNDPTQIQKLAGQAIVANSSGKHKGQSRISKRGRKRLRFLLFEAVLSLTATNPEFKEIHHYYTGRKTNSLKKKQSLMVLSNKLIRVFYAILKSGTDYDPEKLLRDIRRPEEPQAA

SEQ ID NO: 234552 - protein, 438 aa, unidentified
MSNKVIFNLDELFISVGIDVGADFSWMSIALPNQQFVGKPYKILHNSIDSLTTAVSKIKEAEELYSLESRIFLESTGIYHYPLFCYLRDKGFNCSVINPIITKNSTNINIRKVHNDRFDSKKAALVGLKPNLKVSLMPSGLALNCRNLCREYYDLMDNRSAYVNKLQGELRMAFPQYLGIFSKVTINTSLTLLGTYTSPSAFLEADKQEIIDIIKSTARFGLTYAQNKYNAIIQAATDANQFGYIIDSNIKRIRLYISFIRKFDEEINSILESLHELVDANKDTDFVKQIHLIETFKGAGFLSAVSIMGEIGDFSAFSKPKQLFAYFGLDPAVKQSGKFEGTKVQMSKRGSAIARRVIHTLTLQSISISRNGEAKNSVLREYYIKKCDSKPKLVAMGAVSHKVCNMIFAILRDNKPFKIIAPQEHIKQYNAAKCDIAA

SEQ ID NO: 234553 - protein, 372 aa, unidentified
MSRNFRLISPLLLIERRIMEKIAIGIDFSKETFDMTVLDTKKTNGKVDADALAKAPHEQFENRRSGFRKSLSWARKVTGRKLDKDNAIFCGEATGKYSVRMSEYLREQGLFVWIDSGLRIKNSMGIVRGKSDKADSYRIAEYAFRHWDKAELYKPLEKSVSALRELYLYRDHLVGIRKATEQRNSLMKEFSDVVGESSFIRRSGDRIVKDLKEEIKRCEEEMRKLIESNKELKTTFECITSIKGVSLINGVAFIVYTNNFEWFGNNPRKIATYWGVAVFGKESGTSVKGKTKTSKCASRKLKKLISEAATCAIRWDPRIKAYYQKMRNKGKHHGVAMNNVKNKLIHIITALAVNKTKYCDTYEEDRKLRKAG

SEQ ID NO: 234554 - protein, 391 aa, unidentified
MDEEGNVIGYPIFPNTLPGAEALESRLLQLIQEKGFSTLKIATEATSFLDLHLVDFLASSQHLAAFHPSIYQFNPKLVRNFKRAYPDKEKTDKIDAFVITDRLRFGRLPEPYENHRPYLPLRRLTRYRFHLVKTISREKAYFITHLYLKFSAFSLEKPFASLFGATSLALITEFSPDQIVHLPLEDLTQFLIKHGKNRFKDPDKIVEVLQRAARESYRLRPALSSSIDLILATILQTLRALGEALKEVDKAVEKEFQAFPNTLQSIKGIGPVYSAGIFSEIGDIHRFPTEEALAKFAGLTWKRYQSGNFEAEETHMSKTGNEYLRYYLIEAANALRVHNSEYKAYYETKFQEVTKHQHKRALALTARKLVRLVYALLKKGQLYQANYQQEA

SEQ ID NO: 234555 - protein, 335 aa, unidentified
MNGNTEHWVGIDVAKSKLDVALLDERGKIKSHVFSNDVKGHAALIAWLRDRISALGVRVCMEATGPYGEAPATALADAGFVVSVGNPARIKGFAQSELVRNKTDLADAALLARFGQTMQPEPWVAPPLEVRELRALVDRLQSLKEMHQQEANRLEAAMNQAGMRASIESHMQWLGVSIKELERQIDDHIDKHPSLHDDLKLITSIPGVGNTTAAKVLAYLGDVRRFKNGKALAAFIGVTPRLKLSGSSVRGRSAISRSGHAGMRHCLYMPAMVALKHNPLVSVFGVRLKAAGLAPKAVIAACMHKLVLLIYGILKSGAPFNPQFGSHHLDFQDGI

SEQ ID NO: 234556 - protein, 405 aa, unidentified
MARVFVGHDWAEAHHDVHVEDEAGRRLAGARLPEGVEGVRRFHELVGAHADEPGEVTVATETDRGLFVGALVAAGYRVLAINPMSTSRYRERHSTSGAKSDPGDAKVLAELARVDGHNHRPVAGDSNLAEAVKVLARAHQSMVWSRQRQQNQLRSTLREFFPAALEAFDDLASGDALAVLAMASTPAQGRALSRSKIASALRRGGRQRRIEERAIETQAALRSEHLEASPVVAAAMGASVAALVAVITELVAQTENLERELADRFEQHPDAKIIRSLPGLGTILGARALGEFGDDPNRYADAKSRKNYASTSPITKASGKQRVVLARYARNRHLADTCRMWAFAAINASPGARAFYDERRANGDTHNRALRALANRLVGILHGCLRHGTPYDEHTAWAHRITIAA

SEQ ID NO: 234557 - protein, 353 aa, unidentified
MTEYVGIDWAYRRAAWCAMSVGGVISAEGFTPADEDGLAKLVLRLGSDVKACLEMMSGAVWVRDRLRSAGWQVEVADARRVKGVAPLACKTDRVDARVLAELCRRDLVPALWIPSLEERELRERLRRRMHLVRLRTSAMNRIFGLGTQWGLRLSAERLRRQGALELLAQRGVPAVWQRSIEEALAVIDLLDERIAPLEAELAPIARADRDVALLVTIPGVGEMLALTLAAEIADVSRFPSPRKLVGYAGMAPGVKQSGQSSRSGLPLSKAGSRTLRWAAVEAAQHAWRESNPWHQLYSDVAKRGGKNAAKSAVARKVLIASWHMLSRRQPFKPSRPRGGAHTVPASSISVLAA

SEQ ID NO: 234558 - protein, 454 aa, unidentified
MTKRNAEAERAKAPRKPGPSQKALTITHPNAAGIDIGSCSHYVAVPPDRDAEPVREFASFTADLHALADWLKSCGVDIVAMESTGVYWIALYEILEARGFTVLLVNARHVKNVSGRKSDVLDCQWLQQLMSYGLLSGAFRPADAVCTLRSLTRQRGMLLREQGRHVQHMQKALTQMNIQLTNVISDVAGVSGQRILRAIVAGERDGHALAALKDGRIRASGQEIAKSLEGNWRTEHLFALKQAVEAFDFTGAQLAQCDRQIQIQLESLQAHDGEPVKGKKRSRTRNAPAFDLRTHLFKMCGVDLTRIDGIDVTTALAVISETGADMSRFASVGHFTSWLGLCPGTRITGGKVMSGKTKRVVNRAAQALRMAAASLRSSKSALGAYFRRMCSRMDKPKAITAAAHKLARLIYTLLTRGQEYTDQGQEYYEERYRQRVLWHLNQRAEKMGMKIVPA

SEQ ID NO: 234559 - protein, 346 aa, unidentified
MGQPATISVAVVNADGKLVMQSVIATHAATILDFIHGLRGTLHLTFEEGTHSAWLYDLLARGVARVVVCNPRQNALLKAGNKSDTSDARKLAELLRAGLLAPVYHGEGSTRTLQELVRSYAALTEDTTRVMGRVKALYRSQAIACAGKKPYGRRHRREWLSKLSEAGLHRRAERLYEELDALQGLRRAAKRELVLESRKHAAAKLLRTVPLLGAIRAALLIGRVQTPHRFRSKRQFWAYCGLALETRSSADYRFEDGQLVRAKKPVFIRGLNRNHNHDLKNLFKSAATTASALHGPFREFYEGLLAKGMQPAMARLTLARKIAAITLSVWKKGESFDAEQLKPQAA

SEQ ID NO: 234560 - protein, 315 aa, unidentified
MTDIIAQNVGVDISKATLDVHLHPAGNARQFANDAHGIRALLAWLGGYSIARVVFEPTGPYHHGFERRLGEAGLPLAKINPLQARRFAQATGAHAKTDAIDAAMLACMGALLTPPARPITSQTIDEMKELHIARLALVKDRTAAKNREHACRSPLLKRHATQRLAQIDRQIAAIDAALSALLHSEPDLLARFEILVSIPGIGSITAITMLIEMPELGSLDNKQVASLAGLAPVARDSGQYRGRRHIRGGRAILRQALYMPALVATRYNVDMKAKYQAMTAAGKPAKVAITAVMRKLIILANALLRANRPWTQKMA

SEQ ID NO: 234561 - protein, 323 aa, unidentified
MQGKVSFQEDAMPVVYAGVDVSKEWLDVHLHPLGESRRFSNDKTGIRQLKRLLARHRPKSIVMEATGKFHRPAHRSLWLDGFAVAVVDPLRARMFARACGYLAKTDRLDARFLALLAESLRPPADTPPSPHIEALQELVNARSAAKCDITALQNRSKTATTALLRGELNRLVRRLEQHVERLDKEIERCVGEDPQLCRKAEILTSIPGIGRVTALALMAGMDELGSCSGKQAAMLAGLAPIANDSGARTGRRSIRAGRPAPRRALYMAALSARRYNPALARFADTLKAAGKPAKVILVAIMRKLLVLANCLLAHDRIWTPNPP

SEQ ID NO: 234562 - protein, 334 aa, unidentified
MSTYQCFVGIDIGALSASFAWASATQAVSSAQSLGLSTAADLSAWLDVFTALPNSPAETLVVMEATGTYWIRLGLTLHRAGYAVSVINPTQAHHFAQAQLRRAKTDGLDAQMLAELARVLQPTIWLPPPDEYEALEQCLAQRDALLDIRTQEGNRLHALKQRAVIDPVVQQRFEAHLAFLHQTLKAIEQQINHLLTTIPHWQEAAQRLLSIPGIGQVSAAWLLVATVNFSACPSPEDAAAYAGLVPHPQTSGSSRRGHTGVGGGGHARLRKTLYMATLSAVRFNPHIRCFYQRLCAAGKPKKVALCAAARKLIHLAWAIVVKKRFYDPTFGLIS

SEQ ID NO: 234563 - protein, 496 aa, unidentified
MVHETVFTRKMLPENVKQKPSTMKLYLGGDVSKGYTDWVILSEKKQRVLENFQLDDTYAGHCKLYSALEAYFDKHAGLEMYAALESTGGYENNWYNTLKSYQKVFNLKVARINPLGVNYNRRAGMKRNVTDAISAISIAEYMINHPENIAYDQDEKWKTLCRHWNFVEMQKAQKTQTINQLETILYCSNPALLRFKKDNLPNWLLELIIKCPTADKLAKARPENLAKIPYLTLKRSKELVAEAKQNIASATDRNAELLVSQIALQIKAFDQNIKSQMRLIEQEMSCQEIEVLKSFKGIDTTSAIGLLLEIKAVERFPAVKGISCYFGLHPKFKQSGDKVIGVRMSKQGSKNMRKILFNIAKGAITYNPLITEIYEKKLSEGMSKMAAIGVCMHKILRIIYGMLKNHQRYNPAIDKQNCERSKSKQQEKLMQENANIQKSRRYQEFDATAPISKKQTKKRKEHDLSQCEITSQSTGSTCSSNTKLQNVDNNKLRMTS

SEQ ID NO: 234564 - protein, 421 aa, unidentified
MRELRTKRVRTVKEGTLIATVDIGATTNTGYCTCADGRDIKVFKFDNTREGFEKFWHMIVAAQNRFKCDDVIMGYESTGPYGEPLVHYLMDKPVSIVQVNPLHTKRLKEVNDNSPGKTDDKDPRVIADIIRLGRALSVVVPEGDAAYLRRLNNARERHVGERTALLNQMQQLVFLIFPEFKTVIPQMIGKTVRFVLKNYTTPERIGSVDKMVLGEEMRKRSWGKLGTKDAELLINAAQQTVGIKEGVAGIVLDIQHIIAQLEVAERFISEIESEMVVTLGRIPCSARLLSIKGLGVVSVAGLIGEVGDFSKFRTQSEIIKLAGLDLYEVSSGKRKGQRRISKRGRSLMRKILYFAAIQMIRQNGIMHAYYESLIARGMLKMRALVAVMRKLLGIIHAILRDDRDYVGEYCAPKRRVIKRAA

SEQ ID NO: 234565 - protein, 460 aa, unidentified
MSNGSSRRLSRGDRRRNDKLARLRAVVTRESAVLAFDLAADKQVCALTDQDSQVLARRTVAVKAWQLQEAVEWGLARAAAAGFTSVVVACEPTGHRWRVLDQIGAGLGVRLVCVQPLLVHRAREAEDFTRNKNDDSDAMIIARLVTELRCYLPERADPTWARLRHLGARRVQLVVEAGAARQQVQDLLECAWPAALTAAGQPLDSKSWLAAVTVVLDRVGSSGDLSVIRRWGWTRFVAAVRRELPAHGTSRWHSPIVRAVFDAAACTSQVNVGVADQRAGALERVRFALADLAHARAQVSVVEARMVGVLDELRLTELVTSIPGVSAVSAATILAESGDPTRFSSARALVKHAGLCPRDNASGAYQGQTSISGRGRPELRLAAWRATFGALRHNPVLAARHAHLTGRKGNPLTDAQARVAVAGSLLRQLHAVVTTRTAWNPEIAAGLGRATDQQEATAAA

SEQ ID NO: 234566 - protein, 412 aa, unidentified
MQDILTCAMGLDIHRDVIVACLAKGELGTDPEIEIRSFSTLIPEMRKLRDWVLEAECRYVAMESTGIYWQPIYEMLEPCFDGQISILVVNARHMKNVPGRKTDMRDAQWIATLLRAGLLKGSFIPDKTFRELRHLTRYRKSIVRDITAQKNRIDKFLQSSGFRFTAFLSDAFGASGRNIIRHLMEYGNISREALDRCLKTQTRKRIDEILIALNGSLSEHQRGFLRMIFGHLEALEQHRHTVEDAITKEIIKHEEALSLLCSIPGIDVTAAAAIIAEIGTDMSAFPDSQHICSWAGLSPGNNESAGKRKSAHINKGNPYLKSMLCEVGWVISGKRSLYLSGWYWRIKQRKGAKRATIALARKLLALIYTMLKTGSPYNEDCFEIRRKQSERKRASRMVNELQKLGYFVVAPG

SEQ ID NO: 234567 - protein, 313 aa, unidentified
MIITLRCIGIDVSKRHLDIFDEGIGVSERVANAPHAITELVARWRCDALVVFEATGVYDLGLREALRAAGIRFARINPARARDFARASGQLAKTDPIDARMLAVFARAMRPAPEQVSSPARNALARLAKRRDQLVLMRAQEKNRRSEAGDRAMVERICRLIEVLDHEIAEIEADISALIKAEPEISHDAQLMRSLPGVGPVACMQLIAQMPELGHVGPKQAAALAGLAPFNVDSGAYRGKRKIRGGRKRVRNALYMAALNAVRRADRFKAFYAKLRQAGKPAKLALIAVARKLLIILNAIMRDRKAYMPAQQT

SEQ ID NO: 234568 - protein, 368 aa, unidentified
MNEAIRFFVGLDVHKESIAIGVAEAGREEPRFVGTVGPDPAELRKALKRIGPPAALHLVYEAGPSGYGLVRDLGARGYRCEVIAPSKIARRPGDRIKTDRRDALLLARLARSGELVPITVPDARDEALRDLSRTRSDAVRARLKARQQLKALLLRHGHRYSGKSSWTLAHERYLATVTFAQRAQDIAFTEYRSAVRENHERVERLTESLRTQLESWRMRPVVEALMSLRGIDVVAAITLVAEIGDIRRFTHPRELMSFLGLVPSEHSSGHTRRLGAITKCGNGHARRVLVEAAWNYRFPARISRVLQVRQENQPKPIRDIAWRAQLRLSERYRRLLARQLPKNKVCVAIARELTGFVWDLARQVKPIA

SEQ ID NO: 234569 - protein, 406 aa, unidentified
MNMNAVGIDVSKRKSTVAILRPGGKVVVKPFDVPHLSADFQSLEKLIRELDGETRIVMECTGRYYEPVARELSQAGFFVSAVNPQIIRNFQGQDNPLRKVKTDKADSVKIARYTLDSWANLKQYSLMDELRSQLKTMNRQFDFYMKHKTAMKNNLIGLIDQTYPGANTYFDSPAREDGSQKWVDFIDTYWHVDCVRKMSLNAFTDHYQKWCSRRKYNFSKLKAEEIYGKAKELIPVLPKDSFTKRIIKQAIDQLNIASQTVEQLRALMNETASKLPEYPVVMAMKGVGPSLGPQLMAEIGDVTRFTHKGAITAFAGVDPGVNDSGDYSQKSVHASKHGSPVLRKTLFQIMDVLIKTKPDDAVYLFMDKKRSEGKPYYVYMTAGANKFLRIYYGRVKEYLSSLPKSE

SEQ ID NO: 234570 - protein, 416 aa, unidentified
MELELVVERCAGIDVHQAQLRVCVRLPGEGRRSRVEEFATFGTTTPDLLELSEWLSQRGVTQVAMEGTGVYWKPVYYVLEADFDLWLVNAQHVKNVPGRKTDTSDAAWLCRLLEHGLLRKSFVPPREIREIRDLTRYRKALIRERASEVNRLHKVLEDAGVKLATVASDIMGVSGRKMLAALVAGTTDPDVLAEMAKTRLRARLPELRKALNARFREHHGFLVAQILAHVDYLDEAIAQVDERITAALEPSEAAMTVLLSIPGIQRRTAEVVIAEIGTDMTRFPTSRHLASWAGLCPGNNESAGKRKHGRTTKGSPWLRTALVEAALGATRKNGYLQAKYRRVRSRRGHQRAVIAVAHAQLEIIHTLLSRGELYSDLGADFFKRQQAEQITRRAIRQLERLGHHVILKEAATAETT

SEQ ID NO: 234571 - protein, 417 aa, unidentified
MTANSLMQRRSAIKPDTLIVGIDVAKFNHVARTLGPGGVIGRPFEFPNSREGFVALSAEIEARKPTSASAVIVGLESTGIYWINLARWLAEQGYQVVQVSGLYVHHAKELADNSRGTSDDKDALLIADLVAQGKYLGFVRPAGVLADLRQLVGLRQRLVRERAARYNLLHQSVDLLFPEFPTVFKDATGLGARRVLRRFPTPAAALASPPDEMRRLLSEDGRVQASVAKLARLQVAAQQSIGTCEGTAGLKYALNDTLLELHSLDTRVKQVELEINRLLAQVDETPILASLVGPMTAAIVLGETGGLRQYRCAAAVLKLAGLNLYQISSGQYCGDRHISQMGRPLLRQALYLAALQHTHPGMPLYPYYAELLRRGKPKPVALVALCCRLVRLLYALVRDGRCYSPRPPDKSQQTQAA

SEQ ID NO: 234572 - protein, 364 aa, unidentified
MKILLYAGLDVHKETIDIVVYRENERSVYLERRIQNREGSIRKVFGRLLKEGSVVACYEAGCMGYRLQRMLEGMGVESVVVAPGKVPRRARDLIKTDRRDARRLAEQLRAGTLEAIHVPDVEDEATRDYIRSRDDVRLELKKMKQRLQMFVLRYGYVYESTRYWTGRHERWLQSLRFDLPMQKETFEGYYYRIQELKGRLQEMDKRIEQIAMSERYTERVSRLRCLKGIDYLTALAMVCEVDDFRRFGSAEAFMAYLGLIPRERSSGEVRRQGRITKTGNAHLRTLLIESSWHYRYRVAVGKRLREKREGQPAGVIAYADKAMRRLQEKFFHLHMNGKTSTVAVTAVARELAGFIWGMMVGQTA

SEQ ID NO: 234573 - protein, 354 aa, unidentified
MSLKSEKKIAVIGIDIGKNSFHLVGLDKRGAMVLRQKLSRGQIEARLANIPPCLIGMEACVGAHHLSRKLKALGHDARLMPAKYVRPYAKGQKNDFNDAEAIAEAVQRPAMKFVATKTAEQLDLQALHRVRERLVSQRTGIVNQIRAFLLERGIAVRQGLRFLRLELPRLLAARSDVLSPRMVHTIEDLAGDWRRLDERIEMLSSEIEALAHNDAGCERLMSVPGIGPIISSAMVAAIGTGDGFSKGRDFAAWLGLVPKQISTGDRTILGKISKRGNRYLRVLFVQAAWVVLVWPQSWERHGLKRWIETAKKRLHHNVLAIALANKLARIAWAVLAGEKNFEARKIGDTAVQSA

SEQ ID NO: 234574 - protein, 457 aa, unidentified
MVWRGASGTGERVIEQSTRFVGMDVHKHTIVVAVTATGEVGKATAYGTFPNTATALETLVKRLRQAGDGPIKFCYEAGPCGYGVHRTLTRMGEDCMVVAPSMIPRKSGERQKTDKRDAASLAVLHRGGLLTAVWVPDAAHEAMRDLIRARLAAVRAVRAARQQLSAFLLRHERIYPDGRSTWTKAHRRWLADQTFAQPAQQIVLEECIEAVRQGEQRRDRVDGYLRAQIPTWSLFPLVQNLCALRGLDMIAGAGLAAAIGDPSRFATAPHFMAYLGMVPSEHTSGPKRRIGAITKAGDVHARTLLIEAAHSYRYPARIGRHKLAAVDAVPEAVRAIAWKAQTRLCQRYRHMMARGKLKQVVVTAIARELAGFVWSIACITSDPAVSGNIVTELYDEGTAPYDEVTILSEEVAQQVQQLTPDMGRPRAPRHQSLKGTARPRRRTPANQAGSVERSRTG

SEQ ID NO: 234575 - protein, 412 aa, unidentified
MDAIIKTCAGLDIHLNTIVACVLSGELDRTPKKEIKEFSTTTKSLLELLDYLTEKGCTHVAMESTGVYWKPVWNILESGGFNIIIANAHNIKNLPGRKTDIKDAEWIAKLLRCGLIDKSFIPSTEIRDLRYLTRYRRRLCGDLNKEMNHIHKTLQDANIKLSSVLSDIFCVTGTKVLLRIMNNEPLDWAFVNSIYTGAIGASLKAKPDEFYEAINGRIRTFHRKMLKVHYDHILFIQSQIEEIESQIEEALEEHQESLEILTSIPGIDVKSASVIIAEIGTDMTQFPSASSISSWAGVSPGNNESAGKKKSSKIVKGNKWLLCVLCQCAWAASMKKGSYCNKKYWNMVSRMGKQKAIVAIAHYQLRLCYTLLKNKKKYEERNYDYLKKKETQRTQRLIKELQKSGYNIQKIV

SEQ ID NO: 234576 - protein, 381 aa, unidentified
MSAETTHTNQYTTIQLHLYMAFELSQTKWMLGFTIGFGQRPRLRTIAARDLAALQNEIHLARERFGLGAEVPVISCYEAGRDGFWLHRYLSSVGVTNLVVDSASIEVNRRAKQAKTDKLDLGKLLTMLMRYQAGEKKVWHVVHVPSAEVEDHRHLHRELTDLKEQRTQHINRIKGYLSNQGICLEVKDDFPESVEHLRLWNGKSLPAGLRVRLLCEHQRFQLVQEQIKALEAERRESLRHSTQPDVEQVRQLLRLRGIGINCAWLYVMEFFSWRAFRNRREVGALAGLTPMPHRSGEEDRELGISKVGNRHIRAMAIEIAWGWLRYQPNSELSRWYQRRFGKGSKRLRKIGIVALARKLLIAIWRYLEFGTVPTGAVLKST

SEQ ID NO: 234577 - protein, 312 aa, unidentified
MSLPHVYLGADVSKATIDCRLLDQAFTITNDPAGLAKLVTRLRPLSDRVVHVVCEATGGYQNKLVAYLHDKNIPVSVINPRQVRDFARSRGILAKTDKLDARVLADFGATNTPKADAPKAAHLQRLSSLLTARDHLVAQRAAEKTRLPQIEDRWLLNQTKRTINFYTREITKLETELTTLRDAHPELKTKAERLQQAAGVGTQCALGLLGYMPELGTLSRSAVAKLAGLAPLNHDSGQMRGQRHISGGRSQVRRLLYLSSLNAIRRNSILKAFYQKLRAAGKSGKVALTAVARKLLVLLNSALKNPELSLAN

SEQ ID NO: 234578 - protein, 470 aa, unidentified
MRRPYPTAGQFLPLAPGSPGGTASQAKQPETGRGGGRVDEVSDEPLYRDRVCGIDIGKAGMVATIRVPSDSNPARRAAETRSFGTTRREVLALADWLRCWQVPAVVMEATGDYWKGPFYRLEAEGFECVLADARQVKNLPGRPKRDPSDSRWLAACFERGAVTSCFVATGEFRVIRLHTRYRRDLIEERTREKQRAEKLLESAAIKLSSVVTDLHGVTGRDIMDHLIAGERGPKVLAQLARGRARRKLCELEAALEGAEFFTAEHAALLAAMLERIDGLSAQIGKLSEVIERLVAPYEEQLQQAESMPGWGRRAAQDAIAETGVDMSRFPSGAHLASWAGRTPLDNQSGKRKGKARSRKGNRYLAGITGETATAAGKTQTREGARYRRLARRRGKAKAQVALGNTQLKVYHKLLSNPGMRYHDPGPDYYERRRDVRRQVAHHVGKLGGPGFEVTLCRIPEPDGTGQTQAT

SEQ ID NO: 234579 - protein, 317 aa, unidentified
MTFAGIDVSKTHLDLALVSNSPKPTRLRFPNSPEGRQALLAALAHHNPAWVALEPTGAYHLPLLKLLAENRLQVALVNPYHLAAFRKAKGERQKTDRQDALLLARYAQVYHGELWAYTLPPEALRELKALVGYREDLAGRERTILNQMEAAEWAGSKEVLALLQKELACVKGLLGEVEARIQALLATLPEAEVLMALPGVGPQVAAAVLALLPPELWGRAKRAASYAGLIPEREESGKSVERSRLSKKGPPLLRRKLYMGALVAVRHDPEMRAFYHRLLSRGKRKKQALVAVAHKLLRRMMGRLREYYATQLDQGVA

SEQ ID NO: 234580 - protein, 334 aa, unidentified
MSYQWFVGIDVSKQTLDITVLYNSEKKLYERIENSTKSIKLFLKKLVHEQKFSLNDCIFCLEHTGIYNTHFLKVMEEKKLTVCLESSVQIKQSGGLLRGKNDKIDSFRIALYAFKNKEFLTLWQPERNVIKHLRRLSGIRERLLNAKKQITTSIKEDKKFIDKVSSAQIASCCKQSIKALEEDIKKTEDEIKKVIANDEKLKEIFSIIESVPGVGKITATEIVINTNEFKKINDPRKYACYAGVAPFEHSSGTSVRGKTRTCKKANLKAKSLLHMSALIAARFNENIREYYERKVAEGKNKMNVLNAVKNKLIHRIFACVNQKRFYDNNYKLGC

SEQ ID NO: 234581 - protein, 436 aa, unidentified
MTLINFVAANQKYYAFNLLSVFIMVFWSVQYLLQHLLVQTQVSHQLLQPLILILQLPQTPQFRHARPGKFFLPVNGMDYFLPLRLTVRNVLTRRITMNIVFLGIDLAKNVFQLCGLNQAGKPVYTKRTGRKELLQTLANIPACLIGIEASTGAFYWQREFEKLGHKVKVISPQYVRPFVRGQKNDGNDAQAIAVALMQPTMQFVPPKSPEQQDIQALHRARQRIVNHRTATVCQIRGLLLDRGIPIGRAVSRARRAIPLILEDAENGLSSRMRRTIAELYDLFNDLGRRIHFFDKEIETVFRQSEACPRIAKVKGIGPKTATAVVAAIGKGTEFKNGRHFAAWLGLVPRQHSSGDRQVLMNMTKKGDKHLRTLFIHGARAVVRVATNNNDGHMNQWVNQLKERRGFNKTTVAVANKNARIIWSMLRNDTGYQVVCN

SEQ ID NO: 234582 - protein, 404 aa, unidentified
MGRTLSDDQGRKVGQKFFKHSGEGLAEMASWLLKASGANEPGQVLVAIEVPHGPVVENLIERGFAVHAINPKQMDRFRDRFSMAGAKDDSRDAEVMSSCLRTDAKCFRRLVCAEPIFVELREWSRIAEELGVERNRLANRLREQLWRYFPALLQLEDDCSAEWLLDLLALASTPAKAVRLREAKLTQLLKQRRIRRLDAATILKAVQAPPPKLAAGTVEAASAHVLSILPRLQLVNRQIKEADRKIGALIDSLTANEDNQESEPGQKKQHDAAILASLPGVGRTVLATLLAEAWEPLQRRDYAALRSLAGVAPVTKQSGKSRFVVRRQACHDRLANALYHWARVAVQHDPRSRAKYAELRKRGCTHGRALRTVADRNLSVACAMLKTGTLFDPALQAEKNKKTV

SEQ ID NO: 234583 - protein, 338 aa, unidentified
MELYAGIDLHSNNSVLSVLDETDRVVFAKRLPNDLTAIVAALRSCAGALHGVAVESTYNWYWLVDGLMDAGFPVRLVNTTAVKQYDGLKHSGDFEDARHLAHLMRLGILPTGYIYPKGERAVRDLLRKRSQLVRQRSSQILSMQNLLARNLGTHARGNEIKHWSDAQIDAMPLLPEQQQALKANLAVMSCLDGQIKQLERSILAKIKLQPQFQSLKTVSGIGDVLALTIALETGEIGRFESPGNFASYARTVNSRRESNGKKKGQGNTKCGNKHLAWAFIEAAHFAVRYDAAIKRWYQKKCASSLSVVAIKAVAHKLARACYHVMKDGQPFDVKKAFG

SEQ ID NO: 234584 - protein, 356 aa, unidentified
MSRDVKYIGMDVHKEATVIAVQNAKGHMVMESIVETKASSILQFIHGLQGELHVTWEEGTWAAWLYDLLQPHVHQVLVCNPRRNALLKEGSKNDKVDARKLADLLRTGMLRAVYHGEHGLRTLRELARTYQTLNQDLNRVMNRLKALYRGWGIACSGTQVYAGRYREEWLGKIPYAGVRRRAELLYQQLEGLQDLRRRLRPELLAESRKHKAAKLLRQIPSIGPIRAARLIALMQTPHRFRSKRQLWTYSGLGIETHDSAQYRYVHGQLQHAKKPQQIRGLNHNHNHEMKDIFKGAAIRASCGMGPLREFYVSLLDKGMKPEMARLTLARKIAAIALTLWKKEERFDAEQLKTQAA

SEQ ID NO: 234585 - protein, 322 aa, unidentified
MQYIKHFVGIDISKNNFFACFNEIDKPKKFNNNSVGILEFIEFLKTNKYLKKNTVIGLESTGRYHLPLSIMCSEHNYVIKVINPIITKRYTQSTIRGVKNDSADSKTIRSCTVRGEGYEFKENTESMILKNLVRERYFLVQIKTIFKVKHQDIVFKERYIKSPITDINYEMEKILSKKIYSLEQKLTTYNVETQKLLQSIPGVGKITAFSMAAEIGDIKRFNTAKQLVGFIGVDPRVYESGISIKGKGYITKRGNKILRKLLFNAAMSAVQKPNMFRDFYVKKVSEGKPKKVALCAVMRKMIHVIFSVWSRETPFVPDLTSS

SEQ ID NO: 234586 - protein, 343 aa, unidentified
MEKKWFVGIDVSKKTLDCAILRLGGKEKEAVCFQVQNDETGFMDIRSGIRSRKIEKNQLVVVMENTGMYCFELCCFLEATGIDYCVLNPLHVKLSFGLVRGKNDKLDSVRLASYARLHREELKCTHLSSRVIIHLKELIAERKHYTNALAALKNFDQEPKPKECLSTNERVREAKTFWEEKIQAVEKEMLELVCQEPDLLENYNLLVSIKGIALVNAINTIVYTNNFTLFTNARKYACYIGIAPFEYTSGTSIKGRTRVCKAGAKSLKADLSMAARSAVAYDNDIKTYYQRKKDEGKHFGVVLNAVKFKLVERMFAVVKRRKPYVDIYKYKSQIARDQAQLAI

SEQ ID NO: 234587 - protein, 429 aa, unidentified
MHVEDPHHQRGFGEERLERNSIMVASLKDSPVAVNGRIVVGIDIGKQKHAAAAVTPQGVDIGPAIFFQNTKTGVDQLQQLLKSLGKPKSLLIAMEATGHYWMALYFTLERQGYQVAVINPIQTRVKFRSRIRKTKNDKIDARSIARTILLGDAKAARIPDEPTLELRILTRHRWRLIDTISDMSRFAQTLVDRVFPEYAEIFSKPFLPSGRALIQDIGLAPDVIVDHADEVNELLKRCGRNRIQPDKIKFLIEQAKNSIGIHRAEDVIVKQLQSTLDLMEAIESQVDEIDNELEKRVEGLHSPLASLGIKAPLIATIHAESDPITDFKHPWQYAAYVGLDPSTYNSGNFVGTKTHISKRGSPFLRRAFFLTAFSIYRHHTDITRRYQKARKTGHSHIDALVIVAHKIVRIVWRLLTDNRPFKERPPKRK

SEQ ID NO: 234588 - protein, 338 aa, unidentified
MHYTGIDLHKKTSFITTIDKDGKIVTRANLQNVEEDILAYFAHLGGETKIVIESMASWYWLYDLLTGEGLEVVISNPVKTKAIASAKIKNDKLDSHMLAQLLRADLIATVHVSSLETRKLKELLRHRSKLVRDATRMKNRIHMLLMKNNFRSPFSDLFGVKGLRYLEEIDLPDYHRQNVETYLLLYAKLQEQIEPLTKRVRALAKENHTAQLLMTIPGIGPITAMFIIAEVDDISRFRSYRNLASYAGLVPSLDASAGKEKRGRITKQGSRYLRTALVEAAQAAARMKNCRLNIFFRRRIVKAGYQKAIVATAHKILQYAFYVWKNQTPYKETYPVCA

SEQ ID NO: 234589 - protein, 362 aa, unidentified
MNTINLGVDLAKTVFSVCEMDGSGYVVRRQDLKRDAFAVWLAQVPAGTVVAMEACSGAHHWARRCLEYGLEPRIIAAQFVKPFRKGPKTKNDRADAEAIATAARQGNMRFVPVKSIDQQVRLSWHRVREGYKVESLAIGNRLRGLLAEFGVIVANSDVALRRLLGDLDAQLGLPPELKELLRDLADHWRQLRVHLDACDARIEAHAREDEQCVRLRAVTGIGALTADAAVATVGNAREFKQGRQMAAWLGLVPTQHSSGGHVRLGEISCRGDAYLRTLLIQGARSSLQRAKAVATEKATPEQLWIRSLDGRMPFGKVIVAIANKHARQIWAMLAHDVDYDPHACLKHPMHQQTPTEQAAHTA

SEQ ID NO: 234590 - protein, 408 aa, unidentified
MNPLYVGIDVSSKTNVVYLMKPDGFKISNFSIANSLDGSKKLVKHIMSAVEDHSLNEVVIGLEATSVYGDNLVYFLREDGYLAKIPKRIHVLNPKQVNNFKGAYNDLPKNDFVDSYVIADCLRFGRINKAVFMGDYRYDALKNLTRARFFAVQNLIKEKQRMINIIFKKYSSLTQDKIFADKFGATALSVYTDFDSAETLVNMDLHELTEYIQKKGKNHFSDPDSVAKAIQKAARSSYRLPKTVNDSVNQVLAVSISSIKALEAQIKTLDKAIAAQMELIPNTLMSIKGIGPVFAGGIIAEIGDINRFDNQAALAKYAGLAWRQHQSGDFEAQTTRQIKTGNRFLKYYLCEAAFSLVRCDTEYSRFYHLKYNEVNKFQHKRALALTARKFVRLVFRLLKDNQLYIPKS

SEQ ID NO: 234591 - protein, 349 aa, unidentified
MNDFKYHLGIDLHKNTSFWTLLDHNRQKVYSRNLPTSVEGIERGLREMGVNPKEVEAAIEPVSQWGWYGDLLAREGLTVHLVDVYKTKLIAGTKLKNDRVDSMALAELMRSNFLPEAYRAPEETRDMREFMRHRAFLVRLRGKVRGRVHQILWKHGVINPHSDIFGLRAKQWLMALDLRHPYDTERDELVSMWQDLSERIEAHNISCREMVGRSQQAGLLQSIPGVGVITSLTILAEVGDFSRFKRPEQLASYAGLVSSSYSSGERTRLGHITHRGSVWLRTALVEATNTVNPKWGGLYDFYLRIKEKKGSKVARVALARKMLVVSWHLITKDEYWRKERVGPSESVKR

SEQ ID NO: 234592 - protein, 400 aa, unidentified
MRVVFGIDVSKVSSEVAILVNGEKVHGYTMSNDAIGFSRLLGDLKTVHKPEIIFEATGVYSRHLQTFLDEHGYAYTRLNPLEAKKQLDSLRVRKTDQIDAEKLAQSQFVLNRKTTYVQKEVYQNLRDLSRFYQNLTEDIVRAKNRLHKALQVTFPELENILSTPTGEQYWNLVIAFPCKDFVLELSKDKLSESIRQSTSKRISDKRVAYLAEKLIALANQSYCAVKKNSPMLEEVRYYTKELLRLSEQRQAVLDEMVELAQPLPEYDILLSIPGIAETTATSIIGELGDIRRFQSANQINAFIGIDLRHYESGNFLAKEHITKRGNPYARKILFKCIHNIASASHTNPCHIADFYEKRKRQSQTTSTKPHTIASIHRLIRTMYYLIMHNKLYDYASTQNR

SEQ ID NO: 234593 - protein, 390 aa, unidentified
MRSVGLDLGKRHIAYCEVVDGKVVDRATVKSLEELASRLGPGTEPAVVAFEACREGWFVHDKLKEWGHTPKMLDTTRVRQMGVGQHNRKNDTIDAEIIARAVDAGRIAEAHVLSPARRALRSQLSVRGALVETRAQYVTTIRGLAHAAGVLLPSCDTDNFVRKLDGLTMDDATRALIAPLVAMLATLETQLVAVEHTLAGLAEKDPILALLATVPGVGLIVAATFVSVIDEARRFNNAHAVGAYLGLVPSESTTGGPDKRRLGSITKQGNRMARAMLIQAAWTIFRLRDRNDPLKRWVDHVAETRHKRVAVVGLARKLAGVLWAMWRDGTFYDPKGHAEQAARGVRVSARQQLARAQALERAATKLRRPATLAIKDPAKPRQKSSLRRAM

SEQ ID NO: 234594 - protein, 328 aa, unidentified
MQQFQTFAGIDISKLTLDICLLKGDNKEHFTISNDIQTIKAFFNQLPDFASGLYIGMENTGCYNYYLYQILSELELPFYVIPPIHLKKSLGLSRGKNDKIDAFRIASFLESNIKHLSIYKPQRTVILKLQLLLTARSQRVKIKKQLTNGGEQYQYAPTENIQGVLQLDSELVAIIDQQIKAIEIQIQELIKNDEKLSACYKLISSVQGVGKILSWNLLVRTGEFDNISSPRKLACFAGVAPFDHSSGTSIRGKSKVSHFADKSLKTLLHLAAISAIRLAGDLRDYYLRKVAEGKNKMSVINAIRNKIIHRVYAVLKNQKTYQNYLVMS

SEQ ID NO: 234595 - protein, 427 aa, unidentified
MTRFATDEFAAFIGLDWADTKHDICLQVAGSDKREFQVLEHRPEVIDTWATDLLQRFQDRPIAIALELNKGPIVEALRKYDGLGLFHINPMMLARYREAFTPSRAKDDPTDAELQLDLLLRHRDKLKPLAPQSPEMRALSQLVEHRRRLVADRVRITNRLTSALKTYFPQVLQWFPNKETQLFCDFLSQWPTLKSAQLARRSTLARFFRQHHVHGEQRINERLEAMKSATALTSDEGIIRPQALLVQALVSQLRVTLEAIGSFDQAIAERAQQHPDFALFEALPGAGAALAPRLLVAFGEQRERYGSAAEVQTYAGIAPVMERSGKRSWVHWRCQCPKFLRQTFVEWAAESMQFSFWARAYYQQQRDKGASHQAAVRSLAFKWIRIVFRCWQTGTPYNESTYLAALQRQGSSLIPNLAKSSKKGENT

SEQ ID NO: 234596 - protein, 387 aa, unidentified
MARKRTLSTLDTFIAYEAVGLDLAKTDVALAAFDSDHKEPYLIDRIPYDKLYELLADMAPTLVAMEPCSGAHQIAEQIEALGHEVMMISGRHVQAWVKDHCNGQKTDLNDAFAILNLAYDRWLTPIRGKTREECRLLALQASYRQLKGQRTKTMVHVKATLHAWGFPIRAGSFNQKVLHELIDTNREAFGDEVVETLHLMINRVRDLDHDIATVLKLLTEATKRDPRASLLRSIPGFGILTTSRWCAVIGDIARFDSPKQTMAFIGLVPNNRITGHHTETSSGREARGQGKMSKRGDKMLRSLCILGAGALCLMVRNDRLPDCPFVASIKERLASPRPWFKVLVYVAAKLVRIATALLKYGETFSFEKAGISKAVLKQWELEQAKAA

SEQ ID NO: 234597 - protein, 400 aa, unidentified
MNPVVGLDVSSGESEVQAFLDKGKPYGKSFKVSHTNESLEVLFHFLRKIENESGQKPTVILEATGHYHTPVIQFLEEHNYLYIMVNPLLSYQAKKSSLRKVKTDAVDAYCLCELFYKEELEPYKKRGTQLLNLRNLTRQHETLTGLYVQAKLQFNAILEQVFPEYKGVFGDMYSKVSLHTLLEYTTSESVLKVGESELADRIASLCTSRSECWANERAKKLIEAAKRNPFKSTLYQSHLIGLEMYIQMLLQYQEHLAKLDDQIDALAGEIKEYKIIQTIPGIGEKIAATIISEIGEIERFNHPKKLVAFSGIDPSVHSSGKFTATINRITKRGSSRLRHALYMAVLCGIRGSRNKKLKAFYDKKREEGKPFKVAMIACTNKLVHWIFALLKSKETFLDLA

SEQ ID NO: 234598 - protein, 331 aa, unidentified
MSQFTNVIGIDVSKKTLDVHDHLHQVLAQLPNSPVGFKDLLKWVKKRNREFNVLFCFEHTGMYSLPLAVSLSEQGLPYAMVPGLEIKRSLGLRRGKSDRADAQAIARYAYQRREEIKIYQLPSKYLLELKSLLSLREKMVSQRAGYQATKREMKAFLKIVKASSVLFDVQDKMIKELNGQITKVENQILELIKSDEQLKKTFDLVTSVKGVGLVLGTTMLVYTNCFTAFDDWRKFACYCGIVPFEYQSGTSIKGKKKISRFANKRLKALLSNAACTSIQFNPEMKLYYERRIQEGKSKMSTQNIIRNKIVARVFAVVHRGTPYVDTFRYAA

SEQ ID NO: 234599 - protein, 373 aa, unidentified
MEKDSTLYVGLDVHKESISVAYAVDAGAVESLGKIGTTKAEIDRLCKRLQSKAPHVRVVYEAGPCGYGLYRQLVERDFECMVCAPSLIPRKPGDRVKTDRRDAMKLVRALRADDLSAVHVPTVEDEAFRDLARAWASVREELRQAKQRLKSFLLAHGVRYTGRADWSEAHKRWISCYSFGNAWQQLAFEEHRRTIDDRLAQCDRLEAALREAVVDWRFYPVIQALQAMRGVQFLTAVGMVSELGDLSRFMHPRQLMAWFGVTPSEHSSGGKRRQGAITKTGNSYARKLLVEAAWSYRHAARVGPQIQRRHEGLPKVVIDRAWDAQVRLSQRYRKLAARGKNAGITIVAVARELVGSIWDIARLAMTVTSPRSV

SEQ ID NO: 234600 - protein, 343 aa, unidentified
MNVFIGLDVSLASTAICVLGPQGKVVEELEAASEPEALVRAMTSLPYAVDAIGLEAGPLSQWLSKGIEEAGLDVVLMETRLVKAALKAMPIKTDRRDAQGIARLLQMGWYRPVHRKSVSSQEIRALLTARKSVQQAIINLELSMRGVLRNFGLKLGHVTRIRYEARVRELVEQNEILSASTEALLRARAQLRAELAELDATIADLAKQDDVCRLMMTMPGVGRIVALTVKSAIDDPTRFARSKDVGPWVGLTPRRTQSGEMDIVGQITRAGDRGLRTALYQAAMILMHRGSPNWLQAWALRVAHRRGSKRALIALARRIGIVLHRMWRDGTPFRHTQSAPATV

SEQ ID NO: 234601 - protein, 347 aa, unidentified
MVIVDSPRLIVGGVDTHRDVNVAAVVDMNGGLLGVESFRTTADGHKMLARWMAGFGTIERVGVEGTGTYGASVARHLARMAVTVIEVDRPNRQQRRRNGKSDQLDAIEAARAALSGRCTGRAKSGDSFAEAIRALLVAKRSARSTRVRTIVQLRHLMFTAPDELRARLGGLTPIQLVNEAAKLRPRAGGDIVMHGIKTAAVILARRVQALDAEIEAIDAQLFPLVKDAAPGLLQIFGVGADTAAVLIVAAGDNPQRIVSESAWAMICGVAPMPVMSGKNQTRYRLNPGGNRQANNALWRIVITRLGQHDPHTVAYMNRRLAEGKTKPEIIRCLKRYVARETFQALLR

SEQ ID NO: 234602 - protein, 318 aa, unidentified
MIPVPKPVFVGIDVAKADLAVALRPTAEGWTVPQTEAGRAALVSRLGALQPALIVLEATGGLEVPVAGALAGAGLPVVVVNPRQIRDFARATGTLAKTDTLDAHVLAHFAEAVRPTPRSLPDAATQALEALVVRRRQLVEMLTAEKNRLGSAPRALRTEIQAHIRWLERRLARLDTDLSQAIRTSPVWRVKDDLLQSTPGVGPVLSSTLLARLPELGTLNRKASAALIGLAPLNRDSGQQRGRRRVWGGRADVRATLYMAALVGVRYNPVLRAFYQRLRAAGKLPKVALTACMRKLLTILNAMLKHQTPWNPEYRHSV

SEQ ID NO: 234603 - protein, 401 aa, unidentified
MLSIGIDVSKGKSTVCGMKPGGEIVYAPFEVQHTREGMSELVSLLRSSGEEVRAVLESTGSYHCPVVSALLENGIFVSVINSLRMKRFCSQSIRKVKTDRIDAMQIALYGLAYWQELQPARLPEDTYRELQLLARQYYQMTSMLIKAKVDFNAICDQVLPGMQELMSDHAGRHKLSDFVLRYHHTTHILEMGETRFRKDYCKWAEKKGYRNCERMAALIFATAQNGIPVLPNAPSTQIVITEAIRVLHTVEASRDTILTQMQALAKTLPEYSLVREMPCIGDTLAPRLIAEIGDVRRFHSKRALIAYAGIDAPPYQSGKFCANNRHISKRGNRYLRKTGYEVMQSYVMHKPANDPIFTFIEKKRSEGKCGKLAMMAGLNKFLRIYYGKVTEFYRSLPARIS

SEQ ID NO: 234604 - protein, 321 aa, unidentified
MQKDLLYCAIDVSKDKLDVDGAALALPAQLGNDHGSFRQLIKAAKKYPGPVQFVFEATGPYHLGLALALWEAQIPLSVLNPARVRYYAKAQGKAKTDPLDKQVIGDFARSFRPPPTPAPDPVRRELTELLQRRDGLISTRAAEQNRLGQCRHKIIKGQIRRLMAQLAEQIGQIDGLMKKLVNSSEELKAKVKALCQVKGVGHLTAVTLLITLPELGTLGRNRMVRLVGLAPLNDDSGTQKNKRFIQGGRKRPRCALYMPALSASRHNPVLKDFYQRLLKAGKLKKVALTAVMRKLLICLNALLRKLVDPHASQEGLCLAKP

SEQ ID NO: 234605 - protein, 370 aa, unidentified
MAKRSMFVGMDVHKESIDISLAEEGRDGEVRHYGVIPGDLDAVAKVVRALRAPSRRLRFVYEAGPCGFGIHRYLTTQGEDCVVVNPSSMPKRSGDRIKTDRRDGDALARLHRAGELTAIYIPTADDEALRDLVRAREDAVGLSTQAKHRLKAFLLRQGRRYPGRAGWTRPYRRWLADLSFPLAPQHIALQEYRDTIDETERRVERLTDQLRQLTPAWRWAPVVDALQALRGVSFVTAVGLVTEVGDIRRFTHPRELMAYLGLVPSEYSSGPSIRRGGITKAGNPHARRLLAEAAWAYQGVPRIGRQMLYRQEALPKTVCDIAWKAQLRLTSRFRRLVARGKAKPKVATAIARELTGFIWAIAREVPPPSA

SEQ ID NO: 234606 - protein, 341 aa, unidentified
MNEVTMIGVDLAKSVFQAHGATATGEPMFRKKLSRGQFLKFLGEQPSCVVAMEACASSHYWGREIMKLGHDVRLILPIYVKPFVKRQKNDANDAEAIAEAAARPTMRFVPVKSAEQQSRSMVFKTRDLFVRQRNSIINALRGHLMEYGIIAPPGRNFVKKLAEQIESPDCDLPSIVIELSHIHLDQLSIITDKIVAIERRLKEESKSDPETIRLQTAPGVGPVSAMAIKAFSPPLEGFKRGRDFAAWLGLVPVQKSTGGRQVLGRTSKMGQRDIRRLLIIGAMTRIRWAIKNGPPKGSWLEQMLERKPRMLVAIALANKTARTIWAMMTKHEDYRDPIVAA

SEQ ID NO: 234607 - protein, 364 aa, unidentified
MLIIGCDYHPGFQQIACVDTDTGELSERRLAHREQAEQFYRELKQRNLSARVGMESSGHSRWFERLLHELGFELWIGDPSEIQSRRVRKQKTDRLDAQLLLRLLMENRFPRIWVPDAENRDLRQLLWHRHRMVQVRTRVMNQLHVVPLNEGLRRKKALWRPAGRKELESIALAPWASRRRQDLLDLLDQLTPKIQELTRALEQEVEKRPVTRRLMTHPGVGPLTALAYELVIGTPERFHCGKQLASYVGLVPEEKSSGDRRRQGHISKQGNVLLRFLLVEAAQVTVRSQQEWRNKFFHLAMRRGRKIAKVAMARKLAVHLYWMWRQGSDYGQTQRLGSHAGKPGHPDGVQSITDVMIGHPAPSK

SEQ ID NO: 234608 - protein, 315 aa, unidentified
MNNTVEIFVGIDVSKATLDVALWQPEQAWQVRNDIEGIGKLLERLQELRPNLVVIEATGGYEKLIVAELVLAKVPVSVVNPKRVRDFARSVGQLAKTDKIDARILAQFAQAVRPAPRPLRTEEEGRLSALISRRRQIIDMLTAERNRLVTAHLATRKRMEKHIEWLQQELADIEADIDQFIQDTPLWKQKDELLRSVPGVGEVTAYTLLADLPELGTLDRQGIAALVGVAPLNKDSGSKRGKRRVFGGRETVRNVLYMAALSATRFNPTIKTFYDRLIKAGKEKKVAIVACMRKLLVILNSILRHQRPWQPNFHA

SEQ ID NO: 234609 - protein, 424 aa, unidentified
MKVTFQTCCGVDVHKSFLVATIIKTTGGIEPSYQKRRFSTFNNSILEFKKWLLENECLYVCMESTGKYWIPVFNLLEDEINVTIANPKWVKAVKGNKDDTKDSKWIGDLFRLGLVRGSYIPCKKIRILREFTRYRYKLVSCRSSEKNRYQNALTVCNVALDSVVSDVFGKSSTSIIDYLLEQSGTSIDHEMIASKLLKRLKAKEDAVIESIEGYQMTDSQKYRMHLVRAHMDYITAAINDVDSEIESLISSDPDYQNAVELLYTIPGVKHDSAITIISEIGIDMSQFCTSKRLCCWAGLTPGSNESAGKKKSVRITRAGVYLKPALVQCAHAAVKSNKSPYYKKKYESLVKRRGKKRAIIAIARMILTAIFQMLTTGETWNPCDLYKIDMPEALLEKQKQKAIKQAQKLLIREGLLPPTEPIAS

SEQ ID NO: 234610 - protein, 478 aa, unidentified
MPSKQRKQRQAKTPRGARKRRQKGMCLEDRPVLEPNAAGIDIGAREIFVAVPPGRDENPVRVCTTFTEDLERMADWLVACGITTVAMESTGVYWIPLYDILESHGLKACLVNARHMKNVPGRRTDWHECQWLQYLHSVGLLRGAFRPQSDITALRTIMRYRQELVQMSSQHVLHIHKALTQMNLQIHHVIDDITGLTGLAIVDAILAGQRDAGQLAKLRNWRIKADEETIRKSLVGNWREEHLFTLQQSRELYRTYQQQIVKCDEKIEALVSGFEPRVDPEEKPLPPDQKRYRSDKKRAKKSGRVETDFNLRTEAYKLFGVDITQIPGLETMALSLFGEVGRDMSKWPTADHFASWQGLCPDNDISGGRVLWKGTRRVQNRAGQMFRHAAYSLHHNLTPLGDYLRRMKSRLGPAAAITATAHKIAVIFYTIVKNQVEYDETIWATRDIKRKNRIEGKLKRQARQLGYQLVPFETQPAA

SEQ ID NO: 234611 - protein, 360 aa, unidentified
MAKARTLVGLDVHATKIVAAVLDGETGELQSFTMGGDVVAAAGFCAGVAGPVRVTYEAGPTGYGFARELARRGVECVVAAPSKIPRASGDRVKTDRRDAEHLVRLLLAGKLHPVRVPGDEEEALRDLVRAREAVRVDLMRSRHRLSKLLLRHGVRFDDGRAWTGRYQEWLATVTLDWPAAQTTLLDCRGAVEALVHRRDQLEREIVALLPSSPWAVQVGRLRCLRGIDTLTAVGLCAEIGDFERFARAEQLMSYVGLVPSESSTGQQRRLGAITKTGSTHARRLLVEAAWHYRSRPAIGKALSDRQQDQPPEAIAIAWSAQRRLHRTWARLEARAKRRTIIAVAAARELAGFCWAITRIE

SEQ ID NO: 234612 - protein, 414 aa, unidentified
MEPNIVEFEQVIEKGCGLDVHQATVVATVRGKGVKTETKTYSTFTNSLTEMKDWLASLGVTHIAMESTGVYWKPVFNILEDSFEILLVNARHLKNVPGRKTDKADSRWISKLLISGLLKGSFVPPENIRELRDLSRYKTKLTLQIASEKNRIHRILEDANIKLSSIISDISGVTATKLMEGLMSGRKDLDKLVEENYYGKLKASKEQFKEALKGRLTAHHSFMLNQMKAHIMYLESQIGIIDQEMEKKLEIYNEQLNQLQTIPGVGKNGARGIISEIGANMEIFPNEQHLSSWAGLSPGNNESAGKKKNSRTTHGNKYLKALLVEMAWGAVKTKGTYFRAKYESMVGRRGKKRTLVAIAHKILIASYHIIKNNVPYQELGANYLLERKKKNKIDYLKRQLRELGYSVEKTEKAA

SEQ ID NO: 234613 - protein, 318 aa, unidentified
MTKPSTLTAGIDTSKDKLDVAVHGTATRFTVENCKTGWKSLAGELTKAGVERIGIEATGGYEHDVTRHLQAAGFTVVVLQPLQVKAFAKLHLRRAKNDRIDAALIAACTDIFDVRNKMPPDPRFDALTELLTFVEQTEADIVRFKTRLEHTRDKRLLRTINADIKRLVKRRAVELQRLTAELRRHADLATRFELVLSIPGIGERTALALIVRMPELGRVSREEAAALAGLAPFVHQSGKRQGETHIGGGRSRLRRSLYAAALPASFRWNPALKALYARLIARGKSHNSALIACARKLLVFANTVVARGTPWVVAAAGA

SEQ ID NO: 234614 - protein, 410 aa, unidentified
MESHLETLHKRVAGIDVHRMKHIVTVLSEDEAGNVTRLTREFGGFKRDLRAMAAWLVEMGVERVIIESTGIYWKSVHARLEEAGLTIWVVNAHHVKHVPGRKTDVADSEWLAQLGRYGLVRPSFIPTKDLRELRLVSRYRHKLVAAQAAETNRLHKLLDDAGIKLGGLVADIHGKAAGAIVEGLIDGLAPAELIQLSGRLKASREDLLASLEGDLSARHRWVLQEIRDHLHELAAHLAKVDAYLRDAMVPYAEAWIRLQTLPGIDEMAAAMILIEMGDDLSRFGNASRFASWAALCPGNNESAGKKKSGKTRKGNTMLRYLLCEAANGAIRTASVFREKYRGLVVRRGHNKAIVAIAHKLIRTIWFMFTRREAYHDSGFDYAAANVKKNAPRWIKALRTHGFVVKLASAH

SEQ ID NO: 234615 - protein, 391 aa, unidentified
MDEEGKEIGYPTFPNTLSGATALESQLLQLIKEKGFSTLKIATEATSFLDLHLVDFLACSQDLAPFNPSIYQFNPKLVSNFKRAYPDKEKTDKIDAFVITDRLRFGRLPEPYESHRPYLPLRRLTRYRFHLIQAISREKAYFLTHLYLKFSAFSLEKPFASLFGATSLALITEFSPDELVHLPLEDLTQFIIKNGRNRFKDPDKIVEALQRAARESYRLRPALSSSINLILATILQTLRALEEALKEVDKAIEKEFQAFPNTLQSIKGIGPVYSAGIFSEIGEIHRFHTEEALAKFAGLTWKRYQSGNFEAEETHMSKTGNEYLRYYLIEASNALRVHNAEYKAYYETKFKEVTKHQHKRALALTARKLVRLVFALLKKGQLYRADYQQEA

SEQ ID NO: 234616 - protein, 433 aa, unidentified
MQDVQDEPLFAERVAGLDIAKAGVEVTIRVPSETTAGRRQQETRTFATTRRELESLAGWMHCWGVTRAGMEATGDYWKPVFFLLEARGFDCQLYNAAQVKALPGRPKTDRADSVWLAKITERGSVASSFVPPEPIRRLRTHTRYRRHLTQARTAEKQRVEKLLEDGHLKLSSVISGIHGVSGRAMLEAITAGQRDPKALAQLARGSMRGKIRRLEEALDCSFFTGEHAAVLAMMLAAIDHCTAQIEALTARIEELIEPWLHQVAQPGAVDGIGPVCAQDIIAEVGTDMTVFPTASHLVSWAKWSPQVRQSGGKRKGSNATGRGNPYLGAALGEATICAGRTQSFLGAKYRRLARRMPKKKALVATGNSMLTSIHALLSDPQATYQDLGPSYHEQRMHTRRQARNHVLSLERLGYQVTIQALNPDTSELLAPAR

SEQ ID NO: 234617 - protein, 341 aa, unidentified
MDITIVGLDLAKNVFQVHGVDAAGDVIVRRRLRRTQLCGFFAGLEPCLIGMEACGTAHFWARELVALGHEVKIIPPSYVKAYVRRGKSDAADAAAICEAVSRPNMRFVPIKTEDQQAALMLHKARELLMRQQTMLVNALRGHMAELGMVAPLGRGKVEDIIAVIEDDEDESIPALAKAALKPLVTQLRANEDATAALDSEIKAWHKDNVASQRLATIPGIGILTASAIAATVPDPSFFHSGREFSAWLGLVPRQNSTGGKNRLGRISKQGNPYIRRLLVIGATSMLRYARDKTAPGADWVNGLLERRPARLVTVAMANKTARIVWALLSKEETYRAPTAAV

SEQ ID NO: 234618 - protein, 338 aa, unidentified
MLIIGCDFHSRFQQIAMADTETGELIERRLEHRNGEAAKFYTSLQKPVRVGMEATGYAQWFERILAKLGHELWIGDAAAVRAAMVRKQKTDARDARHILDLLLENRFPRIWIPTPVERDLRQLLRHRHKMVCLRTSLKNQLQALALGQGTYRKQKLWTSLGRTELEALVLDPWAHRRRQELLQMLDQLAPLIAELDRAVAEEAAQRRDARRLMEQPGVGPVTALMFVLTIGPAERFRSSKQVVSYLGLNPRESSSGGRQQLGAISKQGNSLARYLLTEAAQTAARYDEELRRNYRRLKFRRGSAVAKRTKTGGTAVLDVAQPISAAGSHAGHLAQARW

SEQ ID NO: 234619 - protein, 315 aa, unidentified
MHHYVGLDVSLRQTAVCVVDQTGKIMREGMVASDPEVIADFIAKHAPHVARIGLETGATSTWLWTELKKKELPVICIDARHAKAALKMQINKNDRNDAVGIARIMQCGWYKEVRVKDLDSHAIKALLVSRALLVKMKRDLENQVRGLLKNLGLVIGRAKMTTFWVRASELIADKPALAAAVEPLLKAREALERQIDDLDRKVLAMARNEPDVRRFMTVPGVGPITALCYFATIDDPTRFNKSRNVGAYVGLTTRRYASGEIDRTGRISKCGDAMLRSYLYEAANVLLTRVAKWSALKAWVCAWPNAAASPRPKWP

SEQ ID NO: 234620 - protein, 358 aa, unidentified
MNTSMLNSPKSNYKDNLDYYDHYLALDWSQASVALARMTQKSHKIKVVEWRKSDLKALKEYLFSLKGKKILTIEETTSSHWLYVELTDVVDRIVICDPYCNHLLSDGPKTDKYDAMKLCRLLRGGFLKEVFHSCDRLYHLRHLLSAYEDLVKAGVRVQNQRNALYRARGMRYSKCDKTEQQEVLNRSGHYQIIIDWQESLIEKYREDKASFEAEIKKIVNGQSAVKNIMALPGIGYINAFKILAVVIQPQRFAKKGSYLSYCGLVWLEKSSGDKNYGKRRPRYNRLLKEVYKNAAYTAIQGGHNPVYEYYQTLIAKGLTDKQAHQMVSRYLAKVSLSMLKNGRKYEPYRWRKDEITAA

SEQ ID NO: 234621 - protein, 384 aa, unidentified
MFIQSQDDSQCCYSLFIKVVILMMKLKYSICCGLDVHKNVIVATIVTTNKDGISEYLQKSFSTINSDIQRFHNWLIENNCYHVCMESTGKYWIPIFNYLENDIDVCLTHPKYVKAIKGKKTDKKDSKWIADLYKFDLVRCSFIPPKDFRQLRELSRYRFKLVCMKSSEKNRIQNCMTVSNVGIASVLSDPFGKTATEIISYLLEHTADSMDEKAVRKLIKKGAKSKSDEIIEAIKGYTIETDQAKKLELARGHLEYLDDMITQTEVELYVRIKPYYEFVEFVSTMPGMTELSSTIVLAETGVDMDIFDDAKHLCSWCGLSPANNESAGKKKSVRIAKAGDYLKPMMVQCALAAIKSKKSLILQSNMVESKSDVDTKRQSLPLQE

SEQ ID NO: 234622 - protein, 317 aa, unidentified
MSKSVPTFVGIDVSKDKLDVAVRPVQERFSASNDDAGIAELLKRLKRHRGALVVIEATGGLEHGVAAAMSTSGFRVAIVNPRQVRQFGRAIDQLAKTDKIDADLLALFGERVKPDPRPLPDKDLQALQALVARRRQIQEMLTAERNRLGAARAPAVRQGLKKHIEWLQKQVKDVDRQLGDAIKNSPVWYAKEDLLRSTPGVGPVVSRSLIAQLPELGSLNRKEIGALVGVAPFACDSGKFRGKRIIWGGRAPVRSALYMATLVGVRHNPILREYYSRLRTAGKKPKVALVACMHKLLTILNAMVRTNSHWKESPSFA

SEQ ID NO: 234623 - protein, 344 aa, unidentified
MKITTIGLDLAKSICQVHGVDATGQVVIRKSLRRSQMLPFFAKLPSCLIGIEACGTSHHWARELIKLGHEVRLMPPAYVKPYVKRGKTDAADAEAVCEAVTRPTMRFVHVKSPEQQAALSMHRTRDLLVKQRTQLINMIRGLLAEFGIDIPKGLERALLMARQIVEGKAPDVPIEAAKIVGTLSQHALDTHVRLREIDRDLLIWLRSNDVARRLTTIPGIGPVGATALAASVTDPHQFRSGRQFAAWLGLTPLQKSSGGKERLGRITKMGDKYLRKLLIVGMTSLVRRAKYNPATIDPRLADLLARKPTRVATVAMANKTARVIWAIMSRGETYRTGHRPTLAA

SEQ ID NO: 234624 - protein, 419 aa, unidentified
MAFKILRKNCCGLDIHKTWIFACIGITDSNGRTEYKQARFSSFSNGLRDLADWLAKYSCSDVCMESTGKYWIPVFNILEKTCWVTLAHPKYTKPQKGNKTDRKDAKWICDLYMCGMVKPSFIPPPDIRQLRDLMRYRVKLTNMLTGEKNRAQNCLTVSNLKLDDVFSDVFGKSSRSIIQYILEHPGEQFDVTPFIHRRCKHPVEEIQAAVDGVVSREQAAKLKECLLHIDQLNAHRERIEAEILRLAEPYPYQLELTRTVPGFPAAPLTAVALISEIGVDMSVFPSAKHLASWAGCCPRNDQSNKKVKSTRISRAGCYLKPLLVQIANAVIKSDRHPECRERYRRIKARRGHKKAIIAVCRMLLTAIWNVLSKLEPYSAKGYLADKLTEHSVVISKAEGLALLRKRGYIFKDELAVESG

SEQ ID NO: 234625 - protein, 353 aa, unidentified
MREVISLTTKRVCGLDLGDKTSAVCVCGRGGEIEWEGRVRTTVAGLAKRFQGVEPMRIALETGMHSLWVSRQLRQWGHEVIVAHAAKVRLIGNSRRKNDRLDARTLADLASVRPRLLSPVEHLSAEAQAHRGVLRSREALVRSRSSLILHARGSVKAWGGRLPSCSAESFVKKAQGAVPAELLPALAPIFEMVGELTVRIRSYDRQIEELLRTHYPQAQRLRQVRGVGPITTLAFVLAVGDPQRFARSRTVGAYFGLVPGQRDSGSLRPQLRISKQGDPYVRKLLVQCAHYILGPWGVDSDLRRLGERLSEVGGKNGKKRAVVAVARKLAVLLHRLLVSGQTYEPLRQAGLAA

SEQ ID NO: 234626 - protein, 402 aa, unidentified
MSNTKKGVIIGVDPHKMSVTIEVVDTHERLLGSGKFATDEAGYAAMQRYVKQWPDRLWAVEGANGAGRPLAQRLVAAGQQVVDVPAKLAARVRLFDTGHNRKTDALDAHSIAVVAVRTEGLRRVVEDGELEALRMLADRRDELARQRVQTVNRLQRLLSELLPGQRKRDLSAAQAKAMLATVRPRDIAGRTRRRIAAEEIADLVALDAKLKKIKAELKATVLERGSGLMDIYGIGPAGAARVLADVGDVARFADRNRFASWTGTAPLDASSGEQNRHRLSRAGNRRMNHVLHVAAIVQIRHDTEGRDYYRRKLAAGKTPLEALRCLKRRLSDVVYRQLVADAQLAQQPDGTGPGGHCGATLQSSAADSHPLIDTSDQPLPGPAELTLRRPSIRRKTLTPSAP

SEQ ID NO: 234627 - protein, 348 aa, unidentified
MYSKNDIILAVDYHDENLVIRRFNCHTSEERLLKRSTTSKDICRLVDDSVAEAASVGGRVIWVMESTTGWARVKDLLGDRAELVVANVLQMPLPPKAYRRKTDKIDTGRILREFLNGSLPVAFQPEVWLRRVRRVAASRESLVSRRTAVRNWISRYLAHETWESRTGLWSVKGIRRLKQFAAAAEGPDQVVLSVKLSELEYLAAMTKLIEIEILRIYKDWPDAQRLDEIYGIGPISAVSICARIGPVGRFSNAEELISFAGLAPGVRQSDQTCRMGRIGGGGTDKHLRHYIIEATIWARRIPRYRPTYERVERKRGRKIARLVVGRLLLRSIYKMLADGVRFDRLPAA

SEQ ID NO: 234628 - protein, 407 aa, unidentified
MELLTAILKRVIGLDVHQAQITACAIIEEPDGTVRVEQRQFGAFKRDRRELAKWCASFAPDEVVMESTGIYWKSPYAALEAAGIRAKVVNARHVKNVPGRKTDVGDARWLATLARAGLLRNSFVPPAKMRELRLISRQRQKLVGILSSEKNRLHKVLTDGGIRLGVVVSDLHGQSARAMVKAIVDGQPTHEVLKLASKRLKASREELFDALQGELTDSHRFVLDELMRHIEEIEARIGRFEARLLEGLTGERNALILLQTLPGVDLIGAAMLLVEIGTDMAAFGSADRLASWVGICPGNNESAGKRKSGRVRKGNLYVRRLLCEFAHAASRTKSVFKSKFEALIVRRGHKRSIVALAHKLLRTIFFMLDRGEYYRDSATDYEALSVQRNAARWIKKLISFGFIPKPA

SEQ ID NO: 234629 - protein, 343 aa, unidentified
MEYYVGLDVSLKQTSICVVDQAGLVVREGVVDSDPEAISAYVTSKAPNAVRIGLETGPTSTWLWTELKRLGLPVICIDARHAKAVLKMQINKSDRNDAIGIARIMQTGWFKEVHVKDIDSHSVRALLASRALLVKIKRDLENHVRGLLKNLGLVIGRAKFNVFAVRVEELIEGRPELVAAIRPLLEARNAVEQQVSELDRKVMKLARRDAQVRRFMTVPGVGPFTALAFKATIDDPARFARSRSVGAYIGLTSRRHASGEVDWSGRISKCGDAMLRSYLFEAAGVLLTRVPTWSAVKAWGMKLAKRNGLRKAKVAVARKLAVILHRMWIDGTEFNWSKKEIAA

SEQ ID NO: 234630 - protein, 419 aa, unidentified
MSFKIFKFNCCGLDVHKTWIYACIGITDSNNRTEYKQARFSSFTKGLNELCDWLAKYNCKDVCMESTGKYWIPVFNILEQHSFWVTLSHPKYTKPMKGNKTDRKDAKWICDLYMCGMVKPSFIPPADIRELRDLVRYRFKLTCMITGEKNRAQNCLTVSNLKLDDVFSDVFGKSSRSITEHILQHPGEKFDIAPFVDSRCKTPITEIQAAVDGAISKEQVVKLRQCLDHIDELNKHISEVEQEILRLSDKYEAALNLIRTVPGFNKNPLTAIQVLSEIGGDMSVFPTAKHLVSWAGCCPRNDQSNQKIKSTRISRAGSYFKPVLVQIANALIKSKKHSEFTSRYKRIKARRGHKKAIIAICRMILTAIWHILSDLKPYTPEGFLESRPVKEEKVLSTSQALNLLKQRGYIIKGEPLAVS

SEQ ID NO: 234631 - protein, 343 aa, unidentified
MNFIIGVDYHPSVQQIAFVEKESGEYGEQELNHSDGQAEKFYRDLKQRGASVRVGMEATGHARWFERLMAELDFQLWIGDPAEINAARVRKQKTDRQDARLMLKLLLEDRFPRIWVPTPENRDVRQLLWHRHRLVQMRTRVRNQVQAIAINEGVRLKTALWSRRGRARLESLQLAPWAARRRQDLLDLLDKITPKIEQLNAAIDQEALKRPEVELLMTHPGVGSITALAFVLIIGAPERFRGGKQIGSYLGLIPCEDSSAGRQRLGHISKQGNSLLRFLLVEAAQSAARHDLDWKRRYIHLAMRREKRIAKVAMARRLGVRLFWMWRKGWDYQQLLQFGSHAG

SEQ ID NO: 234632 - protein, 460 aa, unidentified
MKNNKQSKQIKSNRIRKHLEQVNLFAAGIDIGSQSHYVSVPEELGTESVREFPCFTGDLNRMADWLVEIGIQTVAMESTGIYWIPAYETLEERGLVVLLVNSRHIKNVPGRKTDVLDCQWIQQLHTYGLLEGAFRPEEETVALRSYMRQRETLTQQSSDQVRRMQKALRQMNLLLDNVVSDIDGKTGMKIIRAILEGERDPIFLAKYRDGRCKKDEKMIAASLEGHYREEHLFSLKQSVELYDIYQAKIMDCDKMIQRQLDKMDTQGDKKDLPPSKKPKSKNTPKFDVRGDLYQMTGVDLTRIDGLSENSVLKILSETGADISSWPTEKHFCSWLGLSPGNKVTGGKNLSGKTKPSANRAAAAFRLAAFGVLNSKSALGAYCRRQRTRLGAPKAITATAHKLARTFYSMLKNGTEYVDKGQDYYEKQYQERIIKNLKKRATDMGFELIAKDTSILEISKA

SEQ ID NO: 234633 - protein, 340 aa, unidentified
MLYIGLDVHKEFCQACVIDESGRALSNERFSSTNEELDRFLDRFQDAKFVLESTGIWEFIYEGIERRGFEAVLAHPLKVRAIAEARVKTDKVDAETLAQLLRADLIPKSWIPPKDIRDLRQLVRQRAYLVRQAARFKNRIHAEILRRGVRRPENLKTPFAQRSIRWMRSLDIPTVTSCLNCLESVQVQVQEINDQLLVEFERRGDAQLIATVPGIGFYGALLILAEIDDVRRFHHPEKLCAYAGLVPTVSQSASCVRYGSISKDGSAYLRWILTESVHVHTRYEPGSQLSRFHARVAKRRGKRVATVATSRKLLRIIYWMLVRHEPYHSHGFNPVKRLHS

SEQ ID NO: 234634 - protein, 380 aa, unidentified
MNATTIGIDLAKSIFAICEGDSRGHGSRSSILKGGDFLKWLRTLPTGTVVAMEACSSAHSWGRTMQALGLEPRLIAAEFVRPYRKNQRIKNDARDAEAVLTALHAPGMRFVTIKTEEQQQRLAWHRLREGWKAERTALFNRIRGLLSEFGIVVELGAAKIRRKLAELESDTAYPQSIQLMAQSVRAQIDILDQRLIECERQIAQQSMSDPAVARLRSRPGIGPLTADALVATVGDARQFKNGRQFAASLGITPRQHGSGGKTHLGAITRRGDAYLRSLLVQGARCVLQAALRLQKNKPDTLNRLQLWMVKLNDRVGYHKAAVAIANKHARQVWAMITRGEAYNADAYKDWEAAHANVRPDDRQEAGDYDLSTAALAAASV

SEQ ID NO: 234635 - protein, 329 aa, unidentified
MKVQHIIGADLSKGSIDLVCHLLKSYIKIENTVTGFKDLIKWMQQQKINPSETMIVMEHTGLYSYCFERFLHKQQIAFCKVNALEIKRSIGIVRGKTDKLDATRIACYGYEKKDKLTIDVPASEALKRLQMLHSSRERLVRHRSSLICAIKEYKHIGISDKDVIVQSQLQLIKGFDKQIEKLMIEIETIIKGQKSLKQNFCLLQSIGGVGKVVALVTIIKTHNFTRFADARKFACFCGTAPFEHSSGTSIRKKTRVSRIADKKMKSLLNLSAMSAIQNDKELREYYLKRNEAGKSKMSTINIVRNKIIYRMFAVIKRQTPFVENYLQVA

SEQ ID NO: 234636 - protein, 382 aa, unidentified
MKVTYQTCCGVDVHKSFLVATIVKTTGGIEPSYQKKRFSIFNNSILEFKQWLLDNDCHDVCMESTGKYWVPVFNLLEDDINVVIANPKWVKAVKGNKDDTKDSKWIGDLFRLGLVRGSYVPCKKIRILREYTRYRYKLISCRSSEKNRYQNALTVCNVALDSVVSDIFGKSSTSIIDYLLEQSGTSINHEEIASKLLRSLKSKEDAVIESVEGYQMTDAQKYRMRLVRAHMDYITAEIGTDMSQFSSSKRLCCWAGLTPGSNESAGKKKSVRITRAGVYLKPALVQCAHAAVKSDKSPYYKKKYDSLVKRRGKKRAIIAIARMILTAIYQMMSTGEQWNPSDLYKIDMPVALVEKQKAKAIKQAKKLLQREGLLPPDEPLAS

SEQ ID NO: 234637 - protein, 479 aa, unidentified
MYGHLGAPARAAVNRERRAPAAGSRAFIKDAGRRFAAIPHIRPGHADLAARGTCPADPRRAPTSREGNAMAERFVGIDVALREHRIAVLDRDGEAVGQSFTIAASKDGVATLLRTLDARGATAAQTLIGLEASGHLWENLEAALIGAGYRVIVLNPLQTRRYRDVVRRKAKTDDIDAHVIAGLLRSGAAQASYVPDEQIQSLRELARLRARLMADRQDYLRQLVAQLDVVLPEHRTVLGDLLTARARGILAQFPTAQHLAHANPRAIRRAAEDAGARGFSLNDATVVRDSARRSLYSGKAAAARAHVVRTLVSQLERLTSAIDEVDRAATALLPPSEPGTGPSDAELLQTIPGIGPQTAATLLGELGAFTRFTDARALVAYVGFYPVINESGDRAATPRLSPVGSRIARHSLYLAAVNAVRRSAEWRTIYLRKKAQGKTAKQALVVVAVKLLHAVYAMLKHRQPYNPSRLLVAPATIGS

SEQ ID NO: 234638 - protein, 367 aa, unidentified
MLRFRLMVKRGHRMGLKHQKEKRSMNHFAGLDVSVKETSLCIVDDAGRIVREVKVVSEPEALLGVLADPAWQFKRIGLEAGPLSQWLFNALAEAGLPVICVETRHMRAVLKAQINKTDRNDARGIAQMMRVGLYRPVHVKTLRSQKLRMLLTHRKLLQSKAIAIENDLRATLRNFGLKVGVVGTAKFETRIKELVESLPDLAVLVEPLLVVRRALREQIGVLHRRLLAIVREDDVCRRLMTVPGVGPVVALTYRATVDVPSRFKNSKAVGAVVGLTPCQHQSGESDRTGAISKCGDEMIRTVLYEAAQILLVRSKRWSWLKAWAMQIARRRGMKKAIVALARRLAVIMHRIWVDGTEFRWTREAVAP

SEQ ID NO: 234639 - protein, 356 aa, unidentified
MKIHKVQNFVVKGKEVFVGLEDSKKTWKVAVRCNKMLIHRASMPAEHQMLIQYLRNKFPECTIHLIYEAGFRGFNLFDRLTEEGIDCIVIPPHLVTEPKVNRVKTDKRDANRLAVMLENGDFKEPCFVPDREMREDRQISRTLWGMQKDIIRTRNRIRKFLDFNGIEVPFPERWGKAEFEALKDLPLGDSLKTSLLALITLLAQLWAHKESLQEALRALCSKERYKKAFHIAISLPGIGWFTAIRLVLELGEDLSRFTTGKKIASFVGLTCSEYSTGETERKGRITGMGSGFIRSALIENSWMAIRKDPVLLAKFTRIWKGKGSKKKAIVAVARMLIVRLRACLISGTPYAIGTVR

SEQ ID NO: 234640 - protein, 377 aa, unidentified
MQASSVNTPIGDDIATIHVAIELSQRSWVIVIHSPDRGRLSRHRLEAGDVEELLGLLGKTRSRAARTLGRSPRMVSCYEAGYDGFWLDRRLQSAGIDNLVIDPASLSVDRRARQAKTDRIDGEKMIRALMAHLRGEPRVLSVVRVPTAEQEDARRRTRERERLIKEQTGHINRIKALLRGQGLAAGEPGRRDWGATWLAQQRDWQGQPLAPLLVEELSREHARLMLVRDQLKALGEEAMPQATVGKARQLARLKGIGPVFAATLAGELFWKDFTNRRQVGAYTGLTPSPWRSGRVEHDQGISKAGNRRVRHTAVELAWLWLRNQPTSALSRWFHDRVGEQRGRIRRIAIVALARKLVIALWRFLTVGMIPQDATLKA

SEQ ID NO: 234641 - protein, 337 aa, unidentified
MSYLGVDLHTNSFTVCRRTKQGKNSIRTFQIDRIVDFRKTLRKRDLLAVEATGNTAWFVSHVMDRVKKVTVVNPYQFEVIRRSVKKTDKNDSKMLALFLSKDMLPEARMKTKENAQLHSLATTRDKLVKQRTALINKIHNVLNSYGIKFKKESLGSEKGLKSVWAYDWDVIVRIELEVLIEQIRSLNKSIKTLDKEMTDHGQKLKGHENLTSIKGIAGRSATVLLTVIGDVNDFADENKLAAYFGIVPRVSDSNETVRHGRITKHGSKLGRTTLVQCTLVAKRYSPYLRQYYERIKGHRGSGKAIIATARKFLGIIYNTLKNDWVFEDFPNFVLAST

SEQ ID NO: 234642 - protein, 340 aa, unidentified
MRLIGCDLHASRQSIAMLDRDTGAVIEKTLKHESEAVREFYASIPPPVVVGIEATGSMGWFLRLMEELAIECRVGHPTAIRKAETRRQKHDRRDASLLLQLLAEDRFPAIWMPSTEYRDLRSLLLHRHQWVRMRTRVQNALHAILLAHGVRRGHTLWNRDGQALLASLPLPPHTADRRSELQALYQHLQAHIDRLDDRVEHVANERARATLLMTHPGVGPVTALATEVFVGEPARFLDGKALASYVGMIPREYSSGKRQRLGALSKQGNPFLRFLWCEAAAHAVRRDPDLQRFYRRKVVQKGFAKARVAAARKLGIRLWIMLRDQIDYTEFCRRGLARQS

SEQ ID NO: 234643 - protein, 407 aa, unidentified
MEVLYKRCCGLDVHKKSITACALTPEGKEIKNFGTMTEDIFALVEWIKEKGCTHVAMESTGVYWKPIYNLLEIEDIEILVVNAQHIKMVPGRKTDVKDAEWIADLLRHGLLKGSYIPDRDQRELRELVRYRKSMIGERSREVNRMQKVLEGCNIKLSSVATDITGVSAKSMLKAIIDGAEDTTVVAKLAKGRMKNKQKQLEKALAGLIGEHQKKLLLTQIEHIEFMDQKIKDLDQEIEVRMRPFEEELALLETIPGVARRSAEEIGAEIGFDMDRFPTDAHISSWAGMSPGNNESAGKRKSGKTTKGNKSLRTTLVISARSAARTKNTYLSAQYRRIASRRGGNRAAVAVGHSMLVIAYHILKKREPYKELGADYFDQRKKEVVVNSAIKRLKALGYKVTVEAEAAA

SEQ ID NO: 234644 - protein, 355 aa, unidentified
MKGEVQSKKVLVRGKEVIIGVDVHKESWHVTVRVEGEEAFHGRIPSQYHALQKLLDHFKDCRIKVAYEAGPCGFWLYDRLTKDGIEAIVVPPSLIPIESGNRVKTDKRDSRKLAKLLESNMLKRVYVLNEEDRVNRELLRTRRQIVEHRNDVARQIKSKLLFYGIRSPFARRYGWHQNYLQWLKGMELPREGLRVCFESLIELYEYLSDQLLKINQKVKELSQSLKYRQRLKLLCSVPGIGTLIGMEILVELQEMERFKRAEELASYIGLTPSEFSTGQYVRQGRITRCGNKRVRTCLVESSWILITKDPSMKFKYNRLKAMKGAKRAIIAIARRLIIRIRRILLSNEPYVVGVC

SEQ ID NO: 234645 - protein, 415 aa, unidentified
MEVLYGTCSGVDVHKKLLVVCLRCGRKSEIRNFGTTTQELFDVANWLKSKNCEMVAMESTASYWKPLYNVLEVMGIPSMVVNAQHMKSVPGRKTDVKDAEWIADLCQHGLLKASYIPDKDQRELRELVRYRKSLIEDRGREINRLQKMLEGANIKISGTIRDISGMSGRCVLEKIIQGEKIDAAVYDDLYKNKAIAHNLKASKEQIIADLNGVLSDLQRKMMKELILHLDELDAHIKNLDDEINRFMTPDEKTASELIQAIPGIGNASAQAIISVIGTDMSRFPTDRHISKWAGLCPGNNESAKKRKSGRTTKGNQVLRTTLVNCAHSAMKVKDSYFSAQFSRICAHRGTKRAYVAVAHSMLIAIYHVLSTGEVFKDLGSNYYDQFNKERKAKSMVKRLNALGYEVTLATVAATA

SEQ ID NO: 234646 - protein, 369 aa, unidentified
MFYLGIDQHRKQLTVALRDEQGNLVMRRQVSTVWDRVREFLSALREQCAAEGGYVAIVEVCGFNDWLLKLLPEYGCKEVVLIQPEERRSNKTDRRDAGRLSELLWINRQRLLAGERVQGLRRIFIPSAEDLADRQLVSLRKRITDGRTRLINRIKRVLNKHNLQHGCPTKGFKTKAARAWLKQLALEELDRFEVDQNLDQWDLLDRELNRVQARLWERAALNENAIVIATLYGKRAGYAPLALAASIGPIDRFPTPRSLANYWGLTPSCRNSGDAQQRLGKITKQGSPIARYLLGQLTTNVLRRDRWLRDWYKRIKHRRGVKVARVAVMRRLATILWHMLKRKQPYLPGDPAAWKAVPKLLASTSSGAA

SEQ ID NO: 234647 - protein, 360 aa, unidentified
MAKARTLVGLDVHAIKVVAAVLDAETGELQWFGVSGDVSEAAALCAGLPRPVRAAYEAGPTGYGLARELQRRGVECVVAAPSKIPRGSGDRVKTDRRDAEHLVRLLLAGKLHAVRVPGAEEEALRDLVRARDAVRMDLMRCRHRLSKLLLRHGHRFDDGPAWTERHRAWVATIQLPYPAAQDTMVDAAGAIDALVHRRDQLERGIVAMLPDSPWALQAGRLRCLRGIDTLTAAGLCAEIGDFERFARPGQLMSYLGLVPCESTTGQQRRLGSITKTGSGHARRLLVEAAWHYRKAPRVGKALLGRHDGQPAEAVAVAWSAQRRLHRTWTRLEARAKRRTIIAVAAARELTGFCWAITRIE

SEQ ID NO: 234648 - protein, 342 aa, unidentified
MEFSTVLGVDMSKEWFNCCVMNAKFEIMQESQVENSPDAIFTFLADLQAKGVVSSLKQTLLCLEHTGIYIQHLVRCYLSKGGPVCVVPAVKVSESLNGHGKWEEKTDAIDARRLAEYAFRFADKLKLWKTPDPTLAKLRSFQRQRERLLSAINMLQVPIKESKQFDSVDISEALVANQVASIQALKHDIKNLEKSINELIESDEYLAQLFKLITSVEGVGAVTAREIIIATEAFIKFQPHQGKAFARYAGVVPLKNESGKYRKKRTKTAEKANIKLKTLLTMGACALIKKDLELGRYYQRKTDEGKHHMTVINAMRNKMILRVFAVVRNQVMYQKNLNLCLD

SEQ ID NO: 234649 - protein, 418 aa, unidentified
MYYVGIDIAKQFHIACVLDESNKLIVKNLRIESEISDFSLLHSELINITDDRSQFLIGMEATGLLFENLYIFLQSLGYNVVLLNPYQTNRFREMDTMKYVKNDNIDSQMIAALLKSGRYSEGYVSEDLYQAIKSLYRHKATLMQEMKNAKRQVSTTLVVVFPEFEQIIKDPFSVSGMALLEKYPTAKHYKGASGERILKIFRNIKGNNFNLQKANGLIDLARLSIYQGNASDERAYVIHSNLRRIRFLKEEIEECEQQMFTLLNDANKTIKISQDDEVYIADLVDNLRSIDGVADKTIFAILSECGDISRFRSGQAFIGFLGLYPTLYQSGNSTKYGKLAKRGAKLAKLALYQASIACVRHNGELKKIYLDKKSGGRAPKECVIIVARKLAMIIYSIYKNNTPYNPARVFNTQASLSH

SEQ ID NO: 234650 - protein, 462 aa, unidentified
MRCSTNPHPLSCGIDLQARSMDVCVVSHGGAILLHRTMQAAPEPFLKAVAPYRDGLVVAVQGLFTWSWLAAWCAEQGLPFVLGHALSMQALHGGKATHDQIDAATIALVLRGGMLPQASVSPARMRATRDWLRRRPHLMRTRAELCAHVHKTNAQDNLPESGTKIASKATRDGVAARFDEAAVHKTIEVDLALIPSEDALLKDRELSLGHTAKHHDAHTLSLWHTVPGIGTMLRLVVLDDIHQIERFPSVQEFASSCRLVTCRKASGGNRLGTSGQTIGNAHLTGAVSEAATLCLRHNPQAQKRLARLEKKHDKGKALSMLAHTLGRAVSCMLKRQVACDMERVLQPSGSSAGEPGASLATKGDEPEASTLSVCVDCVCERQGVPRPCIPEPDALIGHPLWLLKRRRCSPPVACAAPPPSPARTGASPMLRQPCEEDGMRARHSCSVAEDTRHAALQSSRKC

SEQ ID NO: 234651 - protein, 348 aa, unidentified
MTIIGGLDLHRQQITFDFLNTDTGEVRTGQVRPATRKAFGAWLAKSFQGRDDVMLAVEGCTGWRFVVEEMQRAGVEPHLAEPADTATLRGRKSRAKTDKADARLLRELLYQRRLPESWIPPQDVMEVRTLARLYLALMDERRAWLQRIHAQLYHQGVPPVASLITCEGRVAIEAAQLSPAARQMVQTALVTIAALEEQIDPLRAQLKSIGRRQAGARALMAIFGIGALCAVIIWAELGDCRRFRRSDQAVRFAGLDVTVWSTDGRRPPGWLSHQGSPQLRWSLFEAAKAAAKSQSPDHDYYVQVRDRKGGKNPTLSVARKLLRYCYHILRELGDEAWAPLDQPAAKVA

SEQ ID NO: 234652 - protein, 377 aa, unidentified
MKAITLYLGLDVHKDSITIAIAEPTSKGEIRVFGTITNDVDRLEKALARIRKAHPGAILEIAYEAGPCGFVIARRLKQLKISCLVAAPSLIPKKPGSPFKTDKRDACTIARLLRAGDLTGVYVPEPTDEAIRDLCRARTDAVDDHRRCRHRLKAFLLRHGYRYQGKANWSQPHMRYLRELVLPHPAMKAILEEYLQGIDDAHQRVQRIEESMLSLLQSWRLKPAVEALMAFRGFQLVASMITVSELGDIHRFEHPRQLMTYLGLVPTESSSGPHQRQGPISRCGNAHQRWLLTECAEHYAMAPKVSKELSRRQEGQPDSVRQLSWKAQNRLHLRFMKLLGRRLQRNKAKVAVARELCGFIWALLRSQDCYKQPMGAG

SEQ ID NO: 234653 - protein, 344 aa, unidentified
MNISVLGIDLGKNVCSVVGLDESGAVVMRRKVRRETLIALAEKLPPCVVGMEACCGAHHLGRVFAAHGHDVRLMSPAYVRPYIKAQKNDDRDAEGIAEAATRPTLRFVELKSQDQLDMQTLHRSRDRLVGERTALINQLRAILLERGMVAPQGKRKLEQFLAVLMDEQGGAGLSSRMIVLVANARTQWAEIDRRIAAFDAEFVRWVKENEEARRLMTIPGIGAIVASALVAAVGQAESFERGRDLAAWLGLVPRQFTTGGKPKLLGISKRGNKYLRRQLIHGARAAVPYVAERDTPLGRWAKGLASRAHRNVAIVAFANKLARIAWAVLRRGERFAVTGMPVAA

SEQ ID NO: 234654 - protein, 368 aa, unidentified
MAQYYVGLDVHSRQSVFVIEDAAGQVVGQGEVPTTPEGLQQLQTQHRLPAGTPVALETGTVAFFVARHLRRLGLEPVVVDAQEVRLKAHRPTQKSDRRDAYELCEGLRRDSYRILVHVPPPAVSALRDTLSRRRHFVRLQTAEINAVKRLLRAAGLGHLSRALRTEVGWGKLLAAVAPQPDLRAFVEHHRAAWRCAGEQVAALEHALGAQQRAFARDLERLETAPGVGPIVAATTLAVFSEVTRFPSAKHAASYAGLVPSTYQSGTRDAHGRITKRGSAELRAMLCEAAQHARRPTHPLHPYFTKLCAKRGYKMAVIAVAHRLARILFAMLRDGTDFDVHRLGIAVGPFTRTTVDAYRLKRAPRAHRA

SEQ ID NO: 234655 - protein, 364 aa, unidentified
MKKNIITRQSPRRAAQASHPITIGMDLGDKTSRYCALDQQGELLGEGSVATTKKALAEKFAGLGRCRIAIEVGTHSPWISRLLTALGHEAIVANARQVRLISESSRKDDKLDARLLARLARIDPELLRPIRHRSEKAQSHLLAIRVRAALVDTRTGLVNTARGLAKSMGERLPACDADSWDAEKLGALPAAIEQALRPLLEQVESLTEKIKQADHRLEQIARIEYPETQLLRQVSGVGVLIALTFVLTLEHHQRFEKSRDVGCYVGLRPKRSQSGQSQPQLPITKEGDRYLRKLLVQGAHLIMNRRGPDTDLKRWGVKLAGRGGKNAKKRAVVAVARKLAVLLHRLWSTAEVYRPLRSSQPLAA

SEQ ID NO: 234656 - protein, 397 aa, unidentified
MVFIMIYVGIDIAKNKHDCVILSDHATCLRPCFSLKNNSQGFALLINAIKEACGGDFNHGEVKAGLEATGHYAHNIVAFLNSNGIDTTIFNPFLVNQYRKSRSLRKTKTDKADAMLIAELLISTAANPATPSYHNQEMKTLCRYRFSLVKQRSKLKADMSRYVDLLFPELGSLGLNPTSSSVMAMLKELPGASYISICNISQLTDILSSSSRGRYGKETAEQVKAMAKESIATANKALSYIMSDTIEQICLLNKRIAKIDGELKNEVEKSGTKLTSIPGIGFCIASVILAEIGDINLFSSADKLQAFAGLDPSTFQSGNFTASHTHMVKRGSAYLRWAIMQGARLCSLNNLKYKQYLDKKIKEGKHYNSALGHLSKKLIRLIFHLLKENEEYDPKVA

SEQ ID NO: 234657 - protein, 332 aa, unidentified
MKKEIKESVGIDVSKLTLDVFIHTKRIHKQFLNNKKGFEGLMKWVKQETKCPEDIIWCFEHTGWYCVLLSQFMHENKQRYCCVNPLEIKRSMGLKRGKTDKQDAEEIARFAWLRKDELETSIPMPVKLIEVQRLMSLREQLVKQSTALKSLSKGMLVTLEKKTGDFGIGAIKQTLKHLEVQIRKVEKEMEALIKTEDQMQKNYKMSKSVKGVGSVLATQMLLHTHNYTRFETWREFSSYCGLVPYPYQSGTSINRKPRNHSISDKKMKSLLSMSAISAIQADKELKIYFKKRVEEGKPKMLVLNIIRNKLVSRIFATVKRGTPFVELNKFAA

SEQ ID NO: 234658 - protein, 421 aa, unidentified
MEAWPWTHFAGVDWAKDHHVVVVVDLEGTVLLQCQIPDTAEGWGNLRRTLVPLSPLPVAVETSQGPVVERLLESSLTVYPVHPKAAQRYRDRKAPSGVKDDWLDAWSLADALRTDGHAWRRLRPEDPLTQELRLLCRDEIRLIEQRTALVNQLQETLHEYYPAALEAFDDWTKPFTWAFVERFPTSQALAKGGKRRWEKFLHTHRLARPQTYQRRLEIFSRATEFCGGPGVTRAKSLLAVSLAKQLRLLERQLTEYRRRIDELFDQHPDRDLFASLPGVGQKLGPRLLGECGSDRGRFRDPQGLQCYAGTAPVTFQSGQMHKVRFRRACNKWLRATVHLWANLSRSCCAWAESYYRQKRREGKSHACALRCLGQRWLKILSKMRQTGKPYDEGLHLRNQVRHGSWVVALDPEPRCPQPLRT

SEQ ID NO: 234659 - protein, 397 aa, unidentified
MIAVGIDVSKSKSTVAILNGDGSIRAKPFNVRHTADELLALVNYIKGTSEVPTILMEPTSHYHYPLLKAFQEANLPVCLINPYQMKKYGDTALRKSKTDKRDSIRIAQYALEKSYSLIPYTPSDQKYEDLRFLSRQYSQRISTLTGNKVQLLDLLDQTMPGITSLLPLKSRDPDNCVLLRFVKRFKSFDMIRKMGKTRFLESFQILVRKTKDRHAGTKGLRIYELALNSVTTRGDNPLTAMTQEQCVALISTSQKAADEINLQMRTIAETLPEYKVLRAMAGVGDRLGPVILAETGDIRRFHSGKALNAYAGNDAPPYQSGQFESRNRHISKRGNPALRKACFEVMQALKLTKPQDDPVYLFLAKKEQEGKPYNVAKMAAVNKFLRIYYARVMELYK

SEQ ID NO: 234660 - protein, 349 aa, unidentified
MGEVSTIGVDIAKSVFQVHGVDADGTVVIRKRIGRLKVVEFFANLPPCLVGMEACATAHQWARELKRLGHDTRLMPPTYVKAYVKRGKNDAADAAAICEAVTRPSMRFVPIKRVEQQSALMLHRTRDLLIRQRTQLINALRAHLAELGLVSAKGYEGLQQLVMAVTESSDERLPDNARFACQAIIVQLHAVQTQINGLDKRVIQTHRANADSKRLEAIPGFGVILSTAVVATMTDPKAFRTGREFAAWIGLVPRQNSTGGKERLGSISKQGDRYLRRLFVLGAISIVRIARARPDKYPWLMQLLARRPFKVVAVALANKMARVAWAVLARGETYRAPTRLSNAAITAAA

SEQ ID NO: 234661 - protein, 474 aa, unidentified
MTTERNPKNQAKRRRKNKASATQQQINTGTNPHAAGIDIGADELVVAIPPDRCAENVRTFRSFTANLYQLRDWLLEHKITTVAMESTSNYWVNCYDILAEAGIDCYLVNARHVKGVPGKKTDVCDSQWLQQLHAAGLLKKSFRPDQEILSLRYLTRYRESLIREAGNHLRRMQKVLTEMNLKLHHVFSDIDGVSAQTIIQAILAGERDPKTLAALRNGRCRSSETDILAALQGQYRPELLFVLAQLQKNWLEQQKHIADLDDQILNLLQKIAPAQKASKDSGTKAAKSPKRRQLGKNALSLDYCRESQHYFGVDLTEVDGLGPSVILALLSEIGNRQQLLDSFKSADSFCAWLGLCPCNAISGGRVLRSATRKTKNPLNEALRLAAFGISRARSRLGEYCRRMKGRLGKAQGITATAHKLARILYALIQSGTAYSETTAFPPKPQNERKQRRKLEILAQKLGFQVTPIPATTLT

SEQ ID NO: 234662 - protein, 428 aa, unidentified
MSERDYNRQAARRQRISKATLVVGVDVGNAFNAVGFMNKDGNVLGSCAKLYNSREGFEQFVEMIEGLKARHHLRDVLIGMEPTGHYWRKLAYFAKEHGYEVRFVRTTALKHHREIDESSSAKSDRRDALTIANITREGKYIDTVIENGVLRQLRALSKARERLLRYSVSAKNSLHAALDDYFPELHEIFWSMGSRSLWVILDQCPFPEDVVLMKVSTLGEWIARSSRKRAGSAQKANALYEAGQKSIGVKQIGSADRYRLRMCLEEVKRTVLTLKDMDRQLKLMVKDIPSASYLMSIPGIGPLSAAVFLGELGDPAHFHNARQIVKYAGYDPQESDSGSRIGRRFISKKGRWLLRKYLFFMSMRVVVLSKYFQEYYHRKLETKNRVGQQPRRKEMLCAVAIKLIKVIFALLRDKRVFEDLAPAALAAA

SEQ ID NO: 234663 - protein, 413 aa, unidentified
MQVLYSHCAGLDVHKKAVSVCVWITSAEGRGQTHHQQFGTTTPDLLELAQWLQSLGVTHVAMESTGVYWRPIYEVLEGGFTLVVVNARHAHVLPGRKTDTGDAQWLGDLLRHGLLKASYVPPRWQRELRELVRYRRNLSQRRTQVVNELHKTLELANLKLASVVSDVTGASATDMLQHLVAGQGDPQLLSELSRGSLRKKKEALCRALTGRVRDHHRFMISQHLAEISGVEEDIRVISEEIERRTAEQQELIDRLDAIPGINRRVAEVIIVEMGTDPSVFGNNVERAMAWAGVCPGNNETGGKRHQARIRQGNRTLTTAAVEAALAAIRSRKTYFHLLYRRLAGRRGHKRAVVAVAHAILKTVFMMILRGTTYQDLGADYYDRLRPQVVIKKLTRRIRQLGFEVQLNPKPAPA

SEQ ID NO: 234664 - protein, 452 aa, unidentified
MARKRNSKSGKRQSPFLHIVHPDCAGIDIGGSFHVVAVSPDRDEQPVRKFEAFTDDLERLADWLHACEVTVVAMESTGVYWIPLYEILDRRGLEVHLIDPRATKQVSGRKSDVLDCQWIWQLMSYGLLSSAFRPADEICELRSYTRVRAMLINNQTRSVQHMQKALVQMNLTLTTVLSDITGTTGMRILRAIIAGERDGATLAKFRDPRVKADERTVARALTGHWREEHLYALEQALAHYDFLEQQIHDCDERIVNVLSTLSLTPDAKVPPATKRFIGGHRTAKQRHALRAALYRVFGVDLTAIPTIGLETALTIAAEVGTALSRFPDSQHFCSWTTLAPGTRISGGKPLPGRAPHIVNRVGQALRIAATHARNSDSYIGAAHRARLARMEKATAIKATAHQLARLIYAMLTHGQAYVEQGVTTFENERRERQIRNLRRNAQKLGIELREAA

SEQ ID NO: 234665 - protein, 353 aa, unidentified
MSPVNSRIAAIGIDIGKNSFHVVGQDERGAIVLRQKWSRGQIDARLSNLPTCLIGMEACVGAHHLSRKLQALGHDARLMPAKYVRPYSKGQKNDFRDAEAIAEAVQRPTMKFVATKTAEQLDLQALHRVRERLVGQRTGIINQIRAFLLERGIAVRQGLRFLRAELPTILATRGDALSPRMLRLVEDLAGDWRRLDARIEAISGEIEELARQDQACERLMTVPIGPIISSAMVAAIGTGDAFSKGRDFGAWLGLVPKQISTGDRTILGGISKRGNRYLRALFVQAAWVVLVKLGKKWERYGLRSWIEAAKKRLHHNVLAIALANRLARIARAVLHRGRAFECVKMDEIAPRSA

SEQ ID NO: 234666 - protein, 353 aa, unidentified
MTEYVGIDWAYRRAAWCAMSAGGVISAEGFTPADEDGLAKLVLRLGSDVKACLEMMSGAVWVRDRLRTAGWQVEVADARRVKGVAPLACKTDRVDARVLAELCRRDLVPALWIPSLEERELRERLRRRMHLVRLRTSAMNRIFGLGTQWGLRLSAERLRRQGGLELLAQRGMPAVWQRSIQEALAVIDLLDARIAPLEAELAPIARADRDVALLVTIPGVGELLALTLAAEIADVSRFPSPGKLVGYAGMAPGVKQSGQSSRSGLPLSKAGSRTLRWAAVEAAQQAWRESNPWHQLYSDVAKRSGKNAAKSAVARKVLIASWHMLSRREPFKPSRPRGGARTVPASSLSVLAA

SEQ ID NO: 234667 - protein, 423 aa, unidentified
MDVVHQRVAGLDVHKETIVACVRIMVDAKVSRECRTFDTTTAGLQDLLAWLTASGCSHVAMEATGVYWKPVWNILSDGNLELLVANAAHIKNVRGRKTDVNDATWIADLMACGLIRGSFVPDQAFQELRTLLRTRKQLTREQTRHVQRLQKTLEEANIKLDSVISDIMGLSGRRMVEAMIAGERNPQKLAALADRRIKASPKALYDALHGRLTDHHRFRLRLHLAQYDVLAAAIEAVDQEVDAAIDQMDETMKAGQAFFRSLIRLLSGIPGVNTLSAATILAEITPDMTRFATAGHLVAWAGLCPGQNESAGKRKSSRLRKGAPWLKTTLVQCATSAVKKKDSYFKAQFQRLKSRRGPQKAICAVAAAMLTTIYHMLKDGTQFQDLGAHHFDRRPPEAKARHLVAQLTKLGYTVQLQPLAEAA

SEQ ID NO: 234668 - protein, 355 aa, unidentified
MDSEKYIGLDVHQATIVVAVMESSGKLVMESILETKAVTILQFFAGLRGTLSVTFEEGTWSAWLYDLLQPHVDQLVVCNPRKNALLKDGNKSDRIDARKLAELLRGNQLKPVYHGETGVRMLRELSRSYLTIVKDLSRVMNRLKALYRSWAIPCAGRDVYYGRHRAEWLAKIREAGVRRRAERLYEQLDMLRHLRQQARRELLAESRKHAITAKLRQIPYLGPIRSALAVALIQTPHRFRTKRQLWAYSGLALETRISAEYRYVDGQVRRSKKLLSIRGLNKDHNHDLKGLFKGAATMASVRPGPFQDFYQAALAKGIKPTMARLTLARKMAAITLTLWKKGENFDAEKLKSQAA

SEQ ID NO: 234669 - protein, 340 aa, unidentified
MGNVATIGLDIAKSVFQIHGVDAASEVVVRRKLTRGRVLAFFESLPRCLVGIEACSSSHYWARELTARGHDVRLLPAQYVKPYLKRQKNDAADAEAICEAVTRPTMRFVPVKSPEQQSVMMLHRVRLMLNRQRTQISNALRAHLSEFGIVAPIGRNGIEQLLVVVNDENETRIPADARLCLRMLEAQLRVVKKQILENDRRVRANARETELGRRLMEIPGVGPLLASAFVATVADAHAFKSGRCLSAWIGLVPNQNSSGGKERLGSISKAGNRYLRQLLVVGAMAVIRYAERNGTRRPWLVQLMARRTAKVAAVALANKTARTVWALMTNGERYREPVIA

SEQ ID NO: 234670 - protein, 427 aa, unidentified
MDNALTTTLFIGIDVSSKTNYVFALDFFGKKLLSFEAKNNLPGSEEIIANILVCLKENNLTHLTIAMESTSFYSWHIANTLATHDALVWFKPKVYCLNPRVVKAYKNSFIDIDKTDPDDAFAIADFARVGKITTAPWSGAQYIALQRLTRYRLHLMENISREKSYILSNIFLKFSELAVLDKAENPFSNTFGASSLATLTDFMSIEDIANASLEDLIAFLVEKSKNRFSNPEATAKLLQKAARDSYRLDKALYDPLNATIAASLNCIKALEKEVKGLDKAIEKAVKRIDNHQFQCLISIPGIGPVFASGILAELGDINKFNNQASVAKYAGLTWRKKQSGNFTADNTFLTKTGNKYLRYYLLEAAASIVRNNTEYLDYYHKKYGEALVHKHKRALALTGRKLVRLIFALLRNNQLYTSNEVVEKATT

SEQ ID NO: 234671 - protein, 330 aa, unidentified
MPVIGIDVSKAKLDGVVLVGVEGRKARRKSVSNDPSGYAALIAFACKQAACVPGELHAVLEATSVYHEACATFLADQGLTVSVVNPARVRDFAKSLAVQSKTDAADAFVLARFGLLLKPGPWTAPPREYRELKALLARLAAIEAQIRREQNRQEKVQASPVPQVVADSIQASLAFLDAERERLVREIDDHIDRHPRLKDDKALLESIPAVGNKTARVALALLYDGKRFTHAREAAAYLGLNPVEHRSGTSIARKPRLSKRGDGRLRAQLYMAAVVAIRHNPDVRALYLRLLAKGKSKMSALGAAMRKLVHIMFGVLKHQTPYRPQVALAS

SEQ ID NO: 234672 - protein, 400 aa, unidentified
MLSIGIDVSKGKSTVCGMKPGGEIVYAPFEVQHTREGMSELVSLLRSSGEEVRAVLESTGSYHCPVVAALLENGIFVSVVNSLRMKRFCSQSIRKVKTDRIDAMQIALYGLAYWQELQPTKLPEDTYRELQLLARQYYQMTSMLIKAKVDFNALCDQVLPGMQELMSDHAGRHKLSDFVLRYRHTTHILEMGETRFRKDYCKWAEKKGYRNCERMAVLIFATAQNGIPVLPNAPSTQIVITEAIRVLHTVEASRDAILTQMQALAKTLPEYSLVREMPCIGDTLAPRLIAEIGDVRRFHSKRALIAYAGIDAPPYQSGKFCANNRHISKRGNRYLRKTGYEVMQSYVMHKPANDPIFTFIEKKRSEGKCGKLAMVAGLNKFLRVYYGKVTELYRSLPAIE

SEQ ID NO: 234673 - protein, 363 aa, unidentified
MKNTIAAANARETFNGSQGCGQSAESKHHMENTQFESTSTKIFAGIDVSKGTLVCSLVDAAESSIKWRQTFINSEEGVSRLLAKIPSGASLAIEPTGRYGNVLIEQATGAGLTVLLAPGKRAKSFNRSVQPRAKTDPIDSLGLALFANSRPLWAYHLKSEAVDRIDQHLSYRKLLSRTVAAMKLQAQSSPMVAEALLDTVSELQERIAKLDKTIAALVKDDPQFAMIPKLKQVPGFGPVVSTAVVSRLIHKQFTKPAQFVAYIGLDIAVNQSGKRKGQLGLTKDGDGEMRRLLFLAAQSSIRVKDSPFKQQYDRELAKGHAKIQAICTVARKMAQLAWSMVHNQSTYDPLRVYKAPSRETKPN

SEQ ID NO: 234674 - protein, 310 aa, unidentified
MDMITVGIDVSKDRLDVAVCPSGEAFVVERNAAGLERLAARLQKIAPHIVALEATGGFETVAAAALAAAGLPVVVVNPAQIRSFAKALGQRAKTDPIDAAVIARFAEAARPEIRPLPDEATRLLADLVARRRQIIEMIGAERQREKRVTVPHLRKSIARLLKALEKELASVDKDIDDAMRGSPAWCDKENLLVSTPGVGPTIARTLVAELPELGQLSRKQIAALCGLAPFTRQSGQWRGRSFIGGGRNAVRTALFMGAMVGKRHNPILKAFFDRLVAAGKPKMVALIAVARKLLTILNAILRDHRPWKIA

SEQ ID NO: 234675 - protein, 282 aa, unidentified
MATSSRKFVGIDVAKDKLDIAVLGEKKASQVGNDEAGIASLIKKMQKLAPALIVVEATGGYQRTVVLGLYEAGLPVALVNPSRVRQYARASGLLAKTDKLDAFNLAEFGKQMKPRRFEAKSEAGRDISALLVRRRQLEEMLKAEKSRLRTVPPKMRGSVERMIETLKEEIKRLEKDLDDFMKENEEWQAQEQILTSAKGVGRITATTLLAELPELGKLDRKKIAALVGLAPMNADSGKKRGYRKTKGGRVEVRNVLYMSTLVATRYNPLIQAQYWQMLKRGR

SEQ ID NO: 234676 - protein, 433 aa, unidentified
MKGGDTMNNALTTTLFIGIDVSSKSNYVFALDFFGKKLLSFQANNNLPGSEEIVSIILSCLKENNLTHLTIAMESTSFYSWHLANTLATHEALVWFKPKVYCMNPRVICAYKKSFVDMDKTNPKDAFVIADFARVGKITTAPWNGAQYIALQRLTRCRLHLMENISREKSYILSNIFLKFSELAVLDKKENPFSDTFGATSLAVLTDFMSTEELANASIEDLVAFLVEKSKNRFSNPEATAKLLQKAARDSYRLDKTLYDPLNATIAASLNCIKALEREVKGLDKAIEKAIKRIDNHQFQCLLSISGIGPVFAAGIISELGDATKFNNQACVAKYAGLTWRKKQSGNFTADNTFLTKTGNKYLRYYLLEAAASVIRNNDEYLDYYHKKYDEALVHKHKRALALTGRKLVRLIFALLRNNQLYTSKEVVEKATI

SEQ ID NO: 234677 - protein, 404 aa, unidentified
MYNAVGIDISKGKSTVAVLQPGSVVIRKPFDVPHTTNALGALAAYIGSLEGESKVVMECTGRYHEPVANALSEAGLFVSTVNPHLIKDFGNNSLRKVKSDPADAKKIARYTLDNWIELRQYTGMDTTRTQLKTLNSQFSFFMKQKVAAKANLIALLDQTYPGVNKLFDSPTRADGSEKWVDYAYSFWHVDCVRKIGLKTFTERYRNFCKKHHYMFQPYKPEQLFNASKELVAVYPKEKTYKLLIQQSIQQLNLASSHVEQLRQEMDRLASTLPEYTTVMGIYGVGKTYGPQLMAEIGDVSRFTHREALTAFAGVDPGVDESGQRISKSNRASKVGSGRLRKTLFQIMTTLLQNAPADNPVYHFLSKKRAEGKPYYVYMTAGANKFLRIYYGKVKECLRNLEQTK

SEQ ID NO: 234678 - protein, 343 aa, unidentified
MKLTRIGLDIAKQVFQLHGTDRFERTVWRRRLSRDRWVQALRDVAEPGCEIGMEACGGAHHWARQLQALGYRVKLIAPQFVKPYVKSNKNDANDAEAICEAMSRPSMRFVTVKSTRQQDIQALHRVRASLMEQRTAKGNQIRGLVAEYGLVAPKELSSLRRAMPRWLEDADNGLSACFRQVLEGLWRDLRSADDRISELDHSIADLAQADPDAHRLQQLRGVGPMVATALIAAVGDAKQFANGRQMAASLGLTPRQHSSGGKDRLLGISKRGDAYVRSLLVHGARSALRTAPAKEDRLSQWVVRLAQRVHPNVASVALANKTARLAWALLHHQCDYQPTLAAA

SEQ ID NO: 234679 - protein, 388 aa, unidentified
MDQNLKYSVGIDMSKENFDACISVINTLQVVVIKATRKFNNTRLGFNEFLTWIKKHLKEDLPVVVTLEATGVYYEELAIFLFKNDLQVSVVLPNKAKKYLQSKGLKSKNDKIDAKGLSQMGAEQNLARWEPFSKNTYELRSLTRQNEDLQAQKTMINNRLEAYKFSGYKNKLIEKQLLSMIKFINRQLKEVNTQIEKSVDGDELLKNKFKKICKIKGLGILTVASIVGETNGFKLIKNQRQLVSYAGYDIIENQSGNRIGKTRISKKGNSHIRRALHMPALSVVTYKQAGFKALYERVYASTGFKMKGYVAVQRKLLMLIYTLWKRDEEYDPNHIITKNNTSGDEESKSLFSLSSEGGVKKIGGIKPPTQDKLRSDESSEVLFSLLQN

SEQ ID NO: 234680 - protein, 368 aa, unidentified
MNTVKFIGLDVHKKSITIAIADQGRENKARSYGAIANDLDALDKFCRKLASTASRLYFVYEAGPCGYSIYRHLTAKGFECMVAASSLIPKKCGERVKTDRRDALKLARLHRAGELTAVYVPDAQDEAMRDLSRARQDAVEATQKAKQRLKAFLLRHHIVYSGRSAWSKAYFRWLADIAMAYPAQQVALQEYIDTVHEGLQRVDRLTDQIRQLVPQWRMAPVVSALQAARGVSLVVAVILLAELGDLSRFGKPSQLMAYLGLVPSEHSSGESTKRGAITKTGNRHARKALIEAAWAYRMPARVSRPLLKRQQDVPEAVCRIAWKAQLRLCTRFRRMVARGKLKQKVATAIARELSAFLWAMAQQVQPAA

SEQ ID NO: 234681 - protein, 346 aa, unidentified
MEKLIRIGLDTSKSVFQLHGVDGSEQPVLRRKLRRLEVVPFFAKIEPTVVAIEACGGSHYWARTLEELGHQVRLLAPQHVKPYVKRGKNDAADAAALCEAVSRPGMKFVAAKTAEEQAALMWAGLRDRLIKTRTQLSNAIRSYAAEFGLVAARGLDKIDPLMARIAASEDLPVAAREAFALHGREYARLQAEIREVEAKLMVWHRGNQDSRNLAEVPGIGPIGGTKLAMKKADAMACQSGRFFSAWIGLTAKDHSTAGRQRLGGITRAGDPALRSVLVVGAMAVIRQAERNPEKASPWLLALLKRKPKKLVAVALANKNARIAWKMMTTGERYDPRRSAIATAAAA

SEQ ID NO: 234682 - protein, 415 aa, unidentified
MALKIVYKICCGIDVHKTFVVACIASTNDKGVTSYESHRFSTYTSGLKTLLQWLLDRNCKDVCMESTGKYWIPVYNILEKDCSIVLAHPKYVKAIRGKKTDKKDAKWIADLFKHDLVAGSFMPPSDIRQLRDLMRYRFKLTCFKSSEKNRLQNCLTVSNIQLGNVVSDTFGKSAQAILDKILENPADTSFDLEPLVFKSLKKKLPELRDAIDGYITPEQAGKLKVIKTHYEDLESRKAELEELILALAAPYQQELAILQTAPGISSDFTAIGIISEIGTNMEAFPSAKHLCSWAGLTPTNNESAGKKKSVRVSKAGCYIKPLLVQCANAVVTSKKHPEIRNRYLRLKKRRGHKKAIIAIARMLLTALYHMLKNGENYNAELYRKSDLPPVDREITVEQALMMARNQGYKIKSATA

SEQ ID NO: 234683 - protein, 396 aa, unidentified
MISVGIDVSKGKSTVCIMKPCGEILESPFDIGHTADELDSLISLIKSFDEETRVVMEDTGHYHLPVATYLSSHNIFVCCVNALRMKKFCSQSIRRAKTDKIDSIKIASFGITYWNELVKAYPSNVIYDELKFLARQYYQVTGMLVKSKVNFSNLLDQVMPKINDVLSNQGENHKLTELVNRYIHFQNILDMGEMKFTSDYCKWAKKKGYRLNERKAAEILALAQNGIPTLPNSQSVKIAVSEAVKLIHSIEESRNTILAQMQDLCNTLPEYSVVKEMDCIGDTLAPRIIAEIGDVRRFKNKHSLIAYAGIDAPPYQSGAFHASERHISKRGNSYLRKTGYEIMQSLIKHKPADNAVYNFIQKKRSEGKCGKEAMIAGLNKFLRVYYGKVMEFYSEH

SEQ ID NO: 234684 - protein, 353 aa, unidentified
MNSIDYIGFDIHKKTISFCAKAQDGRILDEGIIPARRTDLSAWAKRRSRPWWGAMEATLFTGWVYDHLKPLAQELKVAHPAMLKAIAASKKKNDKVDARKIADLLRCDLLPECYMAPSATRELRRVLRYRNLVVRQATRMKNRIAGLLMETGTLYNKERLHGKAYFSELLGSLREIPASVIELLKLSRAQLEFFATIQKRLVKGLRADAGLRERVQRLQSIRGVGEILALTWALEIGEVKRFPSIADAVSYCGLTSAQHNSAGKEQRGPISKQRNKHLQTILIEAAKLAPRYNPQLAAVHEGELKGGHRNQATLAVARKLVAYLKAVDKSGKPFQVRASAAGEEVSKDEQPVG

SEQ ID NO: 234685 - protein, 343 aa, unidentified
MNITTVGIDLAKNVFQVHGVDERGKVLLRKAVKRAELVKMFTALPRCLVGMEACGGAHYWARRLMEFGHTVKLMAPQFVKPYVKTNKNDASDAEAICEAVARPNMRFVPVKNIEQQTVLAVHRARQGFVVERTAQGNQIRGLLYELGIVIPKGIRYIEKQLPQILEDAENGLPEISRALFARLFEHFHQLGNQVKELENQIKTWHRQNEASGRLEAIPGVGALTASALVASVGDAKTFKSGRQLAAWLGLVPRQDSSGGKERLLGISKRGDTYLRTLLIHGARAVLFHRMRQSEHQDGWLMRLRARRNANVAAVALANKNARVVWALLAHQREYCAGRVAAAA

SEQ ID NO: 234686 - protein, 348 aa, unidentified
MQISTIGIDLAKNVFQVHGVDAAEKLVLKKQLRRSQVLEFFSKLSPCLVGMEACATSHQWARDLKKLGHDVRLMPASYVKAYVKRGKNDAADAAAICEAVTRPSMHFVPIKSSEQQSALMLHRTRDLLICQRTQLINAMRAHLAELGLVARKGREGLQQLIRTVAEADDERLPSDACFACQAIIAQLQAVQIQITRLDKRIHQAHRVNPASKRLEAIPGFGVIVSTAVVATMTDPKAFKTGREFAAWIGLVPRQNSTGGKDRLGSISKQGDRYLRRLLIVGALSVVKSARARPDKYPWIMTLLGRRPAKVVAVALANKMARIAWAVLAKGETYRASAHTTSGAVAVST

SEQ ID NO: 234687 - protein, 274 aa, unidentified
MFYLGIDVSKATLDCCLLYQGVDGKRKNIKTTNTANGFNKIMAWVEKHQCALSQTLVAIEATSIYHESLAMALADAGLQVSVVNPARVRSFAQGLSILHKTDQVDSVVLAKFVALARPEKWTPPSHDARQLNGLLARRETLAADLRREQNRMEKMLSIATPVEIRASIERMTTFIEQEIAQLDQQINDHIDQHPKLKNDQKLLTSIPAIGKRTSLMMLNLLQMHHFDCASQMAAYVGLVPIQRQSGTSLKGQAHLSKAGSSKVRSGLYLSLIHI

SEQ ID NO: 234688 - protein, 410 aa, unidentified
MDLLRREVPATSLVIAIDPGKALNRVWLTTGERGLIGEPVSLPVLRDGVDELERLIASSGVAGPPVIGLEATGALHRAWATEIQRRWPGSLRLFAPSETTAARAQLGSRRFKTDDRDCAAMVWLLRQGAGRPAEPDAVEALLGTVRHRRQLVDARKKLQQRLHDQLNALCPGLSAPPAHGRALKIESPTGKAVLACAATFDGRAPTTRSLLARAPGRMTEPTAAFWAARWKRLLPPPADAELRAARLGCDLRRWQDLQSDIALAEQQLELLLAQTPGQVLTSLPGVAVVRAAAFSAFTLPIERWPTPEHLYSATGLAPATYQSSTVTRRGRISRQGLPEHRDALMAIAWGLALNSNAFGARDAELRARCFRPIQARVALARHACRLCWRLLQTQQPFDERRYAHARQRGR

SEQ ID NO: 234689 - protein, 342 aa, unidentified
MAIVGAFDVHRRQVTFDVLDTVSGQVRRGQVRPAGRATLRQFLGRFAGQGEVSFAVEGCTGWRFIVEELERAGFEAHVADPAAVADARGSKRRAKTDRIDSRQLRQQLVEGRLPESWIPPVLVREVRAKLECYHDLREEHTAWVQRVHATLFHHGVPVIEGALSTIDGRARLAAGEGLSPAARQSVGVAVRVADALQTELDELGKELGRFARRQPGCRALAAQYGVGPITAVAIWAFMGDTRRFSSSAQAVRHTGLDVTVYSSDGKRSPGHLARQGPPVLRWALYEAACSAARRTSPDLDYYHDTKERIDHKRAAISVARKIARRSHHILRNLGDTAWQDAA

SEQ ID NO: 234690 - protein, 370 aa, unidentified
MDERIKFFVGLDAHKDSIAIAACEAGREPARFVGTMGPDVNGLLKLLAKAGDPAQLSVVYEAGPTGYGLHRELCRRGYRSQIVAPSLIPRRAGERIKNDRRDCLRLAELSRAGELKAIWVPDEAHEAMRNLWRAREDAVGMRLKTRQQLQAFLLRHGRRYPGRTNWTKSHERWIAEQRFEHDGDRIALAEYQLAAQAAEQRVDRLTTALTEAVKGWRFEPVVAALRALRGIDTVCAIGLVTEIGDVSRFGTARQLMAYLGLVPSEHSSGNSIRRGSITKTGNAHARRLLTEAAWSYRFPARMSQQLRQRSSDLPEPVRNHAWKAQQRLCGRFARLSSRGVQVNKVCVAVARELAGFVWSIAHQASRTQAH

SEQ ID NO: 234691 - protein, 360 aa, unidentified
MQAKTFVALDVHVSGTVAAVLDRESGELSKRRLPGASEEVAAFVSGLPGPVRATYEAGPTGFALARRLEGAGVDCLVCAPGLIPRGPSDRVKTDQRDAERLVRLLVAGELHRVAVPSLEAEALRDLVRAREDLRGDLMRARHRLAKLLLRHDVRFAGPERNWTQAHLRWLSSVSFEQPASQRAFEDYRGGVEALLVRRGQLEREIAELLPDSPFAQTARRLMCLRGIDTLSAAGLCAEIGDFGRFGHPEQVMSYLGVVPSEHSSGAQRRLGPITKSGSQHARRLLVEAAWHYRRAPGVSTNLRRRQAEADPKIVALSWKAQRRLHHVWSRMESRGKRRTIIAVAAARELAGFCWAVATAD

SEQ ID NO: 234692 - protein, 909 aa, unidentified
MQDYYNMNQTTLSIALDYQPEEHHPARYINQLVESLKLKYDYQFGRPREYNLGAMLKLVLLAYCYGIFSSRKIEQFARENKPAGWLIADQIPSYRTICRFRISDELATLTTDSLSQLTQYLRQNGMIDDVSFIDGTKILADANKYSFVWKKNTIRFDKMNREKLVDLLGELHEAKIVGEIPAGSELTPELLDIMISKVEDHLVVLNETVEATKQVSPNPAKQQRRTVKSQKRKLNKRRDKMREHQAQQAIYGQRNSYSKTDHDATFMRVKEDPMQNGQLKPAYNVQIATSNQFITGYRLFQNPTDTRTLQPFIEHLKANNVLGHTIVADAGYGSESNYRYLEDEFGQHTVLIPYGTMLKENSRKWQSDDRKVMNWDYHEKDDYFINPQNVRFNFNAYRQRTDKYGFTRDFKEYIAEKYDENHQLIAAALTPKGYLKRISVNENWEYFKSKQRELLSAPETGQIYAQRKIDVEPVFGKMKASLHFNRFSVRGFDKVTKEAGIVILALNIMKLVTVGTNFKNQRRKQMGRETKIRFLVPFAYTEASYVTASKKISKRFETITCRLKDCGEWLKQRHVEQVLMESTGQYWRPVWQILEPFGFKMILCNPRIVKNIPGKKTDQKDSEWLSELARYGLVSASFVPPKSIQALRESTRLRKKITQSMTATKNEVHNLLQRSNIKLTTYISDIFNGTGLKLLKLLIDGEVITLQAITKCRHTRIKASVEQLFAAMDGILPRNDRRLLGLNMELLADFRRVLAELDAQIDEQIMEFNDLYLRLQDIPGISQRIAQIIIAEVGSDVSPFPDAHHLASWAGLCPGNYESAGIKHGAHILHGNVYLKSAMVSAALAAKQSKETGLKDYFWRLHGRMTAQKALVALAHKLLRIIYVMIDEGTTYVDYKKDQRKAITLIPQT

SEQ ID NO: 234693 - protein, 406 aa, unidentified
MKQIVSVGIDVSKGKSTVCAMIHPNTIIKESFEVLHTVEEMSMLADYIGSLDGEIRIVMESTGHYHLPVAQFLYQKDFFVCVENAYIIRQFSRIMLHGAKTDPLDAKKLAKYGLAYWSELKSYKFHPSCYTELSLLSKQYQTYIKLLIAAKQNVIHLMDEMLPGFKEALDTASSVQFSKVKYVDFAKEFYHVDMIKTMGKEIFRENYKQWCKEKGYRFQSEKADELFHLAEDGIPTLPTEFPSTRLCMEVATEQVSQLGYALEQILSQMQNLAKTLPEYQTIRQMGGMGEKLCVRFIADIGDVRRFHNGKALVAYAGIDAPPYQSGQYTGTKRRISKRGNSALRKTGYEVMKSLKSHPPKTDTRVYDFIIKKENEGKSKKQAKIAGLNKFLQIYYARVMEIYKNIV

SEQ ID NO: 234694 - protein, 353 aa, unidentified
MGQCIGCDAHKKFSVFVSMDEQGQYGASIRIGHNREVFGKYLRTLEPGSDIALETGGGYYWMVDEIAAAGHHPHLAHALTVKRQIQGRHKTNARDAGGLAMLLHNRTLPEVWIPPAEHRDQREMLRLRMALAHKRSGLKNRIHGLLQQYNLEVAASDLFGDKGRVELLARQHELPKYSRLSMLEQLELVDHLDTKIKECESQIKVMLAPSVERDLLDSLPCVGEILSAVMAMEIGDVRRFAGPDRLASYCGLVPVAIESADWKRKGQCPRACNNYLKWAYVEAANLISAHRHRWPERHVVRLLDRVKHRTKMHGKAAMAVARHLAEASYWMLSKQEVYQEPPIKRHALSSTRG

SEQ ID NO: 234695 - protein, 353 aa, unidentified
MKTETTNWQDIQLYAGIDLHKNKWVVTVRSGSNHLTTFVAPPLKEKLFYTFQNRWPAAKINAVYEAGYFGYHLADYLNSKGIETIIVAPHRIPTPRGSFVKTDKIDSRKLALELSKGSLESIYLRSPEELYNRNLIRKRIQLIKRKRQIIVRIKADIIFYDIKFDFQVREYLSQKVIKKIHEFKYENDFLSCLFKQSVDEYEVVNANLTMINKWMEEVCSSANLKNNFELLCSVPGIGKLAASSLLLEIGNIDRFTSKAKFVSYLGLTPSEYSSGDKVRIGSLSGMGHNYLRSLLVECAWQAVRFDPVLLKKFYSLSEKKGKLRAIMAVARKLATRIHYVLKQSQPYVVGVIK

SEQ ID NO: 234696 - protein, 452 aa, unidentified
MTEKDEISMKIVNPRAAGVDIGSRSHWVAIGQGPNDFKEFGVYNEDLYSIAQWLRENEIKTVAMESTGTYWQSLYAVLMAEGFQVILCNGKFTKNIKGKKTDILDCQWIQKLHSIGLLSGSFLPDEETEQLRTFCRHRSNLLASAAAASKKMQKYLRLLNLRLDVVVNDVCGLTGMAIIKAICNGEKNPEKLAELRHHNCKKSKEEIAKALHSNGRKDYLFALKQELEMYEVFQSKIVQCDIEIENMLAQTIDNDDDKKQHHIEGKPYKKINKNTPKNIDLNLMAYQYFEGVDLMAIEGMSYSTVLALISEVGVDGIKKFPTAKHFASWLRLAPNNKISGGKVLSSKIPKGSNRLKISLRNAANAIGNLKDSTPLSDFFKRINFRKGRVSAISATARKLAVIIWNMVVKGVPYHNPEEYLFRDQKKKLGLLKRIQKQITKFELESTDFQFSN

SEQ ID NO: 234697 - protein, 481 aa, unidentified
MQLPYPVRIRGLDLGITSAHRGVVVDGEGRVRARRSAVPTPESLTALEAAALRGAEPGARLVVVVEPTGPAWLPVAVFFGRRGHLVVRVSSAKAADLRRFLSRHAKTNGIDAETLARLPLVAPESVEPVELPGAARASLDRRVRAVARLTAQIGERKTRIRALAAALMPTVDHALGKPVTRADLAVLARWGDPRALRAVSLRRLTAVVAKASGGHSGEEKARAFHAAAEQALRLWAGDSAVALADLAAELATEIRLLHAAEIERAEHETVRDAALAAVDPDGLAASLPGVGPVGASVLTAVMGRPGRFPNAAAFKQFTGLAPRANQTGDTDRKGQPMSKAGPRGLRSVLIRCADAARKQDPQLAAVYHQQMTTRNAPHLKALCVVAARLAERAWVTLADAQPYQLRDVDGTPVTAEEAKQVIAERYAVPPEVRRRRRSGRQKGKIPQQPSAGGQSRPAAGHEATFPAPTVPHRRPRVKQPT

SEQ ID NO: 234698 - protein, 357 aa, unidentified
MRLKGGAVQTIYIGVDFHARQQTICYLTTDSGEILLHQLKHEDKAAVRSFYAQFSGQVIVGLEASGYSPWFERMLEELGCEVWLGHATEIRRRARGRHKNDRRDAELILDLMLHDEFPRLYRPPLQSREILRMLRYRQKLIKIRTIGKNSLQALALQAGLAKGPHLFTKAGLQELRHVTMSSAMQWQRKQWLQLLEPLNERLLETMLWLKQQSQADERISRLRTHPGVGLLTALCVVHSLEPVSRFANTRKVAAYAGLDPLERSSAERQRFLGISKGGSRVLRFLLVEAAHTAIRKDAELKRFYQRLAERHGRPKAKVAVSRKLLIRTYIMLRDEIDYAEFQRRAVAARSAPPAHGH

SEQ ID NO: 234699 - protein, 451 aa, unidentified
MREPQEIPDAEHEQITERVAAIDVAKDAGKVCTRASRDGGPGRRVSKVWDVKATTRAVLELADHLVCQQIEKVTIESTSDYWRIWFYLLQARGLNVQLVNARDVKNAPGRAKTDKLDAVWLAKLTEKGLLRPSFVPPREIRVLRDYTRMRVDWARDRTRCWQRLEKLLEDSLIKVSSVASTLDTLSARDMLEALIAGERNPRVLADLARGRMRSKNAALIEALTGQFDDHHAELARMLLDQIDALTRQLDTLTTGIEHLIAAMPAASAPGEEPPTNGDGDHTDQRTPAGLSAPERLAEIPGIAPLGAQLILAEIGLDMTRFPTAGHLVSWAKLCPRTIQSGPKNRSGRTGKGNPYLKGLLGAAAAAAAKTGTFLGERYRRIVKRRGKLKALVAVARSILVAIWHLLADPTARFHDLGAGYYTSRTDQGQKARNHIRQLEALGFTVTLTRAA

SEQ ID NO: 234700 - protein, 354 aa, unidentified
MTGTPIVAETYQFVVGVDTHAATHHYAIIDTRTGGLIEDREFPTHPKGLLRAAAWITRRTGEPTSGDLDQVLISIEGTRSYGAQITALLAQAGYRVVDAPSPKRERGAGKNDHIDAVVAARGSLHKQLDQLADARGGDTSATLQVLLTARDAMTSERTRAVNALNALLRTHELGLDARKKVNRPTMRTIAAWRARKSDTLAQATARAETIRLATRILALDVEVDANEQALTKLVEATHPTLLEMPGVGPTTAAAVLAAWSHPGRVRNEAAFAKLGGVSPLEVASGNSHEHRLNRTGDRQLNSALHTIANSRMRHDQRTRNYVARRTTEGLSKHRTRRCLKRYIAREIYRHLAAT

SEQ ID NO: 234701 - protein, 355 aa, unidentified
MRQEKYIGMDVHQATISVAVLDSRGKLIMESILETKADTILEFLQGLNGSLSVTFEEGTSAAWLHDLLKPHVSRLVVCDPRKNALLKDGSKSDRIDARKLAELLRGNQLTSVYHGEHGMRTIKELGRSYLTITKDLTRVMSRIKALYRSWAIPCSGTSVYAPRHRAEWLGKIPEPGVRLRAERFYQQLDLLQPVRQQARRDLLTESRKHHAVKLLRQIPSIGPIRAALLVAQLQTPHRFRTKRQLWAYSGFALETHDSGEYRYVRGKLQRNRERMTVRGLSNNHNPDVKNLFKGAAISASTHPGPLYDFYIALLAKGMRPTMARLTLARKIASITLTIWKKGVDFDATQLRRQEA

SEQ ID NO: 234702 - protein, 394 aa, unidentified
MLSKDASISENTHAVSVAAERSEAATETAADDRSKPLSSGLAENVGEPDRRRFSGSSPNSRQSGRNTRSPSSYLQGRDTSKMEFASVIGIDVSKDKLDVADWPASFAECFANDETGHSQLLKKLPKPGSCLVVLEATGRYEKPVVLELLNAGHVVSVVNPRQVRDFAKALGILAKTDRIDARVIARFGEQVRPRTTEKTHEKQDELDQLVTRRRQLIALRTGEENRIGTATSKIVRRSLQKNIKHLSREIATIVQEIARLVKSDDEWKGKSEILKSVVGVGEVTATTLIAELPELGKLNRQKISALVGIAPFNRDSGQFRGRRMIYGGRRSVRSVLYMAVLSARQHNPVIRAFAERLKAKGKLPKVVLVACMRKLLVMLNTMIKTNTHWENKIA

SEQ ID NO: 234703 - protein, 316 aa, unidentified
MTMNDYPFSQFVGVDVSKATLDFVLAEGEKSVSIKNTEKQIVSKLIEVITDRQSTIVVLEATGGYEGRLVALLHQHNIAVAVVNPRRVRDFAKGIGLDAKTDPIDAKALVLYGQVVKPAAQMAKSVEDKKLKALVNRRKQLLGLVTQEKNRLQQTSDLEIQDYIQQSVEALEKQIETINQRLAKCVKADTKNARKIEIFDSIKGLGPVIASTFLAELPELGELNRGEIAKLVGVAPMNRDSGTMSGHRRTMGGRSYVRRVLYMATLVATQHNPRIKAFYQRLLSRGKVKKVALVAAMRKLLTIVNTLIKNNVLWQD

SEQ ID NO: 234704 - protein, 417 aa, unidentified
MKEEFTFYVGVDWGVEFHQACILDAHGEKICQRRIEHSGPGMLEFCDFLQALTNGEASALAVAIEVPRGPIVEALLEHNYAVFSINPKQLDRFRDRHTVAGAKDDRRDALVAADSLRTDQHCFRRVRPEHPDVIRLRELSRTEETLGIDLRRCVNQLSQLLLRYFPQLLRLCSTPDEPWLWALLELAPTPQQAAKLTEKRLKQLLAKYRIRRWTAEKVGEILTAPPLPLAAGSAEAISEHALLLLPQLRLLHLQRKQVADRTQQLLDQMATSTNDFPMSQEHRDIPVLLSLPGVGRIITATMLAEGSHILSLRDYHALRAHAGIAPVTKQSGKSRQVLMRYRCNQRLRNAFYHWARTSIQHDPRSKQHYARLRQVGHDHGRALRGVADRLLAMLIAMLKSGQTYDPNRRSTANLTAA

SEQ ID NO: 234705 - protein, 357 aa, unidentified
MAVMIGVDPHKGSHTAAAIGPAEEPLGRRQVRACPDQARQLLAWAAVWPQRTWAVEGATGLGRLLAQQLAAAGERVLDIQPKLAARVRLLEAGDVNKNDPNDARSVAVAALRSRVWRQVAADGHAAVLKILAKRHRDLARSRNQAACRLHAVLCGLVPGGFAGEITAGLAARLLDQLTPAGAVAAARCDLATELLADLRRLDHQRRECAKKLAATVRASGTSLTGLFGVGPVIAGQVIGDVADVTRFPGRSHFAACNGTAPVEVSSGGRKVYRLSLRGNRRLNHAIHMAAITQIRHTHSDGRACYERKIAAGKTHKEALRCLKRRISDAIYARLRADARQAAAAAAKDPGRATGERL

SEQ ID NO: 234706 - protein, 345 aa, unidentified
MELHTIGIDLGKTVFHLVGLNRHGEVVVRKKFSRTQLLRFTANVSVVLIGMEACGGAHFLGRALREQGHEVRLIPAQYVKPYVKTNKNDYIDAEAIAEAVARPTMRFVPIKTDEQLDLQSLHRVRERWVMRRTAVLNQMRGLLLERGITVRKGRSHIEAALPGILEDADAKLSGALRLLLAQLKIELDELGMRIQEADEVIEQTVQQHDACQRLVAIPGIGPVTATAVIAAIGNGAAFHKGREFAAWLGLTPREHSTGGQQRLLGISKRGNPYLRRLFVQCARAVLQQRTKQSSGLSTWLAQLTSRTHRNVAAVALANKLARIAWAVLAKNESYRPVVSAHTAAA

SEQ ID NO: 234707 - protein, 342 aa, unidentified
MGSLAVFIGIDYHQDSVQACVMDSEGKVLGNQSMPSNPQCVQNYLKNWIVQDLQVERVAVEMCCGAATFVDTLKAETQWNVQLAHAGFVSRMKQTRQKSDHGDAQVLADLARVDYVPQVWLAPEEIRQLRHLVRLRDQHVKYRTAAKLRIRALLREQRLRSPEKPWTTAWLFWLKNTDEIAAPTHFILMDHLETIEYHTKKIQKVEKFMTQVTQDDLVTQKLLRQPGVGPVTAWTLRAEIGDFDRFANGKQLANFFGVAPCNVSSGEKQSTSGLIRSGNRILRKTLIEAAHRLVRHEARWKTFYEHMVEEKKKPKCVVVAAIANRWMRCLFHEMKTPLTTAA

SEQ ID NO: 234708 - protein, 354 aa, unidentified
MKKARRELQTGDRVFVGIDMHKLKWHVTARTAEFELFSGSIPGKWEALQRILERYQGHRINTVYEAGYFGFWLHDELIEYGAECIVTPPSLIPQEYGNKVKTDRRDSRKLAHFLAKGMLKRVWVPTEKERYHRQVIRRRRQLIGDRIRAQSRIKAELQLHGLNLSAPHGKWTKIFLENLGRIRFNNRWMQESFKRLLEQYHFLDEQINKQTSLLHELSETELYKQRVEILMTAPGIGMIAAMELLLELQDVTRFQRADQLAAYVGLTPSQYSSADKIRMGRITCVGKNSLRAMLVQASWALIRKDGVMREKYDRLKSRSGGKRAIVAVARTLLIRMRRMLLDNNPYVVGLVATN

SEQ ID NO: 234709 - protein, 337 aa, unidentified
MEDTIYDHYIAIDWAAINMAIARMTKKSNKITTIDVPSDITELQFYLKNLKGTKILAIEETTTSQWLYTELKDYVNNILICDPCRNSLLKEGPKTDKIDAAKLVQLLKAGLMKEVFHSTDKFIYLRITVSGYEDLIKAGVRLKNQRYSLLRICGKNGYEKKDIKLASRDEQYVLECLGRQIQNYEEEKKGYKKEFERLARKHPEIRHQKSLPGIGTINAVKIVSRVVSPYRFSDKGHYLSYVGLVKLERISGGRSYGKNNPRYCRQLKSVYKSGVLAAIGGNNPINDYYEYLIKEKRYSEHNARNKACRRLAILSLGVFKSGKKYQLYRRNHVKGSN

SEQ ID NO: 234710 - protein, 457 aa, unidentified
MSKRRKRAQSKSFNLQSLPKQLQHINLNAAGIDIGSERHMVAVPEGRDEVAVREFGAFTADLISLADWLQQCGVTTVAMESTGVYWIPLFELLERRGFEVKLVDARHVKNVTGRKSDILDCQWIQQLHTYGLLAGAFRPADQLCVLRSYLRQREMLTQTASMHIQHMQKALQQMNLLLHNVVSDITGVTGMKIIKAILAGERDPQVLASHRDNKCHHDSATIAKSLVGNYRAEHIFALRQAVDLYEIYQTKIGDCDEAIVTQVSTQPDVTDEPPPPEQKRTSARDRQRGGVNVRDLLFQKSGVDLFAIPGLAADTLLVLSSEVGFDLSPWKTVKHFSSWLSLCPGTKISGGKVLSRRVKRNPNRAAQAFRMAAATLSRSKSALGAFYRRIKARSGGKQAITATAHKIARIYYALLTQGTTYVELGQQAYEQKYEARRLKHLMAQAKSLGFQLVPSQT

SEQ ID NO: 234711 - protein, 443 aa, unidentified
MTEPVSGSVPEPDFAAFVGIDWADQKHCWKLVVAGTQVTEKGELKQTPEELASWAAALHHRFGGCAVAVALEQSSGALVYQLSQYPHLWLYPVHPATAAHYRQAFYPSGSKSDPADAGLLLELVVHHRDRLRRLAPDTPETRLLRMLVEQRRQVVDEKTRWNNRLKAALKMYFPQVLDWVDIDTILGCDLLERWPTLQQLQHAHPGTLRKFFREHNCRSESLITERIAAIYQATPAVKDAALLEGESAMAATCVAQIRTLLASIAKLDHQIEPLASQHPEASLFAELPGAGAALQPRLIVAFGTQRDRYANAAELQAYSGIAPITESSGHSRWVHVRWACPTFLRQTFHEFAACSISRSEWARVFYDTKIAAGKSHHAAVRALAYKWIRVLFRCWKDGRPYDERTYLQTLADRNSPLNWGAGASTKPVWKTVGGFKKLSTENS

SEQ ID NO: 234712 - protein, 355 aa, unidentified
MSSEKYIGMDVHQATISVAVRDPQGKLLMESILETKASTILEFLGGLRGTLFVTFEEGTWAAWLYDLLKPHVSEVLVCNPRKIPLLKQGNKSDKIDARKLAERLRLNDLKPVYHGESGVRMLRELARSYLTIVKDLTRVMSRVKAVYRSWAIPCAGRDVYYRRHRSQWLDKIQEPGVRRRAVQLYQQLDMLQQLRQQARRELLAESRKHTITAKLRQIPSLGPIRSALAVALIQTPNRFRTKRQLWTYSGLGLETRDSGEYQFVQGQPRRRKKQVFVRGLNRNYNHDLKGLFKAAAVRASVQPGPFQDFYQRSLSKGIKPTMVRLTLARKIAAVTLTLWKKGENFDAEKLKSQAA

SEQ ID NO: 234713 - protein, 316 aa, unidentified
MTQTSITTAGIDTSKAKLDIAVHGRTERWQLANTLSGWRRLAANLAEIGVARIGIEATGGYERGVVEVLRAAGFTVLVLQPIQVKAFARVHLRRAKNDALDAVLIAACAAAMDPPRIAPDPRMSDLAGYLTFLEQIEEDIARFKTRLEHIDEPGLRRIVNSDIARLKARRVAQIRDIANRLRGHDDLAVRLDLVLSIPGIGERTALALIIRMPELGQISREESALAGLAPFDDDSGKHKGQRHIAGGRGRLRRSLYAAALPAAFRWNKALISLYARLIACGKAHKAALIACARKLLIYANTVVQRGTPWIERASAL

SEQ ID NO: 234714 - protein, 455 aa, unidentified
MSQQAAAPLSLPPHLQHLNLNAAAIDIGSTSHFVAVPEGRDTVSVREFAAFTADLHCLADWLTNCGVDTVVMESTGVYWIPVFELLEARGFQVLLVDARHVKNVSGRKSDVLDCQWLQQLHTYGLLRAAFRPTEQIVVLRSYLRQRAMLIQYAARHIQHMQKALQQMNLLLHHVVADITGLTGMTIIRAILAGERDPQVLAQARDRRCKSSEAVIAKSLEGSYREDHLFALAQAVSLFDTYQAQIAACDEHIELYISSFEHVTEECPPAAAKKRRAPRRNQLPFDARTHLYQMTGVDLTRLDGIEATMATTLLSELGIDMTRWPSAKHFASWLGLCPGTKVSGGRRLSSKTKPSANRAAAALRMAASTLYHSQSALGAFHRRMATRLGKAQAVTATAHKLARLVYSLLKNGSAYVDAGQDVYERQYKERAVRNLGHRAKALGFELVPILLEPEVT

SEQ ID NO: 234715 - protein, 415 aa, unidentified
MKAILDICCGLDVHKETVVACLLKGNLDSEPEAETRTYSTLIPNLEQLKTWLIEENCRHVAMESTGVYWHPVFNVLESAFDGTIELMVSNARHMKNVPGKKTDVKDAEWIAGLLRAGLLRGSFIPSQSIRRLRDLTRYRKSMVEEISSQKNRIEKHLQSCGFKLSTFLTDIFGVSGRGIVDHLAKFGHISPEEVDPLVKKSARAKLNDIKLAVNGNMDVLQRDFLKMLLKHLDDNREHLQIIDQKIDQELLKYQRQFEQLDSIPGINKTAAAAILAEIGTDMAQFKNAENICSWAGLTPGSYESAGKKKSSRTLNGNTYIKRILCEAAWTITRMRNTYLSQWYWKIKQRRGGKRAIVALARKLLVIIYNMLKNNTDYDENCFELAEAKQEKYKIKKIMAEARKLGLEVIELPKIA

SEQ ID NO: 234716 - protein, 381 aa, unidentified
MRNVCGLDVHKDNVFVCIDKENGEKIQFKTGILTKELDVLRDTLVANDVTEIAMESTSVYWMPIWRVLENDFKLYLVNPYAIKQLPGRKSDIKDAEWIATCLRKELIRGSYVPNSEIQQLRQYNRRIFDINKQSVYIQNKIDAALQRCNIRIGNYISNVRAKSYCQIVDMLSEGKTSPELLIVKVHKRTVNKWGRETILAALEGVVNKTDCRILKQLKEELDMLRRHKAECLVMLREICMENYKEQLLDIQTIPGIGEQGAMQIIAETGVDMKAFMTAAMLVGWAGLKPRNDESNGKFKSRSTTHGNKYLRRILIECAWGASRTQGCFFNKFSYHQTMVRKKNRQKVQVAIARKILVVIWNILEKGVVYNDVLEKNKTKDK

SEQ ID NO: 234717 - protein, 427 aa, unidentified
MSYRIAAIDVHKRMLAVVVTDVEGTGEYQFERRKFGATPGELHVLAQWLVQLEVEEVVMESTAQYWRPVWGTLELFWRPARQQREGANQKSGTLHLCQAKSNHGPRGRKNDFLDAERMVKRLVAEELVLSFVPDEEQRLLRTVTRRKYQLTRAKIGFKNQLESLLEQGHIKLSSLVSDLLGVSARRMLKALAEGETDAGVLAAMADHKLRATPEQLRDALGASSHLSGTFRRLLKLSLEELQLIEAHIEQLGREAMELLKGHEDVIQRVAEVPGFGPDCAVQMIAEVGLEAAKFLAAKNLSSWVGVCPGNEESAGESQSTRSPKGNRHMRRLLNQAAQSAVKVKGSIFEVTFHRLESGLGYKQAIWAIAHRLCRLLWLILHKGVRYEERGPAVSAKSKRTRTARMIRELKKLGYRVEGGPLPTVTRA

SEQ ID NO: 234718 - protein, 371 aa, unidentified
MTNEQSTIYVGIDVSKDKLAVAIADGGYRDEVLSLGTFENAPASVDKLLKRLTGRASPVSVCYEAGPTGYGLYRQVRAFGFECCVVAPSLIPVRAGERVKTDRLDAMRLARLLRAGELTPIWVPDKTHEAMRDLVRARESAAEDQRHKRQLVSAFMLRHGRVYHRTKPWTMRYRRWLQSQSFDHPAHQIALQEMLQAERNATERLDRLTGHIEALVPEWDLAPAVNALQALRGVALISAVTFMAEIGDVRRFETPVKLMAYLGLVPSEYSTGKTTRRGGITRAGNARVRHKLIEGAWTYRLQARPGARKLYILQEQPAEVQDIAWKAQSRLTARYRKLSQRGKKSTVVTTAIAREMAAFMWDIARRTMPAS

SEQ ID NO: 234719 - protein, 330 aa, unidentified
MYLGIDTHKRYSQVAVVDGDGNLQDEIRLPNDRLDELAEQYSGGEAAIEASGNYRPIYEMLDEHLDVTLVNPSKNRIIADATVKTDRVDAKRLAQMLRADMLAESYVPPDEIRTLRDLVRTRKSLVESRTAEKNRVRAVLTRTDNTYDSELFGPTGREFLAELSLSDADRTIIEAHLSVIDAYDEQIEAVEEKIEQEVLESPAAQRLLSIPGVGQYTAAVIVAEVGEIDRFDCDKQLVSYAGLDPMVHQSGDKEIRGSISKEGSAPLRWALVQCANIAVRCDDYFGNFYTRLKQRKNHQITIVATARKMLVSIFYMLTRKEMYDPPGVSA

SEQ ID NO: 234720 - protein, 424 aa, unidentified
MNIVYPICCGVDVHKRFFVATLITTQSGIDAKYEKRRFSTFNKEILKFKSWLLENNCLNVCMESTGKYWVPVSNLLEDSINVTIANPKWVRSVKGHKDDSKDSKWIGDLFRIGLVRGSFIPSKAIRILREYMRYRFKLVSAKSSEKNRYQNVFTVCNVALDAVVSDMFGKSASSITDYIIHSDTFDPEHCVSLLQKSLKKKADEVVESIEGFQMTDSQKKRAKIVKEHYDYLLEHIKKLDAVVDELVKPFESAVTLLSTIPGIKRDSAITIISEIGTDMSQFTSSKRLCSWAGLTPGNNESAGKKKSVKITRAGVYLKPALVQVAHAAVKDNKNPYYRIKFERIAKRRGKKRAIIAIARMILTAVYHMLTTGEVWNPVDLKQIDMPPELREKEIQKSLHRAAKLLVSHGIIAPDIIRFPKVASG

SEQ ID NO: 234721 - protein, 353 aa, unidentified
MERYIGLDVHSQSCTLAVVGPTGKRIGQQVIETNGAALKQAMRGVAGAKHVCLEEGTQSAWIYELLEEEVDELVVTIPEKHLGPKDDARDAWQLAESLRTGAIKRRVYKGLGPYSELRAAVRSYGQLRTDVRRVKSRLKAIYRSRGLLPGNDVLQETKHREWDRQLPPAQRRSAEMLRAQVESLTELWAAAEERLHEASKPHQVIRTLATAPAIGPIRAAEIVALVVTPHRFRTKRQFWAYCGLAVVMRSSADWVRDRHGKWIRAQTFQTRGLNRNRQPLLKEVFKGAAHQVATQMTRHPLHLDYRRLVDGGMKPNLAQLTIARRLAAAVLAMWKHEEVYDPERHRSHITSQA

SEQ ID NO: 234722 - protein, 387 aa, unidentified
MKKIYLNVACAGMDVHYKFSNVTFRDPSGKVVRRQRLDHRHREELQERLNRWPPGIPVVMEASFGWGWLSDLLEEAGQEVQLSNCYKVEQMRKARGWVKTNKKDADLISLLPFEQSDWWKVWRAPAEVRNRREQMRFRGDLVGLQTMVKNRIHAIFHRHGIFHEFSDLFGGKGRKFLAELCLYNPTDLSYQGLLALRGQVKLLDHLRRQLADVERILHKQLVKTPLIMRLKTIPGIGLILAHVLAAEIGMIERFRNQKALASYSLLAPRSNDTGQDDPRHSPLGRHLGLRGNRTLKWAFIEAAHGAVRSGGRWRAIFDRVTNGGKKDRNRGYIKVARELVKVVYAVWSKGVDYQSVPPARPGSNKNKKKSRSETGQLLHPMVHALTA

SEQ ID NO: 234723 - protein, 346 aa, unidentified
MDQIIRIGMDTSKHIFQLHGVDAAEQPVLRKKLRRGQVVAFFAKLPPIVVGIEACGAAHYWARVLAELGHQVKLMAPQLTKPYVKRNKNDGRDAEGLCEAMSRPTMRFVPVKTPEQQAALMLIGVRERLVARRTQLSNAIRGYAAEFGLTAAKGLDKIEPLLAEIAADEALPELARELFAMHGKEYAHLQAELKKIEIRLMAWHRAHADSRRLAEIPTIGPIGATALVIKAPDPHLFPSGRHFAAWIGLTPKDHSTAGKLRLGKITRAGDEMLRSLLVVGATAVIQQARRGRGRPSPWLLALLARKSPKLAAVALANKTARIAWKLMVTGESYHAERMPMVSANAA

SEQ ID NO: 234724 - protein, 319 aa, unidentified
MHCIGVDVSKQELVTFDGTKEQVFPNTRGLAEFGRFVKRSKDALVVFEPTSTYSRRLEALCRTQRIPCCQLNPRVVPHLRLVGKGRSKTDSTDAELLYRYGIERGYSEVALLENDALAESIRARLACYRVAQKARVAYQNVLEALSQDPATSRDLLTELEAEISELKKKEKQYLDAAQRLAEGEGEPSQRLNALLSILGVGPITALTLLALFRKYPDANRSQLVALAGFDPIQVQSGTSVHGKSRISKRGNREVRKRLFEATLSAARYNPTIRSIYQRLKEAGKPEKVARIAAARKLLLIAHAVYRSGDTYRDPNQKEG

SEQ ID NO: 234725 - protein, 407 aa, unidentified
MELPAIFACVVGLDVHQAKISACALIEQPDGTLTVEHRQFGAFKRDRRALAEWVRTLGPDVVVMESTGIYWKSPYAALERVGIAAWVVNARHVKNVPGRKTDVADAQWLAILARAGLLRASFIPPAEIRHLRLIARQRQKLGGMLASEKNRLHKLLTDAGIRLNVLVSDIHGQAGRAMVKALIEGQPIPEILALTGRLRASREELFEALQPEELSEAHRFVLSEIMAPIEELEARMGRFEQTLLAGLAAWEPPLVLLQTLPGVDRIGAAMLLVEIGTDMASFASAEKLASWVGICPGNNESAGKRKSGKTRKGNAWVRRLLCEFAQAASRSRCALKEKFKALSIRKGHKKAIVALAHKMLRIIFAMLKNHTPYQDRAVDYEELLVQRNAPRWIKMLLKHGFISPAST

SEQ ID NO: 234726 - protein, 370 aa, unidentified
MLDTTTFIGLDVHARSIKAVSLDVMTGEVRAATFGYDAGAVAEWVRSVDPRARCVYESGVTGFDLQKRLSGLGVDCVVGAVSKMIKPSADRRRKNDRNDAEFLARMLSVGNVVEVWVPDDECEAARDLTRALEDARDDLSRAKQRLSKFLLRHGLAFDERTPTGRRKGNWTRAHWSWIESIRFAEGADNDVLAYYVDAVRRAAEEKARLEGLVEAEARKPRWRRRVDSLRCLKGVDTATAADLVFEAGEFSRFRNARSFAAWVGLTPSEHSSGESDRRGAITKAGNKHLRKALVEAAWHYLTCSGRPKDLAKGQAPDRGARRHAAKGVRRLVERREALLARGVHGNKANVATARELACWVWAVGLMAEEA

SEQ ID NO: 234727 - protein, 359 aa, unidentified
MTATLTWVGLDVHARSTHAAAIARESGELRRARFGAGSEELVAWLRALPQPVHACYEAGPTGYALYRVCSEAGIRIDVVAPTKTPRAAADRIKSDRKDAELLVRCLLAGSLSPVCVPSAQVEAARDLARAREQVRADLARVRHRVSKLLLRYGRVYDAGGTWTQAHRRWLSAQRFPESASELAYADYLAAVDGLVARRAALDERLSRIAREGEWWPTVARLRCFRGIETLSALALTLEVGDFARFRRSAELAAWLGLVPSLHQSGETERRGSITKTGSGYARRLLVEAAWHYRREPRLGATLAARHQGQPDHVLQIAWRAQHRLYRLHQRLRQRGKPGNVCVVAVARELSCFLWAAAIA

SEQ ID NO: 234728 - protein, 314 aa, unidentified
MKKDQSLLSCVVGVDVSKAKLDVSFDNEVAVVSNTRKAIVDELIARIDCESTMVVMEATGGYEEQLVTLLHEHNVALAVVNPRRVRDFAKGIGRDAKTDPIDAGVIAFYGKVVQPAPQLAKSDHEKKLNGLVERRRQLLDLIDQENNRLQQTSDQEIKDFIRKSLESLKKQLKSIDGRLSECVKQDQHNQRKIEIMNSVKGVGLVTISTFLAKLPELGELNRAKIAKLVGVAPINNDTGQRSGKRQTFGGRSYVRRVLYMATLVATRFNPQIKSFYQRLLAKGKEKKVALVAAMRKLLTILNTLIKKDELWQAT

SEQ ID NO: 234729 - protein, 416 aa, unidentified
MFAVGVDVANGRSMVAVLDGMRNMVAKPFEVVHTAQGFAALVEKLRQLDGEVRIVMEHTGRYYESFAMTMHRAGFFVSAVNPLLIKNYQGSINVRKVKTDKADAQKIAQFALDKWTILPHYTPMDTIRYNLKTLHRQFQLASKTKTALSNNLIALLEQSYPGANRYFDSPVRTDGSQKWVDFVDTFWHVDCVARSSEHAFVERYRKWCKRHGYVFSEQKAIELHADARQKIPLVPKSDTCKLLVREAVSQLNAVSRTVETYRAEMDRLASQLPEYETVMGMTGVGKSMGPQLMAEIGDLRCFAHQKSLVGFAGTDPIKEESGDKVSQSAPSSKRGSPYLRKTLFVIMSILLQLQPQEDPVYQFLDKKRSEGKPYYVYMTAGGTKFLRVYYGKVRDCLKAKGLWEVPASASQEVNPG

SEQ ID NO: 234730 - protein, 407 aa, unidentified
MEVIYERCCGMDVHKDEIVACLMCGSRKEIRSYSTVTKSLLELVDWLKNEGCQKVAMESTGVYWKPIYNLLEVSEISTMVVNAQHIKTVPGRKTDVKDAEWIADLLRHGLMRGSFIPSREQRELKELVRYRRSIIEERARELNRIQNVLEGANIKLGSVVSEIDGVSSREMLNAIVSGSTDVKAMAAMSRGTMKKKTAELEQALTGLIGSHQKMMLAEMLKHIDSLQETIARLDDEVKQRMRPFEEEVVLLDEISGIGERCAQAIIAEIGVDMNVFPSANHLASWAGMCPGNNESAGKRKSGKTRKGSKVLRSYLIEAANSLSHSKKSYLSTKFHKIAARRGKKRAAVAVGHAILVICYHILKNKTHYHDLGFDYYEKIQKQDIAKRTVKRLEALGYKVTLEDTTAA

SEQ ID NO: 234731 - protein, 447 aa, unidentified
MGARSTDPTLTENGDGTGPAGILYVGIDVGRRSHMVTGIPRLRMEDGSWERVAARRFASSGGGYRELTAWLATSGLDPKQIQIGLEPTGGWYSQTVAAWLVRRGYQISWLQNAALHERRRLAIGKQTKTDALDARLIARLLYERDCLGSQRGFLHRGPRSADALRLLVRNRSKLVEQQTRYRLQLTAIEDVLFPELKEFFEASITGPAVRSLLEAFGTPQQVAAALPDDLYEAVVRKGRARRHAGRMAELQMLAANSAGLVDEIAPILAAQDWLLHQLRLVEGQIANVEEAIANALESWPLPERVIFNSLPGMTALRQAVLLSVMGDLASFQNDRQLRKLLGWYPEAKESGTSVSKHRLGQSGNRLARREIWLWVMFLISPRAPATPFRDYYERLRSRGVAGRTAIGHVAGKLISVLFHCVRSGHLYDPGRHARELGRGDVHPGLGV

SEQ ID NO: 234732 - protein, 471 aa, unidentified
MGKGSGNGMTRGDRRRNARRERLRGLLPRDGAVIGIDLAEDKQALAVVDHDVRVLARKTVKVKAFRLGEALDWAVAQARAKGFTSVTVACEPTGPRWMQVQRLCAERGLPLVCIQPLVSHIAREQQDFTTHKTDESDCVLIARLAIELHCYIPEELDETWAYLRHLGRRRAQLITAATAAVQRIGDFLSVAWPAVTETCAQPCGSNTWLAAMQLVTSQCGGQPARLAAMGEQAFTAAVRAAVRDWGGQKAHGPISARVFAALTDTEGAVAWSRRGLLRRVADELGDLRRTRAQLRATEADMVAVLAELGLSRLADIPALTAVGAAAILAETGDPRRYDGSSSLVKHAGMSPSDNASGAFAGQAHISRRGRPGLRLTVWRAVWPMLQYNPVMAAKYHAMTRAADDAAADAGPQHGTAAHAAARARRAKARVACAASLLRWIYCMVVHNTSWDPAAAGAASCHDAPQDQAEAA

SEQ ID NO: 234733 - protein, 401 aa, unidentified
MTPVVGVDVSKSFSVAFSYLKRNEPLGGSLTFQHTNEGFTEFINLLKKTEVAANQKPSIILEPTGHYHLGIMDLLQKNNYNVVLINPLVSKYERYSTLRRVKTDIIDAQKLGEIYYKLELQPVSYQTDELFRIRFSTRTLSMISKNISLLKTRTSGILDIIFPYYKDAFYDSYCKYSIELLKSFPSAKSVLNTDKEEILDRLCFIYNIKDRQAVRVNNKLNQLLEAALKCPIEQDVYDSHVHSLLTLLELIEQYQGQYSSLQKHISESICHRKDYNILLSIPGIGEILAATILSEIGDVNNFDSAKKLVAFAGIEPSVYQSGKFKSSQNKISKRGSHYLRRSLYIAVSSQLRKSSRCDEIRDYYYKKKTEGKHHNVAMIACSNKLLRIIYALLTKQEYYYQ

SEQ ID NO: 234734 - protein, 347 aa, unidentified
MDHFAGLDVSVKETSICIVDDAGKIVREVKVASEPEALLAVLKNLAYHFKRIGLEAGPLSQWLFSVLAEAGLPVICVETRHMQAVLKAQINKTDRNDARGIAQMMRAGLYRPVHVKTIRSQKLRMLLTHRKLLQSKAIAIENDLRGTLRNFGLKVGMVGKVKFEARIRELVENLPDLAVLVEPMLIVRRTLREQIVILHRRLLAIVRDDEVCRRLMTTPGVGPVVALTYRATVDVPARFRKSKAVGAVFGLTCAKYQSGEVDRNGRISRCGDEMMRVMLYEAAQSMLRSKKWSWLKAWAMQIARRRGMKKAIVALARRLAVIMHRIWVDGTEFRWTREQATAAAAAA

SEQ ID NO: 234735 - protein, 312 aa, unidentified
MIAQPVYVGADIAKESIDLFCAELAVPRTITNDATGYRLLLKSLARAGATVRVVCEATGPYHKAFVAALHHAQIPVSVVNPRLPRDFARARNRLAKTDAIDAQLLADYGRTMQPALTPVPDAQMVLLDDLVTRRGQLVADRAAERVRLDQTTRPELLASLRLHLRHLDGQIEKLWTLIIELIQATPALRTKVERLVQVQGVGELTASALLAALPELGTLSPNEVTALAGLAPFNRDSGAFRGTRSIHGGRTEVRKALYMAALCATRANPILKAVYQHLRAKGKAHKVALVAVMRKLLIHLNRILKPLTPSPV

SEQ ID NO: 234736 - protein, 385 aa, unidentified
MVIIGVDPHKRIHVASVVEPATNHQVAALQIEASLAGYRRLLRWADKFGERSWAVENTRGLGCHLAQWLLARGEAVEDVPSTATARVRELSRGGRRKNDVIDAAAAASVAALHGDATPVLAEDITTVLGLLDERRANVTTQRTRLINQLHAVFRDVLPGGAPKGLTAAIASALLAGIRPVGPVEAARKQLARDLVAEIRDADRRLKLLTAQIAQTVAATGSRLMEVDGVGPVVSGRLLARTHRMSRFATAAAFASYAGVAPVEVSSADRLRHRLSRGGDRQLNLALHIVAVNQIRMPGSAGRAYYDTKIAAGKTEKEARRCLKRRLADHIWRLMIKDEHGAAGPGGQQGATMQSSAAGSTPTTSSSDKSLPEPATPDSTTGQTAA

SEQ ID NO: 234737 - protein, 339 aa, unidentified
MMDVTTGGIDLAKNLFQLHGVDERGRVVLSRRVKRSQLAEAVASLPPCVIGMEACASAHHWGRAFEKFGHTVKLMSPKYVKPYVKTNKNDGRDAEAICEAVSRPTMRVVSIKTVEQADLQALHRTRSLLVKHRTAVINQIRGLLAEYGLVITPSPEKVRPALVRFLDDAASGLTACARDTFAELYEQLRDLESRLARVTERVERVFRAHPMCRKLAAVPGIGPLTATALLAAVGRPQTFRNGRHLAAGLGLVPRQYSSGGKEILGGLSKRGSRYVRTLLIHGARAVVHRAEGRSDPQGRWLWTLKCRKGTNVAAAALANKNARVVWALLAHDDVYRPSA

SEQ ID NO: 234738 - protein, 358 aa, unidentified
MNKCNNLDFSGTTIFCGLDVHLKSWRVNIRDQEMELRDFSQNPDPVALHHFLTKNYPNASYKVGYEAGFCGFGIQRQLALLQIDCVVLNAADIPKSDKDKRQKNDKRDARAISEEIKNNSKSGIHVPAAAMEYARSLVRQRQRLVLDSTRQKCRIWHCLHFHGLELPQKIDTGQYWSNLFIKKLESNTCNGDTWLKMNLQLMIKDHQQKRALILETTRGIRSLCRQEVFKKQIELITGIPGIGEINAAIILFELENINRFQSADHLYSYAGLVPDTDDSGDTKKTKGITHRQNTRLRKAIVESSWVIIRQDPAMLMMYKNYCKSMHKNKAIIRIGKHLLSRIRYVLKQQKPYVQAVLK

SEQ ID NO: 234739 - protein, 339 aa, unidentified
MIATKFFIGIDVSKPHFDVALMAVVNHAKQEIATARFDNTAPGIKLFEKWLKSQKTTFNEDSLIVMENTGIYHRLIWTFCSNRNLPIHIGNAAHIKWSFGVARGKNDKIDSIRLCNYAFKEADDLKATAALDPELMLLKDLISARTKLLKQRSGISVSVKELGNVTGKEHQKLIEKALKNAIEGIAKSIKNLEDQIKKIITGNQDFKQNYKLLLSIPGIGHVTAVYLIGCTGNFAGRPSGKELACYAGVAPFEHSSGISIKGKTRVHRMANKELKRLLHMCALSLIQHNQEFKTYYNRKKDEGKHSMSIINAVRNKIALRVAAVIKNQASYKNNYNIAA

SEQ ID NO: 234740 - protein, 415 aa, unidentified
MEKVYDICCGVDVHKKLIVACLRSGRKNEIRQFGATTRELLEMAAWLDEAKCEMTAMESTASYWKPIYNVLETWGLPVMVVNAHHMKAVPGRKTDVQDAEWIADLLQHGLLKASYIPSKDQRELRELVQYRKSLIEDRGRELNRLQKMLEGGNIKLSGTVTKINGKSARNILDFIVGGGFFDEAKYDEMLANKEIANNLKASREQIIDDLNGVLSPIQRRVMKELLSHLDELDEHIRNLDDDIDRFMKQKDKEAVKAIEEIPGLGKNSAQAVISVIGSDMSRFPSDRHISKWAGLCPGNNESASKRKSGKTTKGNKLLRTTLINCAHSAVKVKKSYFAAQFARISTHRGKKRAYVAVAHSMLIAIYHVLNDGIAFKDLGADYYNQFNKERKANGLLKKLKALGYDVTIAAVPAIA

SEQ ID NO: 234741 - protein, 353 aa, unidentified
MEVTTIGIDLAKSVFALSGADSRGRVVIRRQLRRAQVLGFMRGLPRCVVGMEATGGAQYWARQFTALGHEVRLMSPALVMPYRKGNKTDRNDADAILEAVSRPSMRFVMVKSVAQQDLLALHKVRAQLVKSRTALCNQLRGLLRERGVAVRVGVAALKRSLPAALTDESSELSGEMRELLSEMSQWLRTLEQRIASCEARITRKFKHDERCVRLAEVPGVGPLTATALVAAVGNAQRFKNGRELSAYLGLVPRQHSSGGKTVLLGITKRGDRYLRTLLIHGARSALRQCKLEGDARSRWMARISAARGPNVAAVAMANKNARILWALLSRGDRYRPSRVLTRAVLRPGSPTPG

SEQ ID NO: 234742 - protein, 408 aa, unidentified
MFNRIIGLDVGRGAAVLCCLEKFPDNIQQQYKQYKNKKQFYKVDCSKAGVDKLLSLKPTGIVLEPTGYWYSQFWVTVADKYGIPIYWIGHNDLDKQRGSYGFTNKRDEEDALCLAASFFDDRFIDIHGQKRFLNLTQSFAITRLRELFHEKEQLQKLRSGLISQLRQRLSLEFPEAARHTMKISSVRGYTPLVYWLAFNHVNARYDNKYKRSFAPELGIKINTYTRKHAQIIIGLETRITEIMQSISSTLVMPEFAAYNAVFDRFNFGLNIKALLLFNFYPFEKFLVAGKPWVEYEHSQGKLQKRDRSLRKFQAFMGLSYSLKQSGDKVKRKFHGNSLIRSHLYAWAVCVLSRTKNIKHNKLTQQLSDRYTELRKSVKGKDAITRILFKLTRLLFYELVKEINKRKID

SEQ ID NO: 234743 - protein, 297 aa, unidentified
MSQSSTLFIGMDVHKDSIAVAYVAQDHGAEVTYLGTFGTRQCDIDHLIRKMQSKAKHLIFVYEAGPCGYWLYRYLSKKGYDCWVVAPSLIPKKPGDRVKTDRRDAVQLARLARSGDLTAVYVPKVEDEAIRDLTRAREDAISDLKDAKLRLKAFLLRHDIRYTGQANWGAAHLRWLSEVVCHTPAQQIVFQEYVRAVNEHSERLKRLEQELQDHVKAWRLYPVVEALQALRGVQFTVAVTLVAEMGDLTRFESPRELMKFMGLIPSEYSSGEQRRQGAITKAGNTHARRVLVEGAWA

SEQ ID NO: 234744 - protein, 328 aa, unidentified
MSIVFLGIDLAKNIFQLCGLNQAGKLVYTKRTGRKELLQTVANIPACLIGVEASTGAFYWQREFEKLGYKVKVISPQYVKPFVRGQKNDGNDAQAIAVALMQPTMQFVPPKNPEQQDIQALHRARQRIVNHRTATVCQIRGLLLDRGITIGAAVSRVRRAVPLILEDAENGLSVRMRRTIAELYDLFNDLGRRINFFDKEIDVVFRQSDACQRIAKVKGIGPKTATAVVAAIGRGTEFKNGRHFAAWLGLVPRQHSSGDKHLRTLFIHGARAVVRVATNNNDGCLYQWVNQLKERREFNKTTVAVANKNARIIWSMLRNNTEYQAVGS

SEQ ID NO: 234745 - protein, 427 aa, unidentified
MNNTQNAKIAQVTNDTMVIGIDIGSQKHWARAFDNRGMELSKKAFGFNNTAAGFASFEVWYEGQRRAAGLKRIMVGLEPTGHYWFNLNQFLSENGIKVVLVAPQHVKHSKELDDNTQRKDDLKDPRVIAKLVTEGRYFLPYRPTGVYADMRDGFNRRCGIVESMTQAKNRLHRWFCINFPEYLEAYGSVAAKTGLMVLKEAPLPKDIVALGVDGIVKIWRDAKMRGAGKKRAMTLVALAEQSIGEKTANEAARLELWQLLEDYEHYAHQYEVIEEMLERRVHEVPNADKLLQIPGIGYFTVIGFFAEVGSIERFDDPKQIQKLAGLSVVENSSGKRKGLPGISKRGRDRLRWVLFQAAMSAVKNNKEFREIHLYFTTRKDNPLKKMQSLMAVAGKIIRVFYGMARTGSDYDPARLMRDIRRPEKAAA

SEQ ID NO: 234746 - protein, 366 aa, unidentified
MLYLAIDQHRKQLTVNLRDEDAQVLVQRQVSTRWQAVREFLQDIQQRGREAGGWLVIVEVCGFNDWLLKLLVDYGAKEVVLLHPEERSRRKTDRRDANRLGELLWLNRHRLAAGLRVQGLRRVVIPSADDQQDRKLTSLRWRVGRERTRLLNRIKNILRRHNVEQECPTKTLLSQAGLRWLRQLAVGELDRLDLDQLLARLETVNTERATLEQKIRERQGRNAAAARIATIPGMGAYISLALACRIGDIRRFPRPRSLANYWGLTPSSRNSGENKQRLGSITKQGSALARFLLGQAVLHVLRKDSVLREWYKGIKRRRGSKIARVAVMRRLTTIIWHLLRKEQNYVPGGPRRQEKRWVKAAQAAVA

SEQ ID NO: 234747 - protein, 309 aa, unidentified
MAAVVGVDIAKRTFDLAILQPNGKHRTKSKLSNDNAGFSVFADWLQRYAVPGAWIVMEATGIYHEALAEHFHGMGYQIAVLNPAQIARYAQSQLQRSKTDKLDAKLIATYGQLHVEHLRAWQPEPVPVRQLRALTRRLEDLQSLRQMELNRLDVSPTTVQNSIQAVVQRLDEQIAWTLEQIKRHIDDDPDLRGKRDLLVSINGIAEKTAALIMAELGDIERFTDARAVTAFAGLDPRLQESGVYRGHTGISRTGSARLRTALYLPAVVALTYNPAIKAQAERLRARGKRRANKPSVQRCANCCASLTAY

SEQ ID NO: 234748 - protein, 316 aa, unidentified
MEAPVAGIDVSKDKLIVYFQGKLYEFTNDRQGFEEIRKILPKGCKVGIESTGVYHVNLAKYLNNEYDVRIINPFILKKFKGFRGKKSDKNDAKKLAEIVVSMGSEFTTSDARELTSQWDFVTRSIARVENRLRRDLVLLGYRDSLSKRNLEEVLRGGDSIVLSEVSFLLEELERLEGRKREIKDRLRELVPKDSLIFTIPGIGKTLGCIILARVGDVKRFSDKRRFVAYCGLDPVVESSGKSVVSRGISKRGDAVLRRAFYLAALTAIKVNPVIKRFYEEHKGRLRGKKLIVACARKLAVITWAVLYYNKPFDASE

SEQ ID NO: 234749 - protein, 351 aa, unidentified
MIIIGVDYHPSDQYLALVDTETGEYVERQLNHSAGEAEKFYRELAARGVSVRVGIEATGYSRWFERLLAELGIELWIGDAAKIKTKRVRKQKTDREDARLLLRLLRENNFPQIWVPSPENRDLRQLLWHRHRLVQMRTRIMNQLQALAMNEGQRRKKKLWSEAGRAQLDKLPLAPWAARRRKDLLELLDRMNPSIAELTAAIEREARKWPEALRLMTHPGVGPLTALAFVLIIGTVERFQCGKQIGSYVGLIPCEDSSAGHQRLGHITKQGSSLLRFLLGEAAQAAARCDADWRRRYMHLAMRRQRNIAKVAMARRLGVRLYWMWRNGWEYAEWVKFGSHAGQLGTGNGVQ

SEQ ID NO: 234750 - protein, 340 aa, unidentified
MPLYGGIDLHANNSVVVLLNDQDQVIYQKRLPNHLPAILQPLSLHQGEIEGLVVESTYNWYWLVDGLMEAGYRVHLAHPAAMQQYSGLKYSDDHSDARWLAHLLRLAVLPEGYIYPKAERAVRDLLRKRAHLVRQHTANVLSVQNIMARNTGARFSVKRIHELTKKELQSLLTEEPQVLAITSSLAVLDCLQHQIKTLEQTVQKRLHHTPSYEQLLTVAGIGPILAQTIALESGDIRRFPTVGHYASYCRCVDSHKISNGKRKGTGNVKNGNPYLAWAYMEAAQFAMRFQPAVQRFYQRKLAKSRNNTVLARKAVAHKLSRACYYMMRDLVPYEATKAFG

SEQ ID NO: 234751 - protein, 295 aa, unidentified
MTRNKQSVGIDISKDSFTACLCTSQKDGSLQYSNVLSFKNEKQGYNQLLRWIRKHHQKETELVYLMEATGVYYESLAYHLNKIKQMVHVVLPNTSKHYFLSLNVKTKTDKIDAKILSRFGVERRHKAWEPPSPLLLELRNLTRYYVQLQEQKTAINNIKHSKEEAYAVQKFILQSNKKLIAQIDKQIELCKQKIEVLIGCNKELKAKVDNILTIKGVGIITIATIIAETLGFAQVRNVKQLVSYAGYDVVQRESGTSIKGKTRISKKGNRYIRNALYFPAMVACRYNPDLKTLQW

SEQ ID NO: 234752 - protein, 377 aa, unidentified
MKAPSTRPAAVLGLDVGKSSHWACLVDRDGEVLASAPVRNREAELDTLFASAPAGTLVVVDQFRNIGSLAVRRARAAGLGVAYLPGLAASRAAGLFAGEAKTDERDAAVIARTAPGVPDSLSGVPGRGEALEAARALSSQRDHVVACATRDKNRLRAVLLESCPALEAAVDLSDRRWLELLAGFGGAWGIARSGAGGPRAEAAGEAAAASTAPPPALVEAENRQVRFLAARISEALDEAGALEAETAALLEGDETYACLLTVPGIGPRTAAQLAVSVDIGRFPDHDHLASYCGIAPRVRSSGTSVRSVRASRRGDARLKSLLIFSCNSLVRSSGRYGEYYRACRARGMGHGRALKAVARKRLRAIYAVMRDRVPYRE

SEQ ID NO: 234753 - protein, 340 aa, unidentified
MKLYGAIDLHSTNSVLVVIDEEDKIVYQKRLPNDLALILKELCVYQSRLEGIVVESTYNWYWLVDGLMEQGYKVHLANTAAIQQYEGLKYSNDDSDARWLAHLLRLGILPQGYIYPREERAVRDLLCKRSQLVRQRTMNLLSIQNLMTRNTGLSMTANQIKGLDKAQVDGLLPDADLSLAVKANWSVMCSADEQVERLEQRVTERVKLRAQFSFLKTVPGIGQILALTIMLETGDIRRFATVGNYASYCRCVGSQKLSNGKRKGSGNTKNGNKYLAWAFVEAANFAIRFNSKIKSFYQRKKAKTKAVVAIKAVAHKLCRACYHIMKDRVAFDVTKAFGQK

SEQ ID NO: 234754 - protein, 342 aa, unidentified
MQVTTIGLDIAKNVFQVHGIDAAEKVVVRKQLRRRQVLEFFKALPPCLVGMEACATAHYWARELTKLGHQVRLMPAKDVKAYVKRNKNDAADAEAICEAARRPTVRFVQIKSTEQQGRLMLHRARDLLMRQRTQVINAMRAHLAELGIVAAQGRDGIKELLKIIASEADARLPVDAHTSLVVLAAELQAMQTLIGSIEKRIMVQHRLSEASKRLKSIPGIGLIGATAIAATVPDPKVFGSGRDFAAWIGLVPREDSTGGKQKLGPISKRGDRYLRRILVVGACAVLRYARHKPEKYPWLTKLLERKPFKVVAVALANKMARIAWALLAKGDTYRVPALAAAA

SEQ ID NO: 234755 - protein, 390 aa, unidentified
MIYVGIDVAKDKHDCLIVDSDGVIILQKFTIPNNKQGFDQLLTNLKTCGSDSSKMKVGLEATGHYSDNLLEFLISNDLPTTVINPLHTNLYRKSLSLRKTKTDTVDALSIATMLRTESLEPYSQSSYQVRELKSLTRYRFSLVQDCSRLKTSYARLCVILFPELEKLVSSLHMASVYALLSELPNAAVISKCHLTKLTNLLSTSSKGRYGKEKAVEIRNAAKDSVGSYSDVKSLELQQTIQMIRLMEDQIKQIEGKINPIIDVLQSPIMTIPGISYRMAAIIIAETENFNNFNSAEKVLAFAGLEPSVYQSGQLTSTHSKMVKRGSKYLRYAIFNATKYVCHWDKGFGQYLSKKRAEGKAYNVAVSHAAKKLTRVIFYLVKTNQPFVSQV

SEQ ID NO: 234756 - protein, 308 aa, unidentified
MTIATIGIDLAKNVFAVHGVDHNGKTVIVKSRVTRAALPGLIAGLPPCVIGMEACSGAHYWARLLRQYGHEPRLIAAKFVSPYRMAGKLGKNDAADAQAICEAVRRPHMRFVPVKDKGQQAMQCLHRTRQGFIEEKTAAYNRLRGLISEFGVIASQSTAALRYAAARHKDSLPAQVRQCIEDLLAHITRIEEQIAEYDRILSQVAKTDNRSQRLMKLQGIGPTTACALVASIGNAHDFKSGRQLAAWLGLTPSQYSSGGKSKPGRITKAGDAYLRTLLVQGARSVLINADKKTDSFSRWGCSLVERRG

SEQ ID NO: 234757 - protein, 363 aa, unidentified
MKIMVGIDLHSNNALCGLMDENGRRLVHQKLPCDLAAILKLLEPYKDRIATIAVESTFNWYWLVDGLQDHGYHVVLANPARMQPYSGMKYTDDVSDAYFLAELLRLNLLPTGHLYDRKTRPVRDLLRRRLLLVRQRTTLILSFKSLNERTLGQRVPLARVKVMQAEEAQARFTDPADQLLSGQQIILMGHLTDSIMKLEQHILGVVGKWSTYQRLQELPGIGKILGLTIALETGDAQRFADAGNFASYSRCVKSLRTSNGKKKGENNRKCGNKYLAWAFVEAAHFACRYDDQCRRFYDRKKQQTNPVIATKSLACKLAKAAWHVMKDDVPFDAARVFGPARKSDFGETGREPAKGSGHPSQQD

SEQ ID NO: 234758 - protein, 427 aa, unidentified
MGFAESEDEEQIIERVAALDIGKAEIVCCVRIPAPGGGKRRVQEVTTHTTMVGSLSDLAQRLVDLRVERVVMEATSDYWRPPFYLFEAHGLDPWLVNAKDVKHLPGRPKTDRLDAVWLCKVAERQMLRPSFVPPHDIRRLRDVTRYRADLVGVRGAEKNRVEKLLEDACIKVSVVASDIFGVSGRDMLAALIAGERDPKRLANMARSRMRPKIGLLEEAFAGLKIGTFTDHHRFLLARMLDRIDRTDADIAALDTQIEAQLDPFADAVARLDEIPGIGPTAAAVIIAEIGLDMTRFPTPGHLASWARFAPGIKNSAGKSNGNGSTGKGNRYLARVLGEAAAGAGRTDTFLGARYRRIARRRGKKKAIVAVGRSLLVIIWHPLSDPDTPFEDLGADHYDRHVSTTAKRRSHIRGLETLGYHVTLEPAA

SEQ ID NO: 234759 - protein, 420 aa, unidentified
MKETAYWAGLDWGSTVHRVCLLDAERERIGARDFAHGGAGLAELCDWLVTKSDAEPGRIGVAIETPHGPVVEALLERGFAVYAINPRQLDRFRDRFSMSGAKDDSRDAFVLAHSLSTDRHAFRCLATGDPVIIELREWSRLTDDLTEERNRLTNRMREQLWRYYPQALKLTDDLDAAWFLALWQQAPTPAKALKLRRSTIAKLLQAHRVRRIDAAGVEAILREKPLPVAPGTAEAASAHIRILIKRLQLVNEQLRLAHREIDALVARLQPDQGDQAESKPGQPVEQRDVEILRSFPGNGRIVLATLLGEAWEPLRQRDYHALRTLCGTAPVTRQSGKSRIVVRRHACNKRLARALHHWARVAAQHDAACHQRYAELRAKGHTHGRTLRTIGDRLLYVACTLLKRQVLFDANHKTEPAVAA

SEQ ID NO: 234760 - protein, 344 aa, unidentified
MHATIAVDLAKNVFEIAVSHHPGRVATRKRVSRSRLPAFFVQQPAATVLLEACGSSHYWARQIQAHGHQVRLLPPHQVARYRTGNKTDRADARALLEAHRNEEIQPVPVKSVEQQTLTALHRLRSRYVATRTSRINTLRGVLREFGLIIPRGGPRAVLRLEAVIGDTESDLPALLRPVLTETCLEIRALTERVEAIGRQLEASGHLMPVVARLSSIPGVGVLTATALVALVGDVRRFRSGRRFASSLGLVPREFSSGETQRRGRITKRGDSYLRMLLIHGARSVLVSASRYQKRDGLRDWALALSCRRGHNTATVALANHLARIIWRVWREDRDFMERRVAATA

SEQ ID NO: 234761 - protein, 405 aa, unidentified
MPYILALDVSMGHSYSVLYKDDTCLFEDEIEHTQRGFHALLEEIQHLPERPLIVFEATGIYSRPVEKFFQDHHFSYCLLNPLEAKKQMEENTLRSWKTDKSDAHRLAQTHLKNQRQPKEVQSNFYLEMRDLARFYQEIEKKITRLRMDLHNCLQLTFPELEQFFSNRLTPYALTLIRLFPHPDFVLASTRTKIKNKLINETRKKISANRAEQKADQIIHYAQCAYPAVEKDSIHCQKTIYYAELLQDLLEQKEALATQMIKKAEGSPCFLLYQTFPGIGALTAALLLGELGDITRFKTHKQLNAFVGIDIRRYHSGKYTGQDRINKRGNPKARKIIFFTIRNMIRQQRAAPNHIVDYYYKLKKQPIPKKDKVATVACMNKLLKCMHAMVRAHTEYVYAYAVSVDH

SEQ ID NO: 234762 - protein, 356 aa, unidentified
MSRDIKYIGMDVHKEAVVIAVLNSSGKLVMESIVETKASSILQFIHGLRGELHVTGEEGTWAAWLYDLLQPHVQQVLVCDPRRNALLKEGNKSDKVDARKLADLLRTGMLRPVYHGEHGLRTLRELARSYQTISKDLNRVMNRIKALYRGWSIPCAGTQVYAPRYRQEWLHKIEHAGVRRRAELLYQQLDGLQRLRRTLRPELLAESRKHKAAKLLRQIPCIGPIRAARLLALMQTPHRFRSKRQLWTYSGLGIETRDSAQYRFVCGQLQRSKKPQQLRGLNRNHNHEMKEIFKGAATRASCGVGPLREFYVALLDKGMKPEMARLTLARKIAAITLTLWKKEEGFDAELLKTQAA

SEQ ID NO: 234763 - protein, 359 aa, unidentified
MLPMGDSALRKEADAMTFVGCDLHTRKQQVAVLDTCTGEVSEHQLGHDGSAVEEFYAALPRPVTVGIESTGYAVWLHTLRQRLGHTLLVGDAAKIRAMVVRKTKTDRRDALHILDLLSHDRFPTIWVPDPATRDLRALLTHRLRLVRIRTMVKNGRHAIALNYRLVHGSTRLRRAGLAQLHALALPPHTAQRRDQSLEWLAGLTAQIRELDDAITTAALAHPDAPRLITHPGVGALTALATIVVLGPVARFQDSKHVVSYIGLAPALNASADKYHLGHITKQGSTLLRFALGQAASHAARIDVDLKRAYFTIMHRRGRPKAKVAVARKLLVRLFIMWRDQIDYDEFRRRGRRMPAIAST

SEQ ID NO: 234764 - protein, 331 aa, unidentified
MFFIGADIDKRKVHCVLLLDPVTGRNRKKVVPNTPAGMEQLVAWGCKQTDASVGDLHVIMEATGPYHETAAQTLYEAGTTVSVVNPKQIKDYAKGIGHKAKNDPQDALALADYGAKQHPRPWQPSPPEFRRLQALLQRLEALEKDLQRERNRREKASVGYDASPPVLASLERSITFLEQEKKRLLNEIDEHIDGHPQLRKDRDCLQSIPGIGPVLSRWALMLLQHGQRFASAGQFAAYLGLTPTEHCSGTSVHQPPHMSKIGPGHLRAKFYMAAMVAAQHNPVVRAHYERLLERGQCKMSALGGAMRKLAHICFGVVKNQTDFQHPTSQEA

SEQ ID NO: 234765 - protein, 428 aa, unidentified
MSYRIAGIDVHKKMLAVVVSDVEIESEYQFERRMFSSNPEQLRSLAAWLVEQKVEEIVMESTAQYWKPVWETLERYWKPLCEKREGARRRSGTLHLAQALSNRGRRGRKRDFVDAERLVKRLVARELTLSFVPDAEQRLWRTITRKKYQLRRDLVRLNNQLEALLEEAHIKLSSLVSDLLGVSARRMLKALADGETNPAALAALAHERLRATPEQLCDALGACTELNPVYRRLLKMTLEHLQILEHQIGQLDQELATLLHPHQDAVERLAEVPGFAVDSAQQIIAEVGPAAATFPSEKCLSSWVGACPGEEESAGVNYSHRSPKGNRHMRRLLNQTANAAVKAKGSIFEIIYRRCVPRLGHNQAIGVIAHRQCRLIWLILHQGTRYEERGPAVTKRSRYQRTWRMIRQLRNLGYQIELPNPQASQAQA

SEQ ID NO: 234766 - protein, 586 aa, unidentified
MSSSTSCEPVAIGVGLDTARYGHHATFLREDRQPAIEPLEFLECQAGYQELEKVLSKLAQHHGNIHFHIRVDAASQYATNLLAFLHRLPWPKTISVGEPRRNKQYREVHFPKRKADATESHACARFAIVERPLSSATVDPEVLALREVASWLEFQVKQSTRLVNRLHNLLSRVFPELATLQNDLQARWVLRLLEKYPTAERIAKARLSSVTGIPRLPSEKGQQVHQAAAQSIAAERGAVIEEVVRESVRALQASLDAEKRLEKLLIQTFRELPDERAKQVATIKGIGERTAAVLVAKIVSIDRFPTASHLTSYFGVFPEEKSSGVDRDGNPNPSRSKRMSRQGNDLVRKYLWMSAMSAISGCNPVVVALYARLRQRGRRGDVALGHCMKKLLHQVFGVWTSGKPYDANLASKSTCGRPSNEEQVAEKKEAEGHKTGNTPVRKTVTSTSTDIVPAKAQLVKQTTPSSDGDGSIDLAYLRSQITMEQVLRHLGYFGRLRGNGSQRRGPCPVHGSKRARGRNFSVHLGKDVFQCFHPPCGAAGNVLDLWCAIHHLTPYEGARHLADTFDLELTRDREEEPVTEPVVLNR

SEQ ID NO: 234767 - protein, 448 aa, unidentified
MGSCALERQYRGDATPRDVEQYAGGTRVLTAQWFVGIDWAADVHEVCIVDRAGQVCERREVNHTAPALQAFVDALLERADGDPSQIAIGIEVPRGALVELCVERGYAVYAINPKQVDRFRDRFTVAGAKDDPRDAHVISDALRTDPQAFRPVRLDQPLVIQLREWSRLDDDLREELTRLTNQLRDLVYRIAPGVLTLCPAADEPWFWGLLQQASTPAAQRQLSVRRLERVLRDHRIRRIAAAQLHNVLQEPSVYTAPGVVDAVAAHLQMLLPRVTLVADQRREAERQLARLLDTLEAEMPPAGDQREHSDVAIVRSMPGIGTRVAARMLAEASQPLADRAYHVLRTWMGVAPVTKRSGRRRRPLVVMRYACNRQLREAAYHWARTGAQKDADSRAYYASLRARGHSHGRALRSVADRALRILMTLLTRGQLFDATYGQHAPTPVIAGA

SEQ ID NO: 234768 - protein, 367 aa, unidentified
MQNTIVHYEGAASLEAVATKVKPSGARIKIGLDVHARLYVAVAQYDPLLPKAARRLRPEQFVPWVEELLRRGHTVHVEYEACGFGFGLYRQLIAAGAHCYVIGPRKLDEECSRVKTDPRDATTLCQRLSRYLEGNTRELAVIRVPSQEEEQARHVSRQRTQLVCHRQKLEAQGRSLLISHALPAPAHWWKEQTFSRLREHLPGWITTRLQMARPALLSLQEQINALTSELEASAPCSLPRGVGKLTSVMLTREICDWHRFNNRRAISSYTGLCPGERTSGSKRVPGSVTKRGNPRVGAALVECAWRMVRFQPHFPPVQKRLAVLAKGSRAIGAVRKKAIVAVARRLAVDLWRLHTGRCTAEQLGLKL

SEQ ID NO: 234769 - protein, 366 aa, unidentified
MENHSIVWVGMDTDAKKNHVALYRGWELEPAVEWEAGMDAKGIKQLIERLKKETGEVRCVYEAGPSGYPLCRKLRQAGMVCDVIAPSLTPRKPGDRVKTNRRDARNLGRLYRAGELTVIDIPNEAQEAVRDLTRAREDVREDCTRRQHRLSRFLLRHGYIYQEGDKWTLKHWAWIRKICFEDSNLKTVLEESIRAVEQSQEQLKTYDARIEENAQKPEYEKKVARYKTVRGIQTITAMTIVAEGGDLKRYATAPQFMGSTGLVPSEYSTGDRERRGRITKTGNAHLRRVLVEAAWHYRHRSIPGASVKKRRNGQPASIVTIAERADQRLCRKFRKLVDRYNKKPVIAAVAVARELAGFIWAIGQQE

SEQ ID NO: 234770 - protein, 358 aa, unidentified
MQIIGVDLHTRQQTVAMLNVETGEIVEKTLRHEGDAVREFYSTLAGPTRVGIEATGSMQWFLELMEELGIDCQVGHPAKIRAAEPRKQKHDRRDAALVLQLLIENRFPSIWMPSREQRDVRSLILYRHQWVRIRTRVQNALQAIALSHGLRRGSSLWTEAGQQAIASLSLTRYTAERRTALQSLYGHLEKRIDDLDRKVEELAWQRPQARRLMTHPGVGPITALATETFLGEPKRFVDGKAVASYVGLIPSEHSSGGRQRLGGLSKQGNPLLRFLWCEAVGHAVRKDAELQRFYQHKLVQKGLGKAKVAAARKLGIRLWILLRDQIDYQEFCRRGQLRQKHGGAHAGMPACEHDPAQQ

SEQ ID NO: 234771 - protein, 346 aa, unidentified
MNITTVGIDLAKNVFQVHAVDVRGKLVLRKQLKRDQVSRCFVNLPPCLIGMEACASSHYWGRMLEGFGHTVRLMAPQFVKPYVKTNKNDMADAEAICEAVARPKMRFVPIKSVEQQAVLSLHRVRQGFVKARTAQANQIRGLLGEMGLVIPQGIRFIAQRVPGILEDASNGLPLAFRQLIERLTNHLKELKEQVDAIQSQIVAWDRGCELSQKLQKIPGIGPLTATALIATIADVHSFKNGRQMSAWLGLVPRQKSSGGKPTLLGISKRGDAYLRTLLIHGARAAIHAAKRRPEGRENSWLAKLLARRHANIAAVALANKNARTVWALLAHGRDFDPAYVPVSAVA

SEQ ID NO: 234772 - protein, 332 aa, unidentified
MGLDVGDRFSQLCVVDQDGVVIQEDRIPTTRVALCERLAGPPARVVLEAGTHAGWMSRELTALGHEVLVANSRKLRWLYHNEHKTDRVDATYLARVGRWDPTLLAPIRVRSAGADGALRLVRARASLVRARTRLINHVRGAVKSVGGQLPPCDATSFARRVAAHLPAELHAALEPLLAQIAGLTQTIARYDRLVEHLAAQVYPETARLRQVAGVGALTALAFVLTVDDPRRFGDGRAVGAYFGLCPRRADSGAHRPQLGITKCGDGLVRQLLVQAAHYILGPFGPDCRLRRWGLELARRGGKNAKKRAIIAVARKLAALLYSLWVHDTRYAP

SEQ ID NO: 234773 - protein, 315 aa, unidentified
MTQIICGVDVSSASLEASIGTRGAASSFANNPDGIDALAAFCHHHRVTLVAMEATGGYERQAFALLTQAGLDVAILNPRAVRQFASGMGRLEKTDRIDAAIIAWFAEVKRSRPTLLASASQLHLRALVTRLRQLTALHTAQLNQQRLITNPHVQATFDELLGLLKRQIKDLAAQIAALIDQDPLWRELDMAFRSIRGVAARTVARLCAELPEIGTLPNKTISKLAGLAPLANDSGKHQGKRSVRGGRAPVRDILFIVASVAGRYEPDFIAFRQRLSDAGKPPKVIRIALAHKLLVRLNAKARDVRTQTLITTQIP

SEQ ID NO: 234774 - protein, 354 aa, unidentified
MIIVGCDYHPGFQQIAYVDTETGEVKEQRLEHRELAEKFYRELASQGETIRLGMEASGHARWFERLLAELNIELWIGDAAKIRAKRVRKHKTDRQDAQHILQLLGEDRFPQIWVASWENRDLRQLLWHRHRMVQARTRIMNQLQAVALNEGLRCKKKLWREQGRKQLEAYRLAPWASRRREDLLKLLDELNPTIAELTQAIDQEVEKSAEAGRLMTHPGVGPLTALAFVLIIGRAERFQCGKQVAAYLGLVPLEDSSGERRRLGHITKQGSSMLRFLLVESAQVAARSIPHWRNQYFHLAMRRGRKIATVAMARKLAVRLFWMMRQGWDYEQVNKFGSHAGQPEHRHGVQSNTE

SEQ ID NO: 234775 - protein, 318 aa, unidentified
MGSMDGKKSSTKIAGIDVGKRQLDAAVHGRGEQHQVANDAAGWEALVVWLEERGVVRVGLEATAGYERGVRARLEAAGLEVVVHQPLEVKLFARLKRRRAKTDRLDAALIAAATAQVDTVRAAQDPRLAQLAERLTAYEQISDQAAQLKTFMEHVALPDLAASLGEQIQSLARLKARLAREILAALKAWPDLLARWTLLQSLPGVGPLVAASLVIRMPELGALKRGQPASLLGVAPFDRQSGQWKGQSFISGGRSRPRRMLYLAAIAAKRFDPDFKAFADRLLTAGKPPKVAIVAVMRKLIEAANLVLARQQPWLKLA

SEQ ID NO: 234776 - protein, 388 aa, unidentified
MIYLGIDIAKLNHSASVVSSDGEILIEPFKFTNDYDGFYLLLSKLAPLDQSSIIIGLESTAHYGDNLVRFLISKDFNVCVLNPIQTSSMRKNNIRKTKTDKVDTFIIAKTLMMQDSPRFLTLEDLDFIELKELGRFRQKTVKQRTRLKIQLTSYLDQVFPELQYFFKSGIHQNSVYALLKEAPTPNAIASMHMTHLASLLTRTSHGHFNKETARNLRVLAQKSVGINDSALSIQITQTIAQIELLDSQLFHTELEIANLVTCLHSVIMTIPGIGSTNGGMILGEIGDIHRFSTPNKLLAFAGLDPSVHQSGNFQAQRTRMSKRGSRVLRFALMNAAHNVVKNNLTFKTYYDKKRAEGRSHYNALGHCAGKLVRVIWKMLTDNVEFNLE

SEQ ID NO: 234777 - protein, 381 aa, unidentified
METLHSHCAGLDVHQKEIVVCIYIGNSETELTKEIRTFPTFTKHLFEMLQWLEELHITHLAMESTGIYWKPVFNILEDYFDITLANAQRIKNVPGRKTDVADAEWIAKLLRYGLIEKSFVPPADIRKLRDLTRLRKKMIGNMTAEKNRIQKTLECSNIKLGSIISDVFGVSGRKLLTRLVEQGYVDSHEVEENIHGSMMPKASQITESLFGTLNPHQIFLIRQSWNHILFLEESIQQIEEKIDELLSPYPEQVELLLTIPGVKKHAAASIIAEVGVEMGQFPSAQHLASWAGLSPGNHESAGKKKSTRTTKGNPHIQSMLCEVAWAISRTRHTWLSGKYWSLAARRGKKKALIAIAHKVIKIIYHILDQRSGFIEYSKVLS

SEQ ID NO: 234778 - protein, 341 aa, unidentified
MSVIAPVFSFGLNGYAGSGLALQDKAKKRLMQITIGIDISKETLDAYRFPDNHHIQVANGRAGHKSLVRWIGKQNGSLVVFEATGAYHRNLEAALAANGTAFAKVNPRQARRFAEATGRLAKTDRVDAIMLAKMGAILGLKAHEPKTEALHILRELITARRALMKDKVAAKTRLQTTRQTLLKNQINARLKQIKIQIQQVDAAITEKVAQDEALSNKLDILTSIPGIAETTAFSMLIEMPELGTLEGKQAASLAGLAPMSRQSGKWQGKERIKGGRASLRRAIYMPALVATRYNPGLKAKYDQLIRAGKSGKVALTAIMRKLVVMANALLRDGRTWSELRP

SEQ ID NO: 234779 - protein, 355 aa, unidentified
MRYYTSTTKYHCGIDLHARQMYVCVMDSQGNKLLHMNIRDNDFEFFLKKIAPWRHDITVCCECLFCWYWMADACHEAGLKFVLAHALYLKAIHGGKNKNDRIDSEKLAHLLRSNLIPPSYVYPADKRPVRALLRQRMDYVWRRSQLLQRVTTMQMAEGKEPVARRSANREKWLEGLMEAHSEPRHRIALQHDVAMVVHYDHAVKELEKELLKITRRTASRDFALLKTVPGIGKALGLTILYEVEDINRFPSVQRFCSYCRLVKGTVASAGKIKGLRGAKLGNPYLRWAFGEAAVLAKRHDEHIAQYCQQLEAKKACKFKVNAIIANKFARAIYFMLKNKSGFDVAKLTGKPVPNK

SEQ ID NO: 234780 - protein, 390 aa, unidentified
MLNIGIDISKYKHDCIVIDESGVIIRNVFSFDNSRTGFDQFMEMYRSLNPTEIKKIGFEATGHYQDNFKVFLERSGIEFMELNALLVHKFKNSQTLRGVKTDKIDARLIANYLSTIEFKPYPKISYHTLALRSLCKRHFDLINERTKYLIRITNFLDRTFPEFKEFIKGNIKSKTAMYILHNYGIPNKIMNINIQSYENLRKESHGHFSVAKFDKLKELAKNTIGFSYETDLFEIKSLLRVYDTLQDEISLVENEITTILSKINSHIPTILGIGEVSAASIIAEIEDISRFDNPNKLLAFAGLDPRIYQSGTQEFKGRMNKKGSVVLRRVLMNCAESILMYNPAFYAYYRKKRDEGKPHRVAISHVARKLVRVIYKLETEHIDFDLSIVK

SEQ ID NO: 234781 - protein, 352 aa, unidentified
MKKYNRICPEGETVFVGIDLHRCSWHITVICSGEVIFSGAHPPEPDKLLNFLKRYRPNRIEAVYEAGYFGFSLYELLNASGIQCLVTPPTLLPMEYGNHVKTDRRDSRKLANFLSKRILKAVCVPDPELCAHRQTLRRRQQLLSDRIRIQQRIKSELSFWGLSITNPRGPWTVSFYNRLKEIVFGNSYMNQSFIALLNEYEYLNRLIEQQTGLLKELATSELYAERVRLLRTVPGIGLLSALHLIFELGDISRFARAEQLAAYVGLTPSQYSSGENVRMGRITRCGKSDLRTVLTEAAWTAIKKDTELREVYESLKFRRGAKKAIVAVARRLLLRCRRVLLDGTPYRLPVAA

SEQ ID NO: 234782 - protein, 406 aa, unidentified
MNQNTCITIDVSQNKSHIQGFIGPNKPLSKARTMRHTKQGYQFILTLKNLIESKTNETPLIIFEFTGIYHKSLEKFLISQNLKYHIVAPLRAAKARNSEIREQKTDARDCLSLSKLFYSNNLGVFYSEDETYSNLRKINRYYDTCMKHFVKIKVNFRETLAVIYPNYKKLFTSIYSDESLTFLKVFPHPSFYTSKSEDEIIEILKDKWNHVESWTSSKVKKLTPLINEVVPGCNVTEPDIIMLLSYITQIEYYLNQIKFTISKMNELAKKVPLYNLVHSLPGIQDILTCKFIAELGDISRFINYKQIVAYAGIDPMIRQSGDKDGLHLKMSKKGNKRLRTILHLMVSSLIKTNRESNAIKDKYQKKTHQLNPLKPKVASMACANQLVRIIFYMHKTSSTYTYQKCK

SEQ ID NO: 234783 - protein, 362 aa, unidentified
MPKSTTIIAFDQHAATTVAAILLPGHRTSALQSLTSDSPTILRFVERVRRQGPVQCCYEAGPCGFELQRALAAHQIPCDVIAPALIPRRPGDRVKTDRRDAGQLAILYRAGALTAIHIPTEQEEAARDLLRCREDIRADLLRARHRLSKFLLRHGRRFTATKRAWTTRHASWLQAQRWPLAALEQTHRAYVRAVDEAVGRLQAVDAELRDLLTLEPLRSRVERLRCFRGIDDLTALTIAAELGDARRFPSAPRVMAFAGLVPSEHSSGTKQARGAITKTGNAHLRRVLVESAWQYRHHPFLGPALRRRQQGAPTAVIDQAWHAQQRLHRRYRRLAARGKPTQHIVTAIARELSGFLWAALTH

SEQ ID NO: 234784 - protein, 341 aa, unidentified
MQITTIGLDIAKNVFQVHGIDTAEKVIVRKQLRRGQVMAFFEALAPCVVGMEACATSHYWARELTKLGHEVRLMPAKDVKAYVKRNKNDAADAEAICEAVRRPTMRFVRIKSAEQQGQLMLHRARDLLMRQRTQVINALRAHLAEFGITAAQGREGIKELLAIVAQEEGSRLPSDAHASLTVLAAQLQAVQTMIGSLEKRIVAQHRSNEASKRLETIPGIGVIGATTIAAVVPDPRVFRSGRDFAAWIGIVPRQDSTGGKQKLGPISKQGDQYLRRILIVGAHAVLRRARQQPEKYPWLTQLLARRPFKVVAVALANKMARVAWALLAKGGTYRAPQLVAA

SEQ ID NO: 234785 - protein, 404 aa, unidentified
MTKNHILGLDIAQPTAVAQLDLANGTKCWRGTLATSQAGWHQLATLLAAHGAQLSTTLVVVEATGVYHLPWAERLHAAGAEVYVLNPLLAARLQSAANALREHKTDPVDVHRLCETGRLYAADLARFRYRPEPARQGLKQLDHARRKLRTTLTNLKKSVRSHLELVFPALLQANIAADTARASRILAAAPTAGAWRALPAAARAKLAGVKHADLDHACADTLADETLAHACVPALRALLAAEQALAAQLRECDDVIAPRLPAERVALITSLPGFGERTAAVLATYLPASFEGWGTRKQIVARVQALFGCDPRLRQSGKWTGKVKLSKRGIAAGRTALFQAAFCSLATDEENATYYAQLRTGDGQGRRSKTHKEAMVDVMRKQLRRLVAVLCSNQPFVKKTHAAA

SEQ ID NO: 234786 - protein, 387 aa, unidentified
MAKQNDLSRCLVTLEQDATVIAVIEIGQSSWLVAGIVPGLEGNPLKKLNPDQDALLQLLHRWRKEAVQAGRTIKRIAVAYEAGRDGFWLARWLRAREIDAYVIHPSSVPVSREHRRAKTDRLDTELLKRAFLGWLRGEPKHCSMAAIPTLDDEDAKRPGRERQSLVGQRTRIINRLKANLARLGIRDFRPNLARASSQLEALRTPEGAAVPANTLAELRRDMDHLRFVKQQIKEIETTRAKRLAGAPNEQHHAMVRLLARVIGVGIESADMLVQEVFSRNIRDRKALARYAGLTGAPDESGKRRRERGLAKAGNARVRRGMIELAWGHLVHQKASALSAWYRKRTSDARGGTRKTMIVALARKLLIALWRLVTTGETPTGLLLRPAA

SEQ ID NO: 234787 - protein, 325 aa, unidentified
MQNQTIVGIDVSSATLDICVSNQHGGQSFVISNNVKAIGKFFKAYHESLVIGMENTGRYNWALYEALKETDHRVFVVSPLHLKKSMGLVRGKNDKIDAIRIAAFITKNHNELLQWKPSSQAVQKLKILLTERNSRIKTKRQLLKQQYDYAKMKHLGMDKYLMRLNKQELALINKQINLIEQDIEILIKADEPMQSQAKLIRSVPGAGKVLCWMMLAKTENFTTITEPRKMACYSGVVPFSNQSGTSVRGKSRVSSYADKAIKSVLHLAAMSAIRLKNDLREYYLRKLAEGKNKMSALNAVRNKIVHRIFAVIKNQTPYQNHLILS

SEQ ID NO: 234788 - protein, 347 aa, unidentified
MSEQHHVGLDVSVKETAICIVDPHGKVVHRATVESHPEVIGRHLIDLGHSYARVGLEAGPLSPWLYAGLVEAGLPAICVETRHMHAALSARINKTDRNDAMGIAQMMRVGLFKPVHVKTPASQQRRLLLTSRKLLQRKAYDIESDLRGQLRNFGLKVGVVGAAGFEQRVRDLVLDLPFVAAVVLPLLEARSALRIQLAKLHKMLLNQVRTDPVCRRLMTAPGVGPVVALTYRTCVDNPARFGRSQCVGAHYGLTPRLYQSGETMRVGRVSKCGDTMMRAALYEAALVLLTGPRVRWSALKVWGLAVAKRRGMQKALVAVARKLAIVLHRMWRDERDFRWSAGAAAAA

SEQ ID NO: 234789 - protein, 325 aa, unidentified
MYVIADGRDQQLLAQRLPNQLPIILETLQPFRARLKVVAVESTYNWYWLVDGLMEHGYPVVLANPSEMEQYDGIKEADDLTDAAFLAKLARLDVLPTGYIYPKQDRPVRDLLRRRMLLVQQRTGIVLSLQNLATRQSGRSLPWRNLRRLGATERAELLGDHDCLTFVADEQIELIEQLNEKIRRFEKKVPEHVQGKPAYERLQTMPGVGPILALTILLETGDIGRFATVGDYTSYCRCVRATHTSNGKKKADNNSRNGNGYLAWAFVEAVHHAIRVCPKAKSFYDKKRAKRNGALATKALAAKWSKAAYYILKRQEPFDLARVFG

SEQ ID NO: 234790 - protein, 349 aa, unidentified
MFKNSGFIHFKSKCMNEFKTFIGIDVSKKTFDAALIRSTDDLSTVHRSFDQNIEGYKAFVQWLKGYDVTIADDVLICLEHTGIYISGIVAFMVSLNASIWVEMALKIKKRIGLQRGSDDKVASINIALYAYRYHDEARLWNPLESTVQQLKNLLAQRDRIVLSITQLTVPLNELEETGNKQQAIELRKLQSKALKGLKDSLNAVEKSIDNCIANDEIIRRKINLVSSVKGVGKQTAVALFVYTRGFSVFENGKQLACYCGVVPFNKQSGTSVRYKPGVSPFANKKLKRLLHLCALAALRFDAGLKAYYERKVAEGKNKMSIINAIRNKLILRVFAVIRDNRNYVDNYAY

SEQ ID NO: 234791 - protein, 391 aa, unidentified
MGQTRNRSMSGISLPAFPFEFSVEQASNRMIDIRGLLKVLKQLQLSFFVLLFIDKVMKKIDYYIGIDISKLTLDISILCSCEERAQTAHYKIENNEKSIAQFVKKKLGNYPFQHLLFCFEDTGIYSFPLAYYLKENNLTYCQVPALEIKRSKGITRGKEDKTDSRDIAFYACTHRHKLQPSRMSTKSIQQLKLLFSEREKVLKSLSIFERTSENKGFISKEVFGAVASVNSTVINQLKKSLEKIEKKMLEIIASQVQLSQQYRLVTSIPGIGMQTAIYLLIATKGFESFDNWRQLACYAGVAPFPYQSGTSIRGRTQVHPLADKKLKSLLNICAICAIRHDRELKSYYERKVSEGKAKMLVINNLRCKLLARVFAVINRESPFVNTYKFAS

SEQ ID NO: 234792 - protein, 307 aa, unidentified
MGPSIGIDVCKASLDWTEGPEGEIHQVENRPRSIAVLARKLIQLDPGRIVVESTGGYERALVQKLAALGLPVVVVNPRRVRRFGEGMGFLAKTDAIDARLLALFGEKAEPEIRPILEGRDRLLADLVARRRQLVGLLVSEKNRRETAPAAVRTTIAPILRAVETQIRKLEERIDAALREDLEQAELLDLLMTVPGIGPAIARTLLVDLPELGHLDRRKIASLVGVAPFANDSGVFRGHRRIRGGRASVRTALYLAAMTASRFNPTMKAIYQRLREAGKPPKLAFIAIARKLLVALNAIARDRTEWQA

SEQ ID NO: 234793 - protein, 412 aa, unidentified
MVVPPKIHVSVDVGCRRHSVAIGLSSGEVLEEFDIDHRPEGFADFFNRIERQHRCFPGAVPTVAMEGYNGHARPLDTLICKRGWRLLNVNNLKLARFKQMFPAAAKSDRIDARRMLDLMLLGEHMPQARRALQEVHAPTSQNAQLKRLTRRRRALVDEKSRVLARMQGDLRAVCPGLLEITGDAENRWFLNLLTHVDDLQKLARLREKTLRGIPAIGAKYAAIIRQWQPQAQFSHEAPYAGPMIIEDAQRILALREAIDALERRCQALAEDSDIARLIDTVPGFALVCSAELAGEISTLDRFAGEASLAVYLGMANLDNSSGERQGARAPGQVNKRAKAAMMTGVDRHRKQVPESQRYYEKKRAEGKTHNQAIRALGRHLCRVLYRMLKHGEAYRVRQPEAPCATAAQPLAA

SEQ ID NO: 234794 - protein, 400 aa, unidentified
MISVGVDVSKGKSTVCVLKPYGEIVCSPFEVLHVEKELEGLDNLLQKLDGEIRVVMEATGIYHLPILSFLQEKGYFVSVVNPYAMKKYAKDNSIRGAKTDRLDSSMIANYGIEKWYKLQKHESDEETYAELKLLGRRYRYYMELHVKALQELTHILDYVMPGIKKLFNSWDEASGKDKLSDFAERFWHFDLITSMSLDEFVDEYLIWAGEKKYHRSRSKAETVYELASGGIPTLSSSTPSTKMLVQEAVTVLRAVDNSLSLILSRMQELAKSLPEYSTVRAMGGVGDVLAPKLIAEIGDVRRLHSAKALIAWAGIDPPPYESGQFVGSRRKITKRGSSTLRKVGYEVMRVLKSHKAPKDDAVYNYILKKEREGKDKKHAKIAGLNKFLRIYYARVMAVYQ

SEQ ID NO: 234795 - protein, 356 aa, unidentified
MNKTMLITGKVNYNRKIQDYDHYIALDWSQVNVALARCTIKQTMPKVYEFDSDVKAIKNYLTNLKGHILLTIEETTTSHWLYVELIDHVDRIIICDPFRNRLLSDGPKTDKIDAGKLCQLLRGGFLKEVYHSCESDFKLRQLVSAYEDLIKAGVRIQNQRHALYRAMGYRYTSKNAPVLKDRISDDRSTRFISDWQDSCIEHYLEEKASFESHIEQVICGNKIIKSLKSLPGIGSISALKIHATVIQAQRFTNKGHYLSYCGLVMHEKTSGNRSYGKRRPRFNGRLKSVYKMAAHRAILLKNNPVYEYYEELIDKGLTEKQATLMVARYLAKVSLGIMKNGKKYEPYRWRENKTVA

SEQ ID NO: 234796 - protein, 407 aa, unidentified
MDLLKTVFGIDVSSRKSNVCIMVNGQKVNDYAISNDMVGFNRLIGDLKQVTKPQIIFEATGVYSRRLQAFLDMHELRYVMMNPLEAKRKTKDDLHQNKTDKLDALYLAKLQSEHPQRLAYVQNKEYQELMANNRIYEQASHDLITNKNRLHKAIQLTFPEIEHLLANPRGKNYWSIALRFPHPDIVLETKEADIIDFLKGLSGIGKKRANDITQNLIRLAKVACPAVKKNSAHIRGLKMAINNILSAEEECQTALQEMAKLAPKRDLEILTSIPGIGENTALRIISELGDIRRFNNPSQLNAFVGVDPQVYESGNLTAHLSISKRGTAIGRKVLYLAINQIQSAKKAGNPCHIVDYYEKRKRSSETASHKKAAIASIHKLLRTIFALIKNDQLYSYDVAKHNQRLLS

SEQ ID NO: 234797 - protein, 311 aa, unidentified
MTQIVCGVDVSKRRLDAHVAPSGAFESFSNDAAGIAALAAFCRRQGVQLVAMEATGGYERTAFLLLWEAGIACGLTNPRSVRRYAEAMGILEKTDRLDAGVIAGFAIAKDLKPTSPPTPGQQRLQALVARLRQVTDDLVVQKQRRSSAMDAEMVASIDEVIALLKRQARTLEGEIGSLIDDDPLWARLDAALRIKGVADRTVARLLAELPEIGIYSNKAVVKLAGLAPLAHDSGARAGKRHIRGGRAGIRSILFLVADIVRRFDASLGAFHRKLTEAGKPKMVVRIALARKLLVRLNAKAREAREQHALAT

SEQ ID NO: 234798 - protein, 461 aa, unidentified
MLLSKEEWDRKIEVIKKELRSYTWRDLETNGKFAKNDKLSFITDDMLIAGCDIGSETHYIRAIDVRGRELSSGAFEFSNTSEGFANAKAWVLALAAKNDKKQIVLGLEPTGHYWFALAAWMISNGISVVQVNPYAVKQSKEIKDNSQLKDDRKDPKLIANLVKDGNYGMPYLPEKVYADMRRLSMFRDQLTEDRIRNINRLHRELKIYFPEYMDAFGKIDGAFTLEVLKVSAIPSDITALGAEGIKNIWHNVKLRGRGYSRANEIVSYAEKSVGLTDGTDAGREAIKWYAEQILRLDEQLAEIESVLHEKCREIPYAENILAINGVGENILAGILAEMGDISRFDDVKEIQKLSGMGLVACSSGKHKGQTKIRHRGRKRLRYWLFQAAKSAVSHADEFKQLHGYYTTRSNNPLKKMQSLVVIACKILRVIYTILKTGTTYDPQKLLKDIKHSAASQVPMAA

SEQ ID NO: 234799 - protein, 414 aa, unidentified
MELGYRLMVGLDWATQAHQVCVLDRQGRLLEQRRVEHRAEAIAAMIDRLIGLAGGDPASIAVAIEVPRGAVVEALVERGLHVFAINPKQLDRFRDRHTVAGAKDDRRDAFVLADSLRTDLSAFRRVHLDDAWTIQIRELTRIEENLNTEITRLANQLRDLLLRFYPQLLRLCPSADQPWLLALLKLAPTPTKAQRLRRSSIERLLHQYRIRKWTVDQVRTELKTAPLSVAPGVTEATCAHIALLLPRMELLIAQLKLCSKAVQTALEERIAAQEQRREHRDVEILLSLPGVGRVVAATMLAEASQLLAQRNYHALRTLGGIAPVTRQSGKRLAVRRRYGCNHRLGNAFYHWARVSSQCDPRPKLHYQTLRQLGHSHGRALRGVADRLLALLVAMLRDQTLYDTTRAHAPNPLAA

SEQ ID NO: 234800 - protein, 391 aa, unidentified
MPMYFVGIDISKYKHDCCIISAADQQIISKFTITNDKDGFEQLLISLNSLSNPEDIKIGFESTAHYALNLELFLENAHHSFMEVNPVLIKEYKKSTTLRRTKTDSVDCESIARWLITVEYKPHSKGFYHAYSLKSLTRLRDRLIRQRSFYLVKITNVLDHTFPEFKPFFNERLSKTALYLLENYGSAEKMARMNSASYDKLRCISRGKFSIQQFLRLKELAANTVGVNNSIFDLELNTLLTLYKSLSDEINTLETEIIKLIEEVHPHYMSIPGIGPISSAVIYAEYGDISNFSNPGQMLAFAGIEPGINDSGTESHGGRMVKHGSSQLRYVLLNACLPLIRFDLTFATYYEKKRAEGKKHRVAITHVAKKLIRVIYALERQDVDFNAQKLR

SEQ ID NO: 234801 - protein, 410 aa, unidentified
MTLINFVAANQKYYAFNLLSVFIMVFWSVQYLLQHLLVQTQVSHQLLQPLILILQLPQTPQFRHARPGKFFLPVNGMDYFLPLRLTVRNVLTRRITMNIVFLGIDLAKNVFQLCGLNQAGKPVYTKRTGRKELLQTLANIPACLIGIEASTGAFYWQRELEKLGHKVKVISPQYVRPFVRGQKNDGNDAQAIAVALMQPTMQFVPPKSPEQQDIQALHRARQRIVNHRTATVCQIRGLLLDRGIPIGSAVSRARRAIPLILEDAENGLSSRMRRTIAELYDLFNDLGRRIHFFDKEIETVFRQSEACPRIAKVKGIGPKTATAVVAAIGKGTEFKNGRHFAAWLGLVPRQHSSGDRQVLMNMTKKGDKHLRTLFIHGARAVVRVATNNNDGHMNQWVNQLKERRGFNKTT

SEQ ID NO: 234802 - protein, 342 aa, unidentified
MPHYVGLDVSQKTTAICILDEQGRRLWRGACVTDPGAIAARIFRHAGVVNVKVGVETGSMTPWLVHGLRSAGLDVECLDARRVKAALQMRLNKTDENDAEGLVQIMRTGWYRPVHVKSFDAHRARALLGARAQLVGMRTQLSNMIRGVLKTFGLLPGAGRGLRFDRAVEALLESAPEVSLIVRPLLATWRQLREQITTFDKAVQQRVRADPICHLLMTVPGIGALSSLMYVSTVEDPGRFSRSRAVGAHLGLTPRRYQSGETDRSGHISRCGDGLARTFMYEAAVVILHRVKRSLHLKDWALAIEQRSGPGKARVALARKLSVILHSVWRSGEPFRWATTAA

SEQ ID NO: 234803 - protein, 346 aa, unidentified
MDKVIAGIDLHGNNLVIGVIDEKGKRLNHRKLQCDLKEVVEFLQPFKPQLKSMAVESTFNWYWLVDGLRAHGYPIDLANPARIEQYSGIKHADDKHDAFHLAQLQRLNILPKAYIYDAALRPVRDLLRRRMNLVRQRTALMLSFKSLYARTTGATMELKRLKEITPEEAPKLYEHPAHQLIAQVQSEHIGALNASIARVEKAVQQAARELPIYPRLLSLPGIGRILGMTITMEVGDIKRFKTDGDFASYSRTVDSRRMSNGKKKGENNQKCGNKYLSWAFVEAANFAKRYDDQCRRWYDRKAAKTSTVIATKALACKLAKAAWHVMAHKVDYDPRRMFPELAIKKT

SEQ ID NO: 234804 - protein, 346 aa, unidentified
MTAFAALDVSKRSTSIHIVDEKGVCLWRGKTLTDPDALAEALSPFAGDLALVGLETGSWTTWLWHELTDRGFPMVCMDARQAHAALSVTINKTDANDAQGLAHLLRTGLFREVRVKGWEDMQKRTLLRARATMLRCVLDLANAIRGALRTFGISLPAGTGNGGAKTFERRVAACLTSRADLAIIIGPLLEAWRAGRTQVARHERAIRAIVRSDPRCQLMMTVPGVGYLTAVGFVGAIGDPDTFRSGRTAAAWIGLTPRRYQSGTINQQGRISRQGDKLLRTYLYEAAAHILTRSSKDSALRRWGLKLRDRIGFKRANVAVARKLAVVLHAMWRSGRPFDAEGCVIG

SEQ ID NO: 234805 - protein, 354 aa, unidentified
MNSVKYIGLDVHLSTISAAVLDGEGKLVMESVLATHSAAILDFVHGLRGTLHLTFEEGTQSAWLYDLLVRQVNEVVVCNPRKNALLKAGNKSDAVDARRLAELLRAGLLSPVYHGETSTVTVKHMGRSYEALTEDSTRVMSRLKALYRSQAIPSAGKRPYGGQREEWLGKLGGAGLQGRAQRLYQQLDALQALRREARQELVRECRKHAAAQLLRSIPFLGPIRAALLIGRVQTPHRFRTKRQFWAYCGLALETRSSADYRFVNGQLERTRKPVWIRGLNLNHNHDLKNLFKSAATTASVRPGPFGTFYQGLLTKGMLPAMARLTLARKMAAITLSVWKKGERFDAEKLKPPAA

SEQ ID NO: 234806 - protein, 318 aa, unidentified
MSKRTMVNAGIDTGKRKLDVALDGRSGRLQVDNTPEGHRALSAWLRRHQVKRIGIEASGGYERAVVAQLRRDGFVVVVFQPAQVRAYGYFHLQLAKNDKIDAGLIAACTTAAKKIHAPPDPRLEPLSEHLTFIEQISDDIARHKTRLEGCRDPRVRGIWKEEIARLKRLERAELRQLAASIRQHRDLAERLALIASVDGVGLRTAVAILVRMPEIGRLSREEIAALAGLAPYDDDSGGYLGKRWTRGGRERLRRALYAAALPAAFYWNPQLIRLYQRLTAAGKLHKVALIACARKLLIYVNTVVQRGTPWVRCPAPAQ

SEQ ID NO: 234807 - protein, 400 aa, unidentified
MRAVFGIDVSKTSSEVAILVNGEKVHGYTILNDAIGFNRLLGDLKTVHNPEIIFEATGVYSRRLQAFLEEYSYAYTRLNPLEAKKQLDSLRVRKTDKIDAEKLAKSQLVHNRKPTYVQEEVYQHLRDLSRFYQNMTEDLVRNKNRLHKVLQVTFPELENLLSTPTGEQYWNLVMAFPCKEFVLSLSQSNLCEIIRQSTSKRISEKRVTYLVDKLTKLANQSYCAVKKTSPMLEEVRYYAQELLRLSERRQVVLSDMVALAQPLPEYDILRSIPGIAETTATSIIGELGNIRRFQSTNQINAFIGIDLRHYESGNFLAKEHITKRGNPYARKILFKCIHNIASASHTNPCHIADFYEKRKRQSTIASTKPQTIASIHRLIRTMYYLITHNKLYDYSLTQNR

SEQ ID NO: 234808 - protein, 396 aa, unidentified
MPTTTRHARTPALPQSMPVPPRVLYLALDLGQRHWTLAFTVGRGQRPRVRTIPGGDLARLTTELAAARRRFGLPPESPVVSCYEAGRDGFWVHRALLAHGVTNVVVDAASIEVPRRARRAKTDRLDARKLVTMLVRHAEGEREVWHVVHVPSEADEDRRHLERERQTLVAEHTGLVNRIQGLLATQGVVLTLRGDVPAQLAAVRRWDGTPLPPELRARLEREWARVTAVRAALRTLTARRHQRVTAATPAAADVPAVHLTRRLAALGAIGETTAWLLATEMFSWRAFRNRRQVGGFVGLTATPDQSGERVRELGLTRNGSVELRARVIELAWSWLRFQPGSALSQWYRRRYGSGTARLRRIGIVALARRLLIALWRYAIGGPLPAGAHQKGDAVAA

SEQ ID NO: 234809 - protein, 320 aa, unidentified
MQNATTKPATAGIDTSKAKLDVAVAGNGQCWQVQNALNGWQQLAAHLTKAGITRVGIEATGGYEHGVVAHLRQHGFTVLVLQPVQVKAYARMHLRRAKNDKIDAGTIAACTAALNQDQRQSDERLNDLAQNLTFVEQIEEDIARIKVRLEHIDQPRLRRVAEADIARLTKRRAAELERIAASLRTHDDFARRLNLVLSVPGIGERTAISLIVRMPELGRVSREEAAALAGLAPFDDDSGKHKGHRHIAGGRGRVRRSLYAAALPAAFRWNPALTALYKRLTAKGKAHNAALTACARKLLIYANTVLARNAPWIKNAASYL

SEQ ID NO: 234810 - protein, 427 aa, unidentified
MPYRIAGIDVHKAMLAVVVADVEVDGDWQFARRQFGATPSQLRLLTEWLVEHEVEEVVMESTAQYWRAVWDALERDWQPTQRRRIDAGPTTGALHLAQAQSNHGRPGRKRDFPDAERLVKRLVAHELTLSFVPDVTQRLWRTVTRRKYQLTRNRVQLQNRLESLLEEAHIKVSTLVSDLLGASARRMLHAVANGETDPAAIAALGSPRLHATPEQLCDALGASTDVHPLYRRLLAMTLTELDLLESHMQQLDEELAALLRVHQAAVQRLAAVPGFGVDSAQQIIAEVGPTATTFPTAKHLASWVGACPGHDESAGVNRSHRVPNGNRQMRRLLNQSAHAAVKTKGSIFELLYRRLVGRLGHAQAIGAVAHRLCRLVWKILHDDVTYEERGPVVSQARAQRRAAKMLRELRSLGYRVELTPAPSGNAL

SEQ ID NO: 234811 - protein, 386 aa, unidentified
MALTGVSVANAGESPSTRGPTASSVRPGMHSVGQRETGRIFRHQAQARTVAWDIFQCPNQQGRVALMTTRETVESVSVGIDVSKKFLDVDCFPHRQAWRVPNSPEGHHQLVEKLREMAPQKIVLEGTGGYEFDVFLALTIAKLPVFRVNPRQVRDFAKCVGQLAKTDKLDAALIARFAHVVEFAPQMPPNSELARLQEHVARHQQLTSMFVAESNRLDHARDDEVRNSIAKPVQFLKDELAQQHRQLRQLIQASPEWQPREAILTTVPGVGDKTASVLIAELPELGSLSRQKIAALVGVAPFSNDSGLFKGQRTIRGGRGSVRRILYMATLVASRYNPVIKAHYQRLLAVGKKKKVALIACLRKLLTILNAMIRKQQTWQNATALA

SEQ ID NO: 234812 - protein, 366 aa, unidentified
MKKISIVATNRNEIFKEPKLTIGLDLGDRSSHYCILDEVGEVILEHGLPTTPKGIHQVFSRIPRSRIALETGTHSPWVSRQLTQLGHEVIVAHARNVRLIGESSRKDDQLDARTLARLARIDPELLGPVRHRSAKAQIHLTVIRARAALVSTRTALVNAARGLTKSYGERLRKCGTGQMNREIAKGLSQELREALEPLLEEIESLNERIADYDRRIEKVAKEVYPEVALLQQVQGVGTLIALTYVLTLDDPHRFRRSRDAGCFLGLRPGRRNSGMSEPQMDISKEGDRYLRTLMVQGAHYILGPFGQDSDLRRWGLKLAERGGKNAKKRAVVAVARKLAVLLHKLWVSGEVYEPLRNNHQVVSAVA

SEQ ID NO: 234813 - protein, 462 aa, unidentified
MPTSQTNKAHRPRAVETLAVIHPNAAGLDIGSREIWASVPADRDAEPVRRFGTFTLDLERLVAWLIECQIDRVVMESTGVYWIPVFEMLEARGVHAALVEPRQLKRVPGRKSDYLDCQWIQKLHSLGMLTASFRPDAEMRTLRTYLRPRAELLERRAPHILHMQKALQQMNLQLQHVLSDVTGVTGLKILRAIVAGERDPLRLAQFRNPACKSSTDKIAQALTGRWLPEHLFVLRQSVEFYDFYTRQVAECDAIIERQFATLKPRWEGEVPDDLPPLKPDSHSKNQPSLRTRAELLRVTGVDLVAVHGISASLAQTILTEIGTDMSKWPTEKHFASWLGVAPHNDISGGKILRSRTLPTDNRAGQAFRQAAASVSRSQCAFGAYSRRKKAHLGPMPALVATAHKIARTVYHMLKHHAPYYDIGATQYDRTQQERELLDLKKKAAKLGFTLTPHEPLPIAGHV

SEQ ID NO: 234814 - protein, 343 aa, unidentified
MSHYAGLDVSLKETSICIVDHEGNILREGKVFTEPAQITSFLQKSGLSIKRVGLEAGNLSPWLCHELRNAGWPVFCLETRHVKAALKAQTMKTDRNDARGIAHIMRTGWFRAVHVKSADSQKLRVLLNNRRCLLEKRLAIEADIRGSLKPFGIKLGQITTRNFDERVRELIAGDEMMEAAIFPLLAVRGPLIEQCKKLEKLILDYVRDDEVCQRFMTIPGIGALTALAFKTFLDSPARFTKSKNVGAALGLTPKKFASGEVDYDGHITKCGDDFVRMYLYEAAQTLLTRTKKWSSLKAWGLRIARRSRFQIACVAVARKLAVIMHRMWVDGTDFQWGQQPMTA

SEQ ID NO: 234815 - protein, 400 aa, unidentified
MRVVFGIDVSKASSEVAILVNGEKVHGYTISNDAIGFARLLGDLRTVHKPEIIFEATGVYSRRLQTFLDDNGYAYTRLNPLEAKKQLDSLRVRKTDQIDAEKLAQSQFVLNRKPTYVQEEVYQNLRDLSRFYQNLTEDIVRAKNRLHRVLQVTFPELENILSTPSGEQYWNLVIAFPCKDCVLELSNDELSKSIRLSTSKRISDKRVAYLAEKLIALANQSYCAVKKTSPILEEVRYYTKELLRLSEQRQAVLDEMVELAQPLPEYDILLSIPGIAETTATSIIGELGDIRRFQSANQINAFIGIDLRHYESGNFLAKEHITKRGNPYARKILFKCIHNIASASHTNPCHIADFYEKRKRQSQTTSTKPHTIASIHRLIRTMYYLIMHNKLYDYASTQNR

SEQ ID NO: 234816 - protein, 358 aa, unidentified
METISNKLRDYSNQNIYTGIDVHDTSWKVTIYSDEFELKTFSQEPDVNGLANHLKNNYKNANFLLAYEAGFCGFWVQRAFAEKGINCRVIHPADVPTSNKEQLRKTDKVDSKKIAKGLKNGELNFIHIPDRELELDRQLLRSRGLLAKDSTRVKNRIKSILKLQGIEIPQAYGNGSWSEKFIQWLKALDLKSVSGNVAMQTQIRELVFLNEQKKQTDAAVKTLSASERYKSNAKLLQTIPSVGVLSAMILLTEIGDIHRFKRLDDLCSYCGLVPNCHSSGENERTGGLSRRGNAAMKNVLIECAWVAVKKDPALLLYYKQQITHMQGQKAIIKVARKLLSRIRYVLINQKEYVTGVIE

SEQ ID NO: 234817 - protein, 345 aa, unidentified
MGFLTFLRWMEEILKKTEMKKVIVGCEPTGCYWLTFQKFLQDHGVQLVTVNPFTVNRSMELDDNSPEKSDLKDPKTIALLVKDGRYSTSYLPSGVYAEIREASVCRDQVMKQHVRLSNQIQGWLQKFFPEYFECYSDWDSTSGLMLLKTAPLPKDILRLGAGGVNQIWRDEKVRAAGIKRAKILVEAAQNSVGLEAGEAARLEIWILVNDYIAKTEQLKRLDEYLEEKVKEVPNVEKLLAIKGVGLSTVIGFVAEVGDIGRFTDPKQIQKLAGLEIVKKSSGKKKGQPRISKRGRRKLRRTMYESARALMNWNPAFQDAGIRHFRMCFFTTGTGKEIRWEECRQR

SEQ ID NO: 234818 - protein, 357 aa, unidentified
MLSSNVKYIGLDVHKEAISIAVLNGAGKLVMESIAETKSCTLLDFLHGLRGELHVTLEEGTWAAWLYDVLKPHVREIVICNPRRNALLKEGSKSDKIDARKLAELLRAGLLRAVYHGENELRTLRELARSYLTISKDLKRVKNRLKALYRSWGISCVGKQVYTPRHREQWLNKIAQVGVRRRAELLYQQLDGLSVLRHTVRGELLAESRKHQAVKILRQVPLIGPLRATLLLALMQTPHRFRSKRQLWTYSGLAVVTHDSAQHRYVDGQLQRSKKPQQIRGLNQNHNHAMKDIFKSTALSASCCAGPLQDFYARLLAKGMKPDMARLTLARKIAAITLTLWKKGGSFDAEHLKSQAA

SEQ ID NO: 234819 - protein, 447 aa, unidentified
MATRKRATTESAISLTHPNAAGIDIGSASHFVAVPPDRDDEPVREFHSFTIELHRRADWLDACNVDTVAMESTGVYWIPLYELLQSRGFTVLLVNARHVKNVSGRKSDVLDCQWLQQLMSYGLLHGAFRPAEQVCVLRALTRQRATILRSQGRYVQHMQKALTQMNIQLANVISDVVGETGQKILRAIVAGERDGMTLGGLKNSRIHASQEDIAKSLEGNWRTEHLFALKQALDAFDFCGTQLAECDAQIEAQLQALQSCQGEPAKGKKRGRARNAPGFDLRTRLYQMCGVDLTRIDGIDVTTALVVVSEVGSDMGRFASDKHFASWLGLCPGTKITGGKVMSGKTKRCANRAAQALRLAAAALRSSKSALGAYYRRMCARMDRAKAVTAAAHKLARLIYAMLTKGEEYTDQGQDYFEERYRQRVLHNLAQRAKAMGMQLVPSQSQV

SEQ ID NO: 234820 - protein, 305 aa, unidentified
MSHPATPSRFIGCDVGKTAIVVFDAASGRTSALANTPEVLSRFAASLEATCFVVCEATGGYERDLLAALIAAGVPACRADARKVKAFIRSFGTLGKSDAIDAAALARYGRDRFAELPLWSAREPERDRLQALVLARRDLVKDRLAYANRRAAPAAAPVHPYLEALVESFDAQIKAIEADINALCAACEPIAKAVNVLIAIPGVGQKTAAALIALMPELGSLPRRQAAALAGLAPHPNQSGQTDAYRRTRGGRPEVKRVLFMAAISAAKHHPTLSAFYKRLLNAGKKPLVAITAIMRKLVVIATPN

SEQ ID NO: 234821 - protein, 322 aa, unidentified
MAKHSTICAGIDISKYKLDVALAGRREWLQVENTPDGYAALLAWLRQHRVKRIGIEASGGYEQPVVAELRRKRFVVVVFQPAQVRAYAQFQQQQAKNDKSDAALIAACTVAVRKIHAAPDPRLAPFAEHLTLIDQLGEDSARLKNRLESCRNPRFRQLWTQEIARLQKRQKEELKALAAAIRQHPDLAQRLDLINSIDGIGLPTAVAILVRMPEIGQITREQAAALAGLAPYDDDSGERAGARHIAGGRERLRRALYTAALPASFRWNRQLIALYRRLIAAGKEHKRALVACARKLLIFANTVVARGTPWQDGPADATVRTT

SEQ ID NO: 234822 - protein, 288 aa, unidentified
MAEVIIIGLDIAKYVFHAHGVDGHGRTLFSKRIGRGKVLEFFAAQPSCTVALEACGGAHHWARQLTQLGHQVRLIPPAYVKPFVKRQKNDAIDAEAICEAAQRPSMRFVAVKSEKQQAAGLVFRTRDLLVRQRTQLINAVRGHLTEYGWVAPKGPSHVAMLADLIEEDEMMSSLPEAAHAMFRVMLDLLDSLNDKIADLDKEIAMRAREDDVSRRLMTIPGIGPISATAIAALAPPAETFAKGRDFAAWLGLTPLQRSTGGKQKLGATSKMGERTLRRLLIIGAVAPS

SEQ ID NO: 234823 - protein, 319 aa, unidentified
MNTTTVASLRNKERHIGVDVGKSFLDVSIFELNLHWQQDNTPEGIKQLVSALRRYKLTRVLVEATGGYERNFVEACAEKSLPVIIVQPIQVRQFAKAQGILAKTDKIDARLIAQFGKVMQPDVRPIASKEVRLIRDLLARKRQLNEARTQEINRQHKASKILAASHKRLLKILDKEIAWINDRLTKEVQLVTEWQRTYEILSSAPGIGDGVAYTLLGELPELGKLSNREISALCGLAPFNRDSGQMKGKRRIKGGRAPIRTVLYMAMLSAIQHNPIMKEFYQRLVAQGKHKKVAITACMRKMITILNTMVRNNQEWQMN

SEQ ID NO: 234824 - protein, 404 aa, unidentified
MLAGIDWASEEHAVCVLDDVGRAVDRFVVAHSAEGFERLCGRLARHGDPGQLPVAIERPDGRLVDRLLEAGHPVVPVKTNAIKAWREAEVLSGAKSDAGDAGVIADYLHQRRDRLRELTPFSPQTRALRAVVRSRSDLVDQRIAAANQLNAALDAFWPGAKALFRDIWTPIALDFLERYPTPASAARLGEARMAAFLTKHGYSGRRSPAELVQRLRAAPTGIGPGPESEARRDTMSAMVRVLRALGQAIKDLDRSIAAHLDEHPDADVFRSLPRSGQINAAQMLAEWGDCREAFNSPEAVAALCGATPVTKRSGKRHAVHFRWACNKRFRNAMTIFADNSRRASPWAQSIYNAALDRGHDHPHAIRILTRAWIRVIYRCWLNNTPYDPTQHGAIQRTQQPPAAA

SEQ ID NO: 234825 - protein, 339 aa, unidentified
MNRIVVGVDIAKRVFQLHWVELQTGEIVALQLKREKFLEHFTNRSSCLIGMEACGGSQHWARSLQKLGHEVKLLSARMVKPFVGGNKNDAADARGIWTAMQQPGIKAVAVKSEEQQAVLALHRMREQLVKFRTAQINGLRGLLTEYGEVMPQGRAGIKRDIPGALGRLSDRLPSMVIETLREQYARVGELDEQISQIERRLRQWQREDSATQRIAAIPGVGLLSATAAVATMGDAKAFKSGREFAAWLGLVPRQTGSGGRVRLLGISKRGDKYLRTLLIHGARAVLTNSKSPPEWLTELLKRRPKNVAVVAMANKMARTIWALIAHERAYQSGYVSRPA

SEQ ID NO: 234826 - protein, 341 aa, unidentified
MNITTVGLDLAKNVFQVHGVNEHGVAVLRKQLKRDQVTPFFARLEPCLIGIEACGGAHYWTAKLTALGHRVKMMAPQFVKPYVKTNKNDLLDAEAICEAVTRPNMRFVPAKAPEQQSVLSLHTARESFVHARSAQANQIRGLLNEFGLVVPQGIRHVYERVPDLIEDASNELPGRFRLLIDRLLQHLRELDRQVHELEREIEQWHRSSEVSRRLETIPGIGPITASALVASAGDAGNFKNARQFAAWIGLVPHQNSSGGKTRLLGISKRGNVYLRTLLIHGGRALVQLAQTRADRAGTWLAKLVGRRHHNIAAVAMANKNARLAWALLSTGKAYEPMRAAT

SEQ ID NO: 234827 - protein, 429 aa, unidentified
MSTAMSGLSAGSAAVVRPSSSSLSSSSSSSSSSSSSSSNRMYYLGLDVHARQTTLEMLNDRGQTVKRQTIRGGLDKVVEEVEKLPGPLSIAYEASCGYGYLHDRLAPLAKRVVVGHPAQMRLIFKSKRKNDRIDGGKIAKLLYLDVMPQVHVPGVDVRQWRGLIEFRAATLNRRVALKNQVRALLRGLGLAASVPRGLWSKKGIVWLKDLSGLGETEALRRDMLIDELSEVNRRIKLLEQALAKIAAAHPAVRLLMTIPGVGIRTAEAVVAYVDDVNRFGKMTQLGTYFGLVPCQDSSAAVNRLGHITKEGPATVRKLLCEAAWQARRRSRRVSGWFERITGGDTDRRKIAAVAVARKLVVVMGHMLRSGEAWREGPASTSSSTNTSMRTGCARRLRGSPPEDTVTGNDRRSSVAGAVAGPTVNGERRR

SEQ ID NO: 234828 - protein, 467 aa, unidentified
MVSEVRLGIDVACRADHQASLADERGELIWSGWRFRTTPADLERLWAKLPVGADVLVVMEPTRNAWVPLAAWLRGCGAKVVVVPPEQSADLRDYYNKHTKTDRLDSRVLARLPLLHPEGLRAIGDLGPAESLRRAVRHRSSLVKNRVAAVLRLDALVELLGPAWADVLGSGDYTKTALAVLGRYADPNALKKLGRKRLTALLVRSSRGAWREAKADELLAAADETLELWAAGGLDFAELAEDIAAEVRLVAALDAEIAAVEDRIAGLYDDVDPNGIVRSAPGLGTTLAAGIIGRTGDLRRFANLAGIRAFTGIVPKIDESGITRRHKGITKAGDPGLRQTLFLAADQARKVDPTLAARYHRLVTVEGKTHVSALNSVAPVLMTRIAACWRNGQHYELRDVDGTPITDTQGRAICADRYKIDPKVRAARRATTRAQQLKRRTSRRREESAGAAPATGPSAADPTESVA

SEQ ID NO: 234829 - protein, 395 aa, unidentified
MENPIISCDVSKGSSHIQGFIGLSNPIGSPFVVRHLKCDLKLIKDLAKDLEKQTKKKPIFIFEYTGVYHECIVNYAKSIGLATHAISPLESAKVRKSSIRVTKTDSKDCTNIATVYYTRKTSCFHSNNDDIKALSRRKAELKHECTRVKCVYRRYIDLIWPCIDAYFDTDTQSASLIISRFKHPYYLKDWSAKYIATFLLNHGHFGKNRALEIADKFKEYSSNCVSGVDKKSEYVDCLIRTFERIELIKQEIGNTNLKLERLLRNTIPYNLLKTVPGFGESILLQVSAEIGDYTRFKTSKQFVAYCGLDPSILQSGQDNGEHYSITRKGNKFLRSSFYLAVNQMLQRNIDNQITRFYFKKKSSGLSHKVAAVASCRKLACCIFGMLSNGTCFETI

SEQ ID NO: 234830 - protein, 391 aa, unidentified
MVCVGIDVAKDKHDCCILDSDGIVRADCFTIPNNMDGFKQLLQTIRNCTKKSDKIKVGLEATGHYSYNILGFLLDNDLAVYVMNPLHTNLYRKSLSLRKTKTDRVDARTIATMLLSDVDLKSYTDTAYHNEELKSLTRYRFDKVRERAKLKQSVSRLVTILFPELEKLVPSLHGVSVYALLSEYPGAKQISEAHLTKLTNLLSIASKGHYGKEKAIQIREAAKSSIGSVMPAKSLELKHTIKLIKELTSEIGEIEDSIQQIMDELHPPILSIPGVGIQSAAMILAEIGDFSNFESPDKILAYAGCSPSTYQSGKLTNCYAHMEKRGSRYLRYALYNATKYVCHWNPVFAKYLAKKRAEGKHYNVALSHATKKLVRLIYALQKSGKAYLTAA

SEQ ID NO: 234831 - protein, 433 aa, unidentified
MSFTLESIPIQRFIGIDSHKHYVMVGGMNQQRKWVLRPRKISMARFRDWAAKNLRPDDAVVLETTSNVWDIHDVVSPLVSKTLVANAYKVRQIAEARVKTDKEDVKRLLTLLIANIVPEVWAPPIHVRELRSLISFRSRIGKQLTMSKNRLHSVVQRFNLIPPDGELLADKNQSWWLEQDFSELTALQLQLDLEIITHLEAQKNKIDQKLALLSNSQPWANDVVFLMQIPGFGLLTSMTILAAVGDISRFSHPKKLVGYAGLGAGIHESGQKHQQKSITKEGRKELRWALGQAAWAAVRSDPYWKEQYKRLSQHKHPNQAIVAIARRLLVSAWHILTKREPYRRSDDETIAYKMMTLVPLRDLVSTHGRNRTPRPHSPAVYQIWLASPRRWTSAHSYCSQRQTQTDCSLQRYCFPLTSAQFARVGLLLRPVYN

SEQ ID NO: 234832 - protein, 317 aa, unidentified
MTTPGIYVGIDVAKAELVVATATAVISRVGNDAAGYGELVQRLAGMTVEAVVLESTGCYGQGVVAALVAAGMAVAVVQPGRVRDYAHSLGIRAKTDPIDAKVIAQFGQATKPRLFTPLTPEVLHLRALVDRRDQLIELRKQEQNHLEATTNPTITKDLRASIKRLIVAEKAYTKHIADHIAKHERLARLSDALQDESGVGLQTAATLLAHLPELGTLNRQQAAALGGLAPFDRASGKHDGKRTIYGGRRRLRRALYLAALTAGRCSTWLKDIYQKLLKRGKPKKVALIACARKLLIRLNTIAAKALKPTTQIQGTTA

SEQ ID NO: 234833 - protein, 338 aa, unidentified
MSELATVGIDLAKSVFQIHGVAENGRVLVRRQLRRSQLLAFFEKRPRCLIGMEACAGSHDWGRRLQEMGHDVRLMPPSYVKPYVKRGKTDAADAEAICEAVTRPSMRFVAVKSEACSSVLVLHRTRDFLVRQRTQIGNAIRAHMTEFGIIAAKGAQNVDRLQEQLDRLPEAARMPVSLLFDQLAETNKRIERLTDEIEETYAQDETSQRLATIPGVGMLTATIIAATTPDVSNFDCARDYAAWLGLTPKPHSTGGKQKVGRISKMGNRYIRRLLYLGAMAQIMLRCRLKHEPGPDWLSSMLTRKKTKVVAIALAHRMARTIFAVLRDGTRYKPQATAA

SEQ ID NO: 234834 - protein, 351 aa, unidentified
MSNSVVAFAPGGIEVSHLTLVVALRGPAHDEPLREFPNTGEGHQGLLRFLERGARPVRVAMESTGLYGLDLALTLHQAGVAVMVANPRAVRHFAQALLQRSKNDQRDAVVLREFAARMPFQPWRPPSAAALKLVAVARRLEALTDMLAAEKNRLHAASLSEALPALIRRDIQRSIQTQQRAIDRLTRTAQEFILADPELARRYELLLSIPGFGATSAVHTLAELTLLPADLDVRQWVAYAGLDPREYTSGTSVHKKVRISKAGNKHLRRALYMPALVAVQHQPQVRAYYDHLLARGKTKMQALVATMRKLLHAIYGMFKHDQLFDGQKVYTLTSPALAPALSNSEVACAQT

SEQ ID NO: 234835 - protein, 289 aa, unidentified
MGNEKRRFSNDTIGHRELIKWVKQLKVPVQVICESSGGYERALVQAFAGAGLKISLVQANRVRQFVRAAGILAKTDRIDAEVLCAFGKVMGPQAVTAAKLEQEHLRELESQRRHLTHLLVMELNRGARVSDACVQRLNRRLIKQIKNQIEQLDLLIKGHINQSHELSAKAAKLMSISGVGTRTAALLLARLPELGELNRREIAALVGVAPFNRDSGRMCGRRAIYGGRKPVRHGLYMAALVAAHHNPFLRDFYLRLRAAGKPAKLALTATMRKLLIALNSALKTDPTYA

SEQ ID NO: 234836 - protein, 386 aa, unidentified
MKDETFVPREYDVFAGLDVDKKSIAATFSSPQGFIRSLHMPYSVDYLLNHVRKHFGDQKVAFVYEAGPTGYGLYDGLVAQGYRCLVAAPSMIPRAPGQRVKTNRLDSRGLSESLRGGQLKSIHVPSPIYRELRHLTQLRDTVVREAAAHKQRIKALLLLEGIGFPPATGGRQWTLRVKAQLRKLRCSRTVRFKLDQLLDSLEFCEKQVVSSTKEIRRFCKEDVELFQSIEYLMSIPGIGWIVASQLLARMGDWREIDNVRQLGSFLGLVPTENSTGDSVDRGSITRAGDGRLRSKMIQAAWSAIRQDAELREFYRSVCQRNPRGKGARIAIVAVARKLSTRIYAVLKKQRPYIVRKQVHSAPLTQEETSPQGTTRRCAEPGETDNS

SEQ ID NO: 234837 - protein, 311 aa, unidentified
MKIDPCSIGCDVSKHHLDVFDGQTGRAIRIANDADAIADWLSRLDGRTVFVTFEATGRYDSRLRQALVAAGIAHTRVNPARARDFARALGLLAKTDRIDARLLATMGSVLRLGPDQPTGDDAARHTLAELHGRRDQLVAMRQQERLRLADSTPAEAPSIERHLVWLDAEIKAIEAQRSEALRSHAELGRLYRLLTSVPGIGPVAATTLIALMPELGNTSPKAMAALAGLAPFNRDSGQFRGTRTIRGGRKRVRDALYMAAVSAWHSHTRLGTFARDLIARGKPFKLAIIALARKILTVANAVLRDGQAYRA

SEQ ID NO: 234838 - protein, 338 aa, unidentified
MASVKGDIIMYYVGIDISKRFVDVCLLADGMKGKRKTKTLPNGPNAVQALAEWLTRQKCDPGQAHIIMEATGVYHEHLAYGLHQSGIAVSVINPHRLREFARGMGILTKTDKVDAYVLACYGGLRQPEGWSPPSPEIRKLKALLQHRDSLLSDKQRIENRLSTLASTQVPEEVVASLDSMVRHVKSELERIERLIEDHIDKHPGLKNDLKLLKSIDGVGDQIGWNMLATIRGGHFRSAEQVAAYLGVIPVERRSGTSVRGRARLSKIGPPAMRAKLYMGAIAAISHNRHVKAQYERLLLKGKAKMLAVGAAMRKLVHLCYGVLHTQQRYDKNYGVVAS

SEQ ID NO: 234839 - protein, 313 aa, unidentified
MYYIGIDVSKKDLSVFNGKLDLKFINQEGLRPFKKYLKKKYKNFSDLVIIFEPTGIYSFNLKEFCAENSIKAYIVNPKRSHSFARSLGIRPKDDKIDAQILYQFHRLIDSKDIKVPKIDQQTKVLSSYLTSYEFAVKQRVAISNHLESLRDKKLVSLLKKELKRAQKLEDKIFNDIKEYIRQNQNLREDYQRLLTISGVGEKMAIALLTLFKTYQGTNRAQITALVGLDSTKRESGSSVRGKAKISKNGKAIYRKVSYLPAVCATVHNQKIKIFYQRLLANHKPKKLAIIASMRKILLIAHAMYRDKTEYVAA

SEQ ID NO: 234840 - protein, 423 aa, unidentified
MNHLTGGQYTAYIGIDWADTKHDICLQAANTHQREFDCIPHQVDEIEQWALSLYQRFGGPIAIALELSHCPIVYALQKYDFLVLFPINPSTLAKYREAFTPSRAKDDPTDAELALDLLLCHPDRFQPLAPQSVELRALAALVEQRRGLVNDRVRNTNRLRNTLKQYYPQVLEWFDRINTPLFCDFIARWPTLEQVKRARKSTLERFFRQHRMYRLQVLEKRYQSIKAATALTQDAAVITPHRLHAAILAEQLRVTLQAIHRYDEEIARLAPQHPDYELFSALPGAGPSLAPRLLVAFGEQRQRFTNAAEMQKYSGVAPVTERSGRKHWVHWRWQCPTFLRQTFVEWAAQTVNKSFWAGAYYRQQKAKGASHQAAVRALAFKWIRILYRCWQAQTPYDELTYLEALRRRGSPLLNQLSTVTENA

SEQ ID NO: 234841 - protein, 352 aa, unidentified
MTVTIVETRAEIRAITGGVDTHADVHVAAALDPIGGLLGVKEFPATAAGYGRLMSWLGGFGTVAVVGIEGTGSYGAGLARHVTTAGVRVVEVDRSDRQDRRRQGKSDPLDAVSAARAAQSGRARGASKGRDGAVEAIRALMVAKRSAAAERTQTINQARALILTGPDDLRARFTRHTPAALVTELAALRPRPGSTVGYATRIALRELGRRAEFLDGQLERLDELIGPLVAARAPGLLALYGIGPHTAALLLIAAGDHPGRLRSEAAWAHLCGAAPIPASSGKTVRRRLNPGGDRQANHALWRIVFTRLGSDPATRAYAERRTAEGKSKKEIIRCLKRYVAREVYPHLRTTAG

SEQ ID NO: 234842 - protein, 355 aa, unidentified
MIIIGADYHPGFQQIAFVDTDTGEVQERQLQHREEAEKFYRELAAQGQKVRVGMEASGHARWFERLLAELNFELWIGDAAEIQTKRVRKAKTDREDARLLLRLLLEDRFPRIWVPSWENRDLRQLLWHRHRMVQARTRIMNQLQAVALNEGLRAKKKLWRECGRRQLESFPLAAWASRRRQDLLELLGRLNPTIAELNQAVDQEVERCPAAQRLMTHPGVGPLTALAFVLIIGEAERFGCGKQIASYVGLVPLEKSSGNRRRLGHITKQGNSMLRFLLVEAAQVTARSIPEWRSRYFHLRMRRGRKIAKVAMARRLAVRLYWMMRKQWDYEQLKKFGSHAGQPGTGDGVYRTPSN

SEQ ID NO: 234843 - protein, 339 aa, unidentified
MIKLGIDVHQDYYVVVKQEGGTNPKPAQRFSKEAFLHWAAKLRRQGGEIHAVYEACGFGFSLQRQLSALGIQCRVVCPQKLDEQNKRVKTDGLDAKALCLKLDRFVQGNRAALALVRVPTEEEEQKRAIHRQREQLVKTRKVLEAQGRSLMVNYGMEPVSSWWKARTFAQLQVPEWMKELLQNSQPILLALQEKIRALTVQLQAAAISQQPRGLGLLSSVVIDREIGNWTRFKNRRQVGSYTGLCPGEYSSGNTRVQSCVTKHGNPRLRAALVETAWRLVRFQPDYRAVKKWRHLLAKGALATGAARKKAIVAVARQLAVDLWRIRTGRVATETLGLIN

SEQ ID NO: 234844 - protein, 341 aa, unidentified
MAKTAVGLDVGSSSCHLVALDHEGRMLRNMKFPTSEAKLIAAVAGLTGEVHIHLEASELAGWVRGVFQGRVARIVTSHAKANAWIANDPLKCDRRDAFKLAELLRLGRVHEVYYPEDESRRLFKYLVQHYDDVTDQEIRLKLKIKARLRAQGIILKGHGVYSARGRLLALQQIPAPAARQMIEQLYAVLDHTLQTQREALTLLRRQARQYPEVERFQTVPGVGIIGAARFSAYIQTPHRFSSKRKLWRYCRLGITERSSDGKPLGRKRLDQAGNGRLKDLSRKAFNGALHTRADNAFKRTYRQALARTHDATHARLTTQRKLLAVLRALWKGGTVYQDERG

SEQ ID NO: 234845 - protein, 355 aa, unidentified
MSSKADTAIARTIGIDTGKNTLHLIGLDEKGAIVLREKVSRTRMTARFVNVPPCLIGIEAGMASHHIARELVALGHDVKQVPPAYSKPFRQGHKNDFRDAHAVAEAVERPSTRCVPIKTDEQLDLQALHRVRSRLISNRTAVTNQIRGFLLEHGIPVRQGHHFLRRQLPQLLATRVDVLSPRMIRIIGDLMADWSYLGERIERVTDEIEALARADEACQQLITVPGIGPIISSAMVAAIGNGAAFCKGRDFAAWLGLVPKQMSTGDRTILGHITKRGNRYLRTLFIQGARAILLRPTGWAKHSFGSWLAAAARRMHRNVLTVALANKLARIAWTILAQGRCYEARVEPRVEPAAV

SEQ ID NO: 234846 - protein, 340 aa, unidentified
MEIFTGKPEGVMKLTPVGIDIAKNVFQVHHIDEETGEIVNKPIKRAKFLEYFVNRAPCLIGMEACGGAHHWARQLTRMGHQVKLMPGEYVKAFNIRNKKDPADARAIWLAVQQPSKPVAIKTEMQQAMLALHRTREQLVKFRTMQINALRGLLTEYGEVMAKGRAPLDRAMPDVLARVADRLPAALIDTLREQWNGLTGLDEQIATIERRMREWKKEDQEVKAISEIPGVGLLTATAAVATIGDAKAFRSGREFAACIGLVPKQTGSGGKVKLHGISKRGDTYLRTLLIHGARSVITNAKQPDPWIEQMKKRRPPNVVVVALANKMARTIWAVLAPILAT

SEQ ID NO: 234847 - protein, 445 aa, unidentified
MQIVYRRCCGMDVHKDSVTACLLLIDDGGEFQVEKRRFGTMTRDLKEMASWLEAQGVERIAMEATGVYWKPVWNILEQHKTFELLLVNAQHIKAVPGRKTDQKDSEWIADLLPHGLLQGSFVPPLQIRHLRDLTRMRARIRQDLATFANRVQKVLEDANIKLGSVASDVLGVSGRRMLKALMGGQQDPEQLAELALGRLRERIADLQPALEGHFTEHHRFQLEILFQFLEFGEKQLGKLETEIRRLVAEVRQEPASPAPSSETPKPGKEASPLPKAVELWKTIPGIDELTATTLLAEIGADMGQFPSPHHLASWAGLCPGNNESAGKRRSGKIRKGSVWLRRALCQAAWAASRTKKTYLAALYRRLIIRRGKKRTIVAVGHTMLLIAYHLLKRGRPYQELGPDYFDRLDGRALKKRLVKKLAGLGYEVTLRPLAAPSPDMSPQTE

SEQ ID NO: 234848 - protein, 432 aa, unidentified
MKYALNQVLPDVPAGQVFAGIDWATADHVACVVGMAGRVIDRFGAAHDKAGIDALISRLRRGGVSEVAIERGDGVLVEALLAAGLTVVVVTSRQVKNLRSRYGAAGAKDDRFDAFVLADTLRTDRARLRPLIPDAPATLTLRAAVRARKDLVAHRVAACNQLRAHLAVAFPAAVGLFRDLDSPISLAFLARFGSYDAAGHLDEQAIAAWLKTIPVRGRPAPVSVLCARLRAAPGGATGQDGAAQAAITAALTATVTMLAAQVKILETGIGIQLAAHPDAHIFTSLPRAGTLRAARLLAEIGDCRSRFPDPQALAALAGVAPVTRQSGTHLSHAFRRAVSRQLRDAVCDFANDSRHDSAWAASIYDAARARGKDHPHAVRILARAWIYVIWRCWQAGTAYDPAKHNALQAILAARDQASGPAAAATPTPGQDR

SEQ ID NO: 234849 - protein, 331 aa, unidentified
MSNFILYLGIDVSKLTLDLACTIDGQTIFTSRSVENNLSGFKTAFEWANKHAQKQKCTSIHVCIEATGRYSEEVMVFFQQLSLKVSLINPAQVKSFGKSIMLRTKTDKVDAQLIALYSAKMQPPATPKLPEELIELKKLVRHLDSLIKQRAQQKTRLESATHSIIINSINESITHFNKQIKEIEKLIKDHVTKYPLLQKNIDLLTSIQGIGEKTARILLCELYPQEQGHIDAKAQTAHAGLAPSQKQSGTSVHGKSAICKAGNSYLRNCLYLPALVATRHNSVINEFYNRLLAKSKPKKVALIACMRKLLVISIGVLNNNTSFDPNWSKQN

SEQ ID NO: 234850 - protein, 424 aa, unidentified
MKKVDYLSTLFVGIDIGARQNVVSAINFEQEFFIKMKPVPNTQSGAEQLESMLVKILENNIFKVTIIGLESTSFYGVHIANFLSASEKFVPYKPYVYCLNPKEVANYKDSFNALNKNDGIDSFVIADFARVGRIHTEPWRGSQYLALQRLTRHRLHIVECLTREKTYMLSNVFLKFSEFALLDGEEHPFSNKYGATASSILTDFLSSEDIANASIEELVEFINTKSRKRISDPQMTAKILQQAARNSYRLDKCLYEPLTISIACSFNCIQAFEKELSTINKAIEKAVMGMNPVEYQILMSIPGFGPVYSSGILAELGSVHAFPNNDAIAKYAGIVWKENQSGDFKAENTPMNKAGNRYLRYYLIEAAGSVIRHVPEYQAFYQKKFAEVTTHQHKRALALTSRKLIRLIFGLLAKNQLYSSNRVD

SEQ ID NO: 234851 - protein, 322 aa, unidentified
MSQPNPLCVGIDVSKATLDIAASSDVAQFTVSNDSDGFNAIITGLRRHSVALVLMEATGGLEVAVACSLQAEGFEVAVVNPRQARDFARAMGYLAKTDRIDARVLTQMAEVINRHPERKRFIRALPDAERQALAAMVVRRRQLIAMLVAERNRLHPFHPQNKKSINTIIKALEDELARLEKDMNSHIRNHFKEIAERLSSIKGVGTMTVSAMLAEIPELGTLSRREISALIGVAPVNRDSGTMRGRRTIFGGRAGVRSALYMAALVATRFNPVIKTFYVRLLAAGKAKKVALVACMRKLLTILNAMLRKNEEWDESYHHVAP

SEQ ID NO: 234852 - protein, 361 aa, unidentified
MMGTMTWVGFDVHARSTHGAAIDTMTGELSRVRFGAGIEGPLAWLAELPGPVKACYEAGPTGFGLYRAATAAGVGMQVIAPGKTPRGPSDRVKTDRKDAELLARLLLAGSLTRVVVPPPEVEAARELTRSHDACRRDLMNARHRVSKMLLRHGRVYPKSTTWTAEHRRWLSQQQFDEPTSDLVFADLIASVDGLTSRKAAIALRLSDVATDERWWPTVARLRAFRGIDTLTALSLHLELGADWKRFERAPALSAWLGLTPTLSQSGESARQGAITKTGSTLARRLLVESAWHYSRQPRLGATLANRQAGQPDHILAISNRAQQRLHKVNRSMKARGKPHNVTVVACARQLACFLWAAATAD

SEQ ID NO: 234853 - protein, 425 aa, unidentified
MTENNYISVGIDVGADFSYMSIALPNRTLVGKPFKITHANQNSLFTALERIRETEKYNSLKARVFLESTGVYHYPLFRWFRNEGFDVAVINPLITSSSKNFNVRKVHNDKFDSKKLALLALNPELKISVIPSELVLSIRNLVREYYRLKDCQSAYVNKLTAALKVSFPEYIGVFSKITVKTSLSLLKRYPTPDAVLSARKSTVIKIIKNESCFGDKYAEEKYQKLIQAAESAKIFSCPVSSDAILIRSFISFIKNYEKEMQQLLRTIRQILDEHPEKTFVKQIQLLESIKGCGFLSAVTLMCEIGDFSVFSSPKQLYAYFGLDPEVKQSGKFNGNDVKISKRGSRLARRVLHMMAVNNIAVSKNKVSKNPVMRSFYEKKCQSKPKMVALGAVIHKLCNIIFAVLRDNKPFEIRTPEQHCSVYLTT

SEQ ID NO: 234854 - protein, 336 aa, unidentified
MTIIRIGLDTSKHVFQLHGVDENEQPVLRRKLRRSEVEKFFAKLAPTRIGIEACGASHHWARVLRRLGHEVVLLPPQYVKPYVQRGKNDAIDAEAICEAMSRPTMRFVPVKSAEQQAALTMLGVRDLLVKQRTMLINAIRGHAAEFGVTVAKGPKQVIELLKRLAIEEGVPALAREMVSMLASQLDGLDIKLKAIEARLMAWHRQDQTSQLLATIPGIGPIGGVSFALKVPDPKAFRSSRHFASWIGITPREASTAGRQRLGRISREGDEDLRRLLVIGATAVIRAAKPGRVSPWLMGLLAKKSKKLAAVALANKTARIIWAMMISGETYRLPTEA

SEQ ID NO: 234855 - protein, 317 aa, unidentified
MIDDAGREVKKGRFPTTREGLEKFSGDLPGDAKVAIEASTSGIFAYEYLDERGIGVHLAHPTLVKPFAKKHVKTDKVDSEVLAQLLRMDYLPESYVPEGEIRDLRTIVRHRASLVRLRTSIKNRVHALLTREGIELPKLSDIFGKRGMEFLKGVKLQQQRRTVLDDYLRVLEVLNCVIKEVEETLEEKAGVKEEAKWLMSVPGIGFHNALLILSELGEIGRFKRPESLVCYAGLAPKVEQSGEHVRYGHINKHSNGFLRWAFIQSAKAAVRSSKPNRFQRIYNKIKARRKIGNRRNGSSYGEIGLLDTDKEGILQRE

SEQ ID NO: 234856 - protein, 349 aa, unidentified
MTTQRLSYVGQSVYVGVDVHKDTYAVTCVCNKQIVKTATAKADPAGLTASLSQWFPGARLYTAYEAGFSAFVLHRALTKAGIMNIVVNPASITVAANDKVKTDRRDSKKLALDLSDGRLQGIYVPTEDEELAHLLPRTRAQIVEHRATIARQIKAKLHQFGLIAPSSRRMISNRYLREIAAWSLAPELRVSLTLLAEQWRFATRQLIEIRRLLQEQAAAQAELETVYRSVPGIGAVVARTLATELGDMTRFANERALFSYTGLTPSEYSSGASVRRGPMSRQGSGRVRHLLIETAWRALPRDIVLQEMFDRIAATRGKKRAMVAIARRLTGRIRACFRQGTTYAVGTYA

SEQ ID NO: 234857 - protein, 445 aa, unidentified
MSDRSGLSRGDRNRNARLARLRALLPPDHAIVGIDLADNKQAAVVTDHDSRVLARRRVSARAWELGDLLDWAVARAAGAGFGSVTVACEPTGHRWRVLDQLAAERGLALVCVQPLLVYRAREGEDLTWDKSDPKDAVIIARLAAGLHCYEPERADAVWARLRHLGARRSKLTADTTAEVNQVRDLLECAWPAVLAAAGVPFRAATWRAALAVALDRGAGDLARVRRLGPARFEAAVRRELPRWGARRPCLRIVRAVFAALADPAGVTVHRPGALERAQLALGDWQDTRAQLADVEARMAAILDDLQLTGLVTTIAGLTPVGAAAILAETGDLARFATPRALVKHAGLCPRDNASGGYQGKTSISGRGRPALRVAAWRAVWAALPNNPVMAARFAYLTTREHNRLARQQARTACAAALLRWIHVVITRRIAWDPAIAGTTPLRQAA

SEQ ID NO: 234858 - protein, 382 aa, unidentified
MKKNSIARLQVTKGQIRRMAAKQRLTVGLDLGDRSSRYCVLDEAGNQASEDALPTTKAGLDSLFAKMAPCRIALEVGTHSPWVSRQLAAMGHEVIVANPRKVRLITQSVKKNDRMDAEQLARLARVDPKLLAPIRHRGPEAQADLAVIRARAGLVDARTELINTARGLAKPMGERLKKCDADYVKEALADGLGEATQSVIRPLLKSVEAISQQIAVYDQQIQEIEKRYPETTVLKQVYGVGTLIGLTFILTLEDGERFVHSREVGPYLGLTRKLRDSGDRQPELGISKAGDELLRRLLVQAAHCILRQGAPDSDLRAWGLTKVQSGAGKKGSKKRKKKAAVAVARKLAVLLHKLWVTGEVYDPHYNRKAVEAAAKGKAKVAA

SEQ ID NO: 234859 - protein, 371 aa, unidentified
MNSIVYIGLDVHKESYTIGSYRIEEDEVKFVQKIKADYKMVLKYVEQMRKQYGEDSEFLCGYEAGPLGYRLYHELNNHGVACVIMAPHTLGVTNNNRVKTDKNDAKNIARSLAFRLYSEVHVPTAEDEEIKEYIRMRDDMKTISKQTKQRILAFVLRQGYKYDEGKSHWTIAHVKWLRSLKFDGLLQEVMSEYLIMYDSQISKLERLDERIEELASGERYAENVKKLQCLIGVKTYTALSVIVETGDFRRFAKPDQYASFLGLVPSEDSSGESQKQGEITKAGNRTIRRLLVEASQSYSRGIVGHKSKELKRRQRGNPPEVIAYADKANERLRRKFYRLVLKNNKARNKAVTAVARELSCFMWGLMTSNIA

SEQ ID NO: 234860 - protein, 449 aa, unidentified
MTKSKRSHPERDISPTHRDAAAIDIGAKMHVAAVPPDRDTEPVRSFGTFTGDLQRLADWFERCGVRTIAMESTGVYWIPVYEILEQRGFEVMLVNARDAKHVPGRKTDVSDAQWLRRLHEYGLLRPSFRPKGELAALRAYLRQRERLLDYAASHIQHMQKSLMQMNVQLHHVVTDITGATGMRIIRAIIAGERDPAALAVHRDRRCHATVEVISAALTGNWRDEHVFALGQALELYDAYQAKLTDCDVQIEAVLRRLRNAANPAGPLPAPRHRDNTANAPTFDARAALHAVLGVDLTQIHGLGASLALKLIGECGTDLTAWPDAKHFTSWLCLAPANKISGGKILSRRTRRSGSRAAALLRLAAVTVGRTQTALGAFYRRLSARLGKAKAVTATARKIAALFYNTLRHGMAYSDPGASYYEQRYRARVLSNLQRRAKSFGYVLQEASSA

SEQ ID NO: 234861 - protein, 343 aa, unidentified
MKIHALGIDLGKTVFHLVGLDASGQVVVRKRCSRTQLLAFTANLQVGLIGMEACSGAHFLGRALRAQGHEARLMPAQYVKPYVHTNKSDYIDAEAIAEAVQRPRMRFVPIKTEEQLDLQALHRVRERWVMRRTAVVNQIRSLLLERGLTLPKGRSHLDEQLPRILEDGELNLSDSFRVLLAQLKLELEQLAARIEEMDRVIQKTARENEACQRLTEIPGVGPVTATALIAAVGNASAFEKGRKLSSWMGIVPGEYTTGGKQKLLGISKRGNKYLRRLFIQGARSVLQQRHKQAPGLSEWLAQLLARTHQNVVVVALANKMVRMAWAVLCKNERYRAPVLAITT

SEQ ID NO: 234862 - protein, 331 aa, unidentified
MKRFNRVGVDVSSKELVVAIEASGRREAPIVLANDAEGHRKLIKLTTKRGASARVVLESTGTYGLDLALALHRAKRIDVMVANPRAIAHFARASLQRSKTDRLDAETILEFATRMPFESWSPPAPQILELRALSRRIEALSKTVVQEKNRLHANDQSEELSEFVKQDIRELAGLLERRIERLRQQALLVIEQSEDLARAFAHITSIKGIADASGIAILAELAVLPADMTTRQWVAHAGLDPRQHQSGTSIHKPARISKTGNAHIRRALFMPALVAVQWEPNIKAFYEHLLASRKTKMQANVAVMRKLLHAIHGMLQHDQHFVGEKFFRMKT

SEQ ID NO: 234863 - protein, 343 aa, unidentified
MQVHSVGIDLGKTTFHLVALGAAGKVLVRKKFTQKQLLTFTANMQTSLIGLEACSGAHFLGRALRKQGHDVRLIAAQFVKPFVKSNKNDFVDAEAIAEAVERKNMRFVPIKTDDQLDLQAIHRVRDRLISRRTAVINQLRAFLLERGMVFAQKPARLKAAMTDILENAEADLTPQMRNLIDMLWSEWKLVEQQIEELNDELERISASDAGCTRIRQIPGIGPVVATAIVAAIGNGAAFRKGRGLRCMAGIVPRQYSTGGKAKLFGISKRGNVYLRKVLIHGARAAVLRIKRDRAPIGAWLDALDARAPKNVVVVAMANKLARIAWAVLSSGNDYRPTANAIAA

SEQ ID NO: 234864 - protein, 370 aa, unidentified
MKNNITIVGLDTHKNSITIVTAETDDNQEVRIYGKIGGDMASLDKAIRKLQSKGATLRFVYEAGPCGYEIYRHLIKQGFECAVIAPSMTPKKSGDRIKNDHRDAEKLARLERAGELTHIYVPREDDEAMRDLTRGREDMVQAQRTARQKLGAFLLRHGYRYSGKKAWSLAHMRWLADIKMPHPAQQVMLQEYTNTVKECTERVNRLTEQIQKLLPEWRMAPVVKALQALRGVADIVAVNTVAEIGDMRRFTNPTQVMNFLGLVPSLNGSGEKITRGSITKAGNGHVRRVLVEAAHAYAFPARVSRILLKRQEGLPQSIRDIAWKAQLRLCGRFRRLMARGKHRNKVVIAIARELVGFIWAIAMEVQPQSA

SEQ ID NO: 234865 - protein, 355 aa, unidentified
MNSVKYVGLDVHQSTISVAVLNAEGRLVMQSVIATQAAAILDFIAGQRGTLQVTFEEGTHAAWLYDLLVRRVARLVVCNPRQNALLKSGNKSDPIDARKLAELLRAGMLSPVYHGENSTGGLQQLVASYTALTQDTTRVMARIKALYRSQAIACAGKKPLGKRHRQQWLEKLTAAGQRQRAEWLYAELDAVQGLRRQARQALVAENRKHAAAKLLRTMPFLGPLRAAVLLAKVQTPYRFRSKRQFWAYCGLGLETRSSADYVIQNGEVVRRRRALYIRGLNWNHSHPLKNLFQSAATTASTMQGPFREFYQARVAKGMQPALARLTLARKMAAIALILWKKGEVFEAKHLNSQAA

SEQ ID NO: 234866 - protein, 443 aa, unidentified
MSKKRSAHLRGERGQAFADLVRGIPPEQILCVSLDISKYFHVAMIHNGLGEIVTQPFDVDIYQSGFDQLCQAMDHAKAHTQAQVVLVGMEPTSHYFENLARHLIEHSQPVKLINSFAVKQNREQQLMRREKSDQIDVAAIGDLLRRGEGTAYKPAAGIYLQLQQIDRVRLGKVKIAGMLKNQIIGHLDRIFPGLALMDESAKERYTPLFSTDFWECQTLQDLIRVCPNPNALLKLSPQQLVQAFHDQQRRLGPATATKIIAQAHKTLLPDPELAAIRCELLQHDLALLEAVQATITLLEQRLTDLVAQTPYHVWTKLKGLSKVQVASLAATMGDPAHYTDAAQIFRRSGLVSGRNDSGKRQRKGKGSHILKTGDVYLRRALMNAVATLILHQPILARYSKQLQITKPAGVARVATARKTNGILWAILRDQSSNTLIYCKGAEM

SEQ ID NO: 234867 - protein, 340 aa, unidentified
MKDTVIGVDLAKNIFQVHGASRAGEVMFRKKLRRQQFMQFMATQSPALVVLEACGSAHYWARELAGAGHEVRLIAPQYVKPFVKRQKNDAADAEAIVIAARQPEMRFVEPRTEAQQARGVLFRARQRLVHQRTELVNALRAVLYEFGLVVPQGIAHIRHIEAMLGEAVLPEAVKQECLDLLRQISEQSVRIDVRTKKIRMLAQESENTCRLQSMPGVGPLTALAIEAFAPDLQSFRRGRDFAAWLGLVPRQFSSGGKERLGKISKAGQADIRRLLIMGAMTQVNWASRKAPAPGSWLARMLARKPRMLVAIALANRMARAIWAMATKQEDYRDPALSVAA

SEQ ID NO: 234868 - protein, 342 aa, unidentified
MSFYCGIDLSARESQICVIDKGVKKVLEVKVPNKLEHIKQLLAPYKADLEIVVESTFNWYWLVDGLQAAGFKVVLAHTLGLYMITAAKVKTDRRDAFALAKLLLAGMIPTAYIYPAETRPVRDLLRRRGWLVQVRAGEYGSLRRLLLRHGILSHKQQEIKQATEEDLEKWFTHELVQLHASQELERIHLYSQQIETLEKTILERAKKARAFEKLQQLPGIGPIIALSIYYEMGELGRFASVKDFSSYCRVVPGVAQSGQMTRRGRGSKQGNPYLKWALSQAAVHAVRCYPGVRRYYERQLQRHRGRARQMVVYNIIAHKLAQAIYHVLKEDSEYREELLFGK

SEQ ID NO: 234869 - protein, 322 aa, unidentified
MNKYKETFGVDISKDVFDVHGSTTGHHQYKNDEPGFKKFLKRLPDDCLVAMEATGYYHYRLAQFLYKNEVVVSVINPLIIKRFIQMKLAKIKTDKSDAKMICEFALINQVPLYTALTDVQSECLQLFRVLDNFIKHRTATKNKMHGEEVLGIPSKFTYRSLRRNKKHYDSEIKAIEEKILSLVKEDQQQQLTLLISVPGIGQKTALFLIIVTDGFSKFETASQLCSYVGITPTTRESGSSVRGRPRISKVGNKKLRNLLFLCSFNACKHNKACRELYERIVNKGKSKKLALIAVANKLLKQCFAIAKSGRPYDESYVSVLPK

SEQ ID NO: 234870 - protein, 309 aa, unidentified
MLTAEADKCKTKVVVNTAAGVQALLAWCAKHGAQPAQLHAILEPTGLYHEQAATALPQVRVSLVNPAQARDFAKALALRSKNDALDSYVLARYGQTLSPALWHPAPLHARQLRALLTRREALSKDLLRELNRKEKSQFSPSAPLVDGSIDKAIAFLREQIKQIERAIDQHIDNHPDLKQDCELLNSIPAIGPQAGNAILAVMHNRHIDSAQSLAAYLGVVPVQRQSGSSLNSCARLSKAGPSQVRATLYMAALVGTRHNPHIRALYQRLLKAGKSKKAALGAAMRKLVHLCFGVLKNRIPGTLLYAIDA

SEQ ID NO: 234871 - protein, 459 aa, unidentified
MGKAKACKGGKNQLQVIHPRAAGIDVGSKFHVVAVSAEYDPDPVRKFNSFTTDLHRLADWLKAVGVTTIAMESTGVYWIPVFEILESRGFDVILVNAREAKRVPGRKTDIKDAQWLQQLHQYGLLSASFRPGEKIASLRSYLRHRERLTEYAAAHIQHMQKALMQMNLQLQHVVSDITGDTGMRIIRAIIEGERSATKLASYRDPHCKQSEKTISAALTGNYRPEHVFSLKQAVALYDFYQKQIKECDQEIEKALAALNSDKNPPSEPLPKARRTQKQKNEPGVPIREMLYTLTGVDSTQINGIGPYTTLRLVAECGTDMAKWPTSKHFTSWLTLSPGNKISGGKVLSSRTRRTKNRATTLLRIAAVNIGKTQTALGAFYRRLAARVGKAKAVTATARKLAVLFYTLMRYGKAYVEPGADYYERQYRERVLLALSRKAAALGYRLAQKQETSPVTGNVS

SEQ ID NO: 234872 - protein, 339 aa, unidentified
MKITTIGLDIAKTIFHLFAVNKTGGYVKKKQLKRTQMQQHFAQLEPCLIAMEACGGANYWARELKALGHEVKLIAPQYVKPYVKGNKNDYNDAEAIAEAVQRPTMRFVPIKSVEQQDIQNLHRQRERIKKARTALSNQIRGLLTEYGIVINKGFVAVRKGLPDILEDGENGLTMRARELFADLLEELRFVDEQYKHSEKQIEISNQGNDTCRRLDEILGIGPITASAVYAAAGDGKDFVNGRHFSAWIGLVPGQHSTGGKTVLLGISKRGNAYLRTLFIHGARAVLRHSAGKGDRFSLWAQALLERRGHNKACVAVANKMARMAWVIMARGESYRPAMS

SEQ ID NO: 234873 - protein, 392 aa, unidentified
MVVSVGIDVSKDKHDCFIVSSEGGVLADVFTIPNTMDGFCCLLQRIRDCTAPQDKIKVGLEATGHYSYNLLGFLLDNGLATYVLNPLRTNLYRKSLSLRKTKTDRVDARTIASMLLSDAGLKPYTDTAYHNEELKSLTRYRFDKVKERAKLKSSIARLVCILFPELEKLVPSLHIASVYALLEEFPGAKQVAAAHLTRLKALLETTSKGHYKRDMALEIRDAAKNSIGSQMPAKSLELQHTIRLIRELDREIDEIEEQIQSIMDELHSPITTIPGLGFRMAAMILAEVGDFTRFDSPDKLLAYAGMSPSTYQSGQLKNCYPHMEKRGSRYLRYALYNATKYVCHWDLAFADYLSKKRAEGKHYNIAISHAAKKLVRLIFAMEKSRQPYCSAA

SEQ ID NO: 234874 - protein, 418 aa, unidentified
MADVMIGIDPHKNSHTAVAIGLVEERLGELRVCACPSQAGQLLAWAQEWPERAWAIEGAAGLGCLLAQQLVAAGERVLDVPPKLAARVRLLQSGNTSKNDPNDAYSVAVAALRSKAWRPVVAEDHAVVLKIWAKRHRDLARARNQACCRLHAVLCDLVPGGIRREISAGKAAAILEQVTPSSPAARARCELAAEFLADLRRLDAQLRECNKKLAAAVRASGTCLTGLFGVGPVIAGTVIGDVRQVFRFPDRDHFAAWNGTAPVEVSSGDRKKIYRLSLRGNRRVNHAIHMAAISQIRHKHSDGRAFYDKKVAEGKTHKEALRALKRRISDAIYAALVADARQATSCPKGPGGQPGNHSASRAAGSRPAHRHFGQATPGPATTIRPDLTAGTARMQPNEVLHGRAGRSPATSKKSPTTT

SEQ ID NO: 234875 - protein, 367 aa, unidentified
MEKSSTVFVGMDVHKESIDMTLAEPGGEVRRLGQIGGDRGSLLKMVRRQQSKGRKLVFVYEAGPCGFWIYREITALGHACMVVSPSLIPRRAGDHVKTDRRDSERLASLARAGELKAIHVPDIRDEAIRDLVRGRDDAVIAQRRVRQQLEALLLRNDIRYVGRTSWTGAHRRWLSELKLPEPAQRIVFEEYVDAITVATGRIERLTQAIDTEVLTWRFAPVVAALQAMRGIQFVHAVTLIAELGDLTRFGSARQLMGYLGLVPREDSSGEHRRQGSITKAGNSYARRALIEAAWAYRHPARVTRIIATRQTGLPKTACDIAWRAQLRLSAKYRRLNARHLHHNKIVVALARELSGFVWAIGQCVKPQ

SEQ ID NO: 234876 - protein, 405 aa, unidentified
MGIYVGIDWAEAHHDICVLDETGTVLTKRRIAEGLEGVGQLHALVADHAAEPNQVVIGIETDRGLLVGALLAAGYQVYAINPLAASRYRERHVTSGAKSDPGDAKVLADLVRTDRHNHRPVAGDSELAASLQVLARAHQNLIWSRQRLVNQLRNNLREYYPAALAAFGTELAHPVALGVLDAAPTPAMGRTLSQSKLAAILRRAGRERGVEEKAAAIQAELRAPQLAAPALIGEAYGKSVASTVRILRAFNDQLASLEAELAPSFEKHPDAEIYRSLPGLGIVLGARVLSEFGDDRTRFAHPKARKNYAGSSPITRTSGKSRVVLARMARNRRLADACHQWAFCALTPSAGARDYYHRLRQRGKTHHQALRALANRLVGILHGCLDHRQTYREEIAWPRSLPVAA

SEQ ID NO: 234877 - protein, 348 aa, unidentified
MAHFVGLDVSVKKTSVCVVDAADRVILEQTVPTEPADIIALLTSLGVSFCRIGIEAGPLSQWLVNALTAAELPVICVETRHMKALLTAQQINKTDRNDARGIARMMRVGLFKPVHVKTLVAQEQRMLLTSRKLLQRKLLDLELELRGTLRNFGLKVGIVSGSGYEARVRELVVGFPRLAAIAEPLLNVRRVMRQQLAVLHKMLLDTVRDDPVCRRLMTAPGVGAVVALTYRATVDQPQRFVHSRAVGAHVGLTPKRYQSGETDYDGGVSKCGDALMRTMLYEAAHSLLTHSRKWSWLKAWGIRVAQRRGMRRAIVAVARRLAVVLHRMWVDGSEFRWSKHSVAVPPAA

SEQ ID NO: 234878 - protein, 384 aa, unidentified
MNRIVKIGMDVHSTNYTLCAMEPVLDGEDRIFANIKVTPDYKNVIQFISKLKNKLGASDTYSIECGYEAGCLGYSLYHQLTDAGVKCTILAPTTMLTPQGKRIKTDKRDALMIAQCLSYGGYNAVHVPDEKDDAIKEYLRMRDDHKLVLKKIKQQITAFCLRHGHFYDGNKWTIKHREWLKTLNLSNLYRETLDEYMATYEEQESKIERLDRRIEELASDSAYKEKVKKLGCFLGIKTHTALSLIVETGDFKRFAKGNTYAAFLGLAPGESSSGDNVNRTGISKAGNSHLRTLLIEGARGICKGKIGHKSKDLRLRQAGNSAEVIAYADKANVRLRSRYYRFMRHEKKKNVAVAAIARELACFIWGMMTDNISIVPERGKQNVA

SEQ ID NO: 234879 - protein, 345 aa, unidentified
MTEAYDGRQVVGMDLHRRRSVLVRMTEDGRKLETVRIGNSPAALRAVIARAGNNPRVVVEATYGWYWAVDVLEAAGAEVHLAHPLGVKAFSYRRVKNDERDCADLADLLQLGRLPEAWIAPEPVRALREITRYRHKLVGQRTSCKDQVHAVLAKAGIPVTRSDIFGPGGGIWLDGLPLPQPYAGKVASLRALTAVLDGEIARLEEQAAGLLAGDRGYAAIRQLPGIGPVLGAVITAEIGDITRFRTPGQLASWAGLTPRHYESDTKVIRGHVSKQGSRMLRWAVTEAIQRQPAGTRPRQVKDAIIDRRGAGARSIAKTAAARILLTQVFYGLRDGHIRRVTSQAA

SEQ ID NO: 234880 - protein, 340 aa, unidentified
MSEITTIGLDLAKNVFQVHGVDETGTVVVVKQLRRGQVIGFFASLPQCLIGMEACATAHHWARELAALGHAVRLMPPQYVKAYVKRNKNDAADAAAICEAVKRPSMRFVPVKTIEQQSALLMHRARDLLIRQRTMLVNALRGHMAEFGLVEAQGLHKVAALITIVMDESDRRIPDMARQALKMITDQISDLQTRISALETQVLAWHKNNPVSQRLATIPGVGPIIATAIAATVADAGVFRSGREFAAWLGLVPRQNSTGGKARLGGISKRGNSYLRRLLVNSAHTVLLCSKAAKADPWIISLRGRKPRLVVAVALANKTARVAWAIMSRQDTYRRIAAAA

SEQ ID NO: 234881 - protein, 375 aa, unidentified
MINYTIFVGLDVHKDSITVAMARSGKQDVESIGFINNDSTSVRKMVKRLEEKGGELSFCYEAGPCGYGLYRQITAMGHSCMVAASSLVPQRPGDQVKNDRRDARKLARHLRNGDLTSVWVPDEDNEALRDLSRARQSAKEDLHRNRQKLLKFLLRLGVRSPQGIKNWGSKYWQWLKALKLDNSIQQMILSEHIYAIEECDSRVSRFEKEIEAQSQDGPHQKTMAALQGLKGVALITSTTILSEVGDLTRFKNPRQLMAYAGLVPSESSSGNIIKRGSITKSGNSHLRKIIVEAAWHYQHRPTLSIGLKKRQEELSEEIKQISWKAQHRLNLKFRRMVAKGKPSQKAVIGVARELLGFIWAVGQAVGKENELSEAV

SEQ ID NO: 234882 - protein, 320 aa, unidentified
MSTDGVFVGVDVAKGSLEIAVHQPAQGWRVRHTDAGVRHLVTRLTALGPALIVLEATGGLERACVAALAAAGLPVSVVNPRQVRDFAKATGRLAKTDGIDAAVLAHFAAAVRPPVRPIPDTATQHLAALVGRRRQLVGMLTAERNRRTTVLPGLRKELQAHIGWLERRLAHLDEALAVAIRQSPGWRHREDLLRSVPGVGPVLARTLLAELPELGTINPKALAALVGVAPLNRDSGLFRGRRVVWGGRATVRAVLYMAALTAVRYNGALRTFYRRLRAAGKLPKVALTACMHKLLRILHAVIKHQQPWRPGHGATATESA

SEQ ID NO: 234883 - protein, 357 aa, unidentified
MIVMKYYISTTEFNCGIDLHARQMYVCVMDRPGNKLVHTNIRNNDFAYFLKLVAPYRHDLTVCAECMFGWYWLADACQDADIHFVLAHALYLKAIHGGKNKNDRIDSEKLAHLLRTNLIPPGYVYPADKRPLRALLRQRLLYVWNRTELLSRLQSHQLAYNRPTHRQTPYNRSSWGQQLLSAEPDPVRQLALQNDLALVGHYDTQLATLEQELLKLTKQTASRDFTLLQTTPGIGDYLGLTILHEIGDINRFPSVKDFLSYCRLVKGTVASAGKFKGLRGAKLGNPYLRWAFGEAAVIAKRDPLVIGPLAQRLEARLNNKFKANTVLAIKLARAVYFMLKTKTVFDPERLVAALSKN

SEQ ID NO: 234884 - protein, 403 aa, unidentified
MVMVYNYRGGVKVKERKSELSLVMQDRSECCSLSLRFLNLNGNIRSGTCITYHDDRLKEVLLKNQYTNKEGFIMSTYKVFIGIDVSKKYLNAAILNGDTTVTFKSLYCPEEFEKELNRHLKEIKKSELLIVMEHTGVYHLRLAHYLYESGYNVGVINPYSMRKFFEAKGKRAKTDKVDSIVIAEYGRQFFDGKLYRPKTEAQKQIETRLRLLDDFQKQINMVKNQREALSHVPMEGIKKVLRYYDGIIKALSSSMKKVEKEIQKLCREKFKKQWELLESIPGISDRAISVVVSMLRGFEGFSRAKEVGSFVGICPSPYESGDTVRGRGSIMKRGNSYVRKVFYMCTLSAIRVNVYCKGLYERLLKKGKSKKLALVAVGHKLLRQCFGVLRSGKEFNPSLVKST

SEQ ID NO: 234885 - protein, 418 aa, unidentified
MGKRKNRVCGADVHKDIIVATIQDSDDTEFQEKFGTTSTELGRFRDWLIAHNCEQVAFEATGVYWFPVYDALSPSIDTIVANPWMIKGIPRNKSDTLDSKWIAGNCLDGKIKRSRVLPKDGRDLRTLTRARSAYTKTRTQLRNRIHKYLALCGITLSSYISDIFGKSGRHILDGLIESKDIDTIMDGIPSGKVKNKREPIKASLGNGLDDVSRMLIKDTLELLDHLDEKVSDTSLEILGRLQERARDLAIVMSVPGIGFVSASIILAEIGDYHDFQKSEQLVKWCGLAPGLNESAGKKSPCGITKQGSKHLRTILVEIAQVVAKMSKNNLSSFFHRLRARKNYNVAITALARKLISIIFHLLINQELYQEDNCATVKTKPIKKDLLCLSKDEQFRDGVAAIVDAFYYFKKKSSLEGGG

SEQ ID NO: 234886 - protein, 403 aa, unidentified
MNAVGIDVSKGKSMVAILRPYGEIISTPFEIKHTSSDINALVEQIKSVEGESRIVMEHTGRYYEVLAHQLAQANLFVSAVNPKLIKDFDNDSLRKVKSDKADAVKIARYALDKWQNLKQYSVMDELRNQLKTMNRQFGFYMKHKTAMKNNLIGILDQTYPGVNTYFDSPARSDGSQKWVDFASTYWHVDCVRKMSLIAFTDHYQKWCKRNKYNFSQAKAEEIYGTAKELVPVLPKDEVTKLIIKQAVDQLNSASATVESLRSLMNETAAKLPEYPIVMEMKGVGPSLGPQLIAEIGDVTRFHSKGALTAFAGVDPGVNESGTYAQKSVPTSKRGSADLRKTLFQVMDALIKTMPQDDPVYMFLDKKRAQGKPYYVYMTAGANKFLRIYYGRVNEYLSTLPESN

SEQ ID NO: 234887 - protein, 317 aa, unidentified
MGRKLHEIDVPSDIGELKAYLKKLQGKTRLTFEESTASQWLYTELKSSVNELIVCDPRRNQLMAEGPKNDKIDARKLVHLLKAGLMKEVYHSNDKFLYLRRLVSGYEDLVKAGVRAKNQRYALLRACGKKGKEKKNLNLDSRGAKFVLECLDRQIGAYEEEKKNFEKEFDRLAKKYPVIRHQKSLAGIGVINAVKIVARVVTPYRFADKGHYLSYTGLIKLKKESGGKIYGKKNPRYCRQLKSVYKAGVMAAIGGNNPINDYYEYLIQEKGYPECNARHKACRRLAILSLGVFKSCKKYQPYRRDHVKESKGTTSSL

SEQ ID NO: 234888 - protein, 344 aa, unidentified
MSEVIIIGLDIAKHVFHVHGADERGRALFSKRISRGKLLDFFAAQPSCKVALEACGGAHHWARQLTQLGHEVRLIPPAYVKPFAKRQKNDAIDAEAICEAAQRPSMRFVAVKSEEQQAAGLLFRTRDLLVRQRTQLINAIRGHLTEYGWIAPKGPSHVAMLADLIDEEEMASSLPEAAHSMFRLMLDLLAGLNSRIADLDKEIARRAREDEVSRRLMTVPGIGPISATAIAALAPPAETFAKGRDFAAWLGLTPLQRSTGGKQKLGTTSKMGERTLRRLLIIGSSAVVQQASKRGAPKGSWLEQMLARKPRMLVTVALANKMARIVWALLVKQENYRAPAPARA

SEQ ID NO: 234889 - protein, 376 aa, unidentified
MPLQNAVDTKLYIGIDIHKKSWSVSIRTESFDHKTFSMPPEPDVLYEYVAAHFPSHDVSITYEAGCCGFSAARYFLNLGWEVTVVNPADVPRMDKQNYQKTDKIDSRNLCKQLQKNNLKAIHIPTEEQEQFRSLLRQRTNITKELRRVKSHIKGMLLFHGIAIPPEFDNVNWTIEFKKWLSELKWTSTCGKESMESKLRTLNFFHSEYLNGGNLLRAHCRKYHNKDYYLLTSIPGIGGFLAAAILSECGDLRRFENEKQFSSYIGVVPGIFNSGGSESNLGVTPRANTILRPYIIESAWIAIRKDPEIQVYYKSHFGKNPKCIIVKVAHKMAKRILSIIKSGKPYQINNNITLDNKIILPKDTEVWEDEMGTGIFV

SEQ ID NO: 234890 - protein, 345 aa, unidentified
MQSMYYIGLDVHKKTISYCVKDGSGIVHAEGAIPATRWDLDRWMKMLPQPWTAAMEATIFTGWIYDHLKPHAAALKVAHPLMLRAIAAAKKKNDRIDANKIADCLRCDFLPECYMASTEIRERRRTLRYRNLLVHQAVQLKNKISGLLMEAGVSYNKQKLHKVGYFKELLATNPDINEGLRPLLRLCRETLVRLQKTESALVRSLQRDSLLAERVQRLMTIPAVGPITALTWVLEVGDVKRFSSIKRAISYCGLCGAEKSSADTVKRTPISKQRNKHLQSVLVEAAKMAPRLSPELALIYDREKQKGNANRASLAVARKLVAYLVAIDRSQRDFLVVEKENCAAA

SEQ ID NO: 234891 - protein, 331 aa, unidentified
MKIKDTIGIDISKLTFDVRIHSNQDYRIFENSIKDFKELTKWAFKSSAFSKDEIIFVFEHTGLYSHELAVYLSEQNIPFALVPGLEIKRSLGIARGKDDKVDATKIALYAYRLKDEIKPTELPLEDIMALKRLLSLRERVVKQRAGYKTSLKEQKRVLAKNKNKVLFESQEKIIIYLSKQIDEIEKEMDNIIKKNERLSQIYKLITSIKGVGPQTALFMIAYSNGFTKFKNARKFASYCGIAPFPNSSGTSIRGKTKISNLANKKIKSLLDLCAKSSIQFNEEMKVYYNKRIEKGKNKMSTINIIRNKILSRIFAVVERNTPYINLMKYAN

SEQ ID NO: 234892 - protein, 400 aa, unidentified
MRAVFGIDVSKASSEVAILVNGEKVHGYTMSNDALGFARLLGDLRTVHKPEIIFEATGVYSRRLQAFLDEHGYAYTRLNPLEAKKQLDSLRVRKTDQIDAEKLAQSQFVLNRKPTYVQEEVYQNLRALSRFYQNLTEDIVRAKNRLHKVLQVTFPELENILSTPSGEQYWNLVTAFPCKDFVLDLSKDELSESIRQSTSKRISDKRVAYLAEKLIALANQSYCAVKKTSPILEEVHYYGKELLRLSEQRQTVLDQMVELAQPLPEYDILLSIPGIAETTATSIIGELGDIRRFQSANQINAFIGIDLRHYESGNFLAKEHITKRGNPYARKILFKCIHNIASASHTNPCHIADFYEKRKRQSQTTSTKPHTIASIHRLIRTMYYLITHNKLYDYRSTQNQ

SEQ ID NO: 234893 - protein, 355 aa, unidentified
MESVKYIGLDVHQSTISVAVLSSEGKLLMQSVMATKANAVLDLLKGLRGVLHLTFEEGTYSAWLYDVVVRQVARVVVCNPRKNALLKSGNKSDQIDARKLAELLRAGMLSPVYHGEQSTRTLQQLVASYTALTEDTGRAMRRSKAVYRSQAIACAGKKPFGKRHRGEWLARLTDSGQRRRAEWLYQELDAVQVLRREARQAVMVECHKNPAAKLLRTMPFFGPLRSAVLIARVQTPHRFRTKRQFWTYCGLGLETRSSADYVEKDGQIMRRRKPVYIRGLNWNYSHELKNVFKSAATTASAMDGPFRAFYEMRVANGMLPAMARLTLARKMAAIALILWKKGETFAAEHLKLQAA

SEQ ID NO: 234894 - protein, 253 aa, unidentified
MTYVGIDVSKATFVVAYSSAKGSRTNSFKNTIKGIHEFIQTISVAEHHCVLEATGNYSSLLVYLLSEAGIAVSLENPLKIKNFARVMLSITKTDEIDARLIAMYGEKMQPAPYKLRSDTILVLKQKRTVIRQLKKQLVATGNLKGSMEALPFFDPKCKKTIERTIIFLEKQIKELEEELASLAQSEYKKQMDLLTSVKGIGVTLAAALIMATGGFTYFDNAKQLTRYLGLSPTYQQSGTSVNVKGHILSLIHI

SEQ ID NO: 234895 - protein, 359 aa, unidentified
MRIIGCDLHSRQQTLAMLDTSTGEIEKTTLKHEEDIVREFYSRLPRPVRVGIEATGSMQWFVNLMEELGIECLVGHPAEIRAAEPRKQKHDRRDADLLLSLLVEERFPSIWLPTKELLDIRALLRHRHQWVGLRVKIQNALQAIALANGLRRGSSLWTQAGQHAIASLPLSPHAAYRRNELQAMYVKFETEIEKLNQRVEQQARERFGARLLMTHPGVGPITALATDVFLGDPARFANSKELASYVGMIPGEYSSGKRQRLGGLTKQGNPLLRFLWSEAVIHAVRRDPPLKHFYRRKLIQKGLGKARAAVARKLGIRMWIMLRDRIEYNEFCRRGQMQQRSGDARAGMPEQRYGAKVAG

SEQ ID NO: 234896 - protein, 421 aa, unidentified
MPNIEIGVDSMVKENFIYVGIDLHKETHTAVMIDCYNQKLGEITFPNRPAAFPKLVTKVKKCNTDGKEVVYGLENAYGYGRALAVWLIDKGYLVKDVNTAISHRQAKHRGAMYRKSDSDDAKAIALATLNMLDKLPDACPNDAYWSLGQLVHRRDNIMKQRTRLVNQLHEQLCIAYPSYKQFFNDISRPTALYFWEHYPSRKYLKGKSVEDLRAELVPVSHNKCSTKTREKILDAVASDKVKNIDYQDARDMVTLSIVSDLQHYDSQLAEVDKMLEQMYKMLGCTLTTIPGVNVITAVKILAEIGDIKRFSNANKLAQFAGIAPLHLSSSGKGKDVATKQGNRRLQATIYFLAIQMVQVSSKGTPRNPVVRAYYEKRKAEGKTSQQALICISRRLISIIYGMLKHGTEYRMPVVESAGENR

SEQ ID NO: 234897 - protein, 459 aa, unidentified
MQVVYQRCCGLDIHKKLIVACLVRMSSQGVHKEIRTFSTILADLYRLRDWLVASECQMVAMESTGVYWKPIWNVLEEELALLLVNAQHMKAVPGRKTDMKDAEWIAELVQHGLLRASFVPPRPQRELREVTRYRSKLVAERARLVNRIQKVLEDSNVKLASVATDITGVSGRAILRALLDGEDDPEVLAELARGRLRSKRDELTQAVQGTLRDHHRFLLTSQLRQLDFYDLQIAELDQEIARRLGVQTGPDDPELQGGEPTSVQPASSADPVPDGGPDLATRSPQPDPARSQAEVIRILDEVTGINQRIAQIVVAELGIQLDQFPSEGHVVSWAGLCPQAKISAGKRLSTKTGKGNRWLKQALIEAAHGAARSKNTYLGAYYQRLKKRMGSKKAIVALAHRILVIIYHLLKEEQSYRELGPGHADEQAAESSKRWAIRRLEQLGFAVSLTPKDHEEEVA

SEQ ID NO: 234898 - protein, 448 aa, unidentified
MFTMHYKRLLTLIDSVSSYLSVGLDVGADFTWMSIALPNGSFIGKPFKIVHSDPRSRDLAVAKIKEAQETYSLKSRCFLESTGIYHIPLLCFLRDKGFDCSVINPIITKNSTNINIRKLHNDKFDSKKAALVGLNVSLKTSILPDDSVVDLRNLVRDYYYFKDLQSAVALKLTAELKVSFPAYAKVFSKVTTQSSLKLLTAYPLAADMLAASKDDIVKIIHSTARFGESYALRKYDAIIAAAQDAAVFGRALPSNAVRIRLYIDTYQEYQKHLDALLKALHETVERLQDTLIYDQICLLQSLRGIGFLSAVVLIAEMGDFKLFSSPKKLYAYFGLDPAVKQSGKLNGDKVHMSKRGSSLARRVLHMAALNNVKVDKGSGTPVNPVVYDYYTRKCSGKKKTVAMGAVMHKICNIIFAMLRDNKPFEVITPEEHCRRFAAEHPDKIRKAA

SEQ ID NO: 234899 - protein, 407 aa, unidentified
MYYLGIDISKKSFTVSVLDEEGEAITKFLTFPCTRKGFEKLVDKICSLKLEKDKTVIGIEATGNLWENLYSFLEGYKVIILNPYQTRKYHQVLSKKAKTDKVDSLVIAGLLRSKEALASYVPEEEVQVLRELVRLRHHLQKDKKNYLRKAYNLLNLVFPEYTDLVKSPFKKVSSMILKKYPTAIHMARARKTDLVKMARRIQGNNYSSELAEKLIKAAKESIYSGKASEVRGMALRILIDEIESLKNKIKEIEDKIEEILSSNQPSSPQKRLLGIPGVGPKTVAAFLGEVGGDVSRFSSANKLIGFIGWHPRISESGESKNLHPKMSKKGPSALRAALYMAAVASLKHNPYLRSLYHRKISEGKESKQALISVGKKILCIMYSMLKYEADYDPQRIFFQFEKEQVLI

SEQ ID NO: 234900 - protein, 313 aa, unidentified
MHLGIDVSKQTLDCCLISDGIFYERKFYNDSSGMNKLQKWLDEHGAENTLHCCCEATGTYYETVAVALSGQYKMSVVNPRTIKGFGTAVMNRSKTDRQDARLIARYCQTMNPEEWKPPESAHRQLQEIVSYIARTKHQRASEQTKYKTAPDFIKPHIQETINYFTKLIACLEQELQDYYRDNPEQDKRRKTLKSIDGIGENSAAALCSIITDRFTHAKQLVAYLGLDPKEHQSGTSVKGRTRISKIGKSETRAALYMPALVAYRMGAFPDFTARLEAKGKPPKVIIVAIMRKLAVIAFHLLKNGENFDRSRYR

SEQ ID NO: 234901 - protein, 325 aa, unidentified
MQIYGIDISNKHLDLYSEDQTGKPVVKRISNKLKPIVKFIYSIPKDSTICAEHTGVYGNLLVQIASSLNIKIALIEGYVINRSFAMEKGKSDLIDSKRIWSYGIRFYDKLRFTTPLKESMHELKEIQTLRTLLVKQRKMLQTNLKGKQKQVINSVKVYQLQQELICFLTNQINDLEKQMKLIIEQDQSLNENYKLATSVIGIGKIIATELIIHTENFTKIDTAKKAASFSGVCPYPNESGANSKKQRVSKRSNKRMKSLLFLAALNVCNSNKEFRLYRERKMLEGKHFFLVMNNVANKLLRTIFAVIKSGNIYDPMYISKDPRLA

SEQ ID NO: 234902 - protein, 347 aa, unidentified
MNLYNNTHPYYCGIDLHARLLYVCILDQEGNTLVHKEISADPNKPKLLLKPYIGNIVVGVECMHCWYWVSDFCDDLGVDFILGHALYMKAIHGGKAKNDRIDSYKIAKLIRGGNFPVAYVYPKAMRATRDLLRRRTKIVRHGADLKAHIVNTTSQYDLPVYKPNLKDKEACLNFKSTFSDISAQRNIDLDMVILECYREQLAKVEWFIEQQARHHNPMHLPILRSINGVGRILSLTIIYEIGNIKRFESVQQFASYSRLVKCRAESAGKNYGTQGNKIGNAHLKWAFSEVAVLYLRGNNKAKKHLLKLQKRMSKAKALSALAHKMGRCIYFMLKNETVFDEERFFKR

SEQ ID NO: 234903 - protein, 391 aa, unidentified
MVCVGIDVAKDKHDCCILDSDGMVRADCFTIPNNMDGFKQLLQTIRNCTKKSDKIKVGLEATGHYSYNILGFLLDNDLAVYVMNPLHTNLYRKSLSLRKTKTDRVDARTIATMLLSDVDLKSYTDIAYHNEELKSLTRYRFDKVQERAKLKQSVSRLATILFPELEGLVSSIHGTSIYALLSEYPGTKQISEVHLTKLTNLLTTASKGRYGKEKAIQIREAARASIGSVMPAKSLELKHTIKLIQELASEINEIEDSIQKIIDELNPPILSIPGMGVNSAAVILAEIGDFSNFSSPDKILAYAGCSPSTYQSGKLTNCYAHMEKRGSRYLRYALYNATKYVCYWNPVFAEYLAKKRAEGKHYNVALSHATKKLVRLIYALQKSGKAYLTAA

SEQ ID NO: 234904 - protein, 438 aa, unidentified
MSNKVIFNLDELFISVGIDVGADFSWMSIALPNQQFVGKPYKILHNSIDSLTTAVSKIKEAEELYSLESRIFLESTGIYHYPLFCYLRDKGFNCSVINPIITKNSTNINIRKVHNDRFDSKKAALVGLKPDLKISLMPSNLALNCRNLCREYYDLMDNRSAYVNKLQGELRIAFPQYLGIFSKVTINTSLTLLETYTSPSAFLKADKQEIIDIIKSTARFGLTYAQNKYNAIIQAATDANQFGYIIDSNIKRIRLYISFIRKYDEEINSILESLHELVDANEDSDFVKQIHLIETFKGAGFLSAVSIMGEIGDFSAFSKPKQLFAYFGLDPAVKQSGKFEGTKVQMSKRGSAIARRVIHTLALQSISISRNREAKNPVLLEYYLKKCDSKPKLVAMGAVSHKVCNMIFAILRDNKPFKIIAPQEHIKQYNATKCDIAA

SEQ ID NO: 234905 - protein, 433 aa, unidentified
MLKLNYMSTLFVGIDVSSKTNAVYAMDFEENKYISSSFGNNQPGADQLVTMIAECMHKHKNLDTVLIVLESTSVYSVHISSFLSTSEVLMPYKPYVFCVNPKATSNYRKSYIGMEKTDPTDAYLIADFGRVGRTKKLEPWRGGQFIALKRLTRHRMHLSECITREKTYMVSNLYLKFSELQLLEGDDKPFGSLYGAASSAVLTEFLSPQEIIDMPEEDLLTFLAQKSRNRISDLSKTSELLRKAARDSYRLGKCMYEPLNISLASSFNCIHAYQKEIKLIEQAIEKCINGMNPNALIILQSIPGIGPVWASGILSEIGDITAFHSSDALAKYAGLYWPKGDSGDFTSEDNKMSKAGNPYLRYYLGEAANSVRKHIPEYADFYARKYAEVTKHQHKRALALTSRKFVRLVFGLLVKNQLYTGEKLDAEYNIESN

SEQ ID NO: 234906 - protein, 345 aa, unidentified
MYRTKVGVDLAKKVIQVCIYRDKKVLSNVEMTPDEFLCWLINAKPATIIFEACGTSNYWLQRAIDAGHDARLISAKLVSIVRQNQKTDKNDALAIIQAALLPDITFISGKSVEQQQLQSIQRLRELAIKQRDASRKQIIALLLELNFRSPNNGAGMIRKIDDMLEDAENGLSMEFRQAISAAKGQFELVVETIATYDRSLEKSIQIHPDCKKLLKLEGVGPINAVNLYISLGCAELGTFSKGKDASACIGLTPIQHSSGGKVKLGTIGKQCKNSMLRSQLISGAMSVVRQVVKREAKTKKEMWLKALAERRGNKCAAVALANKTVRTAFAMLTQGTEYKAELLAA

SEQ ID NO: 234907 - protein, 331 aa, unidentified
MSVFVGVDVGAKTVVLAWRKGGRTRGKLDIQQTPEGHAQAVERIKALEAVQVVMEATGVYYLDLAVALSKAGIVVSVINPKSFHHFAQLKLAQSKTDPLDAALLAEYAERMTPAPWTAPDTLRMALRDIGRQINRLTATRTQAKNRLHALRSKRDTLALLIEDEVEAVERLDQRIERLSNAAQRLIAEDAVLNSQFQHLLAAKGVGVASAIALLAELSVLPQHLKAPQVSRYAGLDIRLCQSGSSVNKASRLSKAGNAYLRSALYMPALSAVRHDPNAKAFYLSLQRRGKKKIQAVCAVMRKYLTGLWACIQLGEPFDSSKLFSKIHLAEA

SEQ ID NO: 234908 - protein, 330 aa, unidentified
MELPTIGIDVSKETLDVSVITGGKPLGKQFANTDQGYGLLIGWLVHRKLGQVHACLEATGRYSLGVALALHAAGHVVSIVNPAQIRDFARTKLGRNKTDKVDAGHIREYGAVFRPPAWRPPSPALRRLCELQTMRAGFLASRIEWQNRAASLDAASLGGDAAAGVLAAATIAHFQAQIAAVDQAIAQTIDQDDDLRGKRDLLLSIDGVGQTLAALVLAELPGSDVITTGAQAVAYAGLNPRRFQSGSSVNRPTRISKIGNAVLRAGLFMPAMAAMRHNPAVAALAARLHAKGRLTPKQILIAAMRKLLVICFGVLKSGRPFDATLAMPPA

SEQ ID NO: 234909 - protein, 405 aa, unidentified
MFDTENVGVFLGLDVGKSTHHGHGLTPAGKKVFDKPLPNSEPKLRAVFEKLTAKFGTVLVIVDQPASIGALPLTVARDASCRVAYLPGLAMRRIADLYPGEAKTDAKDAAVIADAARTMPHTLRSLELTDEITAELTVLTGFDQDLAAEATRTSNRIRGLLTQFHPSLERVLGPRLDHQAVTWLLERYGSPAALRKAGRRRLVELIRPKAPRMATRLIDEVFEALAEQTVVVPGTGTLDIVIPSLAGQLAAIHTQRRAMEAQINSLLEAHPLSKVLTSMPGVGVRTAAVLLVTVGDGTSFPTAAHLASYAGLAPTTKSSGTSIHGEHAPRGGNRQLKRAMFLSAFACMNADPASRTYYDKQRARGKTHTQALLRLARQRISVLFAMLRDGTFYEPRTPSDVELAA

SEQ ID NO: 234910 - protein, 402 aa, unidentified
MNAVGIDVSKGKSMVAIMRPFGEIVSAPFEIKHTASGINSLVELINSVEGESRIVMEHTGRYYEVLAHQLSEANLFVSAINPKLIKDFDNDSLRKVKSDKADAVKIARYALDKWQNLKQYNVMDELRNQLKTMNRQFGFYIKHKTAMKNNLIGILDQTYPGVNTYFDSPARSDGSQKWVDFASTYWHVDCVRKMSLNAFIDHYQNWCKRKKYNFSQSKAEEIYGKAKELVPVLPKDAITKLIIKQAVDQLNSASTTVESLRTLMNETASKLPEYPVVMAMKGVGTSLGPQLIAEIGDVSRFTHKSAITAFAGVDPGVNESGSYEQKSVPTSKRGSSDLRKTLFQVMDVLIKTHPQDDPVYQFLDKKRAQGKPYYVYMTAGANKFLRIYYGRVKEYLASLPES

SEQ ID NO: 234911 - protein, 351 aa, unidentified
MIIIGVDYHPSFQQIAFVDAETGEYGERQLHHSEGEAEKFYRDLKLKGANVRVGMEATGHARWFERLLTELGFELWIGDPAEIKARRVRKQKTDRKDAELLLKLMREDRFPRIWVPSPENRDLRQLLWHRHRLVQMRTRIMNQLQALAMNEGKRWKTKLWSQQGRAKFEKLPLAFWASRRRQELLELLDRMNPTIAELTAAVELEAQKWPEVLRLMTHPGVGPLTALAYVLIIGTPMRFPCGKQIGSYLGMIPSEDSSAGKQRLGHISKQGNPLLRFLLVEAAQAAVRHDPDWRQRYLRLALRREPRIAKVAMARKLGVRLYWMWRKEWTYQQVLQFGSHAGQLVTGHGVK

SEQ ID NO: 234912 - protein, 415 aa, unidentified
MKVVFPTCCGVDVHKTFVVATIITTPADSVQPHYQKKRFSTFNSDLNRFADWLLEHNCLDVCMESTGKYWVPVFNILEKRGIRVVIANPKWVKAVKGNKDDTKDSKWIGDLFRIGLVKSSFIPELNIRILREFLRYRYKLVSMKSSEKNRFQNAFTVCNVALDSVVSDMFGKSATAITDYLTSDEFFDPDHCVSLLQRSLKKKAEKVLESIEGYSISDEQKARIKIIREHYDFVEKLIAKVDTCVNEMVEKYEGEINLLCTIPGIDRNSAITIISEIGADMSQFGSSKRLCCWAGLTPGNNESAGKKKSVRISRAGVYLKPALVQVAHAAVKDKANPYYALKYERIAKRRGKKRAIIAIARMILTAIYTMLCTGEVWNPVDLFKIDMPEHLKEQQLAKAIKQATRFLEKQGLTVA

SEQ ID NO: 234913 - protein, 476 aa, unidentified
MANLGGRAQKGRRSKMSEKTNVESSEKRRQLQGLPVIRPNVAGIDLGSERHWACAPTLDGSGREIASFGATTPELIRMAEWLKARKVESVAMESTGVYWIAPHEVMEAQGLQVLLVDTRQLARVPGRDKKTDPTDCEWIQRLHSCGLLRGSFRPEEAVCMLRTLVRDKANLVAEAGDWLRRMQKSLDQMNVRVHRAVSDLDGVTGMAILRAIVGGERDAQKLAQLRDRRCSKTEQEIAEQLSGHWREDHLFSLQQALKMYDAVQERIAAYEKEILRKLGEMERDEHRGQTAPPLQNPTKTKTIQKRGQELKRQALYRMSGVDVTQIDAIGVETVEVVLSEYGSDLSRFPTEKEFVAHVTLAPHVARSGKKSFKRRKRNSASTRVAAALRMAALSLRHSRTALGAYYRRTAQRIGGDIAVFATARKLATLIYRLLRWGQPYVDEGAEAYENRYRQQRVSSLMAKAKDLGYELTPVSA

SEQ ID NO: 234914 - protein, 470 aa, unidentified
MDPHHPGRAAWLREGTMKTKTKRTTPALVPGMVPQLEPNAAGVDIGATEIYVAVPPGRDERTVRRFETFTDGLIAAADWLERCGATTVAMESTGVYWIPLFQILEARGIRVCLVNARYAKHVPGRKTDVCDCQWLQYLHSVGLLRASFRPEQEICAVRSVMRHRESLVEMAAVHLQHMQKALDQMNLQLHHVLSDLSGQTGMAILDAILAGERDPRKLAKLRNSRVQADEKTIAKALTGDYRREHLFALRQSVAAYRQYQQLLRACDQEIEAMLEEFSDGGPAAPIVGEPKRERGPRGNELRFDLKGHLYRIFGVDLTQVPGISAMTAHMLLTEAGRDLSAFRSGAAFASWLGLCPDNRISGGKVLSAHTRKVKHRLSKALRLAAQSLHGSKSWLGHEFRRMRAKTGAPKAITAMAHKLARIVFHLITTKQAYDETVFAQREIEHTQRTRKRLEQQARALGMQLVEKMTA

SEQ ID NO: 234915 - protein, 476 aa, unidentified
MSYENGNIYRNGNKALKEALEQYRPSQILYVPLEIGKYNHKAKIVNFLGDVLIKPVEFANSKNGLKFILEKIKDAQKIASAEKIFCGCESCGHYHLNIVYHLKQFGLPIEPINPRDVRKENPNKDAKNDLIDLNAIARTMIYNKGTRQVIPEGVYYKIQRASRTRMNLVRRRTSSRNIITGLVDRIFPGLWDKDDSVFSQRFGKASLLLLEHYPYPKKITLLGEKRLSRFLRKNNTKLGEETAKKIVQKAMDCLSKPEEELEMDILSLRCHIKVLYQYEEVIQTLEKEIALLLLQTPGTYLLSIPGIGVEYASQFTAEVGDIRRFAYANQIICFAGICSRVFESSEYEAKGLPMTKMGSKFLRTTLNQIALSLNAHCNPFRSYYQRKREEKKDRPGIARIATGNRFVKLAFALMRKEELYRPRDLVDEKKYYVQLWKKILEKLEKIDLNLLPKENYLIKIKKEIEDKYGLKLSLEI

SEQ ID NO: 234916 - protein, 388 aa, unidentified
MACALLAEGKQLRTFGTLTWQLEQLAEWLHSLDVQVVAMESSGVYWKPVFNILEVAGFELLVVNARHIKAVPGRKTDVKDAEWLADLLRHGLLKPSFIPSREERELRELTRYRRTLIEERARQVQRLQKVLEGANIKLEDVISNVVGLNGRRFLSALVAGEYDPEAVAATANYGLQRKRELLAQALHGTLGSHQRFLLDQLLSHIDFLEQRITALDREVKQRSHPFEAAIAQLDQIPGVGTRAAEEILAEIGIDMSRFPSHRHLASWAKVCPDNNQSAGKRRSGYAGKGNRWLRSILVECAWCATRKKDSYFKAQYHRLAARRGRKRALLAVGHSLLTVIYHLLRDGVLYQDLGPNYFDQRDRSLVARQAIRRLERLGYRVSLSEGAA

SEQ ID NO: 234917 - protein, 367 aa, unidentified
MKDSITVVGLDVHKNSIQIVTADTDGAMEVRHFGRIGGTMEALDRAVRKLVSQGSTLRFVYEAGPCGYEIYRHLAGKGFSCKVVAPSKTPKKSGDRIKNDRRDAETLARLERAGELTAIYVPREEDEAMRDLTRAREDANKALKTVRHQLNAFLLRYGKVYPGKASWTPSHMRWLSDVTLPHPSQQIVLQEYIRAVTVGTERTTRLTDQIAKLLPEWRMYPVVKALQALRGVAPIVAATTLAEIGDMSRFQNPRQLMAYLGLVPSEDSSGESTHRGRITKTGNGHVRRALVEAAHAYGFPARVSRHLLKRQEGLPQPVLDIAWKAQVRLCGRFRRLTARGKLKTKVVIAIARELSGFIWAIAREVKV

SEQ ID NO: 234918 - protein, 429 aa, unidentified
MTPIPSTISPAVRVAIDVAKLTHQVLLELPTGKRRSLHVANTKAEIDHFVSLLRSLEYPCEVAFEPTGDYHRPLAYVLGQAGFRLSLVSSLAVARTRDAMYNSWDRNDPKDAQVILHLMKTGTTQRYLDPLVTGHQDLQELANTYQQVSLRKVRLQHSIVTHHLPLYFPEAERYLHSTRAEWFTELLLFTPCPAAVRRHTKAAFVAAASVQIAGRKVDKARWLADFYDTASTSLGLPVSEESEAMRMFRVVLEEYRALCLLRKRLEADAITRLADQPDFRRLQKLPGIGPILAMIILAEARDLRRFGHARQFLKYCGFDLCTEQSGQFRGTTHLSKRGNARLRYAFWMAGTVAIRMQQNSFRRKFEDYIRPDPKNADRRRKAYTAVAAKMARVAHAVIITGIDYRRFPEAARPGGRIPSPGAVEARATS

SEQ ID NO: 234919 - protein, 356 aa, unidentified
MSNYITIGMDLGNRKHTVCALDQTGNVLWRKDVANTPEALKPFFEENAGATVAMETGLCCRWVSALAKSCGCDALVGNARKLAAIWQSKQKNDENDALLIAELARASRRLFHPVELRDDERHEMVQLIELREVAVSQRTQAVNSVRGLCKAHGVFIPKCDASCFHKVAAGAIPDGMAWKFKPMLRHLKEVAATIKRYDAMLEKYAKAHFKEEVELLQTAPGVGPITSCAFVAHMADPKRFGRARDAGAYFGLTPGQDKSGDKDAPKHITKTGSALMRHLLVTAANYILRASSPVTALKRHGERICAPGGKVARRKAKTAVARKLAVVMLAMLKSGKAYDDGIAAVKAGAGESTVAA

SEQ ID NO: 234920 - protein, 402 aa, unidentified
MENDTSRFGGVDWATDNHFVAVVDQRGAPVDEFEVEHSAAGLELLCQRLKRHAVGRVAIERPDGPVVEALLSADLEVVVIASRSVKALRERYGLAGNKSDRSDAYVLADCLRTDGHRWRSLERDSPATVTLRSTVRTRRDLVETRVALANQLRALLRVSFPGAVGLFRDIDSPISLRFLERFPSATKAAWLSEKRLGAWLKANGYCGRKSPVELYRRLHAAPAGLPDEGGASGAVVLALVEVLKSARTQIDGLNARIAEQLEIHPDGKIFTSLPRAGVVRAATLLAEIGDCRERFPDAESIAGLAGVAPSTRRSGRMRIVEFRWSSDKKLRDALCDFAGDSWQGNVWAEHRYRELRKTKSHPHATRILARSWSQIIWRCWQDRVPYDPAQHGGYRRLVSEAA

SEQ ID NO: 234921 - protein, 429 aa, unidentified
MVFMGVDPHKLSVTIEVVDDHESVLGTGRFATDKAGYAAMRKQVRGWPERVWAVEGSNGAGRPLAQRLLADGEHVVDVPAKLSARARLLDTGHNRKTDAHDAHAVAVVAVRTPGLRVLSYDSELEALRMLVDRREELTRQRVQTVNRLQRLLSELTPGKAKKDLTALQAKAILASVRPRDLAGKTRRRLAVEQLTELVAADKKTKALSKELKAIVLSRGSHLMDLRGVGPVVAARTLADVGDVARFADRNRFASWTGTAPLDASSGEQDRHRLSRAGNRRMNHMIHIAAISQIRLASEGRTYYRRKLAEGKKPLEAIRCLKRRISDALYRQLVADARAVETGPGGHCGATQESSAVDLPPHIDTSDQPLPGPAPTTLPAAVARANPHPGSAPQMTRRRAGAVKVERPTGRTTLTATSAGAHSKEPIPAP

SEQ ID NO: 234922 - protein, 321 aa, unidentified
MTKNKNYIGIDISKLTFDVAISDGKEKYKHYKFSNDQDGFKKLSELINHESDICVMEASGAYYLKLATYLFKINVSVCVINPLVIRRFSQMRMIRAKTDKKDASVIAAYGKTETPDLWEPEEDYVLEIKQMQAYVEQLNKSRTGLIRQREAFKYNTVYISEMNKSLENIINVLENQIALIENKMAELVNQNNKDLFDRLNSIPGIGRKTSMLLIVISGGFTKFENAKQLCSYVGISPRIFESGTSVKGRSRICKMGMSRIRAMLYVCSWTAKKNNKACKELYDRLVDKGKSKKLALIAVVNKLLKQAFAIATKNEYYLEIN

SEQ ID NO: 234923 - protein, 434 aa, unidentified
MEEVTDEPLYRDRVCGTGIGKAGLVATIRVPSDRDPARRMQETRSFGTTKREVLALADWLRCWQVPAVVMEATGDYWKGPLCRLEAEGFECVLADAKQVKNLPGRPQRDPADSRWLAACFERGAITSCFAVTPEFRIIRLHTRYRRDLTEERTREKQRAEKLLESAAIKISAVLTDLHGVTGRDIMDHLIAGQRDPEVLAQLARAAARRKIRQLEEAVEGAEFFTAEHAALLAKVLARIDRLAAGIDDLSGVIERLLAPYEEQLQQAGSMPGWGRRAAQDAVAETGVDMTRFRTGGHLSSWAGRAPQDHQSGKRKGRAKAKKGNRYLGAITGETAVAAGRTQTREGARHRRLARRRGTAKACVATGNTQMKASPLLADPGMRYQDLGPDYYERQRDTRRQIAHHVGKLGALGFEVTLCRIPEPDPDGTDPAQAA

SEQ ID NO: 234924 - protein, 400 aa, unidentified
MALLSLVAVVSARPTGGDPYPPASEEKAITSMPATTTDLTTALIHTVTIGVDTHKDLHVAVALDALGRRVAELRTPATSAGYQQLRRWACNLGQVEAFGVEGTGSYGAGLARYLRRCDERVVEVNRPDRSTRHRKGKSDPIDAESAARSVLAGTATGTPKNGDDQVEVIRMLKITRDSAVKAQTQAVNQLKAILVTAPDELRESLADLGLVRLLERCAAFRPGELTTPLSAAKHALRLLARRALALRAEAKELREHLDHLTTAAAPTLVELTGVGPDTAAALLLTAGDNPDRLRSEAAFAALCGTNPVPASSGKTTRYRPNRGGDRRANAALHRAVVTRMHWHEPTKIYVARRTAEGKTKPEIMRCLKRYLARQVYRCLMPTTAETARRSGPQEVLLCAA

SEQ ID NO: 234925 - protein, 443 aa, unidentified
MSELAVLDPRAAFVDVGSEKMHVSIAGGPPALFGTVTSQLHALRDYLAEHQVRSVAMEATGVYWLPLYGVLEAAGMEVVMVDGRQTRNLPGRKTDMKDCQWGATLHAHGLLRAGFVPPASIRRLQDYLRLRGDHIAAAAGHVQHMQKALERMNIKLHEVISSLTGASGLTVIRAILAGERDPQVLLGLCDIRIRNVKAERVVESLRGDWAEEHLFALAQAVQSWDHYQGLIAACDRQIAVVLRQMPDAKVPPPAASTKAGKPRTRPGVNAPDIADLREILAQICGAKDLTTLPAHSEYSVLQLIGEVGTDLTKWRTEKHFTSWLGLAPGSAQSGKRKASVKRRRNRAGQIFCVMARALARSKYVALGGFYRRMAARRGGLVANKALARKLATLFWRVMVKGLDFIETGVAQYETRVLETKHRILPRLARQLGQQIVPNPAAVV

SEQ ID NO: 234926 - protein, 342 aa, unidentified
MTLYIGVDIHARQQTLSYLETEDGTTGQVVLDHEVDDVPGFYRQFQGEVIIGIEACGYTNWFEELVERLGHQLLVGDAAEIRRLARRRQKNDRRDADLLLDLLVHDEFPALYRYCQESREVLRQLRYRHKLVKLRTMVANTLHALALNAGLSLRAKLLTKGGRQQLSALPLSAISQQQRNELLSLADELTRRIQLVEQWLAVQAARDGRVQRLQTHPGVGLLTSLCVVHTLGEVQRFSSTRKVAAYVGFDPMEDSSAERKAYGGISKAGSRLLRYLLIEAGQTAAKDDEQLKQFYRRLLPRRGKARAKVAVGRKLLLRCFIMWRAEIDYAEFLRRGQKEETE

SEQ ID NO: 234927 - protein, 331 aa, unidentified
MADVKRYVGIDVAKAQLDVALGPNGERFAVANDERGISTLLKRLEPADLVIIEATGGLEVPVASALATAGIGVAVVNPRQVRDFARATGQLAKTDALDAQVLVRFGAAVKPPVRALPDAQAQALEALVNRRRQLVEMLTAEKNRRANSPKVIHKSIDEHIRWLEKRLAGFDDELAALVRATPIWRERDELLRSVPGVGPVLATTLLAHLPELGALNRKQIAALAGLAPFNRDSGSLRGSRCIWGGRAQVRRVLYMAVVSAIRSNPVIKNFYAQLRARGKYPKSALTACMRKLLVILNAMLHNNTHWYTTALTFSNSALYPPGGAVSEHGCC

SEQ ID NO: 234928 - protein, 357 aa, unidentified
MEEYIAFDSHKHYTWVEHWEANTGELREYRLEHEPGAIQRALSKCDPGTAVAVEATANWYWITDAIEQAGCVPRLVHPRKAKLMMGQINKTDKLDTHGLNRLQRNGTLPTVWIPPGNLRELRELTRTRVVLVAQRTRWKNRITATLAKWGLPASEYSDPYGKKAREELEQRLERLPEQTRWATRQMLVQLDGLNAQVKEFEKRLEELVEVTPAMQLLETLPGIAVILSATIALEVGDIGRFCNAEKLAAYSGTVPRVHSSGGHTRYGRTRPDVNRYLKWAFAEAANSVAVNYRRCPDRHVSQLYARLRVRKGHNKAVGAVARHLAEAAFHVLSRKQAYRDPAHKVGRSNGGVSANVS

SEQ ID NO: 234929 - protein, 420 aa, unidentified
MKYARVPRPEAPPGGLSAGIDWASADHAVCVVDAAGEVVSRFTVAHTAEGLRALVRGLARAGAAEVAIERGDGPVVDALLAAGVRVVVITPRQIKNLRSRYGSAGNKDDRFDAYVLADVLRTDRARLRPLIPDSPATAALRQACRARKDLVRHRVAVGNQLRAHLLCAFPGAAGLFSKLHSAISLAFLARFDCQDRADWLSEKRLAAWLKAAGYSGRTSPAGLYQRLISAPRGATGEHGAASAQVIRALVAVLASLNVQIKALEAHIAAQLADHADGHIFTSLPRSGTVRAARLLTEIGDCRARFPEPQALICLAGAAPSTRQSGKHKAVTFRWAVSKQLRDAVCDFADGSRHASPWAAKIYNDAIARGKDHPLAVRILARAWLYVIWECWHNSVAYNPAHHRGLQRLLAAQNVGADQAA

SEQ ID NO: 234930 - protein, 338 aa, unidentified
MNNNMEACGVEVSARELVVARKGKAGVQLTRFANTAAGHRQLLRTLTRGGQRVRVVLEATGLYALDLALLLSAQEQVQLMVANPRAVRHFAQAMMQRSKNDQLDAVVLLEFAERMPFTPWVRPQENALALWAIARRLQALTRLCTAEKNRAHAMGLSEAIPAMVRRDIARSLQFHQRAMKKLRQQALQCIAADAQLQQRYQLLRSIPGLGEISAVQTLAELLLLPADRDVRQWVAYAGLDPREYSSGTSVRKYTRISKVGNAHLRRALYMPALVASRVEPHLRGFYEHLLARGKTKRQALVAVARKLLHAIYGMFRSQRPYDGTRVYLAAAAQAEKFS

SEQ ID NO: 234931 - protein, 422 aa, unidentified
MTQQQNTSILRVMHEVCCGLDVHKELINACLITTDENGHEDSELRVFQTFTDDLCRLRDWLLDHNCPIIAMESTGIYWRPVHNILEGFFEVILVNARHFKNLPGKKTDMSDCLWICGLLRVGLLKGSFIPQKHVRHWRDLTRYRRSKTEDLGDVKRQVHKLFESANIKIDSVASHLFSRSGRNLMELLLEKDRELTLEDVRKCLKGTLKSKSQELYRAVQGFFEEHHRWLLEKMLAHADHLEHLITDIQVRLRSLLEAHEDTIDRLIEIPGISFISAYAIISETGPTLSTFPNTASLCSWAGVCPGNNESAGKRHSGRSPVRRGNLKTILIEVAWGAVRTKGSYFRAKFFSLRSRLGPKKAIMAIAHRILKAIYHVIKHGEKFKDLGEDYLNDLHKKSKIDYLIRQAGKFGFKLMPCAILEK

SEQ ID NO: 234932 - protein, 343 aa, unidentified
MQTVRTIGFDIAKSVFQVHGVDAGGQVIIRRQLKRRHVLAFFQKLPPCLVGIEACASSHHWSRELQALGHTVRLMPPAYVKPYVKRQKNDVADAEAICEAVTRANMRFVPTKTPEQQSCLMLHRTRHMFIRQQTAVVNSIRAHLAEFGIVAPVGRKGVTELLHVVADPNDKRVPEVARACLTALGAQLLSLKEQILEFDRLIMDWYRSNQTSKRLHCIPGVGPMLATALVASVVDPRTFRSGRNFSAWIGLVPKQHSSGGKDRLGSISKQGDRYLRSLFVAGALAVIRYAKIHGTGHRPWLTALLARRPTKVAAIALANKIARMAWAMMAKGECYKQPVALAA

SEQ ID NO: 234933 - protein, 357 aa, unidentified
MLLKYSVGIDMSMKSFTCCILTIDSEQSIKVKGSRKFANTLSGFKNFYDWSVKKHKEVEVPLVYCVEATGVYHENLSFFLHDKNCSLSIILASTSSKYLASLGLKSKTDPIDAKGLAQMGAERKLTLWNPPAKYYSDLRSLTRHHQSLTEDKTAVSNKLHAITHSGKPSKFVIKQLKTQIKHFDKNLKLTSQAITQAINSRPEVRSKIDRICTIKGVAEHTVATVIAETFGFELFESAKQLISYCGYDVVENQSGKTTGKTRISKKGCSRIRRAMHFPAFNAMRPDQPIFYNLYQRTFEKHHIKMKSYVAIQKKLLTTIYALWKNDTEFDPQYQIKMINPTLKKVVPIKPELLEVQP

SEQ ID NO: 234934 - protein, 352 aa, unidentified
MTVTNLARSITGGVDTHLDVHVAAALDERGTLLGVESFATTESGYKKLLGWLIDFGTVELVGVEGTGSYGAGLTRHLQGENVRVVEVDRPNRQRRRLKGKSDPQDAITAARAALSGEAAGEAKTRDGNVESMRVLRVARASARKARTQALNQMRTLVSTAPDPIRAELRGLSVFNLLERGSSYRPGAKRDIVSLTKFTLRMLARRALTLEEEISEIDAILKPLVKETAPELVATLGIGTDAASALLVAAGDNPERMRNEAAFAHLCGASPLDASSGKNQRHRLNRSGDRQANSALWHIVLTRMVYDPRTTEYINRRRTEGLTKKEAVRCLKRYVAREVFSLLPHDTLGLDSP

SEQ ID NO: 234935 - protein, 343 aa, unidentified
MDIVVLGIDLGKNSCSLAGLDASGRVILRRRMRRSSVESFVNGLGRCIVAMEACCGAHHLGRVFVAQGHSVRLMSPEYVRPYVKAQKNDELDAEAIAEAATRPTMRFVAVKSQSQSDIQALHRARERLVSERTALINHLRALLLERGIVAPQGRRKLQEELAVFADEDGIEALSPRIRLLIEDLRSEWRALDERIAAFDAEFVRMAREDEAVRRLTTIPGIGTINATALAAAVGNARAFRRGRDMAAWLGLTPRQMTTGGKPRLLGISKRGNRYLRKNLIHGARAVLPYLVERETPLGRWARGLLARAHKNIVVVALANKLARIAWAVLARGCTYEAAGEAAA

SEQ ID NO: 234936 - protein, 380 aa, unidentified
MTEIQMTPTPDSIKNDRLYIALELSNTKWKIASGNGFKIRLKTIMARDREQFELELQRSRKHFRMAEDVPVLSCYEAGRDGFWIHRYLCNLGIGNLVVDSSSIEVNRRYRRAKTDRLDASKLVTMLIRYMNGETKVWSVLHVPEEEYEDSRRLHREIQRLKKERTGHTNRIKSLLALHGISMEIRKTFPGDVGKVVMWNGKPLPSRVKEEMVRQYRRYELIQQQVQVLEQEKKEALRQESESSKKVLSLQNLKGIGPVSSWDLVHEFFGWRRFKNDKEVGAAAGLAPTPYDSGGSQTEQGISKSGNRRVRALMIEVGWYWLMHQPGSKLSRWFMERYGQGSKRMRRIGIVALARKLLIALWKYLEKGIIPEGAIIRAYYD

SEQ ID NO: 234937 - protein, 343 aa, unidentified
MNTVTLIGIDLGKHCFHLHGQDASGCMVFRKKLSRSQMLTTLANTPACRIVMEACAGAHWIARRLSAMGHEAKLISPQFVKPFVQGNKNDFADAQAICEAASRPSMRFVSPRNEIQQTISATHRVREALVRDRTSTTNQIHAFLLEFGISLPKGPAIIKRLPALLSEREAELPPRLIALIERLRDHHKYLDEQIKAVERELTQQLAEDERSQRLLEIPGVGPITASVLAVELGDAHQFANARQFAASIGLVPRQYSTGGKSTLLGISKRGDKNLRRLLVQGARVIMQRIQERTDALGEWTRSMLCRRHSNVVACALANKMARIAWAILAKGTHYQPRSAVVAA

SEQ ID NO: 234938 - protein, 309 aa, unidentified
MDTIVIGIDVSKDRLDVHVRPAGRVLSYSRDAAGMEALIGEVGSLAPQLIAVEATGGFEMVVVASLGAAGLPVVVVNPAQVRAFATAIGQRAKTDPVDAAVIAHFAEATRPQVRPLPDAATQALADLVTRRRQIIQMIVAEGQREKRATERARKSIQRLLKALRAELADLDTEIGETVRGSPLWREQEDLLASVPGVGPITARTMLAELPELGSLDRRKIAALVGLAPFTRQSGKWRGKSFIGGGRASVRTALFMAAMTAMRRNPVLRAFHQRLRAAGKPKMVALIAVARKLLTILNAILRDKTKWQNA

SEQ ID NO: 234939 - protein, 343 aa, unidentified
MLIIGCDFHPSVQQISFVDQETGECGQLRLDHKKGEAERYYRSLTGRGVRVGMEATGKMRWFERLLHELGFELWVADPMKVRAAAARKAKTDKRDAELLLRLLLEDRFPRIWVPTMEQRDARQLVLHRHRLVQTRTRAKNQLQALATNEGLHRRVWTGAGQVELKKLALSPWGQVRRQDWLELLADLNQRIDPLDQALEQQAEQRPEVKLLMTHRGVGPVVATAFVVTLCDPKRFENSKQVAAYLGLVPQENSSGQGRQRLGHITKQGNSLLRGLLVESAHVAVRFEPEWQRKYTRLAMKKNRSIAAVAMARCLAVRLWWMWKLGLNYEQFRAQKKESRSHAE

SEQ ID NO: 234940 - protein, 384 aa, unidentified
METITQKANILQNIDYQILINTLYVGIDPHKYIHHILITNRNMDKLGEFKVHNNQTDINELIKEINKIKNEHGFNNVAIGIEGYHGNGDFITRNLLKEFNSIYEVPVALTSSYRKSSIYREKTDSIDAKGVINALVTNLSKLSAITSESNDRIATMLRDLTMNRSRFVSSRIGFKNAIHNLMQHIDPEYVKIVKNFNSKKTRKTTKEFCDNILISNEDLEIKNRAKLVIANIERVNDFEEQINVLEREIKNILINSKYQKIIDSFKGVSYIIMAELISWIYDINRFPTPEKFCKYCGIAPVACSSGKTNKLINSKGGVKSLRTTFRTIAIVRVRRSPEDEQYFKRQLSKGKTKKQSLKLVMRKNALVLYALLSKNQAYISPVLS

SEQ ID NO: 234941 - protein, 317 aa, unidentified
MNKEEKIYIGIDVSKPILDITILPNKKYMQFKNDLAGIERLIKKINKFTNALIVMESTGGYEKLLAISLLQAGHKACIMNPRRIRDFAKSMGILAKTDKIDSDVIALFASKIEPAPNFDYDEETNLLAENNARRRQLIGLITMEKNRLDKASPKHIKGIERVIKFLTKELNKIDIEQHKLLESNADFSEKADLLTSVKGIGDVTARALLAELPELGLLGSKQIASLAGLAPFNRDSGKFKGLRTIWGGRATVRCALYMATLTATRYNTVIRSFYKRLLAAGKKKKVALTACMHKLLIIINAMIKNKSFWREPTPLQT

SEQ ID NO: 234942 - protein, 313 aa, unidentified
MIESGIYVGIDVSKSYLDVFIPEEGAFRVEYTDAGLAELLEKLSGFEVTMAVMEATGKFETLCATALANNKIPVAVVNPRQVRDFARSTGRLAKTDAIDAEMISRFGEAIKPAAKELRSEDEERFDELLTRRRQLLGMTTTEKNRVGMVRDRKVRRRVVAHIKWLEREVKDVDREMSDAIKESPIWRVKDALLRSVPGVGEATSKVLLGELPELGRLNSKEIASLVGVAPMNRDSGKMRGKRTTIGGRSMVRTALYMAALSATRHNPELRSFYLRLVEAGKPKKVALTATMRKLVILLNAIVARGTGWQPERP

SEQ ID NO: 234943 - protein, 345 aa, unidentified
MTIVEAARAVTGGVDTHLDVHVAAALDPVGGLLGTEGFPADPAGYKAMLSWLEGFGEVTKVGMEGTGSYGAGLARFLRRQGIEVVEVDRQSRQARVRHGTSDPIDAVEAARATLAGRASQPKSMDGAVEAIRVLVVAKRSARQARSKALTQMRHLSYTAPDQLRCRLKGLTIPVLVAEAASLRPTRSPDPVTAGTKASISSLAHRVRFLDAEIAGLDELIEPLLFATAPELLALKGVGPDTAASLLITAGDNPERLRSEAAWAHLCGVSPIQASSGKMTRHRLNRGGDRQANSALWRIVMVRIAHDPDTKAYIERRVKEGRSKREVIRILKRYVAREVYRHLPRG

SEQ ID NO: 234944 - protein, 355 aa, unidentified
MSSEKYIGLDVHQATISVAVMDSQGKFIMESILETKASTILEFLAGLRGSLFVTFEEGTWAAWLYDLVKPHVTEVLVCNPRKIPLLKQGNKSDKIDARKLAERLRLKDLKPVYHGETGVRMLRELARSYLTIVKDLSRVMNRLKALYRSWAIPCAGRDVYYTRHRSQWLEKIPEAGTRRRAEQLYQQLDLLQHLRQQARRELLAESRKHAITAKLRKIPSLGPIRSALAVALIQTPHRFRSKRQLWTYSGLGLETRDSGEYHYVRGQVQRRKKQATIRGLNKDYNHDLKGLFKGAATRASVQPGPFQEFYQRSLAKGIKPTMVRLTLARKIAAITLTLWKKGEDFDINKLNSQAA

SEQ ID NO: 234945 - protein, 428 aa, unidentified
MLADEVDYVIGVDTHRDQHTLAVVGAPAGAVVAQTVVGANGAGYAQALRFASRHASGVRAWAIEGAGHYGAGLAPYLADRGETVLEVGRHARVERRLRGKDDPLDAIRAARAGLAAETLTLPRAGQRQEALRVLLLARRSAVDVRRVALVQLRSVIVTAPEQLREQLQRLPLSQLVRRCSHFHRSHSRTPDELAVVLTLRSLARRIEAATAEADELEREIRQHVRALAPELLDEPGVGPIVAAQLIVTWSHRDRVRSEAAFARLAGVAPLPASSGQTIRHRLSRGGDRQLNRALHTVALHRRQHDPTTRDYIARRVAEGKTSREATRILKRYLARHLYRVMQNATPRRLDSHRRVIPQRWPPSPSQCSSRLTRHVRTFVSRGASREDWSQAVGPALGRRRGLRQRGAAHAHPPLERREVGLARRSRRA

SEQ ID NO: 234946 - protein, 330 aa, unidentified
MEKTLHFIGADLAKKSIDLVIHGLKSHLKIENNSAGFSQALGWLKANQIPLAQAIVVMEHTGLYSYCFENFLFEKSIQFSKVSSLDIKLSIGVTRGKSDRIDATRIARYGSENALRLTLATPMVKALERLKILSSSRDNLVRVRAGLMNSTEELRNIGTGSADLALGAQLKVITCLNEQILALDQEMECIIKSEEKININYQLIKTIKGIGPVVARNTIIKTHNFERFTNARKFACFCGIAPFEHTSGTSIKGRTRVNHLADKEMKCLLDLAAKSAITCDPELKEYYQRRLEMGKPKMATINIVRNKLVGRIFAVVKRQSPFVVCKKVAA

SEQ ID NO: 234947 - protein, 405 aa, unidentified
MADGPVGVYGGVDTHKDVHVAAAADQAGRVLAVASFAADPGGYRALQGWLSSFGPLVRVGIEGTGSYGAGLCRHLSAGGVEVVEVTRPDRQMRRRRGKSDTVDAEAAARAALGAERTAVPKGGDGTVESIRQIRVALCSTRDHLTRISNQIRDLIVTAPEHLRSELEPLTAAQRAQRCARFRPGDVADPAQAAKLALRTLARQHQALAADLAELREHLDGLTAAASPALRAAKGIGPDVASILLIAAGDNPDRLTSEAAFAALCGASPIEASSGKTARHRLNQGGNRQANHALWRIAMVRLATCERTRAYAARRHTEGKSQREIIRCLKRYIAREVFALLTKPQPAPVVADLRARRHATGHSLAHAADQLNTWPATISAIERGHAPHHRLLPAYHDWLNTHQPAA

SEQ ID NO: 234948 - protein, 336 aa, unidentified
MAIVKVFVGLDYHDDFVQVCVMNGKGKILVNRKMSNDWQAIATAVKKTGRVARAAIEACNGAAHLADELIHRGGWPLELSHPGYVARLKQSPDKSDYSDAQLLADLARVGYIPTVWLAPPEVRELRRVVRFRQQLAAERRNIKLRIGALLREHRVPRPSCHPWTRAWRRWLEKLELPTQTGWIVKQQLRRFDAVCLDLAEVEAHLAKLVEQDRLVQFLLTLPGIGPVTAITLRAEIGRFDRFQRGKQLSRFCGLSPRNASSGHRQADAGLIRAGNPQLRAVILQAAHRLKRYDPRWRTLAERLRHRGKPGSVIAAAVANRWLRSLYHQVKQWSMAS

SEQ ID NO: 234949 - protein, 396 aa, unidentified
MSVAHKKRENLATFHALHRSAIGIDVHSNLIVATYQNCEYGSSSLFNENRGSGASKPELDAFASWCKAKEAEVLIMESTGVYWQSLYESLENVGCTNKQIVVVNARDVKNKRGSKTDLADAIHLAEVARQETYRASFVPAKEFRQLRCLWRSFFTLKISRKRFLNIMHKQLCQVGCRASSVFSDIRGKKATKIIDCLINGEHGETLYNHIIEITSCKQDKLKATPQQIYDALQADMESEVWFAIRQNMEHIKFLDAQIAESEANLRDKLKPYTHPMKLLTSIPGIKDITAMGIICELGDDISQFTSIRRFCKWIGLAPGNNESAGKKYSGRTTPGNKYLKVLLVEAVSGIVLMKKGFLHEVLQRFKERRGTKKSNVALAHKMCRIIFSVLTHGTAY

SEQ ID NO: 234950 - protein, 374 aa, unidentified
MPTSITYVAMDTHKKQHRLALKFPGQERLIELSVLNNVREITKMVKKIIKQAPGLVTFCYEAGVCGFTLKRRIEALGPRCIVIAPSLVPKKPGERVKTDRRDARKLLELFQANLLTEVQAPDEKQEADRELTRLRETAMENLKRARHQLLKLLTRHGFVYTDGKHWTQRHLLWLRGLEFHLPKLRKVFDSYFDEMTYGLRRLESLDQQVEQLAQQPEYRDIVGALCCFHGIQTLTAITLLTEIFDYGRFATPRELMSYLGLTPSEYSSGDRQKKGSITKAGNKRIRRLLNETAWHYRHRYLPGKGLKQRRKGQPQWAIEIADNAGRRLTRRHRHLIEAGKMPVKANIAIARELAGFIWALMREYEARKTIIDVA

SEQ ID NO: 234951 - protein, 366 aa, unidentified
MKKTSTVQALKSKLFKEQKLTIGLDLGDCWSFYCVLDEAGQIILEQKLPTTPEAMKQTFGKIPRSLIALETGTHSPWVSRVLTELGHEVIVAHAQKVQWITKSNRKDDRHDARTLARLARVDPELLGPVRHRSAKAQIHLTVIRARAELVSARTALVNAARGLVKSYGQRLPKCGTYQVNEKLAEGLSAELREVLVPLFKEIESLNERVKEYDERMEKIAKEVYPEVSLLKQVKGVGTQIALTYVLTIEDPYRFPKSREVGCFLGLRPGRRNSGESEPQKGISKEGDRYLRTMMVQGAHYILGPFGEDSDLRRWGRKLAERGGKNAKKRAVVAVARKLAVLLHRLWVGGEVYEPLRNSQKAMREVA

SEQ ID NO: 234952 - protein, 420 aa, unidentified
MKVVYQTCCGVDVHKSFLVATIIQTTSGVEPSYQKKRFSTFNNSILQFKHWLIENQCRDVCMESTGKYWIPVFNLLEDEINVTIANPKWVKAVKGNKDDTKDSKWIGDLFRLGLVPGSYIPCKPIRILREFTRYRYKLTSCRTSEKNRYQNALTVCNVALDSVVSDIFGKSATSVIDYLIEQSDNSINHEEIASRLFRSLKKKSDSVIESIEGYQMTDSQKYRMRLIRAHLDYITSTINDIDTMLDSLIAPYENAVQLLCTIPGVDRNSAITVISEIGTDMTPFSSSKRLCCWAGLTPGNNESAGKKKSVRITRAGVYLKPALVQVAHAAVKSDKSPYYKQKYERIMKRRGKKRAIIAIARMILTAIYQILSTGEVWNPTDLYKIDMPEPLKEKEKEKAIKQAKKLLIREGILSESQLAS

SEQ ID NO: 234953 - protein, 412 aa, unidentified
MVELLRQVVPSTALVVAVDPGKVSNRVWLTSGERGLIGEPVSLPVLGKGVDTLAELIAASGVAGAPRIAVEATGRLHHAWVAELERRWPGSVRLFAPSETQAARTQLGFRRYKTDDRDCAALVWLARQGAGRPAATDTVEALLGAVRHRRGLVADRRVLQQRLHDQLQALCPGLSAPAGHGRALAVEDPTGQAVLACAAAFAGRPPTVRSLVARAPGRLTKATARFWVERWRQLLPAPDDAELRAERLARDLARHRALQADIAAVETQLAMLLAATDGQILTTLPGVAAVRAAAFAAHSLPIARFPTPEHLYAATGLAPAAWQSASLHRRGRISRQGLAEHRDALMSIAWGLSQHSPSFRERDQELRRRGMRPIQARVALARHACRLCYALLRTQQPFDEARYRLARHSRGR

SEQ ID NO: 234954 - protein, 353 aa, unidentified
MKPKTESDTALPMVIGVDIGKEVFHLIGFGGDGKIVFRRKIKRLGFAAVFEKVPPCIVGMEACLSAHFVSRTLRTLGHEPRIIPAIYVKPFVKGQKNDYNDAEAIAEAALRPNLRFVQEKSQDQLDLQACHRVRARLVSRRTATINQIRAFLIEQGIAVRSGPRALRTSLFAILENRKDEISPRMARLILDLYKDWCHLDERIDTVTGEIEELSRVEAKCQRLMTVPGIGPVISTGLVAAIGSGEAFERGRDFGAWLGLVPRQYSTGGRSVLGRISKRGSKYLRTLLIQAAKVLLMRPHNWPRYSFGEWLKTASERLHRNKLAVALANKLARIAWSVLRHDKAFDTHLETAAI

SEQ ID NO: 234955 - protein, 456 aa, unidentified
MKKAQKKRKQRTRLEPVQPMVAGIDVGSKEHWVCAPEDTDGKREVRVYGATTPELQNLAAWLLEQGVKSVAMESTYVYWIPLYEVLEAAGLEVVLVNASTLKNVPGRKTDMADCQWLQLLHSCALLRGSFRPADHICRLRSLQRQRGNLVSERARCVQWMQKALDQMNVRVHRAVADLTGTTGMAIIRAIAGGERDPYKLAKYRDPRCRKSTAEIVEHLTGNWRMDHLFNLANSLRLYDQIDSLISDYDAQLLAELQQLQTEERRSADCPAHSSPAKQRTMKKRGELPMREALWRFAGVDLTTIDGISANTAQMVLTEVGPNITAFPSEKHFVSWLRLCPRVPVSGGKPLKKRTNSFGASRLAAAFRMAAVTVQRSRTALGAAYRHVARRKSGGEAVFVVARKLAIYVYRLLRYGQDYSDIGQEAYEAHFQARRLAALNANARDLGYALVQEEHAV

SEQ ID NO: 234956 - protein, 351 aa, unidentified
MMSQSITMFFIGMDVHKDSTVFCIFDPSACGKDRYRHVTVPTTREGLESVLKPLAHRCKVAFEVGTQAQWVAKIVRPLATEVQIANPSMVPWLFRDGRKNDKMDAYKLVTLLYLDQLPQVHLPSFEVTVWRGLINNRRTLIKRRTMIKNQIRALLRAEALRCPHKSLWTRKGQLWLADVEFHVGQKLILDTLTTELRCIEDNRVRIEDQLDAIALAQPGIALLRTIPGIGPRSAEAIVAYADDIRRFDDRKKFASYFGMTPTQDSSGLRDRHGHISKRGPSVVRWVLVEALHQVVRNSRVFRPYFERIQRGKKERYKKAIVATARKLLTIAYAMLRDGTPFDPARIRGAAA

SEQ ID NO: 234957 - protein, 389 aa, unidentified
MYYIGIDIAKFKHAVYISNSNGEVINSGEYFDNTLDGFNKLLTILNSLDKSQQKKIGLEATGHYHMNLISFLHKNNYDVCEINPYFIASYRKTKTLRRNKNDFVDSQIIASYLEENECNTYPREFYHIYALKSLTREREVLVKQRSRQLIELTNLLDIVFPEFKIFFGGKLTGNAIYILKKYITPNHIANMTIDSYNNMKKELRHVISYAKFLELKELAKNTIGFFDELHITMFKSQIEIYLALDKQIEIYEAKIKESVLELSPHMLGIKWFSINYIAIIYAGFNGFKTFKNWGQCLAFAGMESGRHQSGTVDYNQAMVKHGNGTLRNALIYGTFTLLGRYPVLYDYYKKKRDEGKSHYVALTHTAKKLLRVIFTLEKNNITFDPTLLK

SEQ ID NO: 234958 - protein, 359 aa, unidentified
MTQHHNDRPDIVGGVDTHKDLHVAAVVDTHDRVLGVASFPTTRHGYKTMLAWMRSFGELSRVGIECTGTYGAGLLRYLQRNGIAVLEVTTPDKTVRRKRGKDDTIDAENAAHAAYAGVRTVTPKTRDGMIEALRVLRVCRKTAVAARRVALQMIQTQVISAPEELRDQLRNMSRMQLIRTLAAWRPDMSGYRDVAMAYRIALKSLARRYLELHDEVADLDVMIKAIVDELAPELVSRTAVGYESAAQLLITAGDNPDRLGSEASFAALCGVSPIPASSGKTQRHRLNRGGDRAANSALHIIAIGRLRLDATTQAYVTRRVTEGHSKLEAIRCLKRYIAREVYYVLRHRHQEINQATIAT

SEQ ID NO: 234959 - protein, 408 aa, unidentified
MLEVKVERCAGIDVGKKFLEVCILIGPVHRKPAEEVRRFGTNVRDLEALRAWLLEKACTEVVMESTGSYWRPVFNILEGNLQVILANPEQVKALRGKKTDRKDCRWLAGLLRHGLVQASFIPPRDIRELRDLTRRRRKLLENGTEERNRVAKVLEDANVKIGNVLADVFGMSGQAMLEALLENKLSAEQMANLAHRRLRPKIPQIVEALEGHRMSDHHRLLIGQALKHMQFIEDMVEELNQEIQKKLQPYQRQIELACTVPGIARDAAASILAEIGFDMSDRGPFATCHHLASWAGVCPGNNSSGGKRKSGNIRKGNRWLKATLSQTAWAGAAKKNSTFQFRYQRLKTRRGGKRAAIAVAHAQIIALYWVLRNGVPYQQQIRELHQQQRESMIRHHLARLTQLGYSTT

SEQ ID NO: 234960 - protein, 428 aa, unidentified
MINRNAQKLEAITPSTLIVGVDIAKELQWARFVDYRGLEFGKAFKFRNDKNGFESILASIEANCKNKGLNNVIVGMEPTGHYWKTLANYLIMHGITVVMVNPYHTKRAKELDDNSPTKSDKKDALTIAKLVRDGRYYEVYMPQDVFAELRVLTTSRTSLMKRRNAIKNTITAVLDEYFPEIVTVFKNPLKGKASLQILKSYPFPSLILELDVEVILAEIKKAVKKTVGRKKAHQLLEVAKNSIGVGYGLASAKLKLGLMIEELELLTKQLDLLESEMAKALADTGFGEIILSIPGIGVVTAASFFGEIGDPMRFDNPRQISRMAGYNLVEDSSGKNKSGTAISKRGRKTLRSVLYKMALTMVAVNDEMKELYAYLKTRPNNPLKKKQALVVISKKIITVIYNLVKKKAEYQAELVLGDFRKNQIKQAA

SEQ ID NO: 234961 - protein, 439 aa, unidentified
MAHAKKIRKITPHAAGIDIGAEKIFVCVEGQPVRSFDTFTATLHQARDYLLEHAIETVAMEATGVYWIPLYEILEAAGLEVCLVNGAHVKNVPGRKSDVMDCEWIQELHSYGLLRASFIPDAEIRGLRCYVRLRQDHIEMAASHIQHLQKALDLMNLKVHRVISQIQGKSGLAIIEAIVAGERQAEVLVELCDRRILNQKREAVIASLEGHYRAEHVFALKQALECYRFYQEKLLECDRMIEALLEEMTAEMAVPDVVKPPKAMRHNAPAIADLHVRLLQLTGGQDLAHLVGLTDHTVLKLLSETGTDISKWPSEKHFTSWAGLAPGSDQSGKRRRRRRRRHKNRVGQIFRECAQSVGQSKHLALGGFHRRLRARRGVRVATVATARKLAVLYYRMLKYGFAYVEQGLQAYEQQYQQQQVRYLKKKAKALGFEVVAATG

SEQ ID NO: 234962 - protein, 326 aa, unidentified
MTLSHSLDNTFIGIDVGGANLDVAWHRGDSAHYANRPDAIATLVRRLQAQPQITRIVVEPTGGYEKALVQALRRAKLPVEIIHTSRFTAYRALVGVKAKSDTSDARLLASYAAAPDEVRGRKAGHVELPEDAIREALSELASRRDQLKHMIHAETCRLGTVRLAELREAITTHIETLRAEDKQMHQKMLALVRQRADLQHDQRLLKTIKGIGTKSALVCLALVPELGRVDNKVAAALIGSAPFIRQSGTMNAPAHIHGGRAAVRSILYMAAVTASRHNPVLRPFYERLIAKGKPPKVALIAVLRRLVVFANAVLKSRQPWRGANAT

SEQ ID NO: 234963 - protein, 320 aa, unidentified
MKPIFIGVDVSKDHLDAAVRNAPHTPRRFANNSDGIDELVAWARDIQPERIIFESTGLYQKKAVGALLAAALPAVVVNARQVRDFAKALGQLAKTDTLDAEVLAHFGEVVATIVRPLPAPEIQEFQQLCDRRGQLVRMLAIEKNHRHVGGPAKILKSINDHIRHLEKLIKSLEDRLDKFVGASEAFRAKNELLQSIPGVGPQVSRTLLAHLPELGQGSRQTITALVGLAPYNDDSGKESRTRHIRGGRGKVRIGLYQAAVVAIRHCPEMKAFYVNLKVRGKASKVALVAVARKLLVLANALLRNMKPYETRTNSVCPKTA

SEQ ID NO: 234964 - protein, 406 aa, unidentified
MKQIVSVGIDVSKGKSTVCAMIHPNTIIKESFEVLHTVEEMSMLADYIGSLDGEIRIVMESTGHYHLPVAQFLYQKGFFVCVENAYIIRQFSRIMLHGAKTDPLDAKKLAKYGLAYWSELKPYKFHPSCYTELSLLSKQYQTYIKLLIAAKQNVIHLMDEMLPGFKEALDTASSVQFSKVKYVDFAKEFYHVDMIKTMGKEIFRENYKQWCKEKGYRFQSEKADELFHLAEDGIPTLPTEFPSTRLCMEVATEQVSQLGYALEQILSQMQNLAKTLPEYQTIRQMGGMGEKLCVRFIADIGDVRRFHNGKALVAYAGIDAPPYQSGQYTGTKRRISKRGNSALRKTGYEVMKSLKSHPPKTDTRVYDFIIKKENEGKSKKQAKIAGLNKFLQIYYARVIEIYKNIV

SEQ ID NO: 234965 - protein, 356 aa, unidentified
MSYDVKYIGMDVHKEAIVIAVQNESGKLVMESVIETKASSILQFLHGLRGELHVTWEEGTWAAWLYDLLQPHVQHIVVCNPRRNALLKEGSKSDKVDAQKLSDLLRTGMLRPVYHGENGLRTLRELGRSYQTISKDLTRVMNRLKALYRGWGIPCAGTQVYAARSREEWLSKIPHAGVRRRAELLYQQLDGLQALRREVRPEFLAESRKHKAAKLLRQIPCIGPIRAARLIALMLTPHRFRSKRQLWTYSGLGIETHDSAQYRFVRGQLQLSKKPQQLRGLNRNHNHEMKEIFKSAATRASCGRGPFYDFYAALLAKGMKPEMARLTLARKIAAITLTLWKKEERFDAEQLKTQAA

SEQ ID NO: 234966 - protein, 394 aa, unidentified
MILVGIDIGKKQHIFSIIDKQTGEILSNPSVFHNNQDGFLLLIGKLSCYAKSKLLIGMEDTGHYHFALLKYLLDRHYTVALINPTTTDLTRKLQGGITKNDPLDSLTICDVIGSNQRKKPYRITKVNRFDLYEQKQLTRHHHNLKEELNIYKNRLQKCIDIVFPEFNSLFRSKYGIVYMNILKTFASAEKIANSDIRIIRKCFEYEGRGRRIQLSAEQLKTTANASVGISSVAEEIQIRHLVRQIEMIEEQLSEIDKKIEEFSLQNNSPILSIPGISHFSGTSILAELGDICNYTKASQIIKFAGVAPYHYESSQFIARHTAITKKGSRYLRKTLYQIILPVINHNRVFTAYYNKKLAAGKGHRCAQGHCIRKLLRVIYHLLSTGQSFDPALLI

SEQ ID NO: 234967 - protein, 404 aa, unidentified
MQETSAGIDWAKEEHAVCVLDQDGRRIDERRVAHDEEGVAFLCALLIELGVGRIAIERPDGLLVERLLEAGLVVLAVHPNQLKAARPRFSVSGGKSDGFDAFVLAELARTDHHRFRALVPDSDETKALRALTRAREDLVQARVALANRLRAELEAFWLGAARIFAEIDSPISLSFLERYPSPDDARRLGEKRLAGFLARNRYCGRKTAAELVERLRSAPRGRASEAEVEARRTAVLALVAALRPLVEQIGLLSSQIAGAVRAHPDGEVFLSLFRDPKSSITAACLVAEIGDCRARYPTSEAMAADAGMCPVAVESGKRKVAAFRRACDHRLRDAVAVLADATRHHNPWAKDVYRRARARGCDHPHAIRVLGRAWVRVIWRMWQDRVPYDPARHGNLRRLNAAGG

SEQ ID NO: 234968 - protein, 331 aa, unidentified
MEVLHPRCAGIDVHKDVVVAAVRCVSEPVRREVRSFGTTTSELMSLSEWLGSHGCTHVVMEATGVYWKPVWHLLEEDFELVLVNAQHVKAVPGRKTDVGDAQWLAELLAHGLVRSSFVPPARIQELRDLTRTRKQLVRELSQHTLRIQRVLEDANLKLASVLSSVVGKSGRAMLKAIVEGETNPEKLAELAQGNARKKRAELIEALRGRVTEHHRRLLKLHLGLIDTLQVAMKEVDDSVGKTLEPIQARAQLLTTMPGVSDIAASVIVAEIGVDMTRFPSPGHLVSWAGMCPRNDESGYRPGTSVTKQTGTLGNGLGQREGAACPGTRQTE

SEQ ID NO: 234969 - protein, 367 aa, unidentified
MGKNNTYWVGMDVHADKIQIAVYRGDESLPIEEYERATDTRSLGRILKKLQGLPGEVRCVYEAGPCGYELHRYLTKSGIVCEVAAPALIPKKAGERVKTDRRDARKLGRLYRAGELTMIYIPGEEQEAVRDLIRARERAVEDVRRKRHQLGKFLLRHGYRYRDGKQWTQGHMKWLKGIQFEIAFLKTVFEEYILALSQSEERVNHLTRAIEEIAVRPEHQKTVSAMMVLRGVKVITAMTILFEIGDLRRFLRAKDFMAALGLVPSEYSSGSRVNRGSITKTGNSHIRRVLIESAWHYRHRSTVGKSIKARRAGKPPELLNIAQKADMRLNRKFRRMTDRGKLSTIAAVATARELAGFVWAIGQQVNS

SEQ ID NO: 234970 - protein, 367 aa, unidentified
MKKVSTAVTKQSRNISQQKLTIGLDLGDRNSWYCVVDEAGQIQLEQRVRTSAKGLQEAFGGMPRSRIALEIGTHSPWISRLLSELGHEVIVANARKVRLIGESRKKDDRLDAQTLARLARIDPELLYPVKHRSAQAQADLMMIRARAGLVRARTGLVNTARGLAKSYGERLRGCNVRNMNPEKADGLSPELQRALEPLLASIESVSEQIREYNERIEQLAQQSYPQVALLKQIKGVGTLIALTFLLTLEDPHRFGKSRDVGCYLGLQPGRRNSGQREPQLHISKEGDPYLRTLLVQGAQHILGPFGIDCDLRRWGLKLAERGGKSGKKRAIVATARKLAVLLHHLWVSGEVYEPLHNSNRTTVAAAA

SEQ ID NO: 234971 - protein, 341 aa, unidentified
MEQATTIGLDIAKHVFQLHGADAAGHVLFRKRITRVKLLGFLAAQTRCVVAMEACAGAHYWAREIAKLGHHVRLIAPAYVKPFIKRQKNDAADAEAICEAAQRPSMRFVPVKTEEQQANGIVFRARDLLVRQRTQCVNALRGHLMEYGYVFPKGITHVETLIALVEDLQSSLPDSVRVILKLLVDTFTALEAQIAVLDAEINQRSKSDPTARRLMTIPGVGPIASTAITALVPAAEGFPAGRDFAAWLGLTPLQKSTGGKQKLGAVSKRGERTIRRLLIIGASAVVQQASRRGAPKGSWLAQMLARKPKMLVTVALANKMARIIWALLVKGGTYRTPAVAA

SEQ ID NO: 234972 - protein, 369 aa, unidentified
MSIKKSAVAELKFVGLNVHKDSITSAVLEPGRETPVLDRFFRDEASVRRFVGTLGDLAAVRSCYEAGPTGYELARFLHRLGVACEVIAPSLIPVAPGAKVKTDSRDARRLAHLYRSGELVAVHIPTPEEEAIRDLARTRADLVIDRTRARHRLSKFLLRHGEVFRAGTQWTVAHEAWIGQVRFSEAALSSTFSHYRAVLSSLDGHLHAVESDLVPYFRCGPFAEAVGRLSAYRGVTEMGALTLSAEVCDWRRFAQATTLMGFCGLVPSEYSSGERVSRGRITKAGNTHLRAQLVEAAWALSAPPGSRATDEEAPGALLARDRRPRMARAAPPLREVPPPRGTKDLAQDRRDRDRERARRVLMGRDGRLR

SEQ ID NO: 234973 - protein, 310 aa, unidentified
MDCFIGIDVSKATLDIAALPDGESWTVTNDDHGLAELAPRLVTLAPVLIVLEATGGFEMLAAITLAKHGLPIAIVNPRQVRDFAKAMGQLAKTDALDAGMLADFAQRVRPTPRPLPDEAAQFLESLLTRRRQIVDMLTAEKNRLSFARGPVKRDITQHIRWLEKRLADVDGDLQDAVAASPLYQAKADLLRSVPGVGPVTALTLLATLPELGHLSRHQIAALVGVAPMNRDSGTMRGKRMVWGGRAPVRAVLYMAALVGRQHNPVLRVFYERLRAAGKPFKVAATACMRKLLTILNAMLHQNRRWDPQHA

SEQ ID NO: 234974 - protein, 480 aa, unidentified
MAKARKSTFERLQKGQLNRQQRKELQRKFDADSPELDVKHPHAAGIDVGGASHFVSVPPNRDEMPVREFGSWTEDLRCMARWLKACGIETVALQSTGVYWIPVYDVLEGEGLEVYLVNARGTKNLPGRKSDVQECQWLRKLHSYGLLHKSFRPPEQIRMVRTLWRLRDRVVKDAGRAVQQIPKALTQMNVQLSNAISDVSGVTGMNIVRAILRGERNPYQLAKLRDPRIQASEEEIARCLEGNWQPDLLFELQQVMDAYDFYRRQLGIIDKQLEEYLATLPAREPVGKVEPAQLTAKQRKKLKASRKSKDNRPAFDLGAELTRLMGVDLRIIDGIDLMTAQTIYSEVGADLSAWPTEAAWASWLELVPRNDITGGKVIKQKKRPSNNRVATALRNAAESLYRSDSYLGARYRHFTGRLEGLKGVKAMAHYLACLVYRLLTKGQAWVDRGAAYYENKRQQREMVHLQKRAAAAGMKLVPIT

SEQ ID NO: 234975 - protein, 347 aa, unidentified
MERQPLKKLAADETGLLKLLERWRAEAEKAGHKIDRIAVAFEAGRDGFWLARWLRARGIEAHVIHAASVAVAREHRRAKTDRLDTEQLKRAFLGWLRGEREHCKMAAIPTSAEEDAKRPHRERETLVGEHTTIINRVKGTLARLGIRGFNPKLKKAPERLEHLRTPEAEPIPPNTLAELQRDLARKQLVAEQIRQIEKARLEQLKQAPKAGPNLMVLLLMRVIGIGIETADMLVKEILSRNLRDRRAVARYGGVTGSPDESGKTRREKGLARAGNARVRRGMIQLAWRFLNFQKESALAKWFVARTKNARGSRKKMIVALARKLLIALWRFVRDGVVPEGVVLRPAH

SEQ ID NO: 234976 - protein, 366 aa, unidentified
MKEYISFDSHKRYTLMEREDRETGEARQVRVNHVRGAIVRALAGCEAGTAVALEAAGNWYWIADEIEAAGLTPKLVHPRKAKLMMGMINKTDKLDVHGFNRLQRNGVLPTVWIPPARLRDVRALTRARVRLGWERTRIKCLIQSQLAQYGLTRTEGPSELFCARAAAILEGLIGQLPECTRAVATAHRERLRLIQGQVAQMEKQIEGRVKADETMRLLDTLPGIGAILSASIALEIGEIGRFPDAGHYAAYAGWTPRVHASGGKTRYGRCRPDINRTLKWAYSEAANSVALCHERRPERYVSRRYRAVRKRRNHSVAIGAVARHLAEASYHVLSRREPYRDPAWGPQRSRQGSVSGETSYPIEGAQ

SEQ ID NO: 234977 - protein, 467 aa, unidentified
MTPHKDYCLDPPPPVPTPMLPESSVLSDALQVCHPHAAGIDIGEAEHWVAVPPGCDPQPVRRFGTFTVDLDAVADWLIDCGVTTVAMESTGVYWIPLFELLEARGVQVLLIDPRQAKRVPGRPKTDRLDCKWLQRLHTYGLLAGAFRPEAHVCVLRSYLRHRQMLLTYAAHHIQHMHKALEQMNLKLTQVVSEITGVTGMAILKAILAGERDPQHLAKLRNPHCHHDEDDIAKALQGTWRAEHLFALRQAIELYDFYHQQMTQCDQQIKAHLATFDDKSAGRPLPPKARRHKKTNEPRFDARTPLYHLAGVDLTTIEGIEEGTALVILSEIGTDMHRWPSVKHFCSWLGLCPQHKISGGKVLSRRVRPGAHRVTVALRLAARTLHHSQSALGAFFRRMKARLGAPKAITATAHKLARLVYSLLQHGSAYVQQGLDAYEAQYRERKVTTIAKQAKALGYTLVPLAAQG

SEQ ID NO: 234978 - protein, 344 aa, unidentified
MQIVRIGLDLAKYVFEIHGVDAQGKTVVRKTLRRHAVSTFFANLPPCLVGVEASNGAHFWAKALSDLGHDVRLISPQFVTPYVKSNKNDRNDAEAICEAVGRPSMRFVPIKSAEQLAVQAVHRIRSRLVADRVRLVNQVRGLLAEHGIVVAKDIGNLRRALARIVGDDEDRVLNPLVRALMAELREELTELDARIAGYDRKIRELYRNSEICQRLGKVEGIGPVTATALVAAVGDRSSFKNGRQFAAWLGLVPKQRSSGGRARLFGISKRGDRYLRTLLIHGARSALGRVRDKQDPRSLWLGRMRQRRNPNIVAVALANKNARIAWSLLTSDSVYDAGLSVRAA

SEQ ID NO: 234979 - protein, 342 aa, unidentified
MRYFAGLDVSLEETSICIVDEAGGIVGEARVASEPEALVAFFDALGMTMERVGLEACSLAAWLHQGLSEAGIPAVCIETRQAKAAMGAMPNKTDRNDARGIAQIMRTGWYRAVHVKSPSCRSWRALLTARRMVLNKRRDVENGVRALLREAGLKVGTPSRKDFPARVRELAAGDAVLNALVESLLSVIRVMTDEVARLTKRVLDEVRVEPTCRHLMTVPGVGPLTALAFRATVDRPDRFRRSRDVGAHFGLTPRRYQSGETDLQGRISRCGDELARTALYEAAHSLLIRSTKWSALRAWGMQVAKRRGMARARVAVARKLAVILHRMWVDKSEFRWGKQAVA

SEQ ID NO: 234980 - protein, 324 aa, unidentified
MIDAILGIDVSKNTLDVSISSCTKVRTKSFANSSDGWHHLLDWLVAQKIQRVHACLESTGRYSLGIACSLYEAGHVVSIINPAQIRDFVRTKLGRNKTDGIDASRIREYCELFKPSPWAPPSEAHRRLGELQTIRAGIVAGLTEWKNRKNSGIVDTEAQALADATILHFTSQLGAVDKAIALTIDNDSDLRSKRDLLLSINGVGDTLAGVVLAELPGPDVLRSSGEVVAYAGLNPRQHQSGTSVDRATRISKIGNAILRAALYMPALSAMRYNPAIVALVTRLKSRGRLKPKQIVVAAMRKLLVLCFGVLKTGKPFDPAIAMGC

SEQ ID NO: 234981 - protein, 347 aa, unidentified
MLADQLDYVIGVDPHRDRHALAIVEVRSGGVLLEASIEADSAGYASALSLADKHAPGRRGFAVEGTGSYGAGLARFLADHGETVFEVGRLQRERRSGGKTDALDAVRAAQSVLGKKRPALPRAKGKREALRALMAARDGAVTAKTAALSQLRDLLVTAPEPLRAELRPLSRARLLARLTATRPDLRQDSELRGTHLALKTVARRIRQLATEERELGHEIEKLTHDLAPQLLAEPGIGPLSAAQTVLSWSHPGRIHSEAAFARLAGSAPIPASSGQTIRYRLDRGGDRQLNRALHQIIVTRRRMHPPTIEYIERRTREGKTSREATRCLKRYLARHLYRLLEHPPVTT

SEQ ID NO: 234982 - protein, 387 aa, unidentified
MAKPDDLSRSLVPFEQSSTLVAVIEMSLSSWLVAGIVPGLDRHPLKKLGADEDALLRLLQRWRDKAVAAGCTITRVVVAFEAGRDGFWLARWLRAHDVETYVIHPTSVAVSREHRRAKTDRIDTALLKRAFLGWLRGEPDHCNMTAIPTPEQEDGKRPSRERETLIGEHTRIINRMKACLVRWGIRNFKPTLRQAPQRLEALRTPEGMPLPPNTLAEMRRDMARLHLIKDQIKAITENRVRRLGQASADRPQAMSRMLARVIGVGIETADMLVQEILSRHLRDRRAVARYAGLTGAPDESGKRRREKGLARAGNTRVRHGMIQLAWRFLRFQKASALAQWFHARTSDGRGGTRKTMIVALARKLLIALWRLVATGEVPQGVVLRPAS

SEQ ID NO: 234983 - protein, 343 aa, unidentified
MERYVGLDVSLKQTSICVVNQTGSVMREGVVDSDPEAIAAFVRSQAPGVVRIGLETGPTTTWLWTELKRLGLPVICIDARHAKAVLKMQINKSDRNDAAGIARIMQTGWFKEVRVKNLDSHAIKALLTSRALLVKIKRDLENQIRGLLKNLGLVIGRAKFNVFAVRAGELIADRPELVAAVRPLLAARLSIEQQIGDLDRKVLKLAREDAQVRRFMTVPGVGAITALSFKATIDDPTRFKRSRSVGAYGGLTTRRHASGEVDWSGRISKCGDAMLRMYLFEAANVLLTRVPKWSALKAWGTKIAKRCGLRKAKVAVARKLAVILHRLWIDGTEFNWSSNTAAA

SEQ ID NO: 234984 - protein, 353 aa, unidentified
MKYHTSTTQFNCGIDLHARQMYVCVLDRDGKKLVHTNIKNNDFAYFLKLVAPYRHDLTVCAECMFGWYWLADACADAGIHFVLAHALYLKAIHGGKNKNDRLDSEKIAHLLRTNFIPPGYVYPTEKRPLRALLRQRLLYVWNRTELLARIQSHQLAHNRPTTRQTLYNREPWGKNLLASEPDPVRQLALQNDLALIGHYDAQLASLEKELLKLTKQTACRDFTLLQTVTGIGDYLGLTILHEIGDIARFPTVKDFLSYCRLVKGTVASAGKIKGLRGAKLGNPYLRWAFGEAAIIAKRDALLGPLAQRLEARLNNKFKANTVLAIKLARAVYFMLKQKTVFDPERLVAALSKN

SEQ ID NO: 234985 - protein, 316 aa, unidentified
MSPASVFAGIDVSKTTLDVAVSSGRVWQAPHTAAGIADLVVCLQELRPARICIEATSTLHYDLAGALLDAGLPVVVVNPRQIRDFARALGRLAKTDRIDAEVIARYAAAVQPPVRALPGPRLRELQALVARRRQVSHALVVQRNQRRTAHAAVVADVDEHIALLQASLKKLERAIANLIQQYPRWRELAAQLQSVPGVGPQVAAVLTAALPELGGANKRQLAALVGIAPLNRDSGAFRGRRMIWGGRVAVRNALYMAALVGTRRNPVIAAYYARQRARGKPAKSALVACMNKLLAILNAMVSTGESWSPRLAAEAA

SEQ ID NO: 234986 - protein, 460 aa, unidentified
MSILTIRLPDDKHGRLRELAKSRSVSVNKLMDELATIALANHDARTRFEVRAARGEPDKALALLARLDQEESGSSGPSVSKRRVVRGKRRDLKNHLAQLPASVHGPTVWFPHQAGAPTKETDMRLYAAIDLHSNNSVLCVLDEMDRIVFSKRLPNDLAAILKALQACPGEVVGVAVESTYNWYWLVDGLQDAGFTVHLVNTTAVKQYDGLKHSGDFDDARHLAHLLRLGILPTGYIYPRQERALRDLLRKRSQLVRQRTSQILSMQNLTARNLGAHASGNEIKQWQDEDIDAMPLLPEQRLALKANLAVMDCMEAQVRLLEKAILAQARPRADYQALHTVPGIGKALALTIALESGDMARFASAGNFASYARTVDSRRESNGKKKGSGNAKCGNKHLAWAFIEAAHFAVRYDETIRRWFQRKCAKTLQVVAIKAVAHKLARACFHVMKSGEPFDAARAFG

SEQ ID NO: 234987 - protein, 412 aa, unidentified
MEIIHPRCAGLDISKKDAKVCVRINGAGRRKTSETVTTFGATTRQIMAMRDHLAAQQVTCVVMEATGDYWKPFYYLLEDLPGVEVMLVNARHVKNLPGRKTDVADATWLAQLGAHGLVRGSFVPPEPIRQLRDLTRTRTAVTRERTREIQRLEKLLEDAGIKLSSVAADLNGASSRAMLEALLAGETDPAAMADLAKKRMRVKIPQLTEALYGRFTSHHAFLTRMHLDLIDQHTAAIEQLTDRIEVVIEPFRRVRDLICTIPGIGGFTADVVVAETGADMTRFPTAQHLASWAGTTPGNNESAGKVKSRRTRPGNPYLQGALGTAAMSISHTRDTYLAAKYRRIATRRGPLKANVAVQRALLVAIWNIATTNTSYHDPGGDYFTRLNPQKARNNAVRQLEAMGYHVTLDQAS

SEQ ID NO: 234988 - protein, 360 aa, unidentified
MKYYAMKYYTSTTQFNCGIDLHARQMYVCLMDRQGKKLLHTNIRNNDFAYFLKLVAPYRHDLTVCCECMFGWYWLADACQSAGLTFVLAHALYLKAIHGGKNKNDRIDSEKIAHLLRTNLIPPAYVYPAALRPLRALWRQRILYVWRRSELLARIQSHQLAHNRSPIKQTRPNRDPWEKGLLAQEDNPLRQLALQNDLAMIRHYDQQISALEEPLKQFTRTVAAREYVLLQTAPGIGENLGATILYEIGDIQRFPTVKDFLSYCRLVKGTVASAGKIKGLRGAKLGNPYLRWAFGEAAVIAKRDHALIGPLAQRLEARMNGNKFKANTVLAIKLARAVYFMLKNKTVFDPQRLVATLAHN

SEQ ID NO: 234989 - protein, 400 aa, unidentified
MLSIGIDVSKGKSTVCGMKPGGEIVYTPFEVQHTREGMSELVSLLRGSGEEVRVVLESTGSYHCPVVAALLENGIFVSVVNSLRMKRFCSQSIRRVKTDQIDAMQIALYGLAYWQELQPTRLPENTYRELQLLARQYYQMTSLLIKAKVDFNALCDQVLPGMQELMSDHAGRHKLSDFVLRYHHTAHILKMGETRFRKDYCKWAEKKGYRNHERMAALIFATAQNGIPVLPDAPSTQIVITEAIRVLHTVEASRDAILTQMQALAKTLPEYSLVREMPCIGDTLAPRLIAEIGDVRRFHSKRALIAYAGIDAPPYQSGKFCANNRHISKRGNRYLRKTGYEVMQSYVMHKPANDPIFTFIEKKRSEGKSGKLAMVAGLNKFLRVYYGKVTELYRSSSAIE

SEQ ID NO: 234990 - protein, 352 aa, unidentified
MASVMIGIDPHKASHTAVAISGSEEQLGELRVRASGAQAERLLAWAAAWPQRTWAVEGAGGLGHLLAQQLLSAGERVLDVQPKLGARVRLLASGNVNKNDPNDARSVAVAALRSPGVREARPDDHAEVLRVWSKRRRDLASARTQVVCRLHAVLCELVPGGVAKKIIAAHAARLLESITLPDAVAAARCELAAALIEDLRRIDAQLRETRSKLDTAVRASGTSLTGLFGVGPVIAAAIIGEVRDASRFRNRDHFASYNGTAPIEVSSGSRKVHRLSRRGNRRINHAIHMAAITQIRQPHSEGHAYYDKKLAEGKTHREALRSLKRQISDAAFARLRTDARRTAGQVGDPGGQ

SEQ ID NO: 234991 - protein, 343 aa, unidentified
MQTVTTIGLDIEKSVFQIHGIDAAGHVIVRRKLKRRYVLPFFQKLPPCLVGIEACASSHHWSRELQAFGHTVRLMPPAYVKPYIKRQKNDAADAEAICEAVTRANMRFVATKTLEQQSCLMLHRTRHLFIRQQTSVINAIRAHLAEFGIVAPVGRNGVEQLLDVVADVSDKRLPDLARTCLLALGAQLRTLKAQILNFDRQIMAWHRSNEASKRLDEIPGVGPALATALVASVADPKAFRSGRDFSAWIGLVPKQHSSGGKDKLGSISKQGDRYLRSLFTAGALAVIRYAKIHGTQHRPWLTALLARRPTKVAAIALANKIARMAWAMMARGERYKEPIALAA

SEQ ID NO: 234992 - protein, 360 aa, unidentified
MKCTRKVSRLESFVKGFESGDWWIGIDAHKRSYAIALLRGDAQIHTWNSPADPQGFIAQLTRLGIRPSGVAQEAGPTGFDLARALTRAGIRAIVAAPSRIPRPVLARAKSDRLDCRRLANYAARGMLTGIAVPSEEEEAFRALVRSRQAVTDQNRRCKQRLTSLFLCHDLPAVPEMTSWSTATLDQVAQWPLPEELRAVCDSLLEELTAHTTNQRRIDQRLADCLSSHPIWDAQVKALCTVPGVGPRVAQTFLTEVFRPERFHSAGEVTSYLGLAPMVHHSGESTPRGRIRPVGQQRLRSLLVEAAWVWKTQDTGAQALYNRHLSRMGIAQKAIVALARRLAEILWRIAREQRPYYPMKS

SEQ ID NO: 234993 - protein, 421 aa, unidentified
MHVLYQRCAAVDIGKDVIAVAVRLPGDGPEHRQTIKRTFKTFYGVLKHAARWLTEQQVTHVAMEATGIYSMPVYHALIEHGGFEQVLVCNAGHVRNVPGRKTDLSDAEWLVHLLECGLLRGSFIPPAQIKAARDVIRYRTKLTESRTSELQRLGNILQDAAIKVDSVASTITARSVRAMVEALIDGERRPLVLAELAKGRMRAKIPDLQRALEGRFDSHHALMCRLHLDHLDYLDEMIVRLDTQIEDMMQPFRAQRDLLTTIPGIGPFVAAAVISEAGADIAETFPSADQFASWIGVCPGNHESAGKRHSGKPRKGNQHLQHVLVECAWAASRTPGYLQSHYRWHVRKFGGSRNATAKNKAIVAVAHKLAIIIWHVLATGKPYADLGADYFDRRIDPAAETRRLIARLQALGHTVTIEPAA

SEQ ID NO: 234994 - protein, 402 aa, unidentified
MNSVGIDVSKGKSMIAVMRPFGEVVCSPFEVSHTSSELSKLARLLKSLDGETRVVMEATGNYHLPIAIALHEAGIYVSVVNAMLVHDYGNNTLRRAKTDKKDAIKLANYGLDRWLNLPRFSPEGEIRMQLKTCYRQYQQYSKVQTMLRNNLISLLDTVFPGVNRLFSSPARADGSEKWVDFVDTFWHCECVSGLSQKAFEKKYQKWCQKHGYYFREAKALEIHIAASGCVGVLPKTETTHLLITQAVSQMKATSSALAELKKEMLHLAEQLPEFPVVQKMYGVGPTLGPQLMAEIGDVRRFHSKKALVAFAGIDAPPNDSGQIAGNHKAMSKIGSSSLRRTLFLIMGVYLQKSPVDEPVYQFMDKKRAEGKPYRVYMMASANKFLRIYYASVKAYLDAMEAA

SEQ ID NO: 234995 - protein, 375 aa, unidentified
MAGIARLHAILGELAGQDVEDEHLQVLVGIQTDRGPWVTALVAAGYQVFAVTPLQAARYPERHTVSGAQSDTGDAPVLADMVRTDAHQLPPVASDSAQAEAVKVVARTHKTLIWERTRHTQRLRHALWEYFPAAVQAFQDLDAPDALELLAKAPDPASAARLTRAQIRAALKRARRRDIGAKTERIWAVLHAEHLGQPEVVTGADAASVRSLVAVLGALDQQIATLQRQVVAHFGRHPDAEILASQPGLGQILGARVLAEVGDDPTRYATAKAGKNYAGTSPITRRSGKTKLVTARSIHNDRLIDARMTQAFAALSASPGARASYDQLRARGAGHNAALPQLANRLVGILHGCLKTRTRYDEATAWSHHSQTLAA

SEQ ID NO: 234996 - protein, 429 aa, unidentified
MICAAVERCAGIDVGKQFLAVCVLTGPLEGEARKQMRRFGTIVAELERLRDWLKQEEVTHAVMESTGSYWKPVFNVLEDTVKVYLANPQEVKVRKGHKTDDKDGWWLAHLLRHAMIHPSFIPPRAIRELRDLTRRRKKLIGAGTGEKNRVQKILEDANVKLGNVLSDVFGVSGQLMLDALLKGEAEPEEIAQFAQRRAKQKIPQIIAALEGHRMSDHHRKMIGYSLEHMRFIEDQIEKLDEDIVAKIKKAGLEREWQLVQSAPGLKETSAANVLAEIGGDMSQFPSARQISSWGGVCPGNNRSAGKSKSSHTTGGNPWLRAALTECAWAAAAKKGCFLKEKFWRITTKSGGKKAPALVAVAHTLLTLVYDALRTGEPYQEKKVTDLNPSQRERMIRHHVKRLGKLGVKVRSNPVKRETKLHTHTNTKRS

SEQ ID NO: 234997 - protein, 457 aa, unidentified
MTKRNKKPKSQNFEMSKLPQHLQHINVNAAGIDIGSERHFVAVPEGRDEVSVREFGTFTTDLQALAAWLKQCGVTTVAMESTGVYWIPLFELLEREGFEVKLVDARHVKNVSGRKSDVLDCQWLQQLHTYGLLAGAFRPPDEICVLRSYLRQREMLTQTASQHIQHMQKALQQMNLLLHNVVSDITGVTGMKIIKAMLAGERDPRVLARNRDERCKNTAATIAKSLVGNYRAEHIFALGQAVDLFETYQAKIADCDEALIKQLENQPDVSDDGPPTPEKPTQARDRLRSGVDVRELLYKKSGVDLFAIPGLAADTLLTLTSEVGFDLTPWKTEKHFASWLGVCPGTKKSGGKVLNKKTKRHPNRAAQAFRLAAASLSRSKTALGAFYRRIKSRSGGKHAVTATAHKIARIYYAMLTQGTAYVELGQQAYELRYKERRLDHLKVQAKSLGFQLVPCAT

SEQ ID NO: 234998 - protein, 431 aa, unidentified
MLGGNQEKLMSQNQPEIQYAAFVSIDWADQKHVWSLQEANSSTREHGEVGHMPEAIEAWIAQMSQRFAGRPIAVAVEQSRGALVFMLSKYEQLHIFPVPPAMTANLRKAFYSSGAKTDPADTDLLQDVLQMHREKLRRLSPDTEATRLIQNLVEERRKLVDEKTAQSNRLEAHLKIYFPQIPQWFGDVDSPLVCALLERWSVLEALQKARPDTLRSFFRKHHCRKEELIESRIKAIGEAMPALKDRAVVEVQLAVVKVLVQVIQVLHQGIEDFNRQIQEAAEAHPDFFIFESLPGAGAVMAPRLLAAFGSQRERYRTAAEVQTLSGIAPVTESSGKSSWIHFRFACSKFVRQSFHEWAALSIIQSQWARAYYELQCRRGKRHHAAVRALAFKWIRIIFRCWKERVAYDEKVYLAALAQHNSPLLAATKIAL

SEQ ID NO: 234999 - protein, 352 aa, unidentified
MTTDGKPDEETEMPLSGGIDLHANNSVVVLLHEQDQVIYQKRFPNHLPTILEPLSRHHREIEGVVVESTSNWYWLVDGFMEVGYRVHLANPAAMQQYNGLKDTDAHSDARWLAHLLRLGVLPEGYIYPKGARAVRDLLRKRAHWVRQHTANVLSVQNIMARNTGARFSVTRIQALTKQDLTTLLAEEAQVLAVTSSLAVLDCLKHQIKTLEQSVHKRLHHTLAYEQLLTVPGIGTILAHTITLETSAISRFPAVGHYASYCRCVDSTKISNGKRKGTGNVKNGNPYLAWASMEAAQFALRFQPAAQRFYQRKLAQSRNNTVLARKAVAHKLARACYYMMRDLVPFEATKAFG

SEQ ID NO: 235000 - protein, 315 aa, unidentified
MSPEIVVGIDISKAHLDFGTVPSGEVWRESNEPTAIDHVAKRLVELAPKLIVMEATGGLEIPVAATLSRAGLAVVVVNPRQVREFARATGQLAKTDRIDALILALFGDRVRPQVRPLPDDLARAFDALLARRRQLVVILAQEKTRLKQARSRPVTTGIQRHIRWLEKEIKDVERDLTKNVRESPVWRAKDNLLRSAPGVGPIMSFTILADLPELGRLNRKQIAALVGVAPHAADSGTLRGKRIIWGGRACVRQPLFMAALAACRSDPGFRAFHQRLVVSGKPPKVALVACMRKLLTVLNAMVRDATPWNPTIVRI

SEQ ID NO: 235001 - protein, 344 aa, unidentified
MSEITTVGLDLAKRVVSLCGEDAAGRVVVQRTLRREAVLAWFVQRPPCLVGMEACSSAHWFARELAALGHTARIIAPEFVRPFRLSGKNDANDAAAICAAVRQPQLRFVAVKSADQQARLVVHRLRQGWQEERTAGLNRLRGLLAEFGRVYPNSAAAALAGARAALADETLPAALRHGVARQLEHLRELEAHLAECDRAIAQQARDDPRAVRVARLSGVGALTASAVAATVVDASQFRCGRQFAAWLGLTPRQYSTGGKTRLGRITRRGDTYLRGLLVQGARSALQAASRAAPPRRTQLAAWIVATYERIGYHKTLVAIANKHARLIWVLLTRDEPLRAHAAVN

SEQ ID NO: 235002 - protein, 352 aa, unidentified
MEHFIGNDLHTRYQVVAWVDEQTGEICKRRLEHTGEEVEKFYAQFPRGTVVGIEATLPAYWFERLLEKLGHQLWVGDAARIRAHEVRDQKHDPRDAENMLDLLQGGRFPRIWVPTLEERDLRQLLVHRLKQVRARTQVKNQLHYLAMSQGLCRKRKLWSAKGRAELEGLALLPWAARRRKELLEELDRRDEQVRELDRAVEEAGRERQEVALLRTHPGVGMVVALAFVLTVGPIERFAHSRKLVSYWGLNPREHSSGGRQRLGSISKQGNTMMRWLLIEAAQTAARFDPQLRRTYQRLKSRRNSGVAKVAVARRLAVRLYWMLRTGHNYAQLVPMSGSPSGAVVLPAAGSTV

SEQ ID NO: 235003 - protein, 343 aa, unidentified
MDQFVGLDVSQEVTHICVINSKGGMVWQGQCASTPDGIAETIRTRAPSAARIGMESGALSTWHWHALKAMALPVVCVDARHAKAALSMQVNKTDKNDARGIAQIIRMGWYKEVGIKSMNSHEVRSMLGVRAQLVGMRTDVTNQLRGLLKNFGVVLGKEKGLRFEQRVGEVIQGEGMLNESLRALLAILRYLKVQISLLDEKAQTFAKDDKICRHLMTIPGVGTLTAAAFMTAVDNPAKFAKSKNVGAYFGLTPKRYQSGEADRNGRISKCGDGLVRKYLFEAATTLLTRVNRWSALKAWGVRLVKRSGMKKAIIAVARKLAVTMHAMWTTGEEFRWSKVAANA

SEQ ID NO: 235004 - protein, 356 aa, unidentified
MYGAKYIGLDVHQATISVAIMDSAGKLMMESILETKATTILEFIQGLRGSLYVTFEEGTSAAWLYDLLVPHVTKVVVCDPRKNATLKVGNKSDRMDARKLAELLRGGHLSPVYHGENGVRTLKELARSYLAITKDLARVMNRLKAVYRSWAIPCAGTRVYAAHGRAEWLKQLPETGVRRRAERLYQQLDLLQPLRQEARRDLLAESRKHRASRLLQQIPCIGPIRTALLIALIQTPHRFRTKRQLWAYCGLALETRTSAEYRFVAGQLRRSKKLLAIRGLNRNHNHDLKYLFKSTAILASSRCSGPFHEFYEALLAKGLKPPMARLTLARKIAAITLTVWKKGERFDAEYLKRQAA

SEQ ID NO: 235005 - protein, 355 aa, unidentified
MDHIGIDVHKRESQICILAEGGELMEQRIRTEPDRFAAVLGKRPRARILIEASTDSEWVARCLEGLGHEVIVADPNFAPMYATRTRKVKTDRRDARTLADANVLGAYRPAHRLSDAQRHVRGRLGVREALVRTRTRYISLIRALLRQQGYRVPSGSAEGFVQRVGAMALPGQVRSMIAPLLAVMLPVNRQLAYSDQVIEHLAVQDPRVQRLRTVPSIGPVTAAAFVATLDDAQRFRHAHQVEAYLGLVPREFSSGDSQRRGPITKAGPGRARWLLIQAAVSILRRRPPEAEALWTWALRIAARRGKHVAVVALARRLAGILYALLRDGSVFQLRRAVGVPEAAVEAMNRHATRAR

SEQ ID NO: 235006 - protein, 364 aa, unidentified
MNLTPVGIDIAKSVFQLHYVDAETGEIVNRPIKRARFLEHFANRAPCLIGMEACGGAQHWARELTKMGHQVKLMPAEFAKAFNIRNKNDAADARAVWLAVQQPSKAVAIKTEAQQAVLALHRMRQQLVKFRTMQINSLRGLLTEYGEVMGRGRAALDKAIPAVLARISDRLPMVLIDTLREQWDGLTKLDEQIAVIERRLRQWMLEDKAVKTIIEIPGVGVLTATAAVATMGDAKSFRSGREFAAWIGLVPKQTGSGGKVTLLGISKRGRFIGRFNIETFIVAPNVAPAPIVFNNAFPDVGQNPATFPVHQYHLGLWFNDPRDAAKAGCPGTVTPFNGEHNAGIQVLNTSNFPELQGPLFNLKP

SEQ ID NO: 235007 - protein, 449 aa, unidentified
MTRSTTKQPGLPVVHERAAGIDIGSRFHVVAVPPDCAEEPVQTYQAFTGDLQRMADWLVRTGVKTVAMESTGVYWVPVFEILEERGLEVILANAREARAVPGRKSDVNDAQWLQRLHACGLLRASFRPARDIAALRVYLRQRERLLDFTAAHIQHMQKALTLMNLQLHHVVSDVTGVTGMKIVPAIVGGQRDPQVLVNMRDVRCKASLETICAALVGNYQPEHVFTLAQALALYDFYQERIEACDRQIEHALAILNVDKVCPEAPMPKAKHRTKQPNDVSFDVRSVLYQLTGRDLTQIHGLGPYLALRLIAECGTDLSKWRSAKHFTSWLTLSPGCKISGGKVLSAHTKKTTNRLTAHLRLAAVTVGRTHTALGAFYRRLAARIGKAKAVTATARKIAVLFYNAMRFGMAYQDPGADHYEKQYRDRVVKNLHRRAAEFGYTLAQAEGVS

SEQ ID NO: 235008 - protein, 402 aa, unidentified
MTYDYVIGMDACKYFHHACVLDIDGTQVLSKRINQNEQSLRALFSAFSAYDHKVLVVVDQPNNIGRLTVAVAQDIGIDVRYLPSLAMRQLSRIHAGNAKTDIRDAYIIAHAAKNLPESLRSVDRVEEAFLQLKVLNGIDEDLARSYTRLINQIRSALVGCYPQFEQALRGQIIHRKWVLHLLARYGGPTKIKRLGKAKAAAFARRYKARNPEPVLDAIFAAISEQTVTIAGAHYAEMGVAMSAKDALLKLEHRQQIEKEVIELINDIPHTQFLLSMPGIGPKTAAQILMTAGDMSDFPSAGHLASYAGLSPRTNQSGTSIMSNSLNRAGNKKLKNALWQSSFASIRFHERSRQFYERKRREGKRHNAAVVALARRRLNVLYAMMRNHEHYHDPAPSQEDLAA

SEQ ID NO: 235009 - protein, 339 aa, unidentified
MTDVSTIGLDLAKKVFQVHGVDASGTVLIRRALRRDRVLGFFAKLPRCLVGMEACATAHHWARELRELGHDVRLIPPAYAKAYVRRNKNDPADAAAICEAVSRPSMRFVEIKTGQQQADTGLHKVREVLMKQRTMLMNHMRGLMAEFGIVVAEGPAHIAELVAILADPGDHRIPAPLLDGLLAIATLLRSIEQKLETIDKQIVVASRSNATCRHLITAPGFGPIVSSAMAAFVVNPAAFRSGGDFAASLGLVPRQDGTGGKVKLGPISKRGNGYLRRLLVNGAMSVLNSKLARHDPWLVKLLASKPRKVVAVALANKMARIAWALMIRQEDFRAVPAAA

SEQ ID NO: 235010 - protein, 344 aa, unidentified
MGNITRVGVDIAKSIFHVHAVDRFNETQWKGKYARTKWLAAICKKVPLGAEIAMEACGSANYWGRELERLGYKVKIIHARFVKPYVKSNKNDAVDAEAICEAMSRPNMRFVALKTVRQQDVQSAHRIRENLMKQRTAKANQIRGLTTEYGVVAPVGIEKLRQAIPCWLEDAENGLSVMFRELLDGLAVDLRFLDKRIAKIDDAIKRDVQEDPVAQRLLELRGIGVLCASALSSAIGDGKAYRKGKDFAASLGLTPRQHSTGGKQKLLGISKRGDGYLRKLLVHGARSVIRHAKNKDDHLSNWVNKLTTIKHVNIATVALANKTARVAWALVNNKENYRPELVAA

SEQ ID NO: 235011 - protein, 367 aa, unidentified
MFHSDYTVGCDAHKHFSLFAVLDGGGNLVQRTRVGHVPGAIVAFLAQFPQGTPVALETVGNWYWIVDEIEQAGCIPLLAHAAKAKVMMGNIHKTDKLDAQGLATLLYLGKLPSVWIPPADIRDERELPRTRMTFAKHRTMLKNRIRSTLAKYALSLDTDSDIFAPKWRPELEAALQRLPPETECCLRQHLQLLDALNHHIRELEVRILQRIQTSPSLQLVQSVPGPAKVLAIVIDRELGSIDRFPSPHHFASYCGLVPRLTASAGRAHYGHMVKQCNTYLKWAFIEAANVIVAHRQAAKWRPKYVVQLYERTRRRKGHSVSVGALARYLAESTYWVLKKGEPYREPPHWALAGSKSPVSLSREQARA

SEQ ID NO: 235012 - protein, 369 aa, unidentified
MNKFSKYVGLDVHQETVAVAVADTAGEVRYLGEIVNTPEAIAKLVGQLKRGTGRLAFCYEAGPCGYTICRQLLELKQDCQVVAPSLIPKKPGERVKTDRRDALSLARLHRAGELSPVWIPDEAQEALRDLTRAREDMKHLQRQAKQRLLSFLSRHGYRYAGRSRWTQPHWRWLEGIKFARPEQQIVLQEYIDTVQACGRHVVSLDHEVETAAQASPVWPVIEALMALRGISLLSAVTVVAELGDLARFAGPPQLMAFLGLVPSEHSSGKRERRGGITKTGNSHVRRVLIEAAWSYRHAARKTAILQRRAERTPPEVQEIAWSAQKRLCLRFRNLMARGKLKNQVCTAIARELVGFIWAIGQHVVPLNHA

SEQ ID NO: 235013 - protein, 414 aa, unidentified
MNEVIRLCQNIVRTVVKMYYLGIDIGKKTHVASLIDEKGKVLVRAVKFENSASGVEKILGRISAISQNTEEIAVSMEATGHYWLAVYASLTDKNFSVSVFNPYQIKSFRGAYTNRNQKNDATDSVLIAQYLRVFGSADTVLPQDDLLSLKQLTRFRTHMVEQISALKNTAIGLLDKIFPEYHKAFSDVFGVTSKQILLNCPTPEDIIKINSKKLLNIISKNSKGKLGKPTADNLKSLAKSSFGVKLTVDACSFEIKQIVNQIIFIESQIDELNAKIKQIYDSLDSHLKSVPGIGSTLAPVILAEIGDIANFEKPSKLLAFAGIDPSENQSGEKKSTNEKTSKRGSPYLRHAIYTAALVAMSNDETLRAYYDKKIAEGKHHFVAMAGISRKLITIIFHVLKQKRDYIPFSLKSAK

SEQ ID NO: 235014 - protein, 438 aa, unidentified
MSASTGIDGRRGKARNGSEVECMMDRIKWFAGVDWGSEKHRACLLDASGKIVDERDFTHDGAGLASLCDWLLKKTGAQPREIGVAIETPRGPVVETLLERGFQVHSINPKQLDRFRDRFTVAGAKDDSRDAHALADALRTDRHALRQLSVDDPVVIELREWSRIGEDLEQERNRLTNRMREQLWRYYPQALELTDDLGANWFLDLWSLVPTPATAAKTKEGKLQALLKSHRIRRLDASEVRQLLTQKPVTVAPGTVEAATAHIRALVARIRLVNEQLKEVNRSLDQLCDKLAPSGEDRPGQSCEQRDVMILRSCPGIGRIVLATLLAEAWQPLRRRDYHALRTLCGVAPVTRRSGKKCTVVRRLACNGRLANAVYHWGRVAIQHDPRSREQYAASRARGHSHGRALRGVADRLLGVLCTLLRKQELFDIGHKALLAAA

SEQ ID NO: 235015 - protein, 341 aa, unidentified
MEEYIGLDVSMKETAVSIRRDGKRVWRGTCASDPKLIANLIQKRAPSAKRVVFETGPLSVWFYHALRAEGLPAICIDARHAKAALDMAANKTDANDADGLAHLAEVGFFREVRVKGFDSMLTRTLVAARSRLVKITTGLSNQIRGLMKTFGLLVPAGKGSTFEKNVRSLLVDQEGLAPIVLPMLEAWRSLRLRAAELGRQLIASSRQNQACRILMSIPGVGAITATSFATAIEDPDNFKKSRAVGAWLGLTTRRYQSGEVDYDGHISRRGDRHLRGLLYEAAAVILTRSSADSGLRSWGLKLKERVGFKRAAVAVARKLAVTMHAMLKTGTFFDRTLGAAA

SEQ ID NO: 235016 - protein, 439 aa, unidentified
MTTPSLPVLDPSAAAIDIGSEQLHVSVAGGPPKVFGTMTGQLHEMRDWLKAQGARSVAMEATGIYWLCPYEVLEQGGFEVVVVNGKYVKNLPGRKTDMKDCQWQATLHAHGLLKPGFVPPAHIRRLQDYIRVRSDHITMAATHEQHMQKALDRMNVKIHEVISDLTGATGLSLIRGILDGMRKPAALLALCDRQVLEKKAERMLAALEGNWKEEHLFALRQAYELWKFYQDKISECDGEIEKVLKEMAGPEDLAKPAPPTIKRGGVNRPGIVGLHSLLWRLCGNKDLTVLPGVADYVLLQLLAEVGTDLGKNWKTEKHFTAWLGLAPGSRQSGKRRGNQKRGRNRAGRLFCIIARSVGRSVDKALGGFYRRLKGRRGGLVANLALARKLAELFWRLMVHGVTYVEQGLKKYEQKVAQTEQGLLQKLARKYNMVLQPKAA

SEQ ID NO: 235017 - protein, 356 aa, unidentified
MTTYYIGADVHCNNLEIAIMNRKKIIQRYSVPTNITAASQVLDSYTGKKYMVIEEGPMAGWLYRNLRGKVDRFIVSDPRRNKLISSDGDHDDKIDSGKLAMLLEGGYLREVYHSDNEYQVELKHWVILYNDRVRDAVRNINKIRSRCRMHGIAIPRKVLREPKHRAEWLKSLKNTALASQLLMLWIGYDATAKQSRMAKQHMIQLSTKYPVIKLWKKLPGIGTIRAATIFAYLDTPWRFKKKNKLWKYCGIGLQRTASGKDRKGRPKPAILEMPLASNRVLKNAIMGAALTAINQKQNAFKTDYERMVRDGVVPSNARHTVARKLLTVMWGMWKTSCQDGPAKVSLPKLNEQCIYV

SEQ ID NO: 235018 - protein, 400 aa, unidentified
MNTRQARIWVGIDAGKGHHWAVAVDTDGETLFSTKVINDESQILTLIETARDRADEVRWAVDISGRASTLLLALLIAHGQQVVYVPGRTVNRMTGAYRGEGKTDAKDARVIADQARMRRDFAPLNTPPELVSTLQVLTNYRADLVADRVRLINRLRDLLVGICPALERAFDYSAAKGPVVMLAEYQTPAALRRIGVKRLTTWLERRKVRGADTVAARAVEAAQSQQIALPGEKRAANLVRDLAHQLLALDERIKDNDREIRETFRTDERAEIIESMPGMGPVLGAEFIAIVGDLSGYRDAGRLASHAGLAPVARDSGRRTGNYHRPKRYNRRLRHIFYMAAQTAMMRPGPSRDYYLKKRAEGLLHTQALLALARRRVDVLWAMLRDKRLFTSVTPVTQAA

SEQ ID NO: 235019 - protein, 342 aa, unidentified
MITVTAIGLDIAKSVFQVHGVDAAGQVVLRQRLARGRVLAFFEKLAPCLVGIEACGSSHYWARELTARGHEVRLMPAQYVKPYVKRSKNDAADAEAICEAVTRPTMRFVPVKTPEQQSVMMLHRVRLMLNRQRTQLSNSMRAHLSEFGIVAPIGRRGLDQLLAVVADAEDTRVPADARLCLQMLAAQLAVVKEQILENDRRVRTSARTELGRRLMQVPGVGPLLASAFIATVADPAAFKTGRDLAAWIGLVPKQNSSGGKERLGSITKAGNRYLRQMLVVGAMAVIRYAERHGTRRPWLVQLMQRRSTKVAAVALANKTARIIWALMTSGERYREPTAAMAA

SEQ ID NO: 235020 - protein, 415 aa, unidentified
MAKVMEALFRCCAGLDVHSKTVAACVRRMDDMGKIHVEIRTFGTMTRDLLALSDWLIAEGVSHVAMESTGVFWKPVFNILEEHFKILLVNARHVKNVPGRKTDVKDCEWIAQLLQCGLLRGSFIPPRTQRELRDLTRMRTRLTQQMASVANRIHKVLEDTNIKLGVVATDVLGVSGRKMITALIEGETDPGKMADMARGRLREKIPLLQQALLGKVTEHHQFLLKALMDQLIYLESQIERFSQRIDEASRPFEKAITALIPIPGFDRVSAQNVIAEIGPDMKPFPTAAHLCSWAKVCPGNNESAGKRKSGATGHGNRWLETILVQISWAASHKKGSYPQAQYRRLAGKRGKKRAIVAVAHSLLTIAYCILKYETEYKDLGADHFDRISRDRIRRYHIKRLESLGYSVELTQQEAA

SEQ ID NO: 235021 - protein, 323 aa, unidentified
MDPVMTMFLGLDVAKAKVDCALLLNGKVKSKVVPNNQEGFETLKQWLTKQGATHVHACCEATGTYSDAIALYLHDQGHTVSVVNPAQIAAYAQSQLVRAKTDALDAKLIARYCERERPMTWSPPPAAERLLLALLRDLQDLQSMHQAESNRLDTAHPDVRERIERHLEFLGREIEQLHKKIERHINDNDQLRGRRDLLDSVPGLGEHTIPWLIAYLGDGQRFPGSKCAVAFCGLSPKPHQSGSSVRGKAHISKTGHADLRHALYMPAVVAYSRCKAFASFVQRLKAAGKPPKVIIVALMRKLVAIAQAILKSGKPFDPSLHCT

SEQ ID NO: 235022 - protein, 392 aa, unidentified
MYIIGIDIGKNHHEASIVSPEGKQIGHSLRFATTHKGVDSLMSFIFNNIGNSSCIFGMEATGHYWYPIYSFLKVRGYTIYVINPIQSDSLRKMYIRQTKNDSIDSFLIAEVIRFGQFTTTSMADKNILAMRQLCRYRDSVISSRTEIKLRISTIMEQIFPEYEKQFSSLWLSTSMGILEKYLTPENIENAPIDELFEIIKDKSHNKLTMKKAISIREAAADTFGIKIAQDAFSFQLKQLIDRMNFLDKQIEALDCQILEYYEKFDCYLYTIPGIGMIAAATIIAEIGDINRFKSSSALVAFAGIDPTVRQSGEFSNTHNHMSKRGSPYLRHAIFLAATTCSFHNSPLNAYYKKKRDQGKHHLTATGAVARKLTTVIYAVLRDSKPYEPKKFC

SEQ ID NO: 235023 - protein, 485 aa, unidentified
MSYRNVGIDLSVTAKHEAQVRDEQGNKIVSNFSFYLSKDRLDALSQEALKGACQGTKLRFICEPTEMSWFPLAIYAKNNNHEIVRVKSHKTHDLRKYFTRHKKNDKLDANVLTVMPMIDSKAIEEIYLPDAQIFALEKRNRQKERISDQIAAIKNRLSSLYHWVMPGLLDCFKSHFDSRAREFYRHFSNPFTAKDAGVCGIRKVLQPAGRQKMKNDLPEKLYSVACSACELYTRASNHVDFTEIQDEVHIELQLLEAQEKALAHVKDRVKSLYEKVHPSKNIESLKGISKNLGPSLIGIIGDPNRFSSQSKLRCFSGMIPKQDDSGETNKKGLSMTQEGPSRLRRDLFLAGDVARRWDPQLAKIYYEEMVNKGHCHTQAVCAVGTHLLNRVLCVLKENRPYELRDPKGNPISPREAKQMIKQQFTVPEEIRQRTRSKRSRKNRKNKREERIRNLFKRQHNAPQNSYNIPPRDMLQNFEKFFKSTS

SEQ ID NO: 235024 - protein, 405 aa, unidentified
MKQGKRRGPGPSHLLLTPDHAGNVVGVDPHKRTLTATVIDPRGGILAAEHFRVSGEGHRALEAWALQFGAVARWGIEGSASWGRHTAIFLVDRGHDVRDVCANRTPRHDRARQRGKSDVLDSERIAREVLAHPLLPKAFKRAGQDQGPDEQHQLLAIWHNRRRSILTSRQHMVNEAEQLLCELPLELRDELPSSKAVRPRLAALERRNRRRRYDAPTTLRLQMLDEYRQQIGALDRDEKQVVAELKTLVQATGSTLGKLCGLNTRSVAELLVETGDPRRFTEGGFGRFNGSAPLVASTGEGPGDPVRHRYNPGGNRRINAILHRMAVTQLRCEPRAQAIYANARAKPHTKKEARRILKRHLSDVIHRCMIRDIAHSSTAPSLPYDRARPPAQSRVARQGRAKRAA

SEQ ID NO: 235025 - protein, 481 aa, unidentified
MAKREQSTFERLKGKDLNRKERRELQRRLFSDDPGLEILHPDAAGIDIGNESHFVSVPPGLDPEPVREFGSWTADLERMAEWLKSCGVKTVAMQSTGVYWIAAYDVLEKHGLEVFLVNARDTRNLPGRKTDVQESQWLRKLHTYGLLRNSFRPPEEIRAVRTTWRVRDRLVQDASRHVQHMQKALTTMNVQLANVVSDITGLTGQAIIRTILQGERDIYVLADLRDARVKASREEIARSLEGNWREDVLFELKQAVDAYDFVQKQMGECDKQLEKYMAALPSRNLPGADAEDTGDGGKNKQKSKKPKGNAPKFDLKAELNRVNGVDLTTIDGIDVMTAETILSEIGTDMSRFKTEGHFVSWAGLTPSQDVSGGKVIRQRSRRVNNRVGNALRLAARSLFRSESYLGAKFRKLRARRGAPKAIKGMARYMGCLVYRILTHGQAWVDRGTKHFEEKNRQREIADLQRKATALGLHLLPVTANA

SEQ ID NO: 235026 - protein, 313 aa, unidentified
MMALQDVFVGIDVSKGRLDVHVRPLGVGFSVSNEAAGYAALIARLRPLRVKRIVLEATGGYERALWLALSEAGLVAAIVNPRQVREFARAAGRLAKTDRLDAAVIAHFAETFAPRIGKPDPVADRLGEHVLYRRSLQDEIVALEHQRRRLETPALRERAERRHAALRAEVKEIEAAMRTIVDSDPAKKALFACLTALKGVGLVLACTLIANMRELGSLTRHQAAALIGVAPLNHDSGARRGYRAIAGGRRRVRNVLYVATLSAVRCNGPIREFYRRLSAGGKPAKVALVACMRKMVVMLNGRVRDQLAATATP

SEQ ID NO: 235027 - protein, 362 aa, unidentified
MKEYIGVDLGKHKAVVVKKDRLGKVTGKVTLAVTEAALENYFSKQDRRSKVVVEATGNWMYLYETIEKYVPEVVLAHPLKTRAIAEARIKTDTIDATTLAELLRLDGIAKAYIPPREVRDARELLRYRASVVSMRMGLKNKVHAVLTKNGMECGFSNVLGKRSRQWLKTLSVRDCYRRELDGYIRLAELSTGLIQEITTKIKEVVSVTPQAQLLMTVPGISYYSALLILSEIGQIDRFPSAKHLCSYAGLVPSVYSSGSKSFHGRITKQGSRWLRWICVEISIHAANGDAAFQSLYRRICRRRGLATAKVAVARKILTVIYAMLKNNEPFRRRRPRHQILAKAWSKKNKESSGHPPGVMIQA

SEQ ID NO: 235028 - protein, 409 aa, unidentified
MDVIVERQGALDVHKEQVTACVRVPDEGGERISHVAEFKTTVRGLLVLRDWLKAHRVTQVTMEATGVYWKPVWHVLEDEFELVLVNARHVKQVPGRKTDVSDAVWLCQLAEAGLLRASFVPPKPIRALRQLTRYRKAQVSERQREANRLHKALEDTGIKLDCVATDILGRSGRAMLDALIGGTTDPEILAELAKGRMRAKIPALREALEGRFEPLHALLIGAILAHIDFLEEQIQRISDAIEEQLAPFAPAIELLRTSPGIQRRTAENIVAEIGLDMGVFPTAGHLASWAGQCPGNDQSAGKRRSGRTRKGSKWLDAALKDAALAAIRTDGSYLQALYRRKKPQLGHGRAIGAVKHSIICACWHMLTTGEIYNDLGGDYFSRRDPERQIRRLVAQLERLGQNVTLQTAA

SEQ ID NO: 235029 - protein, 364 aa, unidentified
MSDTYYIGFDVHKKRVSYCVKTASGEIIQEDELAARREELRAWARTQPRPWRGAMEATLFSAWIYDTLKPYAQQLDMAHPARMKAIACGKKKSDRLDARTIADLLRCNLLPTCYVLSPEMRDLRRLLRYRHLVVSESVRMQNKMAGLLMETGAPFVKAKLHGKKYFTQLLETLEEVPESVKDLLRMSRGALEMFESTQKQLVKRLLTEPALQERVERLASIPAVGSITALTWALEIADPHRFPSIGDALSYCGLTTAFRSSAGKEQRGPLSKQRNAWLQSVLIEAAKLAPRWNSQLAAVHEHELKRGHRNRATLQVARKLVAYLMAVDKSGKPFQLRSLPVLEAPLPAKKKGKARRPPEVLQPA

SEQ ID NO: 235030 - protein, 400 aa, unidentified
MLSIGIDVSKGKSTVCGMKPGGEIVYTPFEVQHTREGMSELVSLLRGSGEEVRVVLESTGSYHCPVVAALLENGIFVSVVNSLRMKRFCSQSIRRVKTDQIDAMQIALYGLAYWQELQPTRLPENTYRELQLLARQYYQMTSLLIKAKVDFNALCDQVLPGMQELMSDHAGRHKLSDFVLRYHHTAYILKMGETRFRKDYCKWAEKKGYRNHERMAALIFATAQNGIPVLPDAPSTQIVITEAIRVLHTVEASRDAILTQMQALAKTLPEYSLVREMPCIGDTLAPRLIAEIGDVRRFHSKRALIAYAGIDAPPYQSGKFRANNRHISKRGNRYLRKTGYEVMQSYVMHKPANDPIFTFIEKKRSEGKSGKLAMVAGLNKFLRVYYGKVTELYRSLPAIE

SEQ ID NO: 235031 - protein, 411 aa, unidentified
MDFQDYLFVGVDTHKEEHTASAVNFFHQELKSITISNNPANFDEFIAELEDASPNGETLVFGLEDTQGLGRNLAQWLVRKGFLVKEVNPAITRRERKHSPDPDKSDDIDAKAIADALISDWEELPQVEEDETFEAIRTLNNQRENLVQRKIQIKNRLHKLIHQNYPEYKKFFSDSFGKTALAFWEKYTHPSELKNYGETRLHKFLKEQAKSIPNDKAKTILSLVDKDKNMREDACARNSIILMLIKELKQLRQHLESINNKLEAAVQKSEYELTTMPGMDYKLAAKFISYIRNIDRFGSGDKLARYAGLAPVERSSGSSKAHTHLKYGCRDLNSAFYMLALQQIGSYRNGKVKSDVAYSYYQKKLAEGKTRKNAIRCLQRRLVDIIYAMMRDRSVYQPPEIPDYQVLKRSG

SEQ ID NO: 235032 - protein, 352 aa, unidentified
MKYYIGCDAHKKYSVFTGISEAGEIIPARRVEHERQKFHSFLETLPTGSEIAIESVGNWYWLIDEMEKAGHKPSLVNAAKAKLMMGNMNKTDKLDARGLAILARNGTLPAVWIPPGELRDQRELPRMRLVLVSIRTKLKNRIHATFAKYGITFEEVTDIFGGKGRRLLEQALPELPPESRHSVEEQLQLIDQVAQSIKQAEKRIHGVIKENHAMQILETLPGVGPILAITIALEMGDVERFLTGEKFASYAGKTPRVISSGGKTHYGRVRPDVNRYLKWAFTEAANAIVLQQHRLGDCHVLRLYWRIHQHKGHAKAITAVGRHLAEAAYWMLKNDEPYHEPGLKMMAPAIRE

SEQ ID NO: 235033 - protein, 315 aa, unidentified
MDTPFVGIDVSKETLDVAVLPGGGRKTFRNDDLGCEQLTTWLLDVEPVIVVLEATGGFEMLAASTLSSAGLPVAVVNPRQVRNFAKALGKLAKTDAIDALVIAHFAQAVKPKNRPLPDDQALALKALVTRRRQLIEMLVAEQNRLAGAHPRVKPAIRISIDWLRTQIEEIDRTIATSITDSPLWREKEELLTSVKGVGPVVASSLICLLPELGILNRKQISALVGVCPYNRDSGAYRGTRSIRGGRADIRSILYMAALSATRHNPVIKAFYQRLKQAGKVSKVALVACMRKLLTILNALLRTNQKWNAARTLSLT

SEQ ID NO: 235034 - protein, 343 aa, unidentified
MEYYVGLDVSLKQTSICVVNQTGLIVQEGVVDSDPEAIASFVRSRAPGTVRIGIETGPTTTWLWTELKRLGLPVICIDARHAKAVLKMQINKSDRNDAAGIARIMQTGWFKEVRVKDLDSHAVKALLASRALLVKIKRDLENQVRGLLKNLGLVIGRAKFNVFAVRAEGLIENRPELVAAVRPLLEARKAIERQVEDLDRKVHKLARRDVQVRRFMTVPGVGPITALCFKATIDDPTRFKRSRSVGAYIGLTTRRHASGEIDWSGRISKCGDAMLRMYLFEAAGVLLTRVPKWSGLKAWGAKLVKRSGLRKAKVAVARKLAVILHRMWIDGTEFNWSMKKAAA

SEQ ID NO: 235035 - protein, 452 aa, unidentified
MKANKTRPTARDLAALEQINLHAAGVDIGAAEIYVAVPPGRAAESVRCFATFTADLHSCAAWLAACGIETVAMESTGVYWIPLFEILERRGFEVYLVNARHVKNVSGRKSDVLDCQWLQQLHTYGLLQPSFRPPEEICALRSLVRQRAMLIKYRASHVQHMQKALQQMNLKLTNVLTDITGQTGLQIIRAIVAGERCPAVLARMRDGRCHKSELEIAKSLEGHYQREHLFALRQALEMYDFYGQQIRACDEELEAMYQEFAEPAEPGTPPPAPRTGRRRKNHPHFDLGQAVYRLAGVDLTQIDGIDALLAQEILTTIGTDMSKWPTVKHFASWLRLAPNNKITGGQVKQCGTLPTQNRANTALRLAAQSLARSDSALGGFYRRVRAKHGAPVAVTATAHKLARIIYFMLKRREPYRDPGADYYDQQYQARVVRNLQRRAAKLGMRLEPIPVG

SEQ ID NO: 235036 - protein, 283 aa, unidentified
MDLCILNQDGAILVHRNMPAGPEPFLQAVTPSREDLVVCVACLFTWYWLADLCVREEIPFVLGHALYRKAIHGGKAKNDKIAAQKIAVLLRGGMLPQADVSPAAMRATRDRLRRRMPLMRQRAELLGPIHNTPSQYHLPEMGQKIAYKANRDGVAERLVDPAVQKSIEVDLALIDHDDRLLRDMELTLLKTAKQHDANTLSLLRTVPGIGEILRLVLRDAMPDIERFPRVQDFVSSCRRVKCAKAAAGKRYGTSGTQIGHASLTWAFSEAAVLCLRHHPAGQK

SEQ ID NO: 235037 - protein, 364 aa, unidentified
MDASCPGVTCAIMEVAELHLQEATKMDITTIGLDLAKTVFQVHGADRKGQPVLRRKMRRGQVLKFFAGMPPCLIGMEACASAHYWAREIEALGHEVRLIPPQYVKPFVKTNKNDAADAEAICEALVRPTMHFASVKSADQQSALMLHRARELLVRQRTMLINALRGHCSEFGIVVSQGAVRVNELIAIIEDTNDARLPSLAREALGALVAQLHTIKTEVADLERRLKAWHRSHETSRQLATIPGVGVITATALVATIGDGSQFKSGRQLAAWLGLVSRQHSSGGKDRLGRISKRGDGYLRRLLVHGSRAVLRWRRAKPEMHLPWIKGLLARRPTNVVLVAMANKTARVIWAMLRDQQDFDQARA

SEQ ID NO: 235038 - protein, 459 aa, unidentified
MKILALDLGKFNTMCCFFDTKTRKHSFLNATTDRNYLSTIFKKHKIDLVVMEACGPSSWINDLAIGLGLKTLVCSTNEEAWKWSNVKRKTDKDDALKLARMAAMGELTSVHMPSEEHREFRSLVKYRKTLDWRINKTKCTIRAWFVNHGIAIDRGDKAWHTGRALINSFRKPLAECSANELWKGELDIELTQLDSLSQQMDVVVKKLEAIGKNDPRIVRLRTIPGVGPRTAEILVACIDDPHRFKSGRQVSAYFGLVPRQFQSGETDRNGRITKRGNPLARTILVECAWASLRYNPWAKGVYERICGKQKTRKKKAGVALARKIAVIAWAMLRDEKDWDPVTMIETTKSFGGRLPMDEETFQTMRPKENSDQRKSRLRREAREAHSVTTCRTEKNTGKSSGVSKSPSKAKSLSKRPTKLTAKQTNKPTAAQRKTSDSKPKQSTTKTATTRRARKPVCAA

SEQ ID NO: 235039 - protein, 405 aa, unidentified
MFYGGIDIAKHQHEICVLDREGKFVLQMHFKNNQKGLEKLVKALDTLEVEVDDICFCLEATGHYWLALFSQLEQLGYQLHVINPIQSDALRNLYVRKTKTDAKDALLLADMMRLGYTTETKLAQETTLKLQTLSRSRLDFVQQVGSLKNQVLGVLDRIFPEYASCFSNVFIQTSKELLKRYPEPEELAEVDLSELSKFLNEHSRGRLGQERAEQIQTLAKGTFGIRLAMDAFTLQLRLLLEQIEFIEDQISIIEEAIDQVMEELRPKDADYRHVLETIPGIGPTLAAAIIGEIGDINRFPNAKALVAYAGLDASVKSSGQFEGTKNRMSKRGSPVLRYSLWMAAVSARRFNPELKEFYELKRSQGKHSNVATGAVARRLTHLIYSLWKNNRPFEPDYQWSPPGRT

SEQ ID NO: 235040 - protein, 402 aa, unidentified
MNCVGIDVSKGKSMIAVMRPFGEVVVSPFEVLHTDSELSELARLLKSLDGETRVVMEATGNYHAPVAWLLHDAGLYVSVVNAMLVHDYGNNSLRRAKTDKKDAVKLANYGLDHWLTLPRYVPDEDTRLMLKTCYRQYQQYSKVQTMLKNNLISLLDTTFPDANRLFASPPRADGSEKWVDFVDAFWHCECVCGLSEKTFITRYQKWCRKHGYNFNENKALDIYASACGHFGVIPKTDTAKLLVEQAISQLRATSAALAALKQEMQSLAASLPEYPVVMGMFGVGPSLGPQLMAEIGDVRRFHSKKALVAFAGIDAPPYQSGQMDVRSRSISKRGSASLRRTLFLVMSVILQRAPMDEPVYQFMSKKHSEGKPYRVYMMASANKFLRIYYASVKAYLDSMEYD

SEQ ID NO: 235041 - protein, 349 aa, unidentified
MEFYAGLDVSLETTSVCVVDREGKVIREGKLASDPDAIETFLAEWGIHLKRIGLEAFSFSGWLFTGLEEKGLPVVCIETRHAKAAMNAMLNKTDKNDARGIAQMMRTGWFRAVHVKSGEAQTLRALLVGRKAMLGKVIDMENMIRGLLRPFGLKVGQISTGQFDARIRELVAGMAKLEAIIAPLLDARYEMRLQLAKLHRLAVVAAREDKAVRRMMTVPGVGAVVALTFRATVDDPTRFKKSANVGAHFGLTPRRYQSGETDYTGRISKCGDEMTRTMLYEAAIAILTRIPKNFKLRLWGLRLMKKRGLKRAATAVARKLAVLLHKVWVDGTVFRYGAGMKRGRIAAAS

SEQ ID NO: 235042 - protein, 405 aa, unidentified
MLFLGDDWAEDHHDVELMDSAGCRLGKARLPEGAAGIARLHAMIGAQLGDGEATEVAVGIETDRGPWVAALIAAGYTVDAVNPLQAARYRERSSVSGAKSDAADAHILADMVRTDAHQLRPVASDSPKSEAVKVVARAHKTLIWERTRHTQRLRHALREYFPAALEAFEDLDAADTLELLGKAPDPRSAAKLTLGQIRAALKRARRRDIDAKATRIQSVLRGEQLGRAAVITTAYAATTRSAVAVLAALDEQVKILEKRVEESFGQHPDAEILLSQPGIGPVLGARVLAEFGDAPGRYASAKRRKNYAATSPITRASGKRKVVLARFVHNDRLIDALMSQALSSLQASPGARAYYDQLRAREVGHNPALRQLANRLVGILHGCLKTRTLYNEATAWSHRTEKAAA

SEQ ID NO: 235043 - protein, 312 aa, unidentified
MEKLSYGGIDVSRDRLDVVVLPEGWFFSVSNDTAGWTELVARLRPLAVCAIGLEPSGGYERGIIRALLAAGLSVRRINPNKLRQFARARGVLAKNDRLDARLIAEYVAIMPTRVVQRDGAVERLAEVVTMRRQLCDEHVAVENQAAHLQDAMLRRLSKRRLVRLEADIRLLDKRLAEMVATNAAFAQPYELLTSMPGVGPVLAFTLIALLPELGKMSRKQIAALVGLAPYDFDSGKLRGHRSIYGGRMPIRNVLYMAALSASRYNPALKTFSNRLAHANKKSKVIIVAVMRKMITTLNAMLRDNAAWQPRSA

SEQ ID NO: 235044 - protein, 382 aa, unidentified
MQASRKSTPTAGDCGTIFVAIELSQKTWLITVHSPDRDQFSRHRLEGGDHAGLLALIEKVRARAIQQLGSTPRVVSCYEAGYDGFWLHRLLEAAGISSLVFDAASIAVEQRSRRAKTDRIDGELLLRTLMAHLRGEPRVVRIVRVPSVEEEDARRASRERDRLITEQTAHTNRIKSLLRLLGMAVGNPRRRDWLAWLKRQRDWQGRPLPPHLLAEAQREHARLMLVREQLAALEQVQAAQASAVPAPMAERRDLLQRLKALGPAFTATLVNELFYKDFRNRREVASYCGLAPSPWQSGGIDREQGISKAGNRRARHKAIELAWLWLRHQPNSALSHWFRTRTANAGRRAKRIAIVALARKLIVALWRYLTAGLVPEGATMKA

SEQ ID NO: 235045 - protein, 426 aa, unidentified
MNNYQKLEAITVDTLIVGVDIAKNVQWARFTDYRGLEIGKALKFNNNKEGFNSILAGIEAICKFKKLDKVIVGMEPTGHYWKPLANYLILSGITVVMINPFHTKRAKELDDNSPTKNDKKDALTIARLIRDGRYYEVYMPQDVYAELRGLLNTRVSLMKRHNALKNTIIAVMDEYFPEMVTVFKHPFKGKASMQILKSCPFPSLILELGIEGVLVEIKKAVKKTVGLKKAQQLVEAAQSSIGVNYGLRAAKLRLELMIEELELLMEQQDHIEKSMEQALTETGIKDILLRIPGVGVVTAASFLGETGDLMRFEHPRQISKLAGYNLVEDSSGKSKSGTIISKRGRKNLRSVLYHMAMTMVATNPEMKALYQYLKTRPDNPLKKKQALVVISKKIVTVIYHLVKKQIEYKAELVLGEYRKNQIKQAA

SEQ ID NO: 235046 - protein, 348 aa, unidentified
MKSDSQLPIIGMDIAKNVFQLHIVDAETGEIQRRQLKRAKVAEFFTNRQPSLVAIEACGGAHHWARTLLAMGHQVKLLPAKHVRAFVLRDKTDALDAQAIWVAAQQPHIREVPVKSEQQQACLSLHRIRQQLMKVRIMQTNALRGLLYEFGIVLPEGHKKLLQSVQAELAKAQQDNRLPDMVVLSVQEQLKRVDALQDDIDQLDKRLAAMVKKSQQMLAVLAIPGVGPLTASALVSTTSDLSTFKSGRQFAAWLGLTPRQVGTGGKTQQLGISKRGDTYVRALLVNGARAVIGRSAHGSWIERLLQRRHFNVVVAALANKMARTVWAVLVKGQAFDQVKWNPTETAVA

SEQ ID NO: 235047 - protein, 370 aa, unidentified
MSQSSTLFIGMDVHKDTIAVAYVAQDHGAEVTYLGTIGTRQCDIDQLIRKMPSKAKPLIFVYEAGPCGYWLYRYLRQKDYDCWVVAPSLIPQKAGDRIKTDRRDAMQLARLARSGDLTAVYVPTVEDEAIRDLTRVREDTLSDLKAAKFRLKAFLLRHDIRYTGRANWSPAHLRWLSEVVCPTPAQQIVFQEYVRAVNEHTARLQRLAQELQDHVHAWRLHSVVEALQALRGVQFTVAVTMVAALGDLTRFDSPRELMKFLGLVPSEYSSGERRQQGSITKAGNTHARKALVEGAWAYRYPAKVSRHLQLRLEKQPKMIQDISWKAQVRLCKRYRQLVARGKHANVVTVAIARELAGFMWAIAKQVPVAA

SEQ ID NO: 235048 - protein, 415 aa, unidentified
MALKIVYKICCGIDVHKTFVVACIASTNDKGVTSYESHRFSTYTSGLKTLLQWLLKRNCKDVCMESTGKYWIPVYNILENDCSIVLAHPKYVKAIRGKKTDKKDAKWIADLFKHDLVAGSFMPPADIRQLRDLMRYRFKLTCFQSSEKNRLQNCLTVSNIQLGNVVSDTFGKSAQAILDKLLENPADTSLDLEPLIYKSLKKKLPELRDAIDGYITPEQAGKLKVIKAHYESLESRKAELEELILALATPYQQELAILQTAPGIRSDFTAIGIISEIGTNMEAFPSAKHLCSWAGLTPTNNESAGKKKSVRVSKAGCYIKPLLVQCANAVVTSKKHPEIRNRYLRLKKRRGHKKAIIAIARMLLTALYHMLKNGETYNAELYRQSDLPPVDREITVEQAIIIARNQGYKIKSATA

SEQ ID NO: 235049 - protein, 351 aa, unidentified
MPRTSSVHAVTTIGMDMGKNTLHMIGLDSRGAIVLREKVSRGRITSRLANLPSCLIGIEAGLATHYVARELAALGHDVKQVPPTYAKPFRQAHKNDFRDAYSVAEAVQRPTTRFVPAKTDEQLDLQALHRVRSRLVSERTAVINQIRGFLLERGIIVRQGLRFLRQALPDILAKRTDVLSPRMVRIVADLASDWRQLDERIEPVTDEIETLAKSDDGCRRVMTVPGIGPIISSAMVAAIGNGAAFARGRDFSAWIGLVPKQMSTGDRTILGRITKRGNGYLRTLFVQAARVILLRPASWPKHSFGVWLARAAQRLHRNVLAAALANKLARIAWTVLAQERSYEARIMKAAA

SEQ ID NO: 235050 - protein, 315 aa, unidentified
MTELSGPYVGIDVSKHNLEIALWAEGESWRCGNDSEDVAGLIKRLTELAPALIVVESTGGLERLLLSELCLAHLPVALVNPGRVRDFAKASGLLAKTDKLDARILAHFAEAIRPTVFAMPSEQEQVLSALMTRRRQLVEMLTAEKNHLSSTVSPARHWVERNLDSLQKQLDELNSEIDELIGQDPAFRAKEQILRSVPGVGPVTAAILLSDLPELGKMDRKKIAALVGVAPFNRDSGRKSRKRRTQGGRSAVRSILYMATVCAVRTNPVIKPFYHRLLERGKEKKVAMVACLRKLLTFLNAMIRDSRAWTPTSAI

SEQ ID NO: 235051 - protein, 347 aa, unidentified
MRFYTGEHEYYCGVDLHARTLYLCVLDGRGQVRLHKRLPCERARFLEAIEPYRSDLVVGSECIFCWYWLADLCAAEEIAFVLGHALYMKAVHGGKAKNDKIDSHKAATLLRGGAFPMAFVYPPEMRATRDLLRRRLYFARKRGELFSHIRLTFQQYNVDPPSTGQLRYKKHREGLAEAFEDPVVGATIEADLTLADRYDVVLRDLEGTIEAQAKVHDPDALELLRTIPGVGQILALTLLYEIHHVSRFDSVQQFSSYCRLVKSEHRSAGKRTGSGGAKIGNAHLKWAFSEAAVLFLKGNPPGQAHLKRLQRKHGKAKALSILAARLGRSVYFMLKNQEAFDMNRFFA

SEQ ID NO: 235052 - protein, 359 aa, unidentified
MRTQSNKLDFTGQNIYVGFDVHLKSWRVTIMTDHLTHKTFTQPPNSETLHQYLTKNFPGGIYHTAYEAGFCGYWIHNELKSLGVNSIVVNPADIPTTDKERDQKDDTRDSRKIARSLKNEELQAIYVPSLRTLEDRTLVRSRSMLVKDITRYKNRIKSFLYFHGIKIPDSFIKSSTNWSNNFIYWLENIVMTEKSGKESLNLLITTMKNLRISLLQITKQINELSKTESYKNDIALLRSIPGIGFITSITLLTELENINRFQNIDNLCGFIGLMPSKYSSGEKDITGDITKRGHSVLRSAIIESAWVAARLDPALLLSYNSYCKRMEPNKAIIRIARKLLSRISYVLKNKKPYVYAVVK

SEQ ID NO: 235053 - protein, 347 aa, unidentified
MLIIGCDFHTRSQHIAMLDTETGEVVERRLEHENGEARRSYESLKEPALVGMESTGYALWFAGLLAELGHQLVVGEAGKIRAMEPRKQKHDRRDAAHLLNLVVRGDFPRIWLPSVEDRDVRVLIEHRHQLVQLRTRVKNGLQAVALNYRLARRAKLWTARGRKELAALPLREGMARRRSDLLPLLAQLDNWIEELDQRLEREAEQRTAARLLMTHPGVGPLTALGTVLILGPVERFPDARHVTSYVRLIPSEESSGGRQRFGRLTKQGNHLLRFLVVEAAQTASRSDPGLKRVYRRLTFRKGKPSAKVAVARKLIIRLYIMLRDQIDYAEFCRRGSHAGMLGQVALA

SEQ ID NO: 235054 - protein, 401 aa, unidentified
MVKVRERIWVGIDVGKASHHACAVDETGKVVFSQQTPNGQAAIEALIARAAKASGEVSWALDMTSGTAGLLLALLWQTGQPVRYVPGRLVNRMAGAFAGEGKTDAKDAKTIAETARLRTDLVTVAAADPIVADLQVLTAQREDLMGDWVRGVNRLRALLASIFPSLEGAFDYSTRSSLILLTGFQTPASLRDAGRDGVQAYLTEHGGWPKGITAMADKALEAALEQTVVLPTEKVTAPLIARLAADLLDLDRRIKDLDKELTERFEEHGHAKAITSIPGFGPILGAQFLADTGGDLQRAFGTPGRLAAYAGLAPVPRDSGRVKGNMHRPKRYHRGLRRVFYLAAFSSIRADGPSKTFYQRKRSEGKVHTQALIALARRLIDVIWALIRDNREIHPTVAVAA

SEQ ID NO: 235055 - protein, 322 aa, unidentified
MAKHTTICAGIDTGKRKLDVAIEGRREQLQVKNTPEGHGALLAWLQQHRVKRIGIEASGGYEQPVVAELRRKRLVVVVFQPAQVRAYAKFHLRRAKNDKIDAALIATCTAAVQKIHAAPDPRLQPFAEQLTMIDQIGEDIARLKNRIESCRNVGINKLWQEDIARLEQREKAALKALVVSIRKHPDLARRLALINSVDGIGLPTAVAILVRLPEIGRITREQAVALAGLAPYDDDSGGQVGARHIDGGRKRLRRALYTASLAASFRWNPQLIKLYQRLTGAGKEHKRALVACARKMLIFANTVVARGTPWCGEPPMRSFSVS

SEQ ID NO: 235056 - protein, 420 aa, unidentified
MTIAKTSHSSFAAWIGLDWADQFHLLCIQPASSEPRETVRLAQTPEALDQWAQQLRQRWEGRPVAIALEQCKGAVVYALLKYDFFVLYPVNPLAFSQYRKSFKPSGAKTDATDAALLLNFLLERQAELRPLRPDNPETRSLQLLTEGRRLLVDQSTALTNQLTSQLKQCFPQALDWLKKLDSFSACNFLQQWPTLQDLQKAKPQTLAKFFQQHHRRRWGQLEEWRKQIQQAQPLTTDPVLLLSATMMIKALEGQLRPLLLALQEYDRKIKELYEQHEDHDVFQSLPGAGSALGPRLLSAFGSDRGRFQCATELQSFSGIAPVTEASGKTCHIHWRTSCPKFLRQTFHEFSTQSIHFSGWAKTYYLQQKANGAGYHAAIRALAYKWIRIIFRCWKDRKPYVEAIYLQSLRIRGSHLIEKLV

SEQ ID NO: 235057 - protein, 346 aa, unidentified
MEYFVGLDASLDTVNMCIVDQDGSVLLEQKVDAEPQQIVALLKRFGRPLKRIGLEAGPTSSWLFSELRAAGYPALCLECRHVKAGLSAMRNKTDRNDARGIAHLVRLGWFRLVHVKSEVAQEIRMLLVNRNLLLSKLQDIENSVRGSLKVFGLRLGKVTKRSFETRALELVKAHPKLAAISLPLLRVRRVLLEEFCRLDRMALKIARSDAVCRRLMTVPGVGVIVALTYRTGVDVPERFTRSRDVGAHFGLTPRRYSSGQVDYDGHISRCGDGMVRTALYQAAHVLMHHGRWSGLRGWAMRIAKRSGAKLAKVALARKLAVVLHRMWIDGTTFRWTIRESPPAAAA

SEQ ID NO: 235058 - protein, 339 aa, unidentified
MKQMTVGADIAKNVMQLHYIDAETGEIVNKPVKRAVFLEHFANRAPCLIGMEACGGSQYWARKLTAMGHEVRLMPGKFVKAFVMGNKNDAVDAKAIWLAVQHAERSVAVKTETQQAVLGLHRMREQLVKVRTMQINGLRGLLTEYGEVMGKGRAALDKAIPSVLERLVDRLPAILIDTLREQWNGLAELDKQIAGIERRLQMWMREDKACKAIAAIPGVGLLTATAAVATMGDAKTFRSGREFAAWIGLVPKQTGSGGKVQLLGISKRGDTYLRKLLIHGARAVLCLTKEPGPWAEGIRKRRPLNVAIVAQANRIARTIWAILAHDRPYEKGYVSVKPV

SEQ ID NO: 235059 - protein, 394 aa, unidentified
MRKPKRRKPLNDLSRCPTALNVNETLIAVIELSQKTWLVAGIIPGIERQPLKKLEPDENALLSLLDRWRKEAEKAGYKIKRVAVAFEAGRDGFWLARWLRARGIEAHVIHASSVAVPREHRRAKTDRLDTELLKRAFLGWLRGEREHCKMAAIPTIAEEDARRPSRERESLVGEQNRIINRMKAALARLGIRGFNPKLEKAADHLEDLRTPEGEPIPPNTLSELRRDMERRRFVMHQIRQIEAARLERLKQATRGRGGSHAMVRLLARVKSISVETADMLVHEALSRNLRDRRAVARYAGLTGSPEESGSKRREKGLARSGNIRVRRGMIQLAWRFLMFQKDSALARWYRARTDNVPGSRKKMIVALARKLLIALWQFVRDGVVPEGFVLRPAQ

SEQ ID NO: 235060 - protein, 421 aa, unidentified
MRGIRGKKVRAVKEGTLIATVDIGMTTNTGYCTTIDGRDIKPFKFENTREGFEKFWHMIVASKNKFCCTEAMVGYESTGPYAEPLAQYLMGKPVTLVQVNPLHTKRLKEVNDNSPRKTDDKDPRVIGDVLRLGHALSVVVPEGDAAYLRRLNNARERHVGERTALLNQIQQLVFLIFPEFKTVFNDVTVKTARHILKRYTTPERIGTLDKDELREEIRRRSMGKFGVKEAEALINLARTTVGIREGVAGIVLDIQHILVQLEAVNAFIDEIDTEMKKALDRIPYSSRILLIKGLGVVTVGGLIGEVGDFSKFRTQSEIMKLAGLDLFEISSGKRKGQKRISKRGRSLLRKILYNAAVGTVRKNGIMCGYYERLIARGMVRTSALIVVAKKLLRIIHAMLRDDRDYIENYESAERVVIKKAA

SEQ ID NO: 235061 - protein, 319 aa, unidentified
MGKDKVDFEQVVKRGCGIDVHKEQLVATIKGTGIKQETRTYDCFTESLESLKKWLQENRITHVAMESTGVYWKPVYNIFEDCFVILLVNARHIKNVPGHKTDKKDSAWIAKLLLSGLLKGSFIPPKPIRELRDLTRYRKKIVAQIASEKNRLHRILEDANIKLSSVISDMSGATATRIINAMIDGEENIEELLKLIHAGVKSSKERLAASLHGCLTKHHKVMLRFIKQSIVDKERLIEELDEEIHQCLKDNELEADSELLQTIPGVGKAASIGIISEIGTDMDIFPDEKHLASWAGMCPGSNESAGKKKIPERPTEINT

SEQ ID NO: 235062 - protein, 341 aa, unidentified
MAVAGGLDLHRGQLTFGYIGLGTGESCRGRISPAGRVSLRGWLRRFDGTPDVDFAVEGCTGWRYVVEELQRADIAAHLAEPAQTADRRGSKRRAKTDWADARHLRQLLAEGRIPESWIPPAHVLETRAMVRLYKDLLEERISWQQRVHATLFHQGTPVVPKLGTADGARRLAAAELSAAGRQAVGTGLRQIDRLNAEMTPLRRQLVRFSSRQPRCRALRQSCYGIGGLLSVAVWAELGDCRRFASSDDAVRFTGLDITVYASGGKRARGHIARQGSPVLRWALYEAALYASRPTSPGYAYFCRVRQRIDGQRALLSVARKLARRCHHTLRDLGEEALQPAT

SEQ ID NO: 235063 - protein, 360 aa, unidentified
MKKELYVGLDVHKEWILVAVAESGRNGAVHDLGASSNDLHAVEKLLARLRKHNGPDVRICACYEAGPCGFGIARRLHQLGVECAVVAPSLTPTRAGDRLKTDKRDARKLARLLRAGELTAIYIPEPTDEAIRDLCRARSDAVDDRRRSRHRLKGFLLRHGYRYQGKSAWSAAHERYLRELVLPHPAMKVILEEYLQAIAAAGERIERCEMGMRDLLEKWRLAPAVRALMAMKGFQTVAAMIVVSELGTLDRFTHPRQVMAYLGLVPSERSSSERRRQGAITKCGNAHARWLLVECAQHYAAPPKVSKELSRRQQNQSRQVRALSWKAQNRLHHRYRRLMARRLQRNKVIVAVARELCGFI

SEQ ID NO: 235064 - protein, 338 aa, unidentified
MSKITTIGLDLAKNVFHVVCCDVRGKRVGKKVLRRGQLLRYFVNLPPSLVGMESCASASYWARELQALGHTVKLIPPQYVKPYVRGNKNDYNDAQAIAEAVVQPQMRFATVKTVAQQDVQALHRLRERRLAERTALCNQLRGLLGEYGIVLPRGVASLRRRVPELLEAADNGLSALFRRLLAQAWRQLQEQDVHIADYTRELKRQSAQQAACQRLQTIPGYGPILASVFYSVVGDGAAYRRGREVSASVGLVPRQHSSGGREQLLGISKRGDRYLRSLLVHGARAVVRQAAGKADRLSHWINRIRAARGYNKAVVALANKLARIGWAVLAHNTTYQAA

SEQ ID NO: 235065 - protein, 367 aa, unidentified
MKKVSTVAAQRSTKISRQKLTVGLDLGDRSSWYCVLDETGQTVLEQKLSTTPKAMQEVFGAMPRSRIALETGMHSPWISRLLTELGHEVIVAHARNVRLIGESRKKDDRMDAQTLARLARIDPQLLSPVKHRSAKAQADLTVIRARAGLVRARTALVNTARGLVKSYGERLRGCNVRNMNPEKAKGLNPELQRALEPLLAALESLSERIREYNERIETLAQQSYPQTALLKQIKGVGTLIAVTYMLTLEDPHRFGKSRDVGCYLGLQPGRRNSGQSQPQMHISKEGDPYLRTLLVQGAQHILGPFGVDCDLRRWGLKLAERGGKSGKKRAIIATARKLAVLLHHLWVSGEAYEPLHNNRSRPLAIAA

SEQ ID NO: 235066 - protein, 314 aa, unidentified
MNTNTLQNINVGVDTGKTQLDIYIRPLDIYFNVTNDEKGIKQAVRTIAKYHPERIVIEATGRLEMPFILACEHANLPYVIANPLHIKKFSGALGNKAKNDRLDAALIAHYAEAIKPKLTQLKSENIRLMSDLVTRRNQLLSMQTMEKNRHQILPQSLASSIKPILTALKNQIAKVENRIEKLIETCPDYQAKNEILQSDPGIGKIAAASLISNVPELGYITNKQAASLIGVAPITRESGSFKGKRMIKGGRMQVRTVLYMAMMSAMQCNPVFKETYQRLLAAGKPKKVALIACVRKMVVILNSMLRDGCMWNGR

SEQ ID NO: 235067 - protein, 335 aa, unidentified
MDIRYFLGIDIAKATLDWAVYDGKKVVLQTSTPNSVVGIKTALRLLKTLPGWRPTDAVFCMEHTGIYNAHLLDFLHKLRFPIWLESSLQIKKAGGLQRGKTDSIDAQRIAEYAYRFRDQIRLWEPPRAVVQQLAMLSAARQRLIAVYNQLAGPLAEQQGFINPTLQKQLLRGCQASLTAIERDRKAIDKAIDQLVDGDDQLKELFGLITSIPGIGPATATEVVIATNELKAITDPRKMACHAGVAPFNYQSGSSVRGRPGVSQHARKRLKSLFHLSAMSAIRVKGDLQDYYQRKVKEGKNRMLVLNAVRNKLIHRIYAVVQRGKKYDKNYTPALA

SEQ ID NO: 235068 - protein, 348 aa, unidentified
MLIIGCDYHPGFQQIAFVDTETGEVSERRLTHREEAEQFYRTLKTRKVRIGMEASGHARWFERLLTELQFELWIGDAAEIRTKRVRKQKTDRQDAQLLLKLLMEDRFPRIWVPDAENRDLRQLLWHRHRLVQMRTRLMNQLHVVALNEGVRRKKALWRPAGRSELESLVLAPWALRRRRDLLDLFDQLTPKIQELTRALEEEVEKRPIARRLMTHPGVGVLTALAFELVIGTPERFGCGKQIASYVGLVPTEESSGDRRRLGHIRKQGNALLRFLLVEAAQVTVRSNQEWRSKFFHLAMRRGRKIAKVAMARKLAVHLYWMWRQGLDYGQWQKLGSHAGEPGNRHGVQ

SEQ ID NO: 235069 - protein, 318 aa, unidentified
MLIHYIDIAKRNFVIAVSSLSKTKTETNNPKGIAHTIEYLKKHKVALVVTESTGGLEIPAAKAIRRAGIAVIIANPRQTHQFAQSQPLTKTDAKDAKMPAFFAQMTAQKEDSQTMPYQPPTEAEEVLEALVNRRNQPADMRTAEKNRLHQVHETQVGSVKQLIAHFDRLIDELDKQIDDHTHTHFDGKAQVAEQIKGIGSITTATLMVMLPELGRLSHKRIAGLAGIAPHPRESGETKFKSRCFGGRSAVRKALYMATVAATRFEPLIRDFYQRLLSEGKPYKVAVTACMRKLLTISNARMRDYFAENDTAENGIRTA

SEQ ID NO: 235070 - protein, 410 aa, unidentified
MEVLYDRVAGLDIGKASLTVSVRTPGARRGRHQETRTFKTTTGSLRVMRDWLVEQGVTIAAMESTSTYWKPPLYCLEEVMEVWLLNAAHMKAVPGRKTDVRDAEWIAQLLEHGLLTPSFVPPPPIRRLRMMTRYRIQLHGDRTREIVRLELMLEDASIKLSTVASSLKTVSARAILAAMIDGESDPQVLAEMAKGRMRKKIPDLAQALEGHFDVHHAQLARSILDRIDRVEQAMAELDLAIEAECAPWAHQLELLQTIPGVGPKVAQVVIAETGGDMSKFPTAAHLASWAGLAPAIYESAGKRAPAGRRRGNKWLSAMLVEAAGSVARMHDKNYLAVQHARLTRRRGMSRAQIAVAHSILTTAYYMLKRDEPYRDLGPEWLAKRNEEAHTRRLVAQLEKLGHTVVIDPAA

SEQ ID NO: 235071 - protein, 355 aa, unidentified
MNDAKYIGLDVHQATISVAVLDSSGKLVMEAILETKAETILQFIRGLRGSLHVTLEEGTCAAWLHDLLKPHVAQVLVCDPRKNASMKAGNKNDRADARNLAELLYLDKLSPVYHGETGIRPLKELARSYLALTRDTTRVMNRLKALYRSWAIPCAGQRVYAPRDRSEWLAKITEAGVHRRAEIYYQQLDALRSLREQVRRDLLAEGRKHSAMKLLRQIPSIGPIRAVLLIALMQTPHRFRTKRQLWAYCGLALKTSTSGEYRIVEGRLKRAKKFVAIRGLNTNHNHDLKNIFKGAATRAAAVPGPFQEFHAGLVAKGMKPTMARLTLARKIAAITLIVWKKGVGFDAEHLKQQAA

SEQ ID NO: 235072 - protein, 348 aa, unidentified
MSKHSVAGGDVAALLHRFAQLQEKVRSRTGNQVPIVSIQEAGLDGFWIDRVLKANGIESYVVDPASIATSRRRRRAKTDKLDGEALVRALLAFKRGEPRVCAMVNAPSPEEEDRRRLCRERKVLIAERVKHVNRIKGLLFGQGISGYEPLRKNRRKQLDELHTGDGRPLPTHLKTQISRELDRLELLLEQITAVENERDTLLAAQKDSVAATLIPAGAMLCDIKGIGLEFAAVLWTEGLFRHFDNRRQVAAYAGLAPTPWQSGTIDHEQGVSKAGNPRLRATMIQLSWLWLRHQPQSALSQWFTARVQSSGGRMKKSTIVALARKLLVALWKYVTAGVVIEGAALKTA

SEQ ID NO: 235073 - protein, 337 aa, unidentified
MQDTIAVDLAKSVFQVAESPRPGRVSREWRLSRPQFERYLAQQAPVRVLFEACGSAHYWGRKSRSLGHTVRLLPPHQVARYRGTNKTDRADAKALLEADRNEEIHPVPIKSEDQQCLAALHRLRSGYKQTRTARINAIRGLLREFGLTIPLGAGRVVPFVHGLEAGAVPAPLRSALMTGAEEIQDLEWHIAGVEKQLEGLAQQMPMVEHLRTIPGIGLITATALVASVGDIRRFPSARHFASYLGLTPKEHSSGLRRRLGAISKQGDPYLRMLLIHGARVVLRWARSKERPTPLARWMLEVHRRRGPNIATVALANKIARFVWVVWRENRDFRLERA

SEQ ID NO: 235074 - protein, 366 aa, unidentified
MIVIGADTHKQTHTCAAARTGTGELVGELTAAARKPGFRELLDWGRSLDGQRSWALEDCRHVSGSFERFLIAHGERVVRVPPKLMGASRKGERAAGKSDAIDALAVARAALREGPGTLPAAHLDERALEVKLLLDHREDLVRSRSEDQQRLRWHLHDLWPELELPAGCLDRIVWLDRVARKLARAEQGARVRVARELVRAIRERTRRASELEREITALVRAQAPALLVLPGCGALTAAKLLAETAGVQRFQTDAKLARLAGAAPVPASSGNRQRHRLDRRGNRQLNCALHRMAVTQGRLHPPARDFLARKQAEGKSRMEALRTLKRHLVRAVWQALRAAETAATLDSSMVADHSPNLRPGAAVVLT

SEQ ID NO: 235075 - protein, 437 aa, unidentified
MKTLAVLDPRAAFVDVGSEHMHVSVAGDEPMVFGTVTSQLHALRDWLRSQGVKSVAMEATGVYWLPLYGVLEAGGFEVRMVNGRQTRNVPGRKTDMKDSQWGATLHMHGLLKAGFVPPADIRRLQDYMRLRADHIASAASHVQHMQKALERMNIKLHDVIASLAGVSGLAVVRAIIAGERSPEALLALCDQQIRRAKAEQVKEALRGTWEAEHLFALRQALQSWDHYQAQIAECDRQIQSVLPPHDPDQRALPRPKTPRRGGVNSPDIPMLRELLAQMCGGRDLTQLPAHTSYGVLQLVGEVGTDLSKWPSEKHFTAWTGLAPGNHDSGKRKGHAKRGRNRAGRIFCMMAQSLVRSKNIALGGFYRRMAARRGGLIATMALARKLAAWYWRVMVKGDDYVEQGLAYYDQQVLLTKQRALKRLAKELGQQLVPIAQPA

SEQ ID NO: 235076 - protein, 397 aa, unidentified
MSVVVGIDVGAYKHAAAVCRTGEREAEKKVLRYEATRSGFDELDAWLQRQGQVDRVVVESSGHYWWPLASHLRQRGVPLAVVNPLEAKYFAKSRLQRSKSDPADARTLAALGMRDQPPAREPLLGAEVREAARFCMRLVRDQANVCQRLLRLVEIGFPELKEAFEDPTCDTALAILRQAPTARSAARRRLSTLAQAIKPGGRRAVGVGRANRVQELARDTIAPAELDEQMALEVRLLIEQYDLLGRQIEAAEKRVAELLDSELSRRLQTIPGVGPAIAASLIAEIGDIWRFDDFDQLAAYAGSHPKEQSSGRHGANPETSWRMAKTGNAYLRSALYRMAVVGLQHNPIIKQHYRRKREQGKAPMNAVGHCMGKALAIVWGVWRSGQDFDPSKGGPKT

SEQ ID NO: 235077 - protein, 473 aa, unidentified
MSKGSGTTRGDRRRNERRERLRRVLPRDGAVIGIDLAEDKQAIAVIDHDVRVLARKMVRMKTFRLGPSLDWAVAQARAKGFAPVTVACEPTGPRWLQVQQLCAERGLPLVCIQPLVSHIAREQQDYTPHKTDEADCVLIARLATELHCYLPEQLDEAWAYLRHLGRRRAQLITAATASVQRIRDFLSVAWPTVTEACAQPLESVTWLAALQVVTSRCGGQPGRLAGMRPQAFTALVRGTVPGWGGQRVWGKICDRIFAALTDTEGVVVSCRRGLLRRCADELGDLQRTRTQLRAVEADMTAVLAELGLSRLADIPGLTAVGAAAILAETGDPRRYDSSSSLVKHAGLSPSDNASGAFYGEARISRRGRPGLRLTAWRAVWPLLTHNPVMAAKYQAMTQAAGTAAQAAAARADAGSRQVSAAAAAARARRAKARVACAASLLRWIYSMVVHDTSWDPAVAAGSQHALRDQPEAA

SEQ ID NO: 235078 - protein, 376 aa, unidentified
MTTIDAERTETGVAVVLGVDTHLDFHVAVAIDHLGRRLGEAKVPTTANGYEELLIWAEGFGHVRCAGIEGTSSYGAGLTRHLRAREIEVLEMERPEHRKRSSRRNVEKSDPSDAERAARAVLAGEASGVPKSGEGRVEMVRALRVARRSAIKARTQAANQLQALRVTAPERLRHRLRGLSTKELVSVAACFRLGEDPVDVASATKFALRSVARRYEALSEEISELEAPLDRLVAQVAPELVALLGIGTDNAATLLIVAGDNPKRLGSEASFANLCGVAPIEASSGKVVRHRLNRGGNREANRALYMICLARMRRDIRTQEYVARRTAQGKSKREIIRCLKRYVAREVYRVLVSCGAHSSPTGPKEEAQIGTRNSAA

SEQ ID NO: 235079 - protein, 404 aa, unidentified
MAAVMIGVDPHKGSHTAVVTGLAEEPLGELRVRACAAQAEKLLAWAAAWPERTWAVEGAGGLGRLLAQQLVAAGERVLDVQPKLACRVRLLQAGDANKNDPNDALSVAVAALRSRACRQVTADDYPAVLKVWSKRHRDLGRTRNQVACRLHAVLCDLVPGGHPKEISAAQAARILEQAAPSGAVARARAELAAEFLADLRRLDVQLRDTRKKLAAAVKASGTTLTQVFGVGPVVAGTIIGDVSDVARFPGRDHFAAYNGTAPVEVSSGNRKIYRLSLRGNRRINHAIHMAAITQIRHRHSNGRAYYEKKLAEGKTHKEALRSLKRKISDAIFARLQADARQAAAATAKGPGGHPGNDSASSAAGSHPARQLFGQATPGPGTSLRPGTTTGTPPKPVSKKTQTTT

SEQ ID NO: 235080 - protein, 414 aa, unidentified
MESSYKIAGIDVHKKMLAVVISDVAQVGEFRFERRKFATGAMELQALAKWLAEQEVREAVMESTAQYWKPVWQALEGQCRRQLAQAHSNRAPKGRKRDFADAERLVRRQVAGELILSFVPDPEQRLWRTLTRTKQQWTRDRVRLQNQLEGLLEEARIKLSSQVSDLLGLSGRRMLQALADGENDPVQIAKLAAPGLRASQKPLADARSAAATLSPLHRQIMKLFLQRLKLIETQIDALESRVAEQLRPFQDAVKRLAEVPGLGADSAQQIIAEVGPRAATFPSPDQMASWVGCCPGREESAEVSTSDSSPKGNKHMRRLLSQAANAAVKAKGSVFEILYRRLAPRRGHFKAIWAVAHRLCRIIWKLLHEGVDYEERGYRTNPHAVQKRTNRLVRELRRLGYQVQLTSSKAGAPA

SEQ ID NO: 235081 - protein, 326 aa, unidentified
MTLSHLTDNIFVGIDVGGAGLDVAWHRGDSAHYANRPDAIAALVERLRTGPEVTRIVLEPTGGYEKALVKALRQARLPVEIIHTTRFNAYRTLVGVKAKSDTSDAKLLASYAAAPDEVRGRKAGHVELPEDAIREALSELASRRDQLKHMIHAETCRLGTTRMAELRQAINAHLDGLRAEDKQVHRMMLELVRQRIDLRRDQRLLKTIKGIGEKSALSLLALVPELGRIDNKAAAALIGVAPFVRKSGTMTAPARIHGGRAPVRSTLYMAAVTASRHNPVLSPFYDRLIAKGKPPKVALIAVLRRLVVFANAVLRSGEPWKGVIAA

SEQ ID NO: 235082 - protein, 341 aa, unidentified
MKKFIRTAIDLGKTYFQVHGLESEGGQSMSRKMKRSKMREFYEQIEPCRVGMEACGSGHYWARELVAMGHEVVLIPPAYIKPYIKRGKNDAVDAAAICEAMSRPGMRLVPIKSADQQAVLMLHKTREMFVKQRTMSVNALRGHLAEFGIIVAKGIGRVDELLALAQSDTELPQIAKSTVAGLAQHLEGLDQSIEAVGDEITRAHKQNPTSRLLDEIPGIGVLIASVIASSVPDPSVFKTGRDFAAWLGLTPRQNSSGGKEKLGSITKQGNRYIRKMLVVGATSVMRVAGKRKGALADWINALQAKKPKRVAAVALANKLARICWAIMTTGEGFRVDTYVKA

SEQ ID NO: 235083 - protein, 323 aa, unidentified
MQGKSLLEARSAQPVYVGIDVCKGYLDVYLHPLTDCWRVVNDRDGIRQLKRRLAGLEVTLVVMEATATYHRLAHRSLSQSGLAVAVVNPLRSRLFAEANGTLAKTDRVDAKVLAMFGQAIGPQARPPAPEAIELLQEMVHARNAATAERTALANRLAASQAAFLRKELRGRLKSLEGHIERLETEIAARIAADPALARRYEILLSIPGVGPGVAANLLIDLAELGSLSRHAIATLAGVAPFADDSGEATGQRHIRGGRASPRRALYWAALSASRHNPDLSAFYKRLRERGKKPKLALTAVMRKLVILANTLLKENRLWVDHCA

SEQ ID NO: 235084 - protein, 392 aa, unidentified
MRFAGIDVGGERHMVAMVGEDGKVLCRSSPFSEDASGYAQLFELLGPPEGCLLALEATGHYWRNLFVALLGKGYAVAVLNPLRTRRFAEEELQRTKTDAIDALGIARFAAQKRPPAAQLPDVATEELRELSRLRDRLQEDFASRLRQLHRAVDLGFPEFTRHVHTLESQLAATILSRYPTAASFDGASVKKLARIVYDGSHKIGEELGRALIEAAAKSVGSFHSEPYRLRIKYLCEDLDVLRRRLKDLARDIERRLDNHEVGKLIMTIDGIGPLTAATLIAELGDPARFRSAGAIASYVGVAPRLRQSGKKRFSGSPTIPFGNARLRKALWMVVLNAVRCNPWLRQYYERLRAAGKPGKVAVIAAMRKLLAAVWSVATHRRAFVPRLPFQVA

SEQ ID NO: 235085 - protein, 454 aa, unidentified
MGKPRVVPDEDHEVVYERVAAVDVAKASGVVCLRAPDPARPGRFASRIWDHVPATRARITELGRELLGHGVQVVTLESTSDYWRIWYYVLESTGLAVQLVSASQAKNLKGRPKTDRLDAMWLARLTQHGMLRPSFVPPAEIRRVRDFTRARTDLVAERARCLQRLEKLLEDAMIKITSVAKDGLKAKSVVAMVQALIAGERDPRVLADLAKGPLRGKRAQLAEALDGLFDSHHGVIAQMLLGQVAFLDGQITQMEEQAIAALARVPRSWGVDADGETGPQAGTSAGSPVLAAARRLAEIPGVSEWLAVVIIAEIGLDMAVFPDPAHLVSWMGLCRSAARSGTRNGKGKPKKGNSYARAAAGQAAIGAARTATFLGERYARIARRRGGGIAQAAVARSIMIIAWHLLADPAARYHDLGADYYANRINRDKKIRNHIRGLHALGLTVTITAAGPAA

SEQ ID NO: 235086 - protein, 339 aa, unidentified
MLIIGADYHPSFQQIAFLDRETGECGERKLTHKTEAESFYRDLTGRNVRVGMEATGHARWFERLLGELNYELWIGDPAAIRAKRVRKQKNDRQDAEHLLQLLVEERFPRIWIPSPENRDLRQLLWHRHRLVQMRTRVKNRLQAIALNEGMRRRKGLWSKEGRAQFQALSLARWSQRQRHDLLELLDGLQPRIEELSAAIEQEAAQRPEVQRLMTHPGVGPITALAFVLILGVAERFACGKQVGSYLGLIPCEESSGGRQRLGHISKQGNTLLRFLLIESAHAVVRYDPQWRRRFVHLAMRRGRPIAKVAMARKLAVQLYWMWRKGWDYQQALKFGSHVG

SEQ ID NO: 235087 - protein, 340 aa, unidentified
MKQFIRIGVDLAKNSFQVHALESEDGRATTRKLSRSAMRTFFSGVEPCLVGMEACGSAHYWARELRAMGHGVRLIPPAYVKPYVKRGKNDAADAAAICEAVSRPMMRFVPIKSEEQQARLMAHKTRELLIKQRTMAVNALRGHLAEFGVIAAKGIGRVEELIEKAANAGLPEIARATLSILVGQLSALNAAIADLTRQIASALARDPLARLVAGVPGVGALLASAITASAPDPSVFKSGRDFAAWIGLTPRQDTTGGKVKLGSITKQGNRSLRRLLVVGAIALLRVAAKHKGALGDWLIALRARKRAKVAAVALANKLARIIWAIMMTGEAFRTHMFARA

SEQ ID NO: 235088 - protein, 330 aa, unidentified
MKQYQHFFGVDISKKTVDITFVSDGQTTHRQFSNDPTGMQELLQWLNELNLDLDAVLFCMEATGLYCFPLTRFLAVNAIDIWIEHASQIKRANALSRGKNDKIDSKRIAEYAVKNLDRLRLWKPMDATLEKIKHLASLRERLVETKKRLITPIQEFEEVGNTEMAKMLGKTIKASLTAVDKDLKNVEGKIVEIVNGDENLKQLYKLITSVVGIGFVTAINLLIYTNGFTVMKDARKLACYCGVAPFEYSSGTSVRGRTKVHFMANKKLKCNLHMASLSAVKLDADLKTYYERKVAEGKSKLSVLNAVKNKLLARVVAVVNKQELYVKKVV

SEQ ID NO: 235089 - protein, 333 aa, unidentified
MKDITAVGIDTAKTTFYVVGFSSTGNVMGKKKFTRPSLKKWLVKQEPLKIYMEACGGSHEWGRYLTKMGHAVKLIAPHFVSPFRQGDKNDWNDALAIGIAGAQPTMRYVAIKSVDQQTIQSLHRVRTRLQRDRVAVANQLRGLLAEFDVVLPRSIATLRKRVPEVLDSGQFVGVQAELFQGLLEELRQRDEQVKQYTKRIEQLAMADPVAVKLMALNGVGVLTASALSAEVADAGVFRNGRQLSAYLGLVPRQFSTGGKNRLGSITKRGDRYLRQLLVHGARSVIRHLGDKQDRVSCWIRQLIARRGMNKAVVALANKQARWAWAVMAQAQAV

SEQ ID NO: 235090 - protein, 357 aa, unidentified
MRFYTKQHQFYCGIDLHARTMYVCILAHHGAILLHRNMPARPETFLKAIAPYRDDMVVAVECIFTWYWLADLCAREGIPFVLGHALYMKAIHGGKAKNDKIDSHKIAVLLRGGMLPQAYVYPAAMRATRDLLRRRMHLMRKRAELLAHIQNTNSQYNLPEIGKKLAYKGNRDGVAERFLDPAVQKSVEVDLALIDHYDRLLREVELTIVQTAKQHNAQALYRLQSVPGIGKILSLVLLYEIHDITRFPRVQDFVSYCRLVKCAKESAGKRYGTSGKKIGNAYLKWAFSEAAVLFLRNNPQGQKWLARLEKKHGQGKALTILAHKLARAVYYMLTRDTVFEMDRFLNGYGSRVGEPAA

SEQ ID NO: 235091 - protein, 366 aa, unidentified
MENHSIVWVGMDTDAKKNHVALYRGWELEPAVEWEAGMDAKGIKQLIERLKKETGEVRCVYEAGPSGYPLCRKLRQAGMVCDVIAPSLTPRKPGDRVKTNRRDARNLGRLYRAGELTVIDIPNEAQEAVRDLTRAREDVREDCTRRQHRLSRFLLRHGYIYQEGDKWTQKHWAWIRKICFEDSNLKTVLEESIRAVEQSQEQLKTYDARIEENAQKPEYEKKVARYKTVRGIQTITAMTIVAEGGDLRRYATAPQFMGSTGLVPSEYSTGDRERRGRITKTGNAHLRRVLVEAAWHYRHRSIPGASVKKRRKGQPASIVTIAERADQRLCRKFRKLVDRYNKKPVIAAVAVARELAGFIWAIGQQE

SEQ ID NO: 235092 - protein, 370 aa, unidentified
MSQSSTLYIGMDVHKESIAVAYVSKDHDAEVVYLGSIGTRQYDSDQLGRKLQSKAKHLVFVYEAGPCGYWLYRYLTKTGYACWVVAPSLIPKKAGDRVKTDRRDAVQLARLMRSGDLTPVYVPTVEDEAMRDLSRAREDTIGDLKAAKFRLQAFLLRQDIRYTGRATWGPAHLRWLSEVVCPTPAQQIVCQEYVRAVTEHTARLQRLEQERHDHVHTWRLQPVVEALQALRGVQFTVAVTLVAELGDLTRFEHPRQLMKYLGLIPSEYSSGERRRQGSITKAGNTHARRALVEGAWAYRYPAKVSRHLQLRLEQLPKPIQDISWKAQVRLCKRYRRLLARGKHANQVVVAIARELAGFMWAIAKAVTVAP

SEQ ID NO: 235093 - protein, 404 aa, unidentified
MSETRDKGSFCGFLGIDISKRTFDGCCIDSEGKVLFRVSLPMNRAGFEKLVTQVCAISLPQGSILIGMESTACYHVSLFSFFMALGYSVAVINPLLISNFLKLQLRKTKTDKKDAAVIARYLSAHGACLSQTTADARIADLRELSRQRESLLHQMTALKCDIKRVLSITFPELEQTMGIFTRTTLRLLGRFPSARALAQANRDEVAPLLHHACRGRSTPVSIDTLLRLARSSVGTATPSREMILRQKASILVHLEEHLQEMTHTLIELCQAALERDVEILTSIRGIGDKTAATFLIEMGGEIQNFENHNKLITMAGLDPSVYQSGQYDGHSRITKRGNRHLRRVIWLMTIRAIQFNDLFKSYYRKRIEDGLPFKKAVLATAHKLIRIIFVLLTRRTLFCHQVTS

SEQ ID NO: 235094 - protein, 350 aa, unidentified
MNNVAGIDVSKGKSMVSVLRPFGEVVAKPFSIGHTGSELKELADYLKSLDGETRVVMEHTGRYYEPVARFLHEEGVFVSAVNPKLIKDYGNNTLRKVKTDKADARKIARYGLDNWAELRQHTPMDTIRMQLKTLNRQQSLYAKTKTMMKNNLIALLDQTYPGVNALFDSPVREDGSQKWVDFATAFWHVDCVRNMSLTAFAERYRKWCKRHGYNFSQSKAVEVHTGAQDLIAMLPKDALTKTMVRQAIDALNAVSASLERLKAEMQALAAQLPEYPVVMAMHGVGDSLGPQLMAELGDVARFTHRNAITAFAGVTLALTSPALTRLRAQGFPKAGRRSCAAPYSWLWTAY

SEQ ID NO: 235095 - protein, 344 aa, unidentified
MSIKVVGIDIAKNLFQVCVLGTNGQILSNRKVKRDKLLDTVRQLPEQTALAMESCATSHHWGRIFQELGYTVALIPAQHVKPFVGRQKNDANDARAICEAYSRPNLHFVPVKSVEQQDLKAIRSVRKRLVENRTALANQIRGLAAEYGVVFPLSIKALRSHLPLALEDAENALSPVMRNLLQTLYCDFVSLSEEIDEMTQSVTMLSQQNPKYEAIRNIPGFGPILTAALISEVGAGNQFQNGRQFSAWCGLVPKQNSTGGKSSLGSLSKNGNRELRALLIHGARAVVRCGANKADAMGVWLRGLIARRGKAKAIVALANKLGRVAWHILAKNSEYDINQAFKPV

SEQ ID NO: 235096 - protein, 394 aa, unidentified
MTATTDHYLGIDVHKRQAQVAVLDDEGEVTEEIRVAKADLDEIVQKYAGSSAAPEAGSNYFTIYHRLDEELDVTLANPAKADWLADQKQNNDRKDAKNLARYLRLGKVPESYVPPEEYRRYRALARGRKKLVDKRSDFKNEVSSLLDQNGVTYDESLWSDQGREFLRELTLDDASELLLGQWLEAIDEFTVKIKRMQRRIEEVAAEVDELDTLMSAPGIAAFSGLMIHGEIGEVGRFDRAAEVVSYAGLDPVIRESGDSRREGRISKEGNGYLRWILVQCANTAVHNAEDPYLSQFYWRLRKNRNKPHKVAIVATARKLLVALFNMLSKNEPYDHAHNARIEDDLYNQRSMTETVNSSVKRSDGFAVRAREWYREFREIVLMCLVYNIKQYVTR

SEQ ID NO: 235097 - protein, 327 aa, unidentified
MAAAVDHNGGVLGIESFPADTSGFEELVGWLAGFGPVGRVGVEGTGSWGVGLSRFLTDLGIEVVEVDRPNRQTRRRVGKSDPTDAVAAARAALSGSAAVTPKSRNGPVEQMRVLLVARRSARQQRIQTLNQLRHVVFCAPEPIRSRFKDRYKTGLVTEAAAMRPRNGSDPVTFTTNTVIRNLARRVKALNTEMADIDTALTQLVAATAPSLLELYGLGPDTAGSLLVAAGDNPDRLRSERSWAHLCGVAPIPASSGKVTRYRLNRGGDRQANAALHRIVLTRMSSHDETRRYVTRRRAEGRSTAEIMRCLKRYVARQIFKHLPATTT

SEQ ID NO: 235098 - protein, 403 aa, unidentified
MNRNAVGIDVSKGKSMAAILRPYGEIVSSPFEIKHTSGNIQSLIQQIKSIEGESRIVMEHTGHYYEPLARELSLAGLFVTAINPKLIKDFGDNSLRKVKSDKADAVKIARYTLDSWTELKQYSLMDEIRNQLKTMNRQFGFYMKHKTAMKNNLIGILDQTYPGVNTYFDCPAREDGSQKWVDFATTYWHVDCVRKLSLNAFVDHYQKWCKRRKYNFSKDKAEEIYGAAKELVPILPKDDLTKLIVKQSIEQLNTASRTVEELRTLMNDTAAKLPEYPVVMGMKGVGPSLGPQLMAEIGDVTRFTHKGAITAFAGVDPGVNESGTYEQKSVPTSKRGSSSLRKTLFQVMDCLIKTKPQDDPVYAFIDKKRAQGKPYYVYMTAGANKFLRIYYGRVKEYLMSLPE

SEQ ID NO: 235099 - protein, 458 aa, unidentified
MVDGLAWRTGEVTIDPEDIPDADHESVIDRVCAIDVAKASGKVCVRIPHPSVRGRRTSKVWDVPATCAAVSELAEQLLAERVERVTVESTSDYWRIWLYLLEAAGLGVQLVNARDVKNVPGRPKTDKLDAVWLAKLTEKGMLRPSFVPPADIRQLRDYTRLRIDLTRERSRYWQRMEKLLEDALIKVSSVASTMTAKSVRDMLEALIAAERDPQRLADYARGRMQAKRGALIEALSGRFEAHHGVLARVLLNQIDVLNAEIAALTQRINDQLAAITAVAVPPTGGDTLQAKPTATGVVAAQRLCEVTGIGELTAQVIIAEIGIDMTRFPTAAHLVSWAKLSPRTVQSGAVLHGGRTGKGNPYLKGALGEAAAVAARTDSFLGERYRRLVKRRGKLKALVAVARSILVIVWNLLADPSARYHDLGPDHYLARTDTQRRVRTHLSQLAALGYRVTIAAVA

SEQ ID NO: 235100 - protein, 339 aa, unidentified
MKTIVVGVDIAKRVFQLHWVEPETGEIVALQLKREKFLEHFANRASCIVGMEACGGSQHWARSLQKLGHEVKLMSARMVKPFVGGNKNDVADARGIWTAVQQPGIKAVAVKSEEQQAVLALHRMREQLVKFRTAQINGLRGLLGEYGEVMPQGRAGIKRDIPAALGRLANRLPAMVIDTLREQYARLGELDEQIHQIEQRLRHWQREDTATQRIAAIPGVGLLSATAAVATMGDAKAFKSGREFAAWLGLVPRQTGTGGRVRLLGISKRGDKYLRTLLIHGARAVLTHSKSPPEWLTELVKRRPKNVAVVAMANKMARTIWALTAHERAYQSGYVSRPA

SEQ ID NO: 235101 - protein, 344 aa, unidentified
MDHYAGIDVSLERSSVCVVDTTGKIVRETKVASEPEALIGWFGSLGFGLARIGLEAGPLSQWLYAAMKKAGLAVELLETRHVSDAFKAMTVKSDRNDARNIAQLMRLGWFRPVHCKSITAQEIRAMLTARKLVQSKLQDLENSLRGILRGFGLKVGKTTRTTFAGRIGELVKAHPNLQTIGEALLRVRAVLLAEFNGFEKHVRATSRLHEKARLLMSTPAVGPIVSLTFACAIDDPSRFTSSKRVGPHFGLTPKRYQSGETDYTGRISKHGDASVREALYEAAHIMLTKPIKGCSELKSWAMRIARRAGINKAKVALARKLAVVMLRMLKDNVPFNPAAKAAMA

SEQ ID NO: 235102 - protein, 338 aa, unidentified
MTSKISILAIDLAKSSFQVCAVGSDGRVLYNRALSRNRLATLLGEQPACVVAMEACATSHHWGRMAQSHGHEVRLVPAAYVKPFVKRQKNDRADAEAIAEAAMRPTMRFVAVKSAETQGRAVAFRTHQCLVRQRTQLINALRGHLAEFGLVAPKGPASLKLLENALADESSDLPDPVREMGAVYLEQIARLTDVIERLANELEDASKTDCELRRLCTIPGIGPVTAGAVAAFAPDLDTFDSGRNFAAWLGLVPRQRSTGGKARLGSVSKMGQADIRRLLIVGAMSVIRWVVRKGGSSNRWLAALVARKPRMVAAVALANKMARMIWAMSTKQENYRMA

SEQ ID NO: 235103 - protein, 499 aa, unidentified
MEWDWRASEVGARRKTKQKPAMVEPVEIPDAEHELVVDRGAAIDVAKAAGKVCVRLPGKSGRRFSRVWDVPARTGAITELAEQLVELGIQKVTVESTSDYWRIWYYLLEDAGLDVQLVNSRDVRNVPGRPKTDKLDAVWLAKLTEKGLLRPSFVPPAPIRVLRDYTRLREDLIRERTRYWQRLEKLLEDAAIKVSAVASKLDTLSTRDMVEALIGGERDSRRLADLARGRMKTKRSELITALDGRFDDHHAELARLLLGQIDALTAQIGALSARIERLIDAMDESDHPTGDRGRSGGGGPQVTGAPSTGGQATAPARRTTTAIGVDSDTATVVEPQRLTAVERLDEITGVGQCAAQTIIAEIGLDMARFPTAEHLVSWAKLCPRTIQSGPVIRGGKTGKGNPYLKGALGEAAAAAARTDTFLGERYRRLVKRRGRLKALVAVARSILVIVWQLLSDPTARFHDLGPDYHTSRVVTERKIRNHIAHLTAMGFHVTLQPAA

SEQ ID NO: 235104 - protein, 346 aa, unidentified
MLYAGLDLSRKRLDFHLLDRDGATVEVGAAPPDADGLLGLTRRLDRHREPIRAAIESMNGARFVHDRLELAGWQVEIADAQKVKGLAPLACKTDRIDAWVLAELTRRDLVPAIWLPDPMVRAERERARWRLHLVRHRSSLKQRVHAVLLTHGKPCPVSDLFGVRGRQLLARLGLPEPWQATIEASMRLIDELEREISDCERELRRLGADHRYVPLLLTVPGIGWVLAYTIAAEIGDIERFASPRKLAGYTGLCPRVYQSGERDLRGPLAKQDPKYLRWALVEAATHACTAPVYRERYQQTKTRIGKQRGAKVAQIDLARRLSEAIWHMLTREQPFAPKGATDPLAA

SEQ ID NO: 235105 - protein, 351 aa, unidentified
MSIATIGLDTAKHVFQVHGVDEEGRAKVKRKLRRAEVVGFFEAQPACTVVLEACGAAHHWGRVLSALGHDVKLIAPEAVRPFVKKGKKNDAADAAAICEAARRPGVKFVPVKSLEQQATLALHAARTLLVKQQTMLTNALRGLAAEFGLTVPQGLGKLEALMEMAEAQASLPEAARQALRALHGRFCALEGETATLERAIVAHARQDETARRLATIPGVGPITASLIAATVADIGLFRSARHFAAWLGLVPRQHSTGGKTRLGRITKAGNGAIRTSLVLGATSMVFRAERWNSAAGAWLRGMLGRRPTRLATVALANKMARVAWALMTRKEDYRPHGRVVAILAPTAAVTR

SEQ ID NO: 235106 - protein, 419 aa, unidentified
MFPRVDSACGIDVHRSKLTATIIDASGSYETKNYSTQLPDLIRLRDWIVENNCSRVLMEATGVYWVPVYTILEHAVPTFVANPYFIKYVPSSKTDTKDAVWIAEICLDGHFKASYIPEERVRDYRDLCRSYKNLVKERTRYRNRIHTILSRAGIRITPVISDLFGKSGLIILDGLVKRKTFDEIFAQLSHPGIVKKREKIEAAICGELTENDIFAIQSAHRMLQQIEKEIDIHLSRMVDLFENDSEQINILLSVPGIQLQSASMILAEIGEINRFPSAKQIVRYAGLDPRVSESAGKTRMGSISKQGNKHLRTYLVECASALSRSKDNMFRQFYERIKRKKGHKQAVVAVARKLLTIIYHLLTNNEMYEDPLMTKPKQIKIPKLKTRQPINLANASQMLKSVMARIAVKTKTIDVYPHT

SEQ ID NO: 235107 - protein, 358 aa, unidentified
MSIVAHLYSFFIGVDTHARNHVYSIVTNTGILVETRSFPTTSAGIKRALTWAGRRTSGDLDILWVVEGAASYGAVLTGHIAAAGYPVVEAGRMDAKARHGVGKSDELDSRRIAASVLPLDADQLRWPRHGEGVRQALRVLLAARDAMSTERTRAINSLTALVRTIDLGIDARKSLTSDQVDEIAKWRTRNEDVDLSTAREEAIRLAKRVLALNDDLQTNHDRLTELVEASPAAPLLDEPGIGPFSAAVCFTAWSHPGRVRNEAAFAALAGVNPIPASSGNTRRHRLNRGGDRQLNRALHTVIMNRMVHDERTRNYVARHYGEEPTKKSKREIKRNLKRYLARRVYKILNALDTVPRPA

SEQ ID NO: 235108 - protein, 388 aa, unidentified
MAARPGGERMTLTNDRAGIKRLVGRLGELKPRLVVVEATGGLQRQVVAALWTAGIAVAAVNPSWVRNFAKGRGLRAKTDRKDAELLALYAERERPQVRPPADAETQALQELVMRREQLVEMLVAEEHRLTHALGPVRKELRHHISYLEGRLKQIAEDIDKTVRRSAGWRRKSEIVRSVPGFGKVFCSMVLAKVPELGALNRKQIGALVGVAPVPDDSGTRHGRRAIAGGRFEVRNKLYMCALVASRANPVLKEFYQRLVARGKPKKLALVAVMRKLIVTLNAMLKTNSMWRPPCLAVSVEAAMLGRQRPGKLKSRRVVHKSTGGMLNPIPAPVDPVGNAPSSSLNTVAHPRAPGALALSLMKGRGIWNWAGQGEGKSRVVSSSAAQFL

SEQ ID NO: 235109 - protein, 395 aa, unidentified
MPSTTVSERVVIAVDPHKASWTAAAVGSALAPLATLRTPVSRQGYRQLRRFAARWPDAEWAIEGATGLGAPLATWLSGDGIEAVDVPAKLATRVRMLSTGHGRKNDDADAVSVGIAALTAPGLRSAAVEDAIITLRALVEHRDDTVRTRTQTINRLHVLLTGLLPGGAPRQLDADTAARLLRTVRPRATGPATLRRLAAELIGEVRHLDRRIATASTQISDAVTASGTTLTQLRGIGDLTAGKIIGRVGDITRFRSPAAFASYTGTAPIEVSSGDVVRHRLSRAGDRQLNYCLHVAAITQLKHDCPGRDYYLRKRACGKGHKEALRCLKRRLSDVVYRQLLRDAQAAQAAGPRGQLGATTNSRAAGSTPHTSSSGKSLPGPAGTDPTTPDEDRLD

SEQ ID NO: 235110 - protein, 375 aa, unidentified
MNNNNTLYVGLDVHKESITVAYAINSEPVELMGKIGTSPTDIQNLCKRLRSKSSQVSIVYEAGPCGYGLYRRLVKSGFDCMVCAPSLIPKKPGERVKTDRRDAIRLVRSLRAGDLSAVYVPGIEDEAFRDLARAWASARDDLRHARQRLKSFLLVHGVHYVGRADWGPAHRRWLSKYSFESPWRQLAFDEHRRTIEDRQAQCERLESALKEAVTEWRLYPVVEALQAMRGIQFITAVGLISELGDLTRFEHPRQLMSWFGITPSEYSSGGSRHQGSITKAGNSYARKLLVEAAWSYRHPARISPAIQKRQENLPRPVIDRAWDAQLRLCKRYRKLQAKGKNVNITIVAVARELAGFIWHMGRIAMSVAQQPQCHK

SEQ ID NO: 235111 - protein, 360 aa, unidentified
MKTLRNSEAKTIPSRTTVGLDVGDRHSWFCILDEAGEVVAEGRVRTTSEALNEHFTRWARSRLVLEAGTSSAWISRLAMTAGHEVIVANPRELRKIHQSDRKNDRSDALVLARMARFDPQLLAPITHRSAAMQNDLAVVRARDVLVRARTQCVNAVRGLVKTAGGRLTTCGTECFARKAVAQLPSGLESALGPMLKTIESLTEQIRAYDRVIDELASRYPVTEVLRQVTGVGALTAVTYALTLGDSSRFGSSRDIGAYLGLVPRQHDSGNHVSQLSITKAGNTLLRRLLVGSAHYILGVHGPDCDLRRYGERLMTRGGKNAKKRALVAVARKLAVLLHRLWVNGEVYDPLHSEQRSLQAA

SEQ ID NO: 235112 - protein, 316 aa, unidentified
MAKAVSEITLGIDVSKQELVICDWDTERLTRLVNETAEIKAWLGSLYGPVRIAIEPTSSYHLELVEQAHALGLTVYLINPRQLVHYRQAVGERNKTDPADAWLLARYLARESDSLRPFRPPCAKAQRLWALIKRRGVVVGARQKLQQSFRGIKLPAKALFREIQAVIERIDLQIRTLIRELGWQADYRYALTIPGVGPVNAAALTTVFHRGTFASSDAFVAFIGLDVRVRESGNYKGRRKLTKCGEAEIRRLLFCAAQPARTYQPFDDYYQQQLDKGLSKIAAKVILARKLARIAFTLINNQQSFRKREIAYSQSP

SEQ ID NO: 235113 - protein, 412 aa, unidentified
MKRIRDRVAGLDVHRDTVVACCRIVEPDGEVEVTKQTFSTTRKGLSELAAFLSDAGVETVAMEATGVYWKSPFYALEGLFRELWLCNAMHVKNVPGRKTDLSDAEWLADVAAHGMVRPSLVPPSEIRELRELTRYRKTQVDARVKEIQRLEKVLQDAGIKLTSVASTVWSASSREIVEALIAGERDPKVLAQMAKGRMRAKIERLEEALAGHFGSHHAIVARQIIDHLDFLDSSINALTNEVTTRLVPFEAAVAIVTSIPGISRTTAEVIVAETGVDMSRFRTPEQFCAWAGVAPASYESAGKRRSAGTRQGSPWLRRTLVEAARAASRTKGTYYSAQYSRVARRRGPNKAAVAVAHSMMFTMWHLLTNGALYHDPGADYFERRHDPVVEAKRLARRIEALGFEVSLNQTAA

SEQ ID NO: 235114 - protein, 330 aa, unidentified
MKTWNVVLGVDVSKKTVDICWAEQKLFIKIDNNSEGFRKFKKWCKEKGIGLQDVFIVLEHTGGYEYRFMQFCESESIDYKRVPGLEIKQSMGMCRGKSDKADAFRISEYGEGKIKRLVPDKPLDNRFLNLKQLLSLRKKIVRESAGYKNAAGERKHMYEPGDTDMLLRISQEKIEANTRYVQQIEARIIEMIKSDESMYLNYRIITSIKGIGPVNGWMTIAYTENFTSFPDGRHYAVYVGVIPFEHTSGTSKKGRRRTSNLAQKELKQELNQAAKIAIQHDRELGSYAERKLKYKEYGLVLNNVKFKLILRMFSLVKRQEMYVENYRRSA

SEQ ID NO: 235115 - protein, 404 aa, unidentified
MRAICGIDWASEWHDVRIADADSGEQLVQRRFAHDEAGIGALIDELVDHEVERVAIERPDGLLVGRLLAAGLAVLAIHPNQVKAARDRFRAAAGKTDRFDSFVLCELARTDAHRFHALAPSGDETMALRTLVRTREDLVAARVGLANQLRAQLDASWPGAARIFADIDSPIALAFLERYPAPGDARGLGPQRLHGFLARHAYSGRRPVEQLLQRLRNAPRAVLGELEADARRAAVLGLVAALRPIVAQISELTSQIRGAIRSHPDGPIFLAVFRDPKSVVCAAGLLAEIGDNRARYPHRDALAADGGQAPVAIESGKRRSAAFRWACDKRLRNHLTVLADSSRHHNPWAADIYQRARDRGCDHPHACRILGRAWTRILWRCWQDRAPYDINQHRAATRHLHNGG

SEQ ID NO: 235116 - protein, 422 aa, unidentified
MSCLPALTGVCPTQRTVRRDITILTETTLLVAGADTHADTIHIAAVSMTGVMLGDREFPTTRAGYAAAIGFLSSLGQVQRIGVEGTASYGAGLTRALLAAGIEVLEVARAVKSTRRLKGKSDPLDAYSAARSVLAGQGLAIPKDEATAGLRALHIARRSAVKHRTAVINQIKAMLISAPDAVREKYRGLTTLKLIEAIARCRPDTQSQPWAVSLLTAAKMLAQRVQFLDAQAAELQAQIDVLVSAANPALRAAYGVGADTAAQLLITAGANPHRLHSEAAFAALCGAAPIPASSGKTTRHRLCRGGDRAANNALHRIALVRLAHHQPTKDYAQRQRLKGHSKREILRKLKRAIAREIFKLLTRQIAIPEYADLRQARQAKNITLTAAAKHFGTWPTTITRIETGRQRDDAFADTYRTWLTTA

SEQ ID NO: 235117 - protein, 351 aa, unidentified
MNIMGCDLPSRYQVVAWVHEETGEVVTRRLEHENGEARKFYASLPRGTMVGIEATFPAHWFERLLGECGHELRVGHAAKIRASVVRRQKTGTRDAEPLLELWLANRFPRIWVASLAERDLRQLLVPRMKLVRMRTAVKNQLPALAISQGVCRKQKLWSVRGRAELDNLALLPWASRRRQDLIATLEQLNGSIGELDGAVEAAAQQREEAVRLMTHPGVGPVVGLAFVLTVGQVSRFPNSRHLVSYLGLNPSEHSRGGRQRLGAITKQGNTMLRWLLVEAAQTTARYDPELRRVYQRWKFRRASGVAKVAIARRLAVRLYWMLRAQVDCAQLVRMSGSPSSGVAPKPSESIV

SEQ ID NO: 235118 - protein, 370 aa, unidentified
MRNRSMFVGLDVHKETIDVSIAEGHRDGEVRHYGVIASDLEPLDKVVRALRAPDRQLHFVYEAGPCGFGIYRHLTKRGEDCVVVSPSMVPKRSGDRVKTDRRDSLTLARLHRAGELRAIYVPDDTDEAMRDLVRAREDAVVVGTQAKYRLKAFILRQGRRYPGREGWTLPYRRWLADLSFPSAAQHITLHEYRDAIEETERRLERLTEQLRQLAPAWRWAPVVAALQALRGVSFITAVALVAELGDLTRFRHPRELMAYLGLVPSEHSSGPSVRRGAITKAGNPHARRLLAEAAWAYQGIPRIGRQHAYRQEALPQVVCDIAWKAQLRLTARFRRLVARGKAKPKVATAIARELTGFVWAIAREVAPAPR

SEQ ID NO: 235119 - protein, 413 aa, unidentified
MEVLYARCCGIDVHQRSVVACLSLVEAGERHKEVRTFGTTTRELISMRNWLIEAGCTHVAMESTGVYWRPIYQRLFGFFELVVANAQHLKAVPGRKTDVKDAEWIADLLQHGLLSPSFVPPQDQQELRQLTRLRLSLTQERSQLVNRIHKLLQEGGIKLTSVLSDVMGVSGRAILEALASGESDPERLASRAHKSVQHKHEALVEALVGDMREHHRFLLRELLTLTQAVDRSIQHGEEEIEQRLRPFETLLERLCQITGVSKHTLHVLLAEVGIDMKRFPDAAHLASWAGVCPGNNESAGKRRTGRTRPGNHYVKVALVQAAHAAAHTQTYLGEQYRRLQHRRGAKRAALAVAHSILVIFYYMMVTGQPYQEKGVEFFQQIDQHQVPDRLIQRLQRLGYQVLAPERSQGPPAA

SEQ ID NO: 235120 - protein, 345 aa, unidentified
MILVGCDLHSRKQQVAVLDTNTGEVLEEELAHDGDAVERFYRALPSPVTIGIETTGYTQWFHALMHRLGHTVLVGEAAKIRAMVVRKTKTDRRDARHLLDLLKHDRFPTVWIPDPATRDLRALVAHRVRLVRMRTMVKNGLQAIALNQRLALRSALWTQRGLTQLRALALLPHTARRRDDSLELLAWLTTRIDQLDERIAVEVTADPRARLLLTHPGVGPLTALTTVLVLGPLPRFPDSKHVVSYIGLAPAINASADKQRLGKITKQGHALLRWVLGQAAPLAARADDDLRRRSFAVLHRRGRPKARVALARKLLVRLYIMLRDQIDYEEFRRRGRASRPTASAM

SEQ ID NO: 235121 - protein, 412 aa, unidentified
MEVVHPRCCGLDVHKRSISACVVIREHGRIEKLERRFGTFTRDLEDLAEWLAQHQVTHLAMEATGVYWKPVWNVLEGRVDLMLVNPQHIKALTGKKYDRRDAAHLADLLQHGLLQGSFIPTAEIRQLRDLTRNRARTVQEAARIKSRIQKVLEEANIKLGSVATDVLGVSGRLMLNGLCAGEQDGAKLADLAIGVLRKKHDQLVQALSGRVHDHHRLMLHKLLRALQTREAEIAEDDADIRRQIEPFGKAMLAWMQVPGIDEVTAWSLVAEMGPDMEPFETPEQAASWSCVCPGNHESGGKQGNGRTRKGNPWLRSAICEAAWGASRTKKSYFHAQYARICARRGPKRALMAVAHSMVVVGFFLVKHNLKFNDLGADFFDRRNRERATRRAVKRLNALGYNVRLEQAGSAPP

SEQ ID NO: 235122 - protein, 358 aa, unidentified
MENSISWQARMTVGMDLGDRWSHYAVMDEAGVVVEEGRVATRPAALRQRFGAMAPARVVIEAGALSGWVGRLLGELGHELVVANPRRVALVSGSVDKSDGVDARTLTRLGRADVELLFPVVPRSAQTLADRQRLRAREALVRCRTRLVNHVRSAVKGTGERLPRCSTATFAKRARPMLPAEMRESLLPLVDEIASLTAAIRAFDRQLETLAQQRYPQTELFHPVKGVGVHTALAFVLALEDPRRFASSRAVGSFLGLRPRRRQSGDRDPQLRITKGGDEMARRLLVTAAQYILGPFGPDTDLRRFGLRLAARGGKAAKKRAVVAVARKLAVLLHRLWVTGEAYEPLRNATLTAEADAA

SEQ ID NO: 235123 - protein, 400 aa, unidentified
MMTPDNIDVWVGLDVGKSAHHAHALDRDGATLYDKPVRQDEKAIRSMLEHLSRRGRVLLVVDQPNTIGSLPLTVARDMGIAVAYLPGTAMRRTAQLLPGDAKTDRRDAHVIAWAALKLPETLRDAGPDDETLAALKLLAGHDEDLAHESTRHVNRLRSLLLQTHPAFERALKGERITRDATLALLERYGGPMGVKRAGIEDVKDWAKSNGLRAGRIIDDMFKAIGEQTVTVPGTLMAETIIPSIAHDIKTIRDRRREVGRQVEKLLEDHPLLTVLTSMPGIGVRTASNILLGIGGDIANFKSSAHLAAYAGISPVTGQSGTSIKGERPSRRGNKRLKNALWQTAFVASTKHPPSVAYYKRKREQGKHHNAAIICLARRRCDVIYSMLKNGTLYQEPALVA

SEQ ID NO: 235124 - protein, 346 aa, unidentified
MMIIGCDFHPSWQQIAWLDSETGETGEQKLVHAGGEARQFYQQLAAPVLIGMEATGSSQWFIELVEDWGHEIWIRDAAQIRASYVRKQKTDKRDAAHILKLLLERRFPRLWTADREQRDLRQLVLHRHKLVLIRSRVKNELQHLSLNKGMQRKRTLWSQAGQQLLRELPLKRWAACRREDLLGLLTMLDEQIGKLDGAVEHAAEENPQSKLLMTQPGVGPNTALAFVLTICDVGRFRRGKQVASYLGLIPREESSGGRQKLGAITKQGNRMLRSLLVEAAQNAVRYDPGFRREYLHRCHQKPKAVAKVAAARKLAVRLYWMLRTQKPYPEVVRIESSAGLALVGRS

SEQ ID NO: 235125 - protein, 371 aa, unidentified
MKRESTTKFVGLDVHSKTISVAVADEGRQGEVRHYGTIENTTEAIDKVIISLTSTGAELKFIYEAGPTGFGLYRYLAGNGFKCIVTAPAMIPRRSSVRIKNDRRDALTLARLYRAGELTGIYVPEPEDEAIRDLARARDDARVAERKAKQRLNSFLLRNNLIFPGKTKWTKTYFNWLGLVVIKYPAQKIALQEYIEAVHECTGRRARLSEQIRLAVEEWRMAPTVKAIQALRGVSLISATITIAELGDLSRFRKPKELMAYLGLVPSEHSSGESIKRGGITKTGNNHARRVLVESAWTYKHHARITRCLIKRQQGLPRSIIQISWKAQLRLCARFRRMVAKKKPNNVVVIAIARELAAFMWAIAQEVRATA

SEQ ID NO: 235126 - protein, 397 aa, unidentified
MPIVGGLDIHRKQITFDYPGTVTGEVRRGQVSPADRAHLRAWLARFAGRDDVAFAMEGCTGWRYVAEELAAAGIAAHVGEPADTAFARGRKRHAKTDKTDSRHLRQLLAEGRLPECWIPPAQVLECRALLETYHDLRREHTAWIQRIHAVFFHQGAPALGEGALRTERSLAALREAAAVHLSPAGQLQIATDLDMLAAVEARMDTLRRQLLHAARRLAGARVLADRLYGVGPVAGLAMTCWLGGAGRFSSSRKAVRFAGLDVTVYSSDGKRSPGHLSRQGPEILRWVVYEAGKTHARAAAPGHDYTTRSPSPEPHRPAKAVTITVTPAPGGRQAAAALTRWGYNRGQLPQRPSARTRPAAQGHADGLKRLSGRIPRRAGDTRSIIMSPGAASARGPR

SEQ ID NO: 235127 - protein, 407 aa, unidentified
MIFVGDDWAEDHHDVHVMDLAGTRLAARRLPEGLAGISRLHELLAEHADEPGQVVVGIETDRGLWVQALIAAGYQVYAINPLAAARYRDRHQVSGAKSDPGDAKVLADLVRTDRHNHRLVAGDSDQAEAIKVLARGHQNLIWARTRQTNALRSALREYYPAALEAFTDLHDRDALAVLGRAPSPQQGARLSRTAIRTVLARGGRQRNLDNRAEQIQAILRRPELTAPNPVAAAYAATTTAAVGIITELNRQIADLEAQLAADFEQHPDADIYRSLPGLGVVLGARVLGEFGDDPNRYADTKSRKNYAGTSPLTVASGRKRAVLARHVRNRRLYDAIDAWAFCAISTSPGCHAFYDHRRAVGDLHHQALRALGNRLVGILHGCLRHHTQYDEHTAWHHRNQDQHATAA

SEQ ID NO: 235128 - protein, 427 aa, unidentified
MRVLYDRVAAIDVHKDMVKVAVRVPGKKRGTRTTDVLEYRTFYGVLQAMARELRGRGVTHVVMEASGIYTEPVYYALTELDFTEVLVVNPAHVKALKGHKTDAKDAVRLLDLYECGAVMRGSYIPSPDLKEVRDLVRYRVKTVQARTSEIQRLQKTLESAGIKLDSVVSDITGDSSTAMIKALIDGERRGQVLADLALGRMRTAGKLADLSMALEGRFTGHHALMCRLHLDQIKMFDNAVGGLDAKISPLVARYAAEADLLKTIPGFGDVVTAGWLGAIGPAPHQHFGTAERLASWVTLCPGNYISARKSRSGRTGDGGSYIKPLLVQAAWAAIRVPGRLQARFHRLVRKFGGPKNKGAKKRAIIAIAHTLLKIACAVLKAGRPYCEPGADFYTRRESAQARQDYLLRQLQKLNPGCVITITPAEAA

SEQ ID NO: 235129 - protein, 354 aa, unidentified
MKRTTKYVGLDVHQATTSIAVRDEQDRILARAVVPTDATALVEFFRGMRGTIVVAFEEGTQAQWLHDLLVPVVSQVLVCDRRGEKKRGNKGDSVDAAELAAWLRQGRLRAVYHGSRERAKLRELAHAYQNVVEDTTRVMSRLKALFRARGIRTPRRRLYASAERASWVAQLTEPGARLRAEVLYGELTVLQELHPKVKRAFVTEARRDPAWRTLRTVPFLGDIRVALLLATLQTPWRFRTKRALWGYAGLAVVTRTSAEYELVDGRPRRRGRAPQTRGLNRNHNPVVKNVLKGAATAAATRPGALQDWYQQLLNHGMRAELARVTLARKLAAITLRLWKDGVPYDAKYIAGTAP

SEQ ID NO: 235130 - protein, 411 aa, unidentified
MDKIYDKCCGIDVHKKLIVACFRCGKKQEVREFGATTRELLELADWLKDGGCEMVAMESTASYWKPLYNILESSDLNAIVVNARHMKAVPGRKTDVKDAEWIADLLQHGLLQPSYIPDKDQRELRELVRYRKSLVGERTRELNRLQKMLEGANIKLSGTVSDINGKSARSILEYLLTGKSIDGSKYDEMYEQKIIAHNLKATKEQIVDDLNGVMSPLQRRMMKELLVHLDELNIHIKNLDDEIDNFMKPEEKQASQAIQDVTGIGNTSAQAIISVIGSDMSRFPTDRHISSWAGLCPSDNESAKKRKSGKTRKGNALLRTTLITCAHAAVKNKKSYFYAQYVRISAHRGPKRAYVAVAHSMLISIYHILKDGVVFKDLGADYYNQFNKERKINAYLKKLKALGWEAPIVAA

SEQ ID NO: 235131 - protein, 355 aa, unidentified
MSDVKFIGLDVHKTSISAAVLDEGGKLVMQAVFVTDAAAILGFIGGVKGSLHVTFEESTPAAWLHALLKPAVAEVLVCNPRRNALLKSGNKSDRIDARKLAELLRAGLLSPVYHDETPTQTLKELGRSYRSVTDDTTRVMRRLKALYRSLAIDSGGKKLYTRRRREQWLNQLRQVGQRYRAERMFEQFDLLQGLRRQIRCDLIQEGRKHTATAVLSSVPFVGPIRSALLIARVQTPFRFRTKRQFWAYCGLALETRSSADHQVVDGELRRKSKPVFIRGLNLNHNHDLKNIFKSAATTASASPGPFRDFYENLLGKGMKPEMARLTLARKIAAISLIVWKKGERFDPEQLKTQAA

SEQ ID NO: 235132 - protein, 317 aa, unidentified
MQESSIGIDVSKAKLDVYILPEKKFFTVSNDKKGFKALIKIFNQTNVRLVILEATGGYELACAYALIEKDIPVSIINPKRVKRFAGAKDLNCKTDKVDAKLIAEFAAVMKPEQRELLSKELRELKELINRRSQLVDEITTEKSRVETVMSKLVIKDIKSHLKQLKARINRIEQEIKIRIKENSQCKFLYDFYISFVGIGDITAAALIANMPELGFLNRNEIAALLGVAPYNSDSGQKSGKRFVKGGRKDMRDIFYMATLSACFHNPVIKDFYRRLLAKGKMQKVAITACMRKFITIINAKLKELIVFDHFLSFSTCI

SEQ ID NO: 235133 - protein, 415 aa, unidentified
MKGTGDTRTIDRYIALDIHKEYVLAGGQTAGQEWVLPPRQISMAKFREWAIANLQEGDAVVIETTTNVWDIYDIVAPLVTRTAVAHAGAVRQIAEARVKTDKEDVKRLIRLLIADIVPEVWVPPLEVRELRGVISYRNRLVKMGTMVRNRLQSLLHRHNIIMPKGKLLDASWWQEQKMSTLEKMQIQQELMLLEEFDRHKREVDMELGRQCLRETWGKQAVRLLQLPGFGVVMSMIVLSAIGDIQRFESAKQLVGYAGLGAGVHDSGKEHIEKRITKSGRKELRWALVEAAWQAIRISPYWKEQYETYLRRMRRPNQAIVVIARKLLVAVWQVLTKEETDVHASEEDLAYKMLVLSWDLDESVRMGLTYKQFAKYALMKLGVETDITRFVRKNVPRRIAPREEVLVRMQELGLST

SEQ ID NO: 235134 - protein, 337 aa, unidentified
MAKTQGMRMVGVDVSARWVDVERAAADEPVVTKQWPNTAVGHRQLARWLTQGKRHARVVLEATGVYSLDLALALQRTARIAVMVINPRVSKDFAGACGQRASTDATAATRRREFAARMPFTPWEPPSAAALELRAVMRRVAALVEMRAQEHNRLHAATRSEALPAAVQMDVREHIRALGRRIARLEREARAMVEPAPALRAGYGHLRSIRGIGQRSALGILSEIAVLPRDLTVRQWVAQAGLDPRPIRSGSSVHPPVRISKRGNVHLRRLLFMPALVAVRWNPAVQRLATQLTARGKAPLQVLVAVMRKLLHAIYGMLKTDTDFDGERFRRTVAAEA

SEQ ID NO: 235135 - protein, 365 aa, unidentified
MSEITRGAVVRVGVDLSKRVYQVHAVDRSGRVLMAKPFAPDRFFAWCAELPAGCLVAMEACGGAHHVGRRLRLLGLDARLIAGHFVSPYRMAGKSGKNDANDAAAICEAAGRPHMRFVPIKTAEQQGQLSVHRLREGFKAERTALINRIRGLLAEFGLVFPQSPEALRKVLADVVEDGSNEITGIARMVLQRAHLHWIDLDLQMAWYEQRIAAHARSDPRAAKAAELHGIGPIGASALVASVGDFKQFASAKQFGAWLGLVPSQNSTGGKASLGRITKRGDDYLRMLLIQGAKSAVMTAGKRNDRISQWLLRLKERAGWQKAVVALANKNARILWAVLTRGDGFDRNHVPEAPAPRCSLSQRPAH

SEQ ID NO: 235136 - protein, 383 aa, unidentified
MTLDRHFRQCVGIDVSKDKFTACLQMYDRASDVGCHTMSIDFDNTKSGFNQFVKWSRKEAVKGFPLTYLMEPTGVYYEPLAYHLHKIGQTVYVVLPNKARSFCEAEGIKTKTDAMDARCLALMGCTSRKLKPWSPPAPIYRELRQMTRFHADLSQIMTSVMNRMESLNHMEEADKTVRKNCQKLIDAIDTLLENNDKAIMQKVTEDKELEARVKRIAKAKGLGVTTVVCIVAETEGFHLIENRKQLTSYAGLDVRAKQSGKEDPKHAISKKGNAHIRAALYMPALVAVRYNPQIKAAYGRICQKHPKQKKIGVTAAMRRLLLLIYTLWKNGEEYDPMRDKTHTHQKKMKEEDTELEYEPEDCIGPKRDPADWNATDEHGNPPF

SEQ ID NO: 235137 - protein, 418 aa, unidentified
MRYNKTEKIRTINKKTLIAALDIGKKVHYGYFRAPSGHDIQPFAFHNTRNGFDKFWKKLCDFKKKQMLTEIVIGFESTGPYAEPICHYLRHQSVKLVQINPMHTKRIKELTGNSPNKTDKKDPRVIADVMSLGHSLTVIVPEGATAHLRRLTQARERAIERRTAMNNQLQHLVFLIFPELVHIIKPSTKTGMYLIRHYSDPEKLLFAGIDKINAIIKKISRGRLGADRAEQLYGAAKKSVGITEGKESILFEITHLVSKIESENHYVEDLEKQMGDYLEKIPYSHSILSITGIGYVTAAGLIGEVGDFRKFKTISEVLKLAGLDIYEISSGAHKGCRRISKRGRALMRKLLYFAAINTTRKNGILHGPYQRHLAKGMPRIKALMAIARKLIGIIFALVRDHSNFIADYSSQLMFKKAA

SEQ ID NO: 235138 - protein, 354 aa, unidentified
MIIIGVDFHPEFQQIASVDTESGEFQEKRLAHREEAEKFYRALAASGQKVRVGMEASGHARWFERLLAELQVELWMGDAAEIRTRRVRKQKTDRQDAQLILKLMLKDDFPQIWVPSWENRDLRQLLWHRHRMVQARTRIMNQLQAVALNEGLRCKKRLWREHGRQQLEAFRLAPWASRRRRELLELLDRLNPTIAELSQAIEREVENCPAAKRLMTHPGVGALTALAFVLIIGRAERFDCGKQVASYLGLVPLEDSSGKRRRLGHITKQGSSMMRFLLVEAAQVTVRSVPEWRSKYLHLMMRRGRKTAKVAMARKLAVRLYWMMRQGWDYQQWKKFGSHAGQPGNRDGVQSITE

SEQ ID NO: 235139 - protein, 343 aa, unidentified
MEHYAGIDVSLELSSVCVVDATGRIVREAKVPSEPEALVGFLGQLGLPLTRVGLEAGPLSQWLHAGLTGAGLEAVLLETRQVKAALSAMIVKTDRKDARGIAQLLRMGWYRPVHRKSPPAQEVRALLVGRKLLQGKLVDVELSIRGLLRGFGLKLGEVSKGRFAARVRELVAGQPMLERVVEPMLRVRDVLRAEYQVLHRAVLAIVREDAVCRRLMTVPGVGALVAVTFASAVDDPARFRRSRALGAHFGLTPKRYQSGETDVTGGISKAGDGMVRAALYEAAHAMLTRTGRFSTLKRWALEVAKRRGMKRAKVALARKLSALLHRLWVDGSEFRFGREAAEA

SEQ ID NO: 235140 - protein, 355 aa, unidentified
MNDAKYIGMDVHQATISAAVRDSSGNLVMEATLETKTQTILEFVRGLRGSLRVSFEEGTCAAWLHDLLQPHVTEVLVCDSRKNALLRVGNKNDREDARKLAELLFLNKLHPVYHGEAGIRTLKELARSYLTITRDLTRVMNRLKAIYRGWGIACAGQQVYAPRYRAEWLAKITEAGVRRRAEIYYQQFDGLAALRQEARRELLAEARKHPALRLLRQIPAIGPIRAALLIALMQTPHRFRTKRQLWAYCGLALRTYDSGEYRFVGGQLKRTKKAVTIRGLNKNHNHDLKNIFKGAATRAAATVGPFQKFYEARIASGMKPPMARLTLARKIAAITLLVWKKGVCFDAKQLKPQAA

SEQ ID NO: 235141 - protein, 387 aa, unidentified
MSKEKGRVVGLDVHPDSFAGAVVAGSDPASAQVLSTSTRVELKQLEQWALRHTRREDTLVLEASGNAFAVAARLRALGRRVEILDSHRAGKVGKVYCANDRVDAVKIARIYLSALSPIVWQPDEKTLERREVFSAYQAVVKESTRAKQQLRAMLNEHCMRLEKGFRLCHPNAIKRLLALRQWTPARAMLLQQLHGSLLAARARRTLLRRHMAQEIVSEEALLRLTRLCGINLITLYGVVAAVGDVRRFSHGKKLVAYFGLNPSVSQSGNFEGSGALKRHGRGALRALLIQSGKKLLEVNNPLQKWGLAVAARRGRNKAAVAVARKLCVALWHVLMGHSIGALERLDTLTTKLSKFATEIGPAALKTFGYDNKADFVEKKLYVLRSYP

SEQ ID NO: 235142 - protein, 409 aa, unidentified
MDVVYTRCCGLDVHKAKIVACLITPGSAGQVQKEIRTFGTLTDELLALGDWLAEAGCTHVAMESTGVYWKPIWNVLEGSFELLLANAQHIKTVPGRKTDVRDCEWIADLLRHGLLTPSFVPDREQREVRELTRYRLALVRERSREVQRLQKTLEGANIKLSSVASDILGKSGREILAGLVDGRTDPAALADLAQGKLREKLPALERALVGRFGSHQRFLVARQLSHLDDLDGLIAELSAQIAERLRPFDEAITRLDGIPGVGRITAEVLVAEIGTDMTRFPTDRHLASWAALCPGNHESAGKQTSGKTRKGNRALRTALVEAAQAAGRSRKTYLGAQYHRLTSRRGKKKATVAVAHSILIIAYHLLRDGTDFHDLGPDFFDRRNQDALERRLVSRLEALGNKVSIEKVA

SEQ ID NO: 235143 - protein, 418 aa, unidentified
MLPTDDYDVFVGVDWGNARHQVCVLDPARQVLGERTVEHSGPGLAALADWLGALAPGAPARIAVALEMPRGAIVDSLLARGLHVFSINPKQLDRFRDRHSVAGAKDDRRDAFVAADALRTDRWAFRRLAPDHPLILQLREGTRLDQEMQQALTRLANRLRDQLLRFYPALLHLVPAADEPWLWALLALAPTPAAGAHVPRARLARLLQTHRIRRLSAEAVRDALRAPALPVTPGTVEAAASHVALLVPRLQLVHAQRAQGARHIDTLLAAYLAEAPAAGPPRAHHDVAILRSLPGVGRLVAATLLAEAAPLLAARAYPALRAQAGIAPVTRQSGKHRGVLMRYGCNHRLQQAVYHWARVSAQCDAHSRAHYTALRQRGHSHPRAVRGVADRLLALLIAMLKNDTLYDAARPRRRELAA

SEQ ID NO: 235144 - protein, 326 aa, unidentified
MEHELHYIGIDTAKEKLDVDVLRPDGRHRTKKFANTTKGHDELVSWLKGHKIDHAHICIEATGTYMEPVAECLYDAGYIVSVINPALGKAFAQSEGLRNKTDTVDARMLAEFCRQKRPAAWEAPHPLERALRALVVRHQALTDMHTQELNRTETAREVQRPSIDAHLLWLEAELKRLEKQIKDLTDDDPDMKHRRKLLESIPGIGEKTSAVLLAYIGLKDRFAHARQFAAFAGLTPRRYESGSSVRGASRMSKAGHVSLRRALYMPAMVATSKTEWGRAFRDRLAANGKKGKVILGAMMRKLAQVAYGVLKSGVPFDASRYNPVAA

SEQ ID NO: 235145 - protein, 346 aa, unidentified
MKILALDLGKYKTVGCAYESESGAHQFKRGLTTAAGLAGMVQAVKPDRVVIEICSIAGWVCDLMWGLGIEVQVANTSDDAWRWRKVKQKDDRRDALKAARLSAVNQLREVYIPAPEVRQWRALITYRQQLIRRRTKIKNHIRDLLLREGQLLGRGSSCWSQVGIAALAAQARPFSECGPAELWRGELQLELEQLKEIQRQMATVTAQLDKLGAGDARVQLLRTVPGVGARLAEAIVALLDQPQRFRKASQVSGYIGMVPKAMDSGETERRGHITRQGSRLVRSLLVEVAWAGLRHNAWVRQTYQRLSGGKKARKKIAIVAVGRKLLVKCWAMLRDNRPWDWQPQIT

SEQ ID NO: 235146 - protein, 433 aa, unidentified
MHEVEDEPLFAERAAGIDIAKAGIEVTVRVPSDTRAGRRQQETRSFATTRRELLSLADWLRAWGVTKVGMEATGDYWKPVYFVLESQGLGCVLYHAAQVKALPGRPKTDRADSVWLARITERGSLPSSFVPPAPIRALRTHTRYRRHLTQARTAEKQRVEKLLEDGHLKLSAVISDIHGVSGRAMLEAIIAGERNPAALAQLARGTMRGKIARLEQALDCSFLTEEHVAILAMMLAAIDSFTTQIDKLTARIEILAEPYWRQIQQLDAVHGAGVTSAQDVIAEIGVDMTVFPTAAHLVSWAKWCPQVSQSGGKRKGSNAAGRGNPYLSAALGEVSMSAARTQSFLGAKYRRLVKRMPKKKALVATGNSVLTIFHALLSEPAGSYHDLGPDYYEQRINARRQARNHIHSLERLGYHVTIQATSPDTGQPLTATA

SEQ ID NO: 235147 - protein, 413 aa, unidentified
MSEMFSPMPSPAALAYVVGIDIGAESCFMCCLTVEKRQVIKPSQFGNDALGFEWLFTRLEQLKSAPHQILVGLEATSRYGENLYHALLKRGYHVCLLHPGQVHAFAQQRGLRAKTDRVDAMTIARVLLSGEARFGYVPSEQIATYRELTRLHQQLSDDVTRYKNEIHALLVVLFPEFTQVLADPSRPTALAVLKAYPSAAAMREADPAALGRFLHELCPSHYGRQTAEKLVQLAKSSVSSGVALAARSSSLRILCNQLEYTQSNLKQLQEEIEGLVNQDPKAKGVLSISEFGPMTVAVILAELGDLDRFSHMDQVVAYVGMDLRVKESGKWKGQTKLSKRGSGRVRRSLYLAALRSIRLPTSPFRIYYRRLVDRGMKKGMAVVAVMRKLLIVASHLIQTRGRTMMLAKSRDQQ

SEQ ID NO: 235148 - protein, 363 aa, unidentified
MFYTGIDLHRRSVVVCTVDDRGIIIERRHMKTQQELVVTYFHQWPAEEQRAVVECTTGWYWLCDLLRSLGITVVLAHAKYLKAISYAKVKTDAVDAQTLAQLLRMGYIPEAHQLPPEYRAMRDVLRQRMVMEHKRTNIIQRMLSILAQFNITSVPVSPSKPAFSEFLASCTIPDEYRLTLQMYHEQCVQTTLHRTQLEKHFKARLRPTTTVQLLMSIPGIGDITGSIIAMETGDIHRFANAKHYCSYCRLVPGARDSGGKRSHRSGSKDGNPFLKYAFTEVAIKAMMFYPEIKAFAANLEHRSTKAIARTVVAKELAKISFYVLHRQQEFQTFKGIVINKLRDWPRARKPVRLTGPTCTVPLP

SEQ ID NO: 235149 - protein, 309 aa, unidentified
MIIAPGFIGIDVSKNHLDIFDPAAMPQRIDNTAPALAGLIQDWAQRDAFVLFEATGRYDLVLRQALTTAGVRFARVNPARARDFARAAGFLAKTDAVDARMLAIMAQSLRPPPQDDRSEERERLALLSKRRDQLVAIRQQERTRRSECADPLSLASIADHIAWLDVAIEALNAKITAVIAIAPDLDRDRRLLASVPGVGPVTATVLLALLPELGRRPPRQLSALAGLAPFNNDSGTRRGQRSIRGGRKRVRDALYVAAFSAARHDPRFIAFYKRLIDAGKPAKLATIAVARKLLTVLNAIIRDQQPFRA

SEQ ID NO: 235150 - protein, 414 aa, unidentified
MFAVGVDVSNGRSMVAVLGARRSVVVQPHEVPHTADGFAELAARLHALDGEVRIVMEHTGRYYESFAMSMYRAGFFVSAVNPLAIKGYQEGISVRKVKTDKADALKIAQFAIDKWEILPHYTPMDTIRYDLKTLHRQFQLSSKTKTALNNNLIALLEQSYPGANRYFDSPVRPDGSQKWVDFVDAFWHVDCVARVSRKAFVERYQKWCKRHGYNFSEAKAVEIHEDARQRFPLVPKSDTCKLMVREAVAQLNAVSRTVETYRAEMDRLASQLPEYETVMAMTGVGKSMGPQLIAEIGDLRRFAHQKSLVGFAGTDPIKDDSGDKVSDSKPSSKRGSPYLRRTLFVIMTILLQLQPPDDPVYQFLDKKRSEGKPYYVYMTAGMTKFLRIYYGKVRDCLKEKGLWEQPNVDEVNPV

SEQ ID NO: 235151 - protein, 452 aa, unidentified
MPLSVPVCPRHRTVGIDLAIRAVQVAQVFDDGCAVGKPMRFRLTPADLNRVVTLIKHGVSAETRITAVMEPTGMAWFPVAVWLQRAGITVIRVKGQRVRALRRYLSEHTKTDAADAHVLGAMPTFGSRGLDPVHVPSPEQHAVQRLTKQRHRYQDLVSASRRRVLDLMRWACPALEPALPDTTTHLTLAILNDLFNPHRVIRMRRDVLARFLGRHAAGNHPTSGPFILALVDALKTAAADTLALHGDAVDFDALQFEVAQEVDHLRLWEQHIAAIDRRVAGLYQQLHPSNALRSIPGIGPILAPLLVATLGDATRFRNETHARGFCGMFPVKRSSGGVDQPGQRLTKSGSNRIKRALFLAADVARKIDPDLGAVYWRLMVTKGHHHKQALCAVATRLVNRIYRVLKTGVPYVLRDPDGIEISVQDAKRLVSERFTVPMDIRQSRRRQAVATP

SEQ ID NO: 235152 - protein, 361 aa, unidentified
MGLYAGIDLHSNNSVVAIQDEEDNLIARRKLANDLESITAWLEPYRKDLVGVVVESTYNWYWLVDGLMGAGYTVHLANTTAIRPYSGLKYRDDSSDARFLATLLRMGQLPTGYIYPRAERPVRDLLRKRSRLVRQATMNLLSIQNLFARNTGRRISANQIRQLTPEAVEEAFEDANIALAVKSTLKMLDCLTEQILILETVVHKQVKLRPGYKKLRTVPGIGEILAMTIMLETGDLGRFREVGHYVSYGRLVGSKHLTNGKRKGSGNTKNGNAFLCWAYMEAANFAIRFDETIRRYYQRKQAKTKRVIALKAVAHKLARACYHMIRENVAFDINRAFGGREDRSRTGTVSPGSVLASSHPG

SEQ ID NO: 235153 - protein, 417 aa, unidentified
MLKIVFPICCGIDVHKTFLVATIASTDRSSVTTYQTKRFSTFTKDLENLSKWLLDNQCADVCMESTGKYWIPVYNVLELTCEVILAHPKYVKSLRGKKTDRKDSVWIADLFKHGLVKASFIPEKAIRDLREVMRYRTKLVSMKSSEKNRYQNALTVSNVQLASVVSDTFGKSAQALINQLLQQPKDTSFDVLPFLHGSLKKKAEQISESLNGSIDDIQAQKIRSCTSHMAELDSHIEDLQVAADLLASPFTAALRIIESVPGIGHLSALTILSEIGTDMSKFLSAKHLCSWAGLTPCNDQSAGKKKSTRISRAGCYIKPILVQCALAAIKDKSFPYYGQRYQVLKHRRGHKKAIISIARMMLSVIYTLLSRGELFSKELYEESLKNPMVILSPEEQFQRLAKKFGYVVVKVHEPVPV

SEQ ID NO: 235154 - protein, 453 aa, unidentified
MDTYYLGIDVSKGYADFVILDKRKQIIEDNFQLDDTFTGHCLLYERLYEFFKNHPDALMYAAVESTGGYENNWFNSLVKFQGTLNIQTARLNPLGINANSRADLKRNSTDQISAQNVAEFMIAHAEKITYQQQDALANLRRQWSFIKLLTKQSTQLLNQLESLLYIANPELLIYCQDRTPKWVLKLLQKYPTASNLSRAKPKSLAAIPYVSRQRAQQLIAGAKSSVASATDKITGQLITTTVKQIFHLKQSIEAQTKMMANQCRLDEVDLLKTFTGISDYSAIGLILEIQSIKRFSSAKKLASFFGLHPVFKLSGDGSGGFHMSKQGRKEPRRILFMVTIVAINHNPLIAGIYKERLKKGMVKMAAIGYCMHKILRIIYGMLKTNRAFDPEIDRINRIKNIKHQKKTRKDKIRKYQDYDAKAPVSRRQRKKRRERRESQSDKITENGIIVSTP

SEQ ID NO: 235155 - protein, 281 aa, unidentified
MNNTYYIGLDVHKETIAIAYACGANREDAVYHGQCGGSVPTAEKALRKLAEKLGVEFRDLKVCYEAGPTGFVLARRLIRLGLDCVLMSPSKTERKPNEKIKTDKRDACKIARIFRNGDITVVRIPPALDEAVRDVCRARTDATDDLSRSKQRLSAFLLRNGFNYTGKSKWAAPHMRYLRELVMPHDAHKIVLEEYMQAIDTGIARVARLVEKMKQLLAGWEWEPVVRALMACKGFQEVAAMTVISELGDLRRFKHPRALMAFLGLVPGEETSGAKRRQGSI

SEQ ID NO: 235156 - protein, 353 aa, unidentified
MKTYYVGMDVHRASIVIVVLNGAGKVVMQLVIETGAERVRGFLKQLRGKVYVTFEEGTQANWLHEVVRPLVTEVVVCDPRQNKLMQSGNKSDRVDAQKLAELLRHGALKAVYHGDNGMRALKELVRTYDCLVSDTTRVMNRLKAIYRGRAIGCAGHDIYRQDRREQWLEKLTERGAKQRASFLYQQLAALKPLRHEAKRMMVKEARRQPAYPWLMSVPQFGSVSVAQLLAIVSTPHRFRSKRQFWTYVGLAVVTRSTADHEVVNGVLRRSQRPVSTRGLNRNHNHLLKRVFKNAAQGACHGGPFKAAYELRVTQGMVPSLARLTVARQLAATTLAVWKRGEQFNPERMKQQTA

SEQ ID NO: 235157 - protein, 376 aa, unidentified
MEMMQQDGRSRYIGLDVHRATIAVAIAEDDGCPPTSYGSIANEPSAIRKLMARLGGPNVRVRVAYEAGPTGYALHRQLTSMRLECMVVAPSLIPVRRGDKVKTDRRDALKLARLLRSGDLTAVWVPDEAHEALRNLVRARADAKSDELRAKHRLSKFLLRQGSHPPVGIRNWSVRFFQWLRQVKFEHVADEIVLTDYLAAVTAAGDRIKRLEAALRQCAETSSQVALIGALQAFRGIGFLSAVTIVAEAGDLRRFRTAPQFMAYAGVVPSESSSGRTHHRGSITKTGNSLLRHVLGEAAHHARHVPRVAGTLKQRQTNVPQPIVDLAWRAQQRLHSRYRHLGARIGVPKALTAVARELAGFIWAVSHVLEEVPTAA

SEQ ID NO: 235158 - protein, 315 aa, unidentified
MFPTIGLDVSKTTLDVCVLKGKDDREFYKFDNSDQGHQQFLDLLANLKVALVVCEPTGGYEASICAVLHRHNYAIHRVNTLSFHNFAKSLSLAKNDRIDAYKLAYYGVSMDIKANYHQSEYQQQLKDLVARREYLVSQLSSEKKNLKHKEYSNIQTSIVKHISYLEGAIKDLDKQIDDFASTETEQAKKVELGCSVPGIGKTLSYKLLAFFPELGDDTFDLNELAAITGLAPYCRDSGNKSGKRFIRGGRKIPRDALYMAVLSGCHKIPLLKNLRARLLSKGKPKKVAIVACMRKLLGILHSIFKRREAFVEQIA

SEQ ID NO: 235159 - protein, 326 aa, unidentified
MTSLPSPTSDDRVNVGVDVAKATLEVAISGQDNTLAIANDEAGCAELLAELSNLNVGLVLFEATGGFELACATALQLAGLAVAVINPRQARDFARAMGHLAKTDRIDARVLADMARTLVQRGDLSKMVKPLPDAQQLELQGLVTRRRQLMAMKLAEDHRMKMPGVRQRRSLNTIIKALDREITRVDKDLQAFIGANHAELAALLDSVKGVGKATISTLLAEVPELGKLSGREVSALVGVAPINRDSGTMRGKRAIFGGRPDVRRVLFMAALVASRHNPVIKVFYQRLLAAGKPKKVALVACMRKLLTILNAMVRSGKPWDQALHLG

SEQ ID NO: 235160 - protein, 411 aa, unidentified
MIEQQNLVYVGVDLHKQHHTAVIIDCWSKKLGEIKFDNKPSAFPLLVKEVRKYAKKGLSVVYGLEDVGGYGRGLAVYLKENQCWVKEVNAKLANARRQSHVTVQKSDSWDAECVAKVLRDELERLPDAKPIDLYWAISQLVTQRKWFAKSLTATVKKLHQQISYPYPSYKKFFSEVDGKTALAFWEAYPSPHKLKDLSEEKLAEFLRSHSNNGLSHKKAGQILSLISVDGDTYRDFQDSRDSVVVSQVRSASFFKKEIARVEVEIEQLMGQLGFQLESMTGIDIVTAAELVAEIGDIHRFPTADKLARFAGVAPVMVGSGNKSRNYKSKQGNRELHDIIKSLAIRQIAVTRTKRVPRNPYFHAYYLQRMSEGKTKQQAIICIMRKLINIIYAMMKKKSAYEMPTIPRVQVG

SEQ ID NO: 235161 - protein, 322 aa, unidentified
MSAPVLGIDIAKQRVEVALLVDGKVKNKSFKNTTEGFEALALWLRKLGIPKVQACLEATGNYGEGLGIYLHEAGHSVSIVNPARIKGFAQSELIRTKTDRVDAGIIARFCLAMKPETWIPPSPEVRFLRALVRRADSLIEMLTQEKNRFGTAHESVIPLIKEHMDYLNKEIKKVRDQIADLIDQNPNLRQKKDLLVSIPGIGKATIAVILAELDNLEKFNHVRELVAFIGLAPKETLSGSSIKGRPRLCKIGHARLRKALYMPALVSIQCNPVMIAFYNRLKEKGKNGKVIVCAIMRKLVHIIFGILKSGKKFDPNYKPVFA

SEQ ID NO: 235162 - protein, 465 aa, unidentified
MKSKTSKPKKRKQNISMEQGWETVHPHAAGIDIGAREHFACVPSGSAPNPVRSFGTFTADLEALADWFQECGVTTVAMEATGVYWIPVFQILERRGLQVLLANARQTKNVAGRKSDVQDCQWIQRLHTYGLLQGSFRPADAHCVVRTYLRYRDELVSARSTQCQHMQKALQQMNLQLTQVLSDVSGVSGLAIIGAILQGERDPVKLSRLVDRRVRATAAALQKALAGDYRAEHLFVLGQAFALYHTYEEKIQVCDQQIARALTQLPDQVDLSRQPLPARKAGRRPSLDRMAGQDMREALYRKTGVDLTAIEGIGALTSLVLFTEVGADVSRFPTEKHFCSWLGLCPDNRISGGKVLSSRTRRVVNRAADVLRMAATTLERSPSALGGFYRRMKARLGAAEAVTATAHKLARIIYRLIKHGEAYVRQGIEAYEKQFQTRKLRALQKAAKTMGFELIPTQTVPSGVS

SEQ ID NO: 235163 - protein, 345 aa, unidentified
MTVYIGVDFHARAQTISYLTTEDGEIQRLELDHGQPDEVRSFYQQFLGQQVVVGFESSGYAAWFEELLEELGCEIWIGHATAIRLFARRRQKNDRRDADLILDLLWRGDFPRIHRYSAESREVLQQLRYRQRLVKMRTMVINSLVFMAASRGVSLRTQLKSRRGLERLQQLALPQALTEQRDELCQLLLELKTRIEKVEHWLATKAESDVRVKRLRTHYGIGPLTGLCLVHTLECPERFANSRKVTAYVGFDPVEDSSGERRRIGSISKQGSRLLRFLLVEAGQIAIRKDQDLARVYQRVLVRRGHAKAKVAVGRRLLVRAFIMLRDEIDYAEFQRRGVAARSSR

SEQ ID NO: 235164 - protein, 325 aa, unidentified
MEKIIIGIDVSKLTLDICIQENGLNRFDTIPNTEKAIKSFFKQFVEKQNILIGMENTGRFNALLYNVLIQHSFAVYVINPLHLKKSMGLVRGKNDKIDSERIAVFLLKNYMDLQQWKPNSEVIEKIKLLNAERKQRVKIRAGLLAQTQDEQFLKSIMDKAVLRLNTKLIDVLTKQINEIEERIYQLICEDEQLFNHHKRIQSIPGVGKVLAFNMLIKTDGFTTINTPRQMACYAGIAPFDFQSGTSIRRKPKISSMADKDLKKLLHLAAMSTIRLKNDLAIYYHRKVDEGKNKMAVLNAVRNKIIHRIYALIKNQTIYKNSLVLS

SEQ ID NO: 235165 - protein, 429 aa, unidentified
MSYRIAGIDVHKKMLAVVVSNVEVESEFQFERRMFGGNPEQLRLLGAWLLEQEAEEVVMESTAQYWKPVWGALERYWKPIREKREGAKRRSGTLHLAQAQSNRGQRGRKKDFVDAERLVKRLVARELTLSFVPDVEQRLWRAVTRKKYQLRRDLGRLNNQLESLLEETHIKLSSLVSDLLGVSARRMLNALADGETNPAALAALAHQRLRATPDQLCDALGACTELKPVYRRLVKMALEQLQILEQQIGQLDQELATLLHPHQDAVQRLAEVPGFGVDSAQQIIAEVGPAAATFPSEKCLSSWVGACPGDEESAGVNYSHRSPKGNRHMRRLLNQAANAAVKVKGSIFEVIYRRCVPRLGHNQAIGVIAHRQCRLIWLILHNRAPYEERGPAVTTLSKYKRTWRMIRQLRQLGYRIESPNPQPSQAPAQ

SEQ ID NO: 235166 - protein, 391 aa, unidentified
MEARTVNNLPSAGTHDDAVRCVLAIELSKKSWIVAVNTPLSDKISRYTLKPCGGKELLDLCERIRTRVAREVKKPVEIISCYEAGYDGFWLHRLLEAHGIRNYVIDPASLQVDRRARRAKTDRVDAERLLRSLMAYLRGEPKVWSVVRVPSVAEEDDRRLHRERDRLISERIQHVNRIKGLLAIHGIYDYQPLRRDRMQQLERLRTADDRSLPPRLLAEILRELQRLELVIGMIKTIEAERDAIASAKTEEAEHTSPKKIQDLAKIKCLGPEFATALVGEVFYRSFDNRKQLASYVGLTPAHFQSGAMSRDQGISKAGNAKARTVMIELAWLWLRHQPDSPLSVWFRERVGKLKGRIRRITIVAVARKLLIALWRYLENGLVPEGAILKVK

SEQ ID NO: 235167 - protein, 360 aa, unidentified
MNQEKYIGMDVHQATISVAVMDAGGKLIMECLLETKAATIVEFLRGLHGTLSLTFEEGTSAAWLHDLLKPHVSRLVVCDPRKNALLKDGNKSDRIDARKLAELLRGNQLHAVYHGEHGVRTLKELGRSYLTITQDVTRVMNRVKAVYHSWAIPCAGTTVYAPRHRAEWLAKIAEPGVRARAERLYQQLDLLQPVRMEARRELLAESHKHAAVKLLRQIPSIGPIRSALLVALLQTPHRFRTKRQLWAYSGFAVETHDSGEYRSVRGKLQRNRERMTVRGLNDNHNRDLKNLFKSAAISASTRPGPLRDFYVARVEKGMRPTMARLTLARKIAAISLTIWKKGVEFDAQQLQRRICVSTSR

SEQ ID NO: 235168 - protein, 408 aa, unidentified
MDFEENKYISSSFGNNQPGADQLVNMIAECMQKHKNLDTVLIVLESTSVYSVHISNFLSASEVLMPYRPYVFCVNPKATSNYRKSYIGMEKTDPTDAYLIADFGRVGRTKKLEPWRGGQFISLKRLTRHRMHLSECITREKTYMVSNLYLKFSELQLLEGDDKPFGSLYGATSSAVLTEFLSPQEIIDMPEEELLTFLAGKSRNRISDLSKTSELLRKAARDSYRLDKCMYEPLSISLASSFNCIHAYQKEIKLIEQAIEKCINGMNPNALLILQSIPGIGPIWASGILSEIGDITVFHSSDALAKYAGLYWPKGDSGDFTSEDNKMSKAGNPYLRCYLGEAANSVRKHIPEYADFYARKYAEVTKHQHKRALALTSRKLVRLVFGLLVKNQLYTGEKLDTEYNIESN

SEQ ID NO: 235169 - protein, 344 aa, unidentified
MKNLFIGIDFSKEKVDAAIIIADGLNEVAQRVYGEFKTTNSGYNQLVKWVKKHSGDTEESSWLFCGENTGDYSLGLCNYIYGKGLDFWLENAKSIKDASGIRRLKSDRADANMIAEYAMRNHDKAVMYEPLSENLRQLRELFLYRHKLVGKKCSLTVRRDEKKLTMEKSAAKNAIANMGRHLINEFDKSIKKLDDMIKELISSDEELKRIYDIVTSIPGVGTQNAVCLMVYTNNFKKFGYDSRKIACYYGIAPFGKDSGTSVHSDPHVHYMANRLVKSMLTQAALASVKFCPSIASYYIRHIESGKKKMVVLNNVKNKLIHMVTAMVKNGQKYNSEYRNLISVA

SEQ ID NO: 235170 - protein, 346 aa, unidentified
MLHAGLDLSRKRLDFCLLDESGERIEVGATPPDADGLRSLAQRLARHDQPVQAAIESMNGARFVHDQLELAGWQVEIADALKVKGLAPLACKTDRIDAWVLAELCRRDLVPAIWLPDPSVRAERERARFRLHLVRHRSSLKQRVHAALLAHGMPCPVSDLFGVSGRALLERLALPEPWSGTVAASLQLIDELDRQITTCEAELRRLGADHHYVPLLMTVPGIGWVLAYTIAAEIGDIARFPAPRQLVGYTGLCPRVYQSGNSDRRGPLAKNGPRYLRWALIEATAHACKHPLYRDRYQRTKTRLGKQRGGKVAQVDLARRLADAIWHMLTRDQPFAPAGATDPLAA

SEQ ID NO: 235171 - protein, 370 aa, unidentified
MAQGSTLFVGLDVHKETIAVAYVGEEREAEVVSLGTVGTRQSDIDKLIRKLQAKGKTLHLVYEAGPCGYWLYRYLTKKNLQCWVVAPSQIPKKAGDRVKTDRRAAVQLARLLRSGDLTPVYIPSVEDEAIRDVVRAREDVLKDLKAAKVRRKAFLLRQDIRYEGRANWGAAHLRWLAAVVCPTPAHQMVFQEYVRAVSEQTERLQRLEAELQPLVQSWRWYPVVEAIQALRGVQFTTAVTLIAALGDLTRFANPRQLMSYLGLTPSEHSSGERRRQGAITKTGNAHARRVLVEGAWAYRYPAKVSRHLQLRLEHVPKAIQDISWKAQVRLCKRYRRLGARGKHVNQVVVAIAREMAAFVWAIAREVAVAH

SEQ ID NO: 235172 - protein, 407 aa, unidentified
MSYYIGCDWASTAHQFCAIDAQGQIAWQDSVPHTTDGLTALRRQLQRFGAAADVSVAIERPSGLLVDVLLEWGYRVVPIHPNALKASRPRYRMSGAKTDASDALILADLLRTDGHRFRPMQGPADETRALRALVRTRDDLVATRVGLANQLRALLESFWPGAAQIFADVDSPIALAFLERYPTPESAAHLGEKRLAAFLGRNSYTGRRSAPELLDRLRRAPTVTTGEAAAEASGDAVRAVVGVLGPLVAHIQKLTNAIAQAMQVHPDGAIIMSFPRAGCTNAAQILAELGQERLRFQSAEHLAAEAGVVPVTLESGKHRGVTFRWACNKRLRQAITMFADNSRRASPWAAQIYQRALARGCDHPHAVRILARAWLRVMWRCWQSSTPYECGKHRAALHLNPAEPVGA

SEQ ID NO: 235173 - protein, 356 aa, unidentified
MSQTLNTTISVVGIDIGKNSFHIVGHDERGAIVLRQKWSRGQVEARFANMPPCLIGMEACVGAHHLSRKLGSLGHNARLMPAKYVRPYSKGQKNDFRDAEAIAEAVQRPTMKFVATKTADQLDLQALHRVRERLVSQRTGIINQIRAFLLERGIAVRQGQLFLRAELPRILTTPPDVLSPRMARVIEGLSGDWRRLDERIESLSSEIEAIARQDAGCERLMSVPGIGPIISSALVAAIGAGDAFTKGRDFAAWLGLVPRQMSTGDRTILGKISKRGNRYLRVLFVQAAWVVLIKPTVWEHHGLKPWIEAAKKRLHHNVLAIALANKLARIAWSVLARGRAFEVRKIDQAATQPACS

SEQ ID NO: 235174 - protein, 323 aa, unidentified
MSPVVGIDVAKRSFDLAIDLANSKYRTKAKLPNDPKGFQILQTWLQTHAQADSWIVMEATGTYHEALAEFVYGLGYRVCVLNPAQMALYARSQLTRVKTDRSDAKLIASYGQRHAAQLRPWQPDPPALKRLKALVRRRDDLLQMLQMERNRLDVAALVVRDSLLENIGQLQARIAQIERAIDDQIDQDPTLRGQRELLVSIDGIAGTSAALMLAELGDVERFAHASAVTAFAGLNPRLQESGKRQGQVCISRTGSPRLRAGLFLPALVAMTHNPVVRALKQRMRERGKANKQIICAAMRKLLHIDYGVLKSRTPFDPQKTLVC

SEQ ID NO: 235175 - protein, 339 aa, unidentified
MENFVGVDLHKKVSQLATLREPKPASQVRFPNHTVTVEKVLKKLPQGSKIALEATGSWWWFVDLAQRTGHEVVMSHPKQTKAIASARLKSDKVDALMLAKLLKADLLPTVWIPPAAQRYVRELLTHRARLVRQRTSVINELHALYAKRNIDAGMIFHRVRPPAFRAEDLSGYGPRIVEEDVALLGFLNRQVQGLDKELKAIAEKDPESKRLMTIPGVGPVNAVAGSCWIGTIERFSNSKKLSSYFGLAPRVRQSGERERHGHITKEGNRMVRSLLIQAALWHIRRGPMSSRRHYLGVCKRRGKPIARVAAANKLLGIIFQMMKEKIDYEEFLRRGGNAQ

SEQ ID NO: 235176 - protein, 387 aa, unidentified
MTRVVIGMDPHKRSVTIEVMTPDESVLGGGRYGTDEAGFTALLREAQQWPERIWAVEGCSGIGHHVATRLLAAGEQVVDVPPKLSARARVFSTGQGRKTDATDAHSIALVGTRMAGLRPVVDDQQLAVLRVLADRRRTLGEDHTRMVSQLHHLLLELIPGGAKKDLSAAQAKGLLAKVRPRDIAGKTRRRVAAELIADLERIYARKKAANKELRELIEATGTSLLTLNGIGPSGAARLLIDVGDITRFPTKGHFASWNGTAPLDASSGDRVRHRLSRAGNRQINRTLHIMATVQLRNPSQGRDYYDHKKAAGKTSMEAMRCLKRRLSDVVYRHMVGDAVRAMTGPGGHPGATTESSATDSHPDTGSSNKSHPGPAKSEPTTALPAAS

SEQ ID NO: 235177 - protein, 421 aa, unidentified
MLRIVHPVCCGIDVHKKFVVATIAATNDKNVTSYQTRRFNTFKNDLVLLNNWLVENKCKEVCMESTGKYWIPIFNVLEAACNITLANPKYIKNIPGKKTDKRDSVWIADLHKHGLVKGSFIPPKPIRELRDLIRYKSKLTNISSGEKNRVQNSLTVSNIMLSNVVSDTFGKSASAIIQHLIQHPEVSRFDYSSMLHKSLKKKAEDIEKAVAGKFSKEQASKLSVCYEHFNSVQKCIEILEATTLSLSLPFKEQIDLIVSLPGIKPPSATAIISEIGVDMSVFTSDKHLCSWAGLTPQNNESAGKKKSVRISRAGAYIKPLLVQCANAAIKDKSCTVFKNRYEAIKKRRGHKRAIIAIARMLLTCIYHMLSKNEPFNPSIYENNMKPRLKKQQNFRSIEQAIVFLKANGFKINVSDLVVTTS

SEQ ID NO: 235178 - protein, 382 aa, unidentified
MLYLAVDQHRKQLTINLRDEAGDVILKRQVSTEWSRVREFLDEVRNRSVSEGGFVTIVEVCGFNDWFLKLLAEYGCREIVLVQPEKRSKVKTDRRDAAGLGELLWTNRQRIQEGKKVQNVRRIVPPSQRDAEDRQLTAARHRLGRQRTRTINRIQHLLLKYNLQQECPTKKLQTKSARKWLTTLVLGMTDRLELDHLLSQWELYDKQLAELDTKIGERQAQSQAAMMIATIPGAAAYGSLALASRIGSIERFPSARSLAHYWGLTPGCRNSGDATRRLGSITKEGSAMARFVLGQIVVHILRRDARMKEWYQRIKKRRGAKIARVAVMRRLATIIWHMLKHQQPYRLSGKPGEGNDPSCGCVPPDRNAFFNNRPPRYQRALR

SEQ ID NO: 235179 - protein, 397 aa, unidentified
MSNTSTQQQDRVVIAVDPHKASWTAAAVGAGLTPLATLRVPVSQQGYRQLRRFAARWPDAVWAIEGAIGLGAPLATRLSADGIDAVDVPAKLAARVRTLSTGHGRKSDSDDAVSVGIAALTAVGLRSAAVDETITALRALVEHRDDIVRTRTQTINRLHALLAKLLPGGVSSSLDAETAARALRTVRPRTPGPRMLRSLAVDLVGEVRHLDRRIAAATTEISAAVAASGSRLTELRGLGDLTAGKILARVGDVRRFRSAAAFASYTGTAPIEVSSGDTVRHRLSRAGDRQLNCCLHVMAISQIRHEGPGRTYYQRKRAAGKSHKEAMRCLKRRLSDLVYRELRRDAERVDGADPGGHQGATQESSATGSTPTTGSSDKSLPGPAAATLPSHDQDRLD

SEQ ID NO: 235180 - protein, 309 aa, unidentified
MNPVGIDVSKDLLEVATGEGRSRIARNKQNLDELMASLPADTVIAAEATGRYHRMVVQAAADAGREIRLVDPHGFSHYRKSVHPRAKNDRLDAKALRRYAEKESDRLRPAKPSEPQLQRLKDLLELRETQVKLRTAWRQSMSEFEKVPAATKRALESMNKSIADLDKRILEIGQRFELYERLKQMDGVGECLAPALVWLFTDKSFENDDQPVAFTGMDVAVRQSGKFEGKRKLTKRGPAFIRRLLYCASNSLRRNAEFADLFAKHHAKGLRTKGVNVAVGRKILRTAYHLASNPELRYNRAKFLGGVLT

SEQ ID NO: 235181 - protein, 323 aa, unidentified
MKRTTKYVALDVHQASTVASVREEGGRVIARSVLPTDGLALTEFVRGMRGAVHVTFEEGTQAQWLHDLLAPLVDRVIVCDRRGAPRQGNKGDQVDADTLSELLRRDGLRAVYHGGASRATLKELTRAYRNLVEDATRVMLRLKALFRARAIATRGTKVYQVRERAQWLTQLGDRGARFRAEVLYAELDRLRTLHPPVKAAMLAEARQDPAWPVLRSIPYLGPVRVALLLATIGTPWRFRTKRHLWAYAGLAVVTHSSADYTVSGGQVSRRHRAPRTRGLNRNHNRVLKDVFKGAATAATARPGPLQEFYRDLSLGACGRSSPG

SEQ ID NO: 235182 - protein, 341 aa, unidentified
MEQATTIGLDIAKHVFQLHGADAAGHVLFRKRITRVRLLSFLAAQTRCVVAMEACAGAHYWAREIAKLGHHVRLIAPAYVKPFIKRQKNDAADAEAICEAAQRPSMRFVPVKTEEQQANGIVFRARDLLVRQRTQCVNALRGHLMEYGYVFPKGITHVETLVALVEDLQSSLPDSVRIILKLLVDTFTALEAQIAVLDAEINQRSKSDPTARRLMTIPGVGPIASTAITALVPAAEGFPAGRDFAAWLGLTPLQKSTGGKQKLGAVSKRGERTIRRLLIIGASAVVQQASRRGAPKGSWLAQMLARKPKMLVTVALANKTARIIWALLVKGGTYRAPVAAA

SEQ ID NO: 235183 - protein, 320 aa, unidentified
MSVKSVLGIDVSKKTLDVFLMSGSKAEAGKFVNSAKGFKQLIKWLQSNGIKQVHACMEATGSYGKKLCYFLHESGHLVSVVNPLRVKRYGQSDLRRNRTDKSDAKLIADFCLTKKTSLWEPPSAEVQELQALTRRIESLEKMRQMESNRLESAPKQVRTSIKRIIANFDKEIKQIEKLIKKHFDDHPDLKHKKELLESIKGIGDKTAKLLLSEIQFERFDCARQVAAQAGVTPSREQSGTSVNKTKLSKIGNHRLRRALYFPAVSAIQHNRIIKPFAKRLEQNGKAKMQIICAAKRKLLHIAFGVIKNNRPFDPNMAQFA

SEQ ID NO: 235184 - protein, 448 aa, unidentified
MKQKKPIKRKSIKLPKHLQNLNPYAAGIDIGSKSHFVAVPEGADEQSVREFSSFTDDLERLAQWLTACGVTTVAMESTGIYWIPVFEILESYGLEVRLVNARHVKNVPGRKSDVLDCQWLQQLHTYGLLRGAFRPADQVCALRAYVRQRSTLVRSSSSHIRRMQKALAQMNLQLHNVVSDITGVTGMRIIKAILAGERDMKILSAMRDPRCKNSEETIARSLQGNYRQEHLFSLRQAVELYDFYLAKINDCDQQILEQLRIFDASDDNDKPDYKAPKNIGEALQRMSGVNLSDINGIDTNTALKIIAEIGIDMSRWKTAKHFASWLGLCPGTKVSGGKILSSATKQVANKAAAALRMAAFALINSKSALGAYIRRQRARLGASKAITATAHKLARLVYSMLKNGTTFTDAGQDYYEERYRTRVVQNLKRKAQEMGFKLVSIQEETQIA

SEQ ID NO: 235185 - protein, 348 aa, unidentified
MTLYIGVDFHPHQQTACWCDMETGEIKTRTLFHNTDEIKQFYQTMPPSTIGIEATSKATWFENLLFENQHKLLIGDPKLIRKRATSRHKSDNRDAANIFDLLIRDEFPTLWRRTPVSSARLELMRLRHNLVKQRTQTYNRLQALAHAAGLPKGKIRTYLFQARLQRIELSEAFNLQRQMLFEVVANLNQQISQLELWLQAQAAADAQVKLLLTQKGVGYLTALCLIDTIGDISRFTRPTKQVPAFVGLDPVEMSSGSKTKFGSISKAGSPLLRFLLGQATQSVSRYDQKLKAKYKQLSKKKHKAVAKTAIARKLLVKLTIMVRDKITADEFDLRGRTVDNARKVKGLQ

SEQ ID NO: 235186 - protein, 350 aa, unidentified
MIIGVDYHPSVRAIAFLIEETGECGEQELNHSDGQAEKFYRDLKQRGISVRVGMEATGYSRWFERLLAELGFEVWMGDPAEIKAKRVKKQKFDREDARLLLRLMRENNFPQIWVPSPENRDLRQLLWHRHRLVQMRTRIMNQLQALAMNEGYRWKKKLFSEQGRAQLEKLALAPWASRRRQELLELLDRLNPTIEELTAAVEREARKRPEALRLMTHPGVGPLTALAYVLIIGTPTRFERGKQIGTYVGMIPCEDSSAGKQRLGHISKQGSSLLRFLLVEAAQAAARIQPDWRRRYMHLAMRRHKSIAKVAMGRKLAIRLYWMWRNGCEYSPSLEFGSYAGQLGTGHGVK

SEQ ID NO: 235187 - protein, 402 aa, unidentified
MRVVHERCAGLDVHKSSVVACALLPEGKQLRTFGTMTWQLEQLADWLRSLEVPVVAMESSGVYWKPVFNVLEAAGFELLVANARHIKAVPGRKTDVKDAEWIGDLLRHGLLKPSFIPGREERELRELTRYRRTLIEERAHEVQRLQKVLEGANIKLEDIISNVVGLNGRRFLGALIAGDYDPQAVAATANYGLQRKRELLAQGLRGSIGSHQRFLLDQLLSHIDFLEQRITALDREVKQRSLPFEAAIAHLDQIPGVGTRAAEEILAEIGTDMSRFPTHRHLASWDKVCPGNNESAGKRRSGYAGKGNRWLRSILVECAWCASRKKDSYFKAQYHRLAARRGRKRALLAVGHSLLTLIYHLLREGVLYQDLWLQLLRPTRPLTDRSPSSPQAGAPRLSSSAH

SEQ ID NO: 235188 - protein, 439 aa, unidentified
MHRSLVRLSKPETSNRTPSLADFITITFDFRSHGEVDSNRYSGRVRLLPPTLEATMQTVAERPEAPTAIRTDLGAIFVSLELSRSTWLITSLSPGGGEKMSKHVVRGGDVTGLLERFAQLREKTRARTGKVFSFVVIQEAGLDGFWIDRVLQNEGIESHVVDPASIATSRRRRRAKTDRIDGEALVRALLAYKRGEPRVCVMVKAPTPEEEDRRRLCRERKVLIAERIRHVNRVKGLLFSQGISGYEPLRRDRRERLVTLQTGDGRLLPDHLKAQVCRELDRLELLLEQIKAVEAERDVLLAAQQAPAAMLLDIKGIGPEFAAILWSEGLFRHFDNRRQVASYAGLAPTPWQSGSVDREQGVSKAGNPRLRTTLIQLAWLWLRHQPQSALALWFEERVRRNGDRLKKTTIVALARKLLVALWKYVTAGVVIEGAVMKAA

SEQ ID NO: 235189 - protein, 361 aa, unidentified
MANVRSWAGLDVHAAKVVAVTVDGDSGELRSQWLRGVTSEVVAFCAGLPGPTRVAYEAGPTGFGLARALGEAGVGCVVAAPGKIERPAQDRVKTDRRDAERLVRLLMVGGLHPVRVPGTDEEALRDLVRAREDVRGDLMRARQRLGKLLLRHDVRFDDGAGNWTQRHLDWLSRVELAQEAAQLTLHDYLGAIDALIARRSELEAAIGRLLPDSPWADAAARLRCLRGIDTLTAVGLCAEIGDFDRFARAGQLASYLGIVPCEHSTGQARRQGAITKTGSRHARRLLVESAWHYRRPPRRGKILAARQAGQSASVMAISWKAQQRLHRSWQRLDQRGKRRTITAVAVARELAGFCWAIVRTD

SEQ ID NO: 235190 - protein, 339 aa, unidentified
MLIIGCDYHPSFQQIAFVDRETGECGERKLTHKEEAESFYRDLNGRSVRVGMEATGQARWFERLLAEQNFELWIGDPAEIRAKRVRKQKNDRQDAEHLLQLLVEDRFPQIWVPSPENRDLRQLLWHRHRLVQMRTRVKNQVQAIALNEGIRRKKGLWSKLGRVQLESLSLAPWSARRRQDLLELLDRLNPKIDELSTAIQQAAEQRPEVQRLMTHPGVGPITALAFVLILGVPERFQCGKQVGSYLGLIPCEESTGGRQRLGHISKQGNTLLRFLLIESAHAVVRYDPDWRRRFLHLAMRRGRPIAKVAMARRLAVRLYWMWRKAWDYQQTLKFGSHVG

SEQ ID NO: 235191 - protein, 355 aa, unidentified
MNDEKYIGLDVHQATISVAVMDATGKVVMESILETKATTILEFFAGLRGTLWVTFEEGTWSVWLYDLLNPHVDKLVVCNPRKNALLKEGNKSDRIDARKLAELLRGNQLKPVYHGETGVRMLRELSRSYLTIVKDLSRVMNRLKAVYRSWAIPCAGRDVYYRRHREQWLGKIREAGVRRRAERLYEQLDMLQHLRQQARRELLAEGRKHAITARLRQIPYLGPIRSVLAVALMQTPHRFRTKRQLWAYSGLALETRTSADYRFVEGQLRRSRKVVSIRGLNKDHNHDLKGLFKGAATMASVRPGPFHDFYQASLAKGIKPTMARLTLARKIAAITLTLWKKGENFDAEKLKSQAA

SEQ ID NO: 235192 - protein, 376 aa, unidentified
MQDDSTLYVGLDVHKDSIMVAYAVGMSDVELLGKIGTTQIEVDRLCKRLQSKATRIRIVYEAGPCGYGLYRQLMQKGFDSMVCAPSLIPRKPGERVKTDRRDAIKLVRSLRAGDLSAVHVPTVEDEAFRDLARAWSSAREDLKQARCRLKSFLLQHGVNYVGRADWGPTHRRWLSTFSFDSGWQQLAFNEHRRTIEDRLAQCERLETALREAVADWRFYPAVLALQAMRGINFTSAVGLVSELGDLTRFEHPRQLMAWLGVTPSEHSSGGKRRQGSITKTGNSYARKLLVESAWSYRHPARVSIDIQRRHEGIPKAIIDRAWDAQLRLCRRYRKLVAKGKIAHVAIVAVARELAAFIWDIGRLGMAMASPQGGHPI

SEQ ID NO: 235193 - protein, 403 aa, unidentified
MVFLGIDWAEAHHDVCLLDEQGKLLGKRRVVDGLEGVRQLHELVAERVPEPEQVVVGIETDRGLLVQSLVATGYQVYAINPLAVSRYRERHSTSGAKSDPADAKLLADLVRTDRHNHRPLSLDSELAEAVKVLARTHQNLIWSRQRQLNQLRSLLREFYPAALEAFAGDLASADAIAVLERAPTPHQGRSISQGQLVSALRKAGRERNLVVKAAQIQACLRRPQLEAAARLTQAYGRSVTALVRLVRQLNQELASLEQELSASFELHPDAEIYLSLPGLGKVLGARVMAEFGDDRTRFQNPKARKNFAGTSPITKSSGKHKAVLRRFACNHRLLDACYFWAFASLRRSPGAKDYYRRLRARRQSHKQALRALANRLVGILDGCLRHRQLYREKVAWPLLEAAA

SEQ ID NO: 235194 - protein, 389 aa, unidentified
MIYVGIDIAAAKHACCILSEEKKVIKQFTFANSASGYEKLHSALLSPAETKIGLESTGVYGNNLVEFLRRNGYTTHIFNPLLVKKSIQATTLRKTKTDKSDAKQIARYTMEHSQPDQLPSYHISELKSLSRGRFSLVRERSKAKTQAKTLLIQLFPEFSEAFSDMFGVTASAVLRSFPSARALSLCPANVLAEILSQTSRGRFGKAKAEYLIGLAKDSIGTQSIALELELQMLLQQIDLFTAQIAGYEAAIKPIMEEIDSPITTIPGIGYVLGAVILSEIGDISRFSTPAKLQAYAGVDPSISDSGSSVSAPGRMVKHGSRYLRWALCQAARCVSLYDPVFAAYMQSKRNEGKHYCVACSHVAKKLTRVIYSLLKNNSVYSPTYSLLSA

SEQ ID NO: 235195 - protein, 469 aa, unidentified
MSKGSGMTRGDRKRNARREGLRAVLPRDGAVIGIDLAEDKQALAVVDHDVRVVARKTVRVKVFRLGEALDWAVAQARLAGFGRVAVACEPTGPRWMQVQRLCAERGLPLVCIQPLVSHIAREQQDYTPHKADESDCVLIGRLAVELHCYVPEELDETWAHLRHLGRRRAQLITAGTASVQRIRDFLSVAWPTVTEACAHPFGSVTWLAAMQVITSRCGGNPGQLAGAGLAEFTAAVRAALPAWGGQRPCGRVCAAVFAALTDTEGVVTWSRRGLLRRVADELGDLARARAQLAGTEAGMVAVLGELGLSRLGDIPGLSAVGAAAILAETGDPRRYDSSSSLVKHAGLSPSGNASGAVEGQAHISRRGRPGLRLAVWRAAWPALQHNPVLAGKYAAMTAAADGAAQAAARTGPRTRQVSAAAAAARARRASARVACAASLLRWLWCLVVHGTSWDPAVAAGTASTPAQAA

SEQ ID NO: 235196 - protein, 423 aa, unidentified
MKPLCTQPFTAYVGIDWADAKHDICLQAVGSDRRQFDCIPHQMPDIDAWAKALHQRFGGSIAVALELAKGPIVYALQKYDFFVLFPINPLTLAKYREAFQPSRAKDDPTDAELALDLLMRHPERFTPIQPQSAAMRTLVSLTEHRRELVGDKTRLTNRLINTLKQYYPHVLDWFEQRDTVLFFDFLARWPTLAHAKRARLDSLKAFFNAHNSRRSAIVAARLESIRAAIPLTEDRGVIDTCRLHALLLVKHLRVTIDAIDQFEREIADLAPTLPYYYLFERLPGSGEHLAPRLLVAFGENRQRFKGADELQKYAGIAPVTERSGKKHWVHWRWQCPKFLRQTFVEWAGQTINKSFWAGAYYRQQREKGSSHSAAVRALAFKWIRILYRCWKTRTPYNETRYLNALRKRGSPLLRNLLPNAENA

SEQ ID NO: 235197 - protein, 355 aa, unidentified
MPSKADTAVARTIGIDTGKNTLHMIGLDEKGAIVLREKVSRTRIAARFVNLPPCLVGIEAGMASHHVARELVALGHEVKQVPPAYSKPFRQGHKNDFRDAHAVAEAVERPSTRCVPIKTDGQLDLQALHRVRSRLIGNRTAVINQIRGFLLEHGIPVRQGHRFLRQQLPQILATRTDVLSPRMIRIVGDLMADWKYLDERIKGVTDEIEALAHADEGCQQLITVPGIGPIISSAMVAAIGNGAAFCKGRDFAAWLGLVPKQMSTGDRTILGRITKRGNRYLRMLFIQGARAVLLRPASWAKHSFGSWLTAATRRLHRNVLTVALANKLARIAWTVLAQGRRYEARVEPRVEPAAA

SEQ ID NO: 235198 - protein, 319 aa, unidentified
MTTASYTLGLDTSKAWLDAALRPGGQHWREANDDAGFDRIRARLAALGNPASVRIVIEASGGYERPAHEALTRAGHAVAIVNPQRVRDFARGLGRLAKTDRIDADTIAAFGETTRPRTTPLAQPQRARLAEILAYRQQVLDEIAQRTQQAKRITDPQLRRRAELHLDRLRHDRDDLSAEIRNTLRDSPDFAPLARILTSFKGVGPILAATLVAYLPELGSLNDKQIACLVGLAPFARDSGSLRGKRMIQGGRAKIRQVLYVATLAAIRYNPAIHACRQRLALRNKPGKVAVVACMRKIIVILNAMAKSMTPWINHLAHT

SEQ ID NO: 235199 - protein, 309 aa, unidentified
MEHFVGIDVAKDRLDVHIRPSGEAFTVARDSQGLAMLVKRLQALAPALVVMEATGGYEMVVASALGAAQLPLAVVNPRQIRDFARATGKLAKTDRIDAAANAHFAEAVRPAARPIADAQAQALGELVARRRQVIEMIIAERHRRRMASQRRVIRAIERHLALLQAELSELEGDIDGAIRKSPAWQADADLLARVPGIGKATLRTLIAELPELGHLNRRKIAALVGAAPINRDSGTLRGRRTIAGGRPAVRTALYMAALVASRANPVIAAYYAKLRAAGKTGKQAPVACMRRLVVILNAILRDRKPWQPA

SEQ ID NO: 235200 - protein, 407 aa, unidentified
MYYLGIDISKKSFTVSVLDEEGEAITKVLTFPCTSKGFEKLVDKISSLKLKKSQVVIGIEATGNLWENLYSFLQGYKVIILNPYQTRKYHQVLSKKAKTDKVDSLVIAGLLRSKEALASYVPEEEVQVLRELVRLRHYLQKDKKNYLRKAYSLLNLVFPEYTDLIKSPFKKVSSMILKKYPTAVHMARAKRTDLVKMARRIKGNNYSSELAEKLIQAAKESIYSGKASEVRGMALRILIDEIESLKNKIKEIEDKIEEILSSNEPSSPQKRLLGIPGVGPKTVAAFLGEVGDNVSRFSSANKLIGFIGWHPRISESGEKKNLHPKMSKKGPSALRASLYMAAVASLKHNPYLRSLYHRKISEGKESKQALICVGKKILSIMYSMLKYEADYDPQRIFFQLEKEQVLI

SEQ ID NO: 235201 - protein, 353 aa, unidentified
MSRGSRRQPLKKIAADQTALLHLLHRWRDEAIRAGRAIGRIAVAYEAGRDGLWLARWLRQRGIEAYVIHPTSVVVSREHRRAKSDRLDTEQLKRAFLGWLRGGPRHGSMARVPTLEEEDARRPNRERENLVSERTRIVNRMKSALARLAFAASSRPCARCPSSWRDCSLPRVPSCRQNTLAELQRDMARLRFIMEQIREIEAARLARLEQHPEQANPEMILLLARIIGVGIETADMPVHEILSRNLPDRKAVARYGGLTGAPDESGARRREKGLARTGNARVRRGVSQLAWRFLMLQTQSGLAQWYRRQTIDGRGGTRKTMIVALARKLLIALWRLVTTGEVPEGVVLRRPVT

SEQ ID NO: 235202 - protein, 386 aa, unidentified
MRDTTFIPQEYDVFAGLDVSKKSIAATFTSHHGFIRSLQIPHSVESLLNHVRKHFADQKIAFVYEAGPTGYGLYDGLAAHGYSCMIAAPSMIPRAPGNRVKTNRLDSRGLSESLRGGQLKSIHVPCAVYRELRHLTQLRDTMVRQAAAHKQRIKALLLLEGIGFPPAAAGRQWTLRVKAQLRKLSCSGTVRFKLDQLLDTLEFSEKQVLSSTKEIRRFCKEDAELSQSIAYLMSVPGIGWIVASQLLARMGDWREIDNVRQLGSFLGLVPTEKSTGDRVDRGSITRLGDGRLRSKLIQAAWSAIRQDAELREFYRSVCRRNPRGKGARIAIVAVARKLSTRIYAVLKKQRPYIVRDQVHSAPLTQEETSPQGTTRRCPEPGETEDS

SEQ ID NO: 235203 - protein, 357 aa, unidentified
MKEIAPVVTGGVDSHADTDEAAALDERGRLLGTRKFATTSAGYAQLLGWLESFGELDVIGVESTGSYAAGLVRYLRLKEVRVVEVNQPHAHTRRRKGKSDPIDAEMAARRALAGEASAIPKLTNGIVESIRQLRVARESAIKSRSAAMVQLSELIITAPQDLREQLSHCKTLRGKVSLCRRLRPDLAELEQTSHAARLALRSLAKRIEGLEEEIADLDKHLDRLVATAAPRTTQLLGISTGHAGQLLVSAGQNIERLRGESSFAALCGASPIPVSSGRRNRHRLNYGGDRQANRALHMIAVCRLRYCQRTRAYAQRRTTEGKTKREIIRCLKRYIAREVYNALQADLTDLKNLAHTP

SEQ ID NO: 235204 - protein, 328 aa, unidentified
MSKSSFYVGIDVGSKELVAVVEGRKSRSFKHSRAGIKSMVNWAKKITPITPLHFCLEATGVYGYSLACSLHHDHHMAVSVINPAQIASYAKAQLRRTKTDSVDSKVILSFAQSQNPPLWKPESKTRRQLYYLVAETDRIGKALGQWNNRKHSQKYLDDLPKLIKQTNRALERAMRRQLAKIEQAITELCRKDGDLKQEVELLCSIPGISDRSAVRILAFGKNALRDYGRNALTAHAGLAPSQRQSGTSIRGKSRIAKQGDRRLRQALFMPALAAAYHNPILKTFYQKLLENGKPKMLALVAVMRKLLLMIQAILKNKITFNPKYSLDN

SEQ ID NO: 235205 - protein, 398 aa, unidentified
MKRQSELLVAVDVGGQQHSVIVAREHEALEEFEITHNQPGFRKFFARIERAREGGETVWVIVEGAGGWLRPLDQQILQRDYRLLTVQNHKMARFREVFATAAKNDRLDARRACQLLSFHRQYPRERAVCEPVVAIPEVNRRLRLLSRYRRQLVAEKQRLIHRLRAHLQAVAPGLIVMTKRVENLWFLRFLSSRTRLSQLARMRTQSLLKIGGIGPQRCRKIQQWQKQICWGPDADCLHLWVRHDIQRFLQLHEQVQQLEEQLGQLGQESTLYGQLKSIPGFGVVYSSALAGEIGTLKRFASPDSLALYLGVAPVEHSSGRRQGQRRAKLVNRRAKNALCQAVSHHRMEVEQSRRYYQRKYQEKGQRHTKAVRALARHMVRVIWSMAKNNRHYLIQEAA

SEQ ID NO: 235206 - protein, 438 aa, unidentified
MSNKVIFNLDELFISVGIDVGADFSWMSIALPNQQFVGKPYKILHSSMDSLTTAVSKIKEAEELYSLESHIFLESTGIYHYPLFCYLRDKGFNCSVINPIITKNSTNMNIRKVHNDRFDSKKAALVGLKPDLKVSLMPSDLVLDCRNLCREYYDLMDNRSSYVNKLQGELRMAFPQYLGIFSKVTINTSLTLLETYTSPSAFLEADKQEIIDIIKSTARFGLTYAQNKYNAIIQAANEANEFGYIINSNIKRIRLYISFIRKYDEEINRILDAMHELIDSNEDTDFVKQIHLIETFKGAGFLSAVSLMGEIGDFSAFSKPKQLFAYFGLDPAVKQSGKFEGTKIQMSKRGSAIARRVIHTLALQSISTSRTGEAKNPVLRDYYLKKCESKPKLVAIGAVSHKVCNIIFAILRDKKPFEIIAPEEHVKQYNAAKCDIAA

SEQ ID NO: 235207 - protein, 408 aa, unidentified
MKRYYIGVDWGDRLHQVYVCDPEGKKVKESKVAENVEEMAEIGRWLDEQRAEGFELWAAIEKPAGRIVDFLLDHGVMVYPVNPKALDRVRDRYRMSASKSDVFDAFVLAQFLRTDHAHLKVLRPSSEQAQELKLLCRDHRRVVRHKTRLLNQLTNTLKEYYPRPLDAFANIETEIALDFLIRYPTPAHLSALKRREFNRFATQEHTLSKERCEQLWAKLSPAQLPIPQHVVRAKAQLAEVLIEQLRAAIKAVKTYEHKVERFFASSPAALIAKTLPGAKSGTLVASIWGELGDAVGRWESFHHLQAQAGVVPVTKASGKSRVVHFRFACNKDLRYAMYWFAFVSCKRSDWANTYYRQKRAQGHTHAQALRALGAKWLKIIFVMWRDHQAYDEKLHLANIALQKMRQAA

SEQ ID NO: 235208 - protein, 331 aa, unidentified
MREKLRFLGMDVHAETIAVAIAEADGEVRSLGTIAKREDSIRKFIRKLGTPEQLRACYEAGPTGFVLYWQLTQLGVDCAVIAPTLVPKKPEDRVKTDRRDALKLARSHRSGDLTAVWVPDEDSEALRDLVRQREAAKQDQLRARHRLTKFLLRTGQRPPLGLKAWTERYMRWLAQIGYTQPAQEVTRLDCMNEVEHMSARVKRLEEAILEVVKLAPQPMQDVIRGLQALRGVAHVSAVTIASELGNICSRFQSARKLMGYCGVFPSEDSSGNRVRRGGITKAGNAHLRRIVVESAWCYRHLPRVGEKLRKRHEGVPPAIIEIACKAAESPA

SEQ ID NO: 235209 - protein, 412 aa, unidentified
MEVLYPHCTGLDVHKDTVVACVRHMVNGTVKREVRTFKTTTKELLALSEWLAAEKCTHIAMEATGVYWKPVWHILSDGDFALVLANAAHVKNVPGRKTDVNDATWLADLLAHGLIRGSFVPDPQTQEMRDLLRTRKQLVRERSRHVQRLQKTLEDANIKLDSVISDVMGLSGRKMIEALIAGESDPKQLAQLAHRRIKASPEELCEALRGRITRHHRFLLSLHLQQIDAIDAAIDAIDEEVDAQVEPFRTTVHLLTTIPGVDELSACVILAEIGRDMSRFPTAGHLISWAGLCPRNDESAGKRRSTRMRKGAAWLKTTLVQCAAAAARRKASYLQAQFHRLRARRGAKKALGGIAASILTAAYEMLKSGALYEDLGPDHFDKRGKSRHIHRLVHRLQNLGFAVQITPLPTAA

SEQ ID NO: 235210 - protein, 465 aa, unidentified
MRPVQRSQKPQPELPTELQQVNLHAAGIDIGATSHFVAVPSSGDPQPVREFGAFTRDLHQLADWLQSCGVETVAMESTGVYWIPVFEVLEQRGFVVKLVDPRQLKRAPGRKTDVLDCQWLQQLHTFGLLVGAFRPPDQVCVLRSYLRQRENLVRSATREIQHMQKALTQMNLQLHHAPIQIGVTGATGMAIIRAILAGERDPRALAKLRDYRCKNDEATIAKALEGTWREEHLFALQQAVELQDIYQEKIKACDTRIQATLGTFADRSEGAPVPKRSKDKGRKRRALAPAFDLHPELFRLTGVDVTSLDGIESLTALQILSETGIDVSPWPTEKHFASWLGLSPGSKKSGGKMISSRTKSSANRAATAFRMAAQSLHSSRSALGAYYRRMRARLGGPQAITATAHKLARTFYALLKYGHAYVDPGQDAYQRQHRDRAVKALRRRARELGFDLATNQGKLSAVAPA

SEQ ID NO: 235211 - protein, 332 aa, unidentified
MDYELFVGIDISKLTIDVVAFTKTSFPEPVHRIFGNCYDGFGEMLEWLSMFGAAFERALFCCEHTGVYICPLTGFMDANGLSLWVENGLQIKRSIGLRRGKSDRADAVAIAQYAFSNQHRARPYHFPSPTTSKLRHLLSYREQLVRHQTSLKCTSSELRGFDRENAAYCIADTEEILALYAERIKRVDSQLAAVIEGDRELNAQSNLVQSVHGIGKQTAFFILVHTEAFSAFSDYRKFASYCGIAPFPYSSGTSIRGRDRVSSLANKKLKALLTMCALNTIKKDNEFKRYYDRKKAEGKHSMCILNVIKNKLLSRAFATVRRGTPYVPELAP

SEQ ID NO: 235212 - protein, 385 aa, unidentified
MANQNDLSRSLVAFEQDNTIIAVIEMSLNSWLVAGIVPGIERHPLKKLSCDEQMLLQLLYRWRDEAVKAGRMITRMVVAFEAGRDGFWLARWLRARGIEAYVIHPTSVAVSREHRRAKTDRLDTELLKRAFLGWLRGEPEHCSMAAIPSLQEEDAKRPTRERENLVGERTRIVNRMKACLVRFGIRNFNPTLRRATERLNALCTPEGVSLPPNTLAELRRDMARLRFVIDQINEIEAARLQRLERAPAEGPHAMVRLLARVIGVGLETADMLVHEILSRKLRDRRAVARYAGLTGAPDESGSKRREKGLAKAGNARVRRGMIQLAWRFLLFQKNSALSQWYRTRTESAGKKRKTMIVALARKLLIALWRLVTTGEVPAGVVLRAV

SEQ ID NO: 235213 - protein, 310 aa, unidentified
MEQTFIGIDVSKDRLDVYVRPSQACFAVARDGKGLAHLIERLGPLDPYLVVLEATGGFELTVAAALVAAGMPLAVINPRQIRDFARATGQLAKTDALDAKAIALFAEKVRPEPRPVPDEQARALGELIARRRQLIEMMTAERNRRAQLHSRRLVKNIDQLLAMMQKQLSELDREVGNSIRGTPAWRQRDELLQSVPGVGDIVARTLIADLPELGSLDRKQIAALVGVAPFNRDSGKMRGRRTTWGGRAKIRSTLYMAALVASRYNPVLTVFYQRLLRAGKAKKLALTAVMRKLLTILNAMVRDNRRWQNA

SEQ ID NO: 235214 - protein, 347 aa, unidentified
MRFYTQEHRHYCGIDLHTRFMYVCILNQKGEIVLHKNMIAAPEPFLKAIAPFRDDLVVAVECIFTWYWLADLCAKESIPFILGHALYMKAIHGGKAKNDKIDSRKIAGLLRSGMIPQAYVYPAKMRATRDLCRRRCHFVRKRAELIGHIRNTISQYNLPILDLKFERPGSYHEIIAHFPDPDVQRNIKADLEMIRFYSKEISVLDRHILTKAKNHDPDAFHILKTFCGIGPILSLVILYEIHDIRRFPRVQDFASYSRLVKCAKESAGKRMGYSGKKIGNAHLKWAFSEAAVFFLRRNPAGQKYKQRLVSKYGKGKALSILAHKIGRTVYYMLQRKRAFNMEKFLSA

SEQ ID NO: 235215 - protein, 342 aa, unidentified
MRLFIGLDVSLDKTAICVISEHGEIIREAEAASEPEVLSRWLAELDGRVAVVGLEAGPLSQWLHRGLMEAGLDAVLMETRQVKGALNAMPIKTDRRDAEGIARLLHLGWFRPVHCKSVSAQETRAVLGARKAIQQNMIALEMSLRGLLRNFGLKVGAISRGRFEVRIRELADGNPMLETATAPMLRARETLRQELATLEKHVRQFAQDDPVCRRLMTMPGVGAVVALTFRAAVDDPTRFRSSKRIGPWVGLTPSRNQSGERDVSGGITKAGDVNLRRALCQAATVMMNRGRSTWLRTWGAQLAQRRGRKIAMVALARRIAVILHRIWIDGSVFQPDAAPKMI

SEQ ID NO: 235216 - protein, 427 aa, unidentified
MNYTQNHKISQITPSTLIVGIDIAKDKHVARAQDERGMEFGKRLIFDNRIHGFETLLDWAERHRKVNNKNHIIFGVEPTGHYWLNLAYYLTAKGYDFVLVNPMHVKKSKELDDNSPTKNDTKDAKVIAQLIKDGRYSVPNLLEGIYAELREGVKLRDQLIKQLMIIEGRIQNNIQRYFPEFFDVFGDWKGKAALCTLRLFPFPAQIKKMTPEDVLLEWKPFVQRGVGIKRATKLVETAKKSIGIQIGVQFAKREMECLLEQYDLYKEQLAELDKELEALVETIPGAKEMMAIPGLGATTVALFFAEVGDISNYTHPQQLVNLAGLSLREHSSGKLKGQTRISKRGRSRLRRALYLAIRPLVAHNSTFKALHQYYTTRPNRPLKKQQSLIALCCKLLRALFAIGTKQCAFDGSKLLRGLPHLNTLQVA

SEQ ID NO: 235217 - protein, 356 aa, unidentified
METAYDGRQVVGMDLHRRRSVLVRMTEDGRRLGMARIANSPQELRAEIARAGKSPRVVLEATYGWYWAADTLAAAGAEVHLAHPLGVKAFSYRRVKNDEKDAADLADLLRMGRLPQAWIAPAEIRELRELTRYRIKLVRARSSYKEQVHAVLAKLGIPVTCADLFGTWGNTWLDGLSLGQPYAGKVASLRTLISELTAEITLLDAVIAGLLARHDGYHAIQALPGIGPVLAAVIVAEIGDIRRFSRPSRLSSWAGLTPRHRESDAKVTRGHITKQGSPLLRWAMVEAIQHQPAGSPVRDVKDRITARRGTPARNIANIAAARYLLTCVFYALRDGQARSLAARTAVKAATTGKDAA

SEQ ID NO: 235218 - protein, 335 aa, unidentified
MDISYFIGVDISKATLDWAVFDGKTIVLQSQSANSEAGIKATLKLIKGLPNFRVAESVCCMEHTGIYNAHLLTHLHKLSFPLWLESSLQIKKAGGLQRGKTDAIDAQRIAEYAFRFRDQMRLWQPPRPVLQKLAALSSLRQRLILVRRQLQQPLSEQQGFIDAALQKQLSKNCQASLKALNADLDVVDKQINELIKQDSRLGELFEWITSVPGIGPATATEVIVATDEFKAINDPKKLACHAGVAPFEYKSGSSVRGKTRVNQHARLRLKSVFHLGAMSAIRMKGELGDYYQRKVGEGKNKMSVLNAVRNKLIHRVCSVVHRGQKYDKNYMPTLA

SEQ ID NO: 235219 - protein, 424 aa, unidentified
MVQDEDSRLKEFRQLKSEIRESRDYLVVGIDVAKERHYAFFGTAAGKTLLRKLVFDNTDEGFKKLLLHAALLKARHVLGKAVFGLEPTGDYHKPLGEYLITHGHTVVLVGGSAVKRNRELLNGRWDRNDTKDAANVADLIIQGKCLFYEYPSPLVRELRSLLSWKRKLKKLEHASMVRLRNHLVAQYFPELDPYYRCSEGPAIVRWCFDPHEIASLPFSAFARLVSSRSGGEQQKMRLSEIHTKAARSIGCALTPAASFEAEHLLTTIAHVKTMITEIDLAIETVCKRFPEYPCLLSIPGFGPDVSAKVLGAIGNPHRFDNGRQVLRTAGLDLSGDKSGKRNATPMVISKRGKADLRYALYQAALVASTGNHRFIQYFTSKLAGREKEKGIGTKMRVKLAAKLLIIAWTLMKKREVFNPGCIKS

SEQ ID NO: 235220 - protein, 431 aa, unidentified
MKVIYSIACGIDVHKSFIVAVICDSTTLTPTYTKKRFSTFYKDLTKFRDWLLEHDCHNVCMESTGKYWIPVFNILEGYISNVVLTNPKWVKAVKGKKDDNKDAKWICDLFKLGLVQGSFIPEKQIRILRELTRNLFKVTNMRSSEKNRFQNALTVGNCNIDQVFSDVFGKSASAIINLILADKPFTLQDISASLHGRCKATAEEVSDAITGFSLEHVQKQRISLIQAHMEYLDSMIYHFQSLIDSIVSPYEPFITLLSSIPGVKRLSAITIISEIGIDMSPFGSHHRLASWAGLTPGSNESAGKKKSVKISRAGVYLKPCLLQVAHAAIKDNRNPYYANKFNKIAKRRGKKRAYIAIARKILVAIYHMIDTGEFFNPRDLADTETTVKKRIQYTKNNLRNDISSLLNSGLSQEDISILINSMLPNNLQLST

SEQ ID NO: 235221 - protein, 420 aa, unidentified
MERIVERPGALDVHKASVTACVRVWEGRKLIEHIAEFQTTVAGLLALGDWLAALGVRQVVMEATGVYWKPVWAVLEDSFDCMLVNARHVKQCPGRKTDVLDAQWLCQLLEAGLLKASFVPPKPIRTLRNLTRYRKTQIQDRQREAARLHKIPEDTGIKLGCVATDILGKSGRDMLDALVAGTTDPNVLAELARGQLRKKIPALREALVGRFEDEHALVIGQILAHIDFLEEAIDRLSVDIEERMLPFAAQRDLLMSIPGVKQRVAEVLIAEIGVDMSVFPTPKHLASWAGVCPGNDQSAGKRRSGRTRKGSKWLRGTLTEGALAATKTKDCYYAAQYQRLRGRRGHSKAITAVGHSILTAAWHMLNNGELYRELGGDYFTRQDPDKATKRLVRQLEALGHIVTIQTATSTATAGTREAAA

SEQ ID NO: 235222 - protein, 364 aa, unidentified
MNCVILNTELSSLEETRCQFNGGKGAMKLGIDVHQEFYVVVMQEGGTNPKPAQRFEKRAFVAWATRLKQNGARVSAVYEACGFGFGLQRQLSAVGVACYVVCPQKLDERNKRVKTDSLDARALCLKLDRFVEGNRSALALVRVPSEAEEKVRAIHRHREQLVKVRKVLEAQGRSLMVNHGIEPLGNWWKKNRFGQLEVPSWIKELLQNTQPILLGLQEKIAALTLQLQSAANEKQPRGLGAMTSVIIDREIGDWHRFNNRRQIASYTGLCPGEYSSGNTRLQSCVTKHGNPRLRAALVELAWRLVRFQPQYKAVIKWKERLKKGQLTTGAARKKAIVALARQLAIDLWRIRTGRLRAEQLGLSI

SEQ ID NO: 235223 - protein, 347 aa, unidentified
MNYNRQHRFYCGVDLHARTMFTHVLDHKGKTVFEKDLPSNPAAFLRAVKPFRKDLVVGCECMFAWYWLADLCADQNIPFALGHALAMRHIHQGKSKSDKIDAGKLAAMLRGGLFPLAYAYPREKRQTRDLLRRRSFFVRQRGQLVAHVVNTNSQFNLPPLPGKLRYARNRTEDVVERFTDPSTRLMVQSDLALMASYDGRIHELEAYLVRNARVDDAVTFGLLRTVPGIGEVLGLTLLYEVDDIARFPEVGNFLSYSRLVRCEHSSAGKVKGFGKKKLGNAHLKWAFSEAACLMVRAVPAVKSWLARQEKKKGKRKALSILEARIGRAVYYLWRKQVPFDLERFLKG

SEQ ID NO: 235224 - protein, 409 aa, unidentified
MLYVGIDWASDHHDVCLTNDSAQTLAAFRIAHDTEGFERLHCVIKEHQPEPQQVLVALETTRGLLVHDLLRSGYQVYAINPKAVSRYKDRHVVSKAKTDSLDASCLAHLLRTDRHRFKPLVLLPEAYRLLDRLCLDLRKLVDDRTRVVNQINDCLKEFYPQPLELFYKIDSAISIAFLETFSDPNTLLATTKRRFRAFLKKQNYPYLEKADQLYEKIHAPAPEADPVIVQTGKLRLEALLGQFLAVRRHQKVYEQQIRDILRKLPESKPIRTLPGLGKRLVPELVAVLGPRQSHRRFDSARALSNLAGCSPITQASGKWKTVRMRTACVKPLRRTFRHWSFASLTCSKWAWAYYQYRRSRNHLHETILRSLAQKWTKILFAVWANGQAYDEQLHIERLKRHRVAWALFL

SEQ ID NO: 235225 - protein, 309 aa, unidentified
MLTAEADKCKTKVVVNTAAGVQALLAWCAKHGAQPAQLHAILEPTGLYHEQAATALPQVRVSLVNPAQARDFAKALALRSKNDALDSYVLARYGQTLSPALWHPAPLHARQLRALLTRREALSKDLLRELNRKEKSQFSPSAPLVDGSIDKAIAFLREQIKQIERAIDQHIDNHPDLKQDCELLNSIPAIGPQAGNAILAVMHNRHIDSAQSLAAYLGVVPVQRQSGSSLNSCARLSKAGPSQVRATLYMAALVGPRHNPHIRALYQRLLKAGKSKKAALGAAMRKLVHLCFGVLKNRIPYQPNYAMNG

SEQ ID NO: 235226 - protein, 326 aa, unidentified
MYCIGLDVSKSTISVYIPKNNLDLEIENSIKPLKSLYSKLKKIYKKEIDKLIFVYEPTANYSSLLYRFCAQKKVKVFIINPKQSHNFAKAISQRNKSDKTDARMLSKAIAVAKEDEIVTPVIDTLVEDIKEMMGYYKIKVKQRVALSNHLESLNAKGYKTAIAKRLEKEIYELKKGEKEIIDEIYQLIAKDENLLKRYKAILSIDGIGKITAIILIYLFIKYPNANQRQITSLVGLDPTIRESGTSIRGKSHISKAGGRIFRSTLFMAAMVAVKRNEKMEIFYNRLKTNGKHTTVAQVAVMRKLVIIAHSLYKSGQMYDKSRHLSC

SEQ ID NO: 235227 - protein, 361 aa, unidentified
MKKPAQRLIAEVPRRHAKVEMTIGIDLGDVWSHYCTLNPEGTIVDRGRFRTTPKAIEKWFTDLPPARIAMEAGTHSIWISEQLQELGHEVIVANVRELRAISHSDRKSDHADAEKLARFARLDPEILRPISHRTVQQQEALTLIRARAFMVRLRTASVNAVRGLTKACGHRMPASSTRCFAKRSLAAMPPGLSKALGPVLEQIAQMTLKIKQYDLQILELTQTEYPETQALLKVQGVGHITALTYVLTLGNKQRFKRSRDVGCYLGLRPRRSQSGDRDPQLGITKAGNVYLRSLLIECANHILRPRGKDSSLRRWGLHLADRGGKQARNRAVVAVARKLAILLHHIWTTQEPYMPFYAEAA

SEQ ID NO: 235228 - protein, 420 aa, unidentified
MKKRVYKATNVKKINLEKLIQEVEGKEIVLGVDVAKEDFMAAIMDKDRKVIKTIKWKHPFESHLLLDLILSKLRWYSLEVAMEPSGTYGDSLRAQFLGNGISVFRVSPKRCHDAAEVFDGVPSMHDAKASAIIGRLHLDGASEEWPMAEDSQRELTAVIRTMEMFDDAYRRNVNRLEALTMRYWPELTKYLQLQSATLLELLKEFGSPESVAQFSQEAGELMKKTGGTVLKAAKIKAVLESASISLGVKCIEAEREQVRELCREIRRLQKLRRHARSQVEALTQDMDCVKEMTPVIGKVTSAVLYMTLGSMEGYANAGSVIKSLGLNLKERSSGKHKGQLRITKRGSGSARMYLYMAVLRLVKNNTIIKAWYQKKIIRDSGLKMKALVAIMRKLASALWHVGKGEKFDAALLFDSTRLAI

SEQ ID NO: 235229 - protein, 366 aa, unidentified
MKKSSTVRVNGNMIFKGHKLTIGLDLGDRWSCYCVLDEAGEIILEQKLPTTPEAMKQTFERIPRSLIALETGTHSPWVSRLLRELGHEALVAHAQKVQLISKSKRKDDRHDARTLARLARIDPELLGPVRHRSAKAQIHLTVIRARAELVSARTGLVNAARGLTKSYGERLPKCGTKQVSRELAAELSVELREVLEPLLKEIESLNERIKEYDARMEKIARESYPHIELLKQVKGVGTQIALTYVLTLDDPHRFRRSRDAGCFLGLCPGRRDSGQSQPQMHISKEGDRYLRTMLVQGAHYILGPFGEDSDLRRWGLRLAERGGKNAKKRAVVAVARKLAVLLHRLWVSAEVYEPLRNSHKAMRAVA

SEQ ID NO: 235230 - protein, 364 aa, unidentified
MKRKVYVGMDVHKETIQIASLTSKTKDLVKEQQIKHEEVQIKKFIQKLKLEKSEIHCCYEAGVTGYPLYRYLKSLGVNCTIVAPGKIPRQSSDKIKTDKRDAIKLARLLRSGELESIHVPSEEDEAVRDYLRSRDSLRLDLGRNRQRLMKFLLRKGIKYSTTKYWTTSHYKWLNNLHFENEILQTTFNDYYSRVRVQEENLKAMDKKIQEIAESEPYREKVGILRCFRGVDYLTAMFLLSEVNDFKRFKTAGSFMSFLGLVPGEYSSGSKRKQTGITKTGSPRLRRILTEAAWQHRFSGTGSKVVVARRVGQSALVVSLAEKASLRLHKKFKKLQLRGKSPQVMITAVSRELSGFLWAAMNLVV

SEQ ID NO: 235231 - protein, 379 aa, unidentified
MDHAITDTPAETILHGALELSKNSWLLALQFPDRAQPSLYPISGGDTVGLMAKLTAARDRWAKMSGKAPSIVLCYEAGYDAFWLARFLKARGIECLVVDAASMQVNRRARRAKTDRIDVGMLLRALMAWGQGDRHVWSVVRVPNVDEEDLRRSHRERDRLVRERTAHINRIKGLLFGQGIRGINVKSKYKTLQIDKLVTGDGRPLPPRLASEITREIARLALIQEQIATLERERDQAPTPCKTTEKKRLQLVSLNGIGPAIAAVMTREVYYRQFDNRRQVAGFLGLATSPHDSGDVERSQGISRAGRGQVRGTMIQAAWLWLKHQPKSAITRWFVQRTAGQSGRIRRIMIIAVARKLAIALWRFLEQGLVPQGAMLANR

SEQ ID NO: 235232 - protein, 312 aa, unidentified
MEKLSYGGIDVSKDRLDVVVLPEGWFFSVSNDTAGWAELVARLHPLAVSAIGLEPSGGYERGIIRALLAAGLSVRRINPNKLRQFARARGVLAKNDRLDARLIAEYVAIMPTRVVQRDDAVERLAEIVTMRRQLCDEHVAVDNQAAHLEDAMLRRLSKRRLIRLEADIRLLDKRLAEMVATNAAFAQLYELLTSMPGVGPVLAFTLIALLPELGKMSRKQIAALVGLAPYDFDSGKLRGHRSIYGGRMPIRNVLYMAALSASRYNPALKTFSNRLAHANKKSKVIIVAVMRKMITTLNAMLRDNAAWQPQSN

SEQ ID NO: 235233 - protein, 434 aa, unidentified
MSEFLNDFIIGIDVSSEFSVVAMLEPNGSLIRKPFRIDHNPAGFNKLLGILKKEEERLKQKPIYFVESTGIFHLPLFFFLKSNDLKGFVLNPLCVHSTKNFDLRKVKNDAKDAESIARLAKFQDVKYSLVPEPQILSLRMLLREYYAMSDMLTELKNRLCTDLYLLFPGYLDVFSNPFGKASLKILRDYQTPQAILSENPDTLAQMIAKTSRKGLIWGQKKVAKLVEMAQLCLSMPMEFSILSRKIQYHLDGIETFQANLEGLKDELAGMISNVDFPKNIRDSIILLEAMPGIGFLTAATILAEIGDFSRFHSPKALVAFFGIDPGVNQSGKFNGDRNKISKRGTRFGRRVLFTAALASIRTTCKGDPINPVLRDYYQNKCQNKKKKVALVAVMHKLLHYIFAVLRDQKPFEFRSPKDHQSWRNNNHSGLTLAA

SEQ ID NO: 235234 - protein, 345 aa, unidentified
MSIVGGLDIHRKQITFDYLDTVTGQVCRGQVSPADRVHLRAWLARFASRGDVAFALEGCAGWRYVAGELAAAGARAHLAEPAGTAFARGRKRHAKTDKTDARHLRMLLAEGRLPECWIPPGHILECRALLELYNDLRRERTAWAQRIHAVLFHQGAPVLGEGALRTHKGVAALRATAAAHLSPAGQLQVATAVEVIDALEARLHVVRHQLLDAARHLAGAKALAARLYGVGPVTALAITCWLGGTGRFSSSRKAVRFAGLDITVSSSDRKGPPGKLSRQGPPVLRWAVYEAGKAHARTSAPDHRYYAAVKDRKNSKRACLSEARKILRQAHHILAELGDDALAAA

SEQ ID NO: 235235 - protein, 265 aa, unidentified
MTYCIGIDVSKQSLELWDGTQEGEVPNEKGLKTLKKLLKKRYGTNWNKGEFIYEPTGLYSNYLRAFAAEHEVRVVEVNPKKSANFAKVLGNRSKTDVVDAKMLYSFHLLLKESEFSIPEMDEIAEQLGAELGSYEMIQKTRTMPSNHLQSLEYKSGVTRKLKDSLEKELKHLGTMEDELENEMEAYAEDHEATREDLHNLLSMNGTLVISAMSLLYLFRKYPGANRNEITALAGLDPIQRQSGSSLNGGRKISRAGDPLLRYPAQ

SEQ ID NO: 235236 - protein, 441 aa, unidentified
MAMRARDEEIVFPNAAGIDVGASSHWVAVPRHSADEPVREFGAMTDDLNAMADWLLACGVDTVALESTGVYWIPVYEVLEQRGLKVWLVDARQMKYVPGRKSDVQDCQWLQKLMSLGFLRAAWRPEGEVCAVRAVARQREVLLTEQASWVQRMQKALVQMNIQLSEVLTDVMGMTGQAIIRDIVAGQRDPKALARHRNGRVKATAQEITKALTGNWRDEHLFVLRQALAMYDDIARHLAECDAKLQALLTDLGQSKVDLGKAPRAGSKLRQEFDARQTLANWAGVDLTRINGLGLTAVMKILSEIGPDLSRFETVKHFCSWLGLCPGTKISGGKVLSAKTKRSANRVRQALKMAAMSLSHSDSALGAFYRRLCSRMDKPRANTAVAHKLARMVYFMLTRGEAFVDQGQQQYEDQQRQRSVAALKRRAAALGFEINPTMAPT

SEQ ID NO: 235237 - protein, 445 aa, unidentified
MRGERSGEGRVEEVTDEPLYRDRVCGIDIGKAGLVATIRVPSDRDPARRMQETRSFGTTKREVLALADWLRSWQVPAVVMEATGDYWKGPFYRLEAEGFECVLADAKQVKNLPGRPKRDPSDSRWLTACFERGAVTACFVATPEFRIIRLHTRYRRDLTDERTREKNRAEKLLESAALKISSVLTDLHGVTGRDIMDHLIAGERTPKVLAQLARAAARRKISQLEEALEGAEFFTPAHAALLATMLARIDRLSADIGDLTEVIEQLLAPYEEQLAQAESMPGWARRAAQDAIAETGVDMSRFRTGPHLVSWAGRAPQDHQSGKRKGRAKAKKGNRYLGAITGETAVAAGRTQTREGARHRRLVRRRGSAKACVATGNTQLKVYHKLLSNPGMRYEDLGPDYYERQRDVRRQIAHHVGKLGALGFEVTLCRTPEPSPDETGPIQAA

SEQ ID NO: 235238 - protein, 404 aa, unidentified
MNNVTENTKVIYVGIDVHKDTNSFCAYDSREDKLFAEHKSSSKFESTLHYLKNLQKSVGQDAVFLIGYEAGPTGYGLCRKLQKEDFACVIIAPSTIAKAPGQKVKTDRMDARLLAKTLAFKTYSPVCLPSEKLEAIKEYTRVRTAKITMLKKAKQNLLSFLLRMGLPYPQSGHYWTQAHMAWLRTMNFADKWLQESFEEYHAEVITLMDKVQRIEAKILELCKDDEVREKIDALVCISGISYVSAISIVAEIGDFSRFSKAKSFVSFIGLCPGEDSSGNRVRHTAITKAGNSRVRSLLVECAGSLRMHSVVTAKSVRVKERQKNASAAIVSYADKCTLRLRKRMLYLSQKGLPYNLVTTAGARELACFVWGMMNFVDNRKTALNKIDEGELSDIQKTVEEFIAQ

SEQ ID NO: 235239 - protein, 458 aa, unidentified
MEQALAQRNRSIKLKPGKSRAAALTITHPNAAGVDIGSAAHFVAVPADRDDEPVREFPSFTVDLNAMADWLKACGVDTIAMESTGVYWIPLFELLESRGFTVLLVNARHVKNVSGRKSDVLDCQWLQQLMTYGLLRGAFRPADQVCVLRSLWRQRGMLLRSQARHVQHLQKALTQMNVQLANVISDVVGETGQKILRAIVAGERDGQILGSMKNARIHASVDEIAKSLHGTWRAEHLFALKQALAAFDFVGTQLTECDREIEIQLQCLQIHDGEPAKGKQRGRARNAPKFDLRLQLFKMCGVDLTRIDGIDVTTALAVISETGADMSRFPSVGHFASWLGLCPGTKITGGRVMSGNTKRCANRAAQALRLAAAALRTSHSALGAYFRRMCSRMDKPKAITAAAHKRARLIYTMLTRGEEYTDQGQDYYEERYRERALRQLSARAQKMGMRLIAAEQPA

SEQ ID NO: 235240 - protein, 307 aa, unidentified
MTVTIVETPTQARAITGGVDTHAGVHVAAALDPIGGLLGVAEFAASPAGYAYLLEWLGGFGTVCLVGIEGTGSYGAGLARHITAAGIRVVEVDRSDRQDRRRRGKSDPLDAVSAARAALSGRAAGTPKGRDGQVEAIRALMVAKRTARSERIQTINQARSLIVTGPDDLRARFAGHSADDLVAELASLRPRPGSMIRYHTLLSLRELGRRVAFLDGQLQRLDALIVPLVTARAPGLLALYGVGHDTAAKLLIAAGDHPERLRSEAAWAHLCATAPIPASSGKVTRHRLNPGGDRQANHALYRIVITG

SEQ ID NO: 235241 - protein, 471 aa, unidentified
MAAGKGMADGTGVPGHGGDGAEVAEDSTQVVEYAAAIDVAKGSGMVCIRVPGSRAGRRRQVTWPVQATFTAVTALMDHLRCEGIQRLVLESTSDYWRIWYYLAEAAGLEVWLVNARDVKHLPGRGKSDKADCVWLCKLNERGMLRRSFVPPQPVRDLRALTRTRARLAQDQARHQARVEKILEDALLKISVVISDLFGASGRRFLDALVAGERSPAALAALGDKRLRATRTELAEALTGRFRDIHATEIAVHLRLIDAINTEVTRLDEEIGRQLALVPGAEPACAACGLAGGGHAPGCADGDVEVLGLAERLDEITGVGAVNGRALIAELGTDPSQFPTPGHAAGWARLTPRSQQSGQTARPGRTGKGNRYIRGALGQAAMTAARTDTRLGAMYRRIARKRGKQKAIVAVSRVICEIAWILICDPSARYAELGPDYYHPLSAARQTQTKIREIERLNPGKKVILADAGTAA

SEQ ID NO: 235242 - protein, 355 aa, unidentified
MDSKKYIGMDVHKESISIAVMNGAGKIGMECVIETKASTILQFIDGLRGDLQVTFEEGTSAAWLYDLLKPHVTKLLVCDPRKNASTREGNQSDKIDARGLAELLRLNHLSPVYHGEHGLRSLKELVRSYLTITKDLGRVMTRVKAIYRSWAIPCTGKQVYAARHRAEWLAKIGELGVRRRAEFYYQQLDALRTVRQEVRRELLAEAKKHQAWKRLCQIPSIGPIRAAVLLGILQTPHRFRTNRQLWSYSGFGIETHSSADYRSVDGQLRRAKKQSSIRGLNRNCNHDLKNLFKSAAIVASSKPGPFQEFYTTLLTKGIRPEMARLTLARKIATIVLIMWKRGACFDAQHLKPQAA

SEQ ID NO: 235243 - protein, 355 aa, unidentified
MKQVTKLSFKGQSIYVGMDVHKKSWRVSLFTDNFELNTMSIPPSVEVLRSHLHKMYPDAAYYSVYEAGYCGYWIHEKLQKEGIFNIIVNAADVPTTDKEKKRKTDPVDSRKLGRSLRSGELKSIYIPSELKQNDRLLVRSRHDNVKKQTRCKNQIKSVLNFFGIFLSDEKIKTHWSKAYIQWLKSLCKDTSGKSIKLKTLIAELEYFRQTISDLTKSIRALSLEPAYKKYVKLLTTIPGISTLTAMIILTEFGDMKIYNSVNKLSSYVGLIPDEHTSSDNEKKYGITKRGNRYLRKAILESSWVAIRKDPSLYLSYRNYLKRTIAVKSIIKIARKLLNRIRYVLITENEYQLMKS

SEQ ID NO: 235244 - protein, 342 aa, unidentified
MIAIGVDTHKQSLAACAVNELGLAVAERSFGNDTKGHGALLRWAAEFRSRRFGLEGASNFGAGLTRALTEAGEDVREVPAILTRRERRRTGRAGKSDPIDALAVARVVAREPGLPPARAENRARDLKVLVDYRDQLIYERTRTGNRLHADLQILAPGYLGRIRRLVTKTQLRDARELLRSTPGVRAELALMRLGRLEALDREIVELKCRIAAMIEASGTSLTTITGLGPITAAKLLGEAGDIRRFRSKAAFARAGGTAPIPASSGQTQRHRLSRGGNRQLNRALHTVALVQARVDPRAIAYLERKRAEGKTRAEAIRCMKRHLANVVFAVMVDDVSRGVLDT

SEQ ID NO: 235245 - protein, 358 aa, unidentified
MAQGTILDFSGTTLFCGVDVHKRNWSVNIHDGEFELKQFSQDSDPVLLHKYLVRNYPGARYKICYEAGFSGFGAQRYFSDHGIECLVFNAADVATSDKEKRRKNDTVDARKLREHLQSSKAKGIYIPSQSWEHARTLVRTRSKIVGDQTRCKNRIWQLLHFSGLNLPPQFAERQYWSRRFLAALETLDCGGSQQLKASLDLYLAHYKQTRSLLLNATRVVRQLCRQPEYADQIQLLRTIPGIGQVNAAVILFELQNINRFEHFDQLSSYAGLIPDTGDSGDTRITKDITSRANNFLRAALVESSWAVIRQDPALLMKYKEYNKRMNRNKAIIRIAKHLLSRIRFVLKNQQEYVTGVVQ

SEQ ID NO: 235246 - protein, 412 aa, unidentified
MAITCGIDWAENHHDVALVDEAGQLVAKRRVNDDAEGYRQLLGMLAEAGDSLQDPIPVAVETARGLLFACLRATGRKVYSINPMAVARYRERYRVGRAKSDHADAMALANILRTDADVHRPLPADSELAQAVSVLARAQQDAVWNRAQLNNQLRSHLKQYFPAALAAFQVRGVGLDSREARTVLSAAPDPATAARLTRTQLRSLLRKSGRQRNIDTWTDRLKSVFTSDCLRQLPLVEEAIGRQTAALVLQLDAACQAADDLAAAAAEAFAQHPDNEIISSFPGIGPLTGARVLGEIGDNRSRFRDARALKAYAGAAPITVASGKSHAVHHRRVKNQRLAAAGYVWIFGALPSPQVKEQYDRRRARGDRHTAAMRNLFNRLLGCLHHCLATRQNFDPAKAFPALATTAGPAAT

SEQ ID NO: 235247 - protein, 333 aa, unidentified
MSTTMNLPSTPAAGQAVYVGIDVSKDKLDLARSGSDAVETFSNDAAGIARIVALLTPLKPAVVVIESTGGLERPLVQALLEADLPAALVHPARVRYFAKGLGILAKTDRIDAVVLRRFGELAAPRLLEKRSKNQGELRDLVACRRQLCATRAQQYNRRSTTASKAALKSIDAVVKTLDKQIDSLDGQIRDLLDADDDFKHLDQLLRSVPGVGPTLSATIAADLAELGHADRQRVCALAGVAPFADDSGTTRGRRSIRGGRTDLRCVLYMGTLAAIRSNPVIKTFAQRLRAAGKLAKVVIVACMRKLLTLLNAMIRDGLRWDQLDVVKKLSTTH

SEQ ID NO: 235248 - protein, 391 aa, unidentified
MIYAGIDVAKDKHDCFITNSDGEVLFKSFTIPNNREGFETLFQKIQSVSDDLTKVKVGLEATGHYSYNLLGFLLDKGLPTYVINPLHTNLYRKSLSLRKTKTDKVDAHTIASMIMSDVNLKSYSDTSYHNEELKSLTRYRFDKVKARAKLKSSVSRLVCILFPELEKLVPTLHMVSVYSLLSEFPSAHAIASAHLTRLTNLLSESSRGRYGKDTAICFRDAARSSIGSHIPAKSLELKHTIRLILELTSEIDEIEAEIKTIMDEINSPILTIPGISYKMGAMIIAEIGDFSRFDSPDKILAYAGMSPSIYQSGQMDNCYAHMEKRGSRYLRYALYNATKYVCHWDESFGTYLAKKRAEGKHYNVALSHATKKLVRTIYAMEKSGQAYTNAA

SEQ ID NO: 235249 - protein, 423 aa, unidentified
MNKDTLNTLFVGIDVSSKSNYVVAINFNGDSLLDFSVPNDLPGAELMLDRILSVLQDNNLSFVTIVIESTSVYSFHIANFLASNNSLFDFCSKVFVINPKTSSNFRKTYVDIDKTDPLDAFVLADMARCGRINQQPHKASQLFALQRLTRQRFHLVKTISAEKAYMLTNIYLKYSSLCTSYKEDKPFSNLFGNTSSNLIVDFSPDDIVNMSEDDMINYILDKGKNRFSDPLKNVDLFKKIARDSYRLDQVAYDPINISISSSFNTINALQSNLKTIDKAIEKNIKGLCDNEYNILLSIPGIGPVFAAGILAEIGSIKFFKTNNELAKYAGLTWRKTQSGNFEADTTRMTKTGNKYLRYYFIEAIAHVKSQIPEYKQFYTRKYNEVTKTPHKRALALTARKFVRLVFGLLHHNQLYSDEKSVNS

SEQ ID NO: 235250 - protein, 381 aa, unidentified
MKKLLYIGLDVHKESIAVAVAESGRNGEIRSLGKMSNSLHALDKLIARLRKQYGADVKLHFCYEAGPCGFVLVRRLVQLGHECIVVAPSKIPRGSGDKIKTDRRDAEKLAKAHRAGDLEAIYIPEATDEAIRDLCRARTDAVDDQRRARQRLKAFLLQHGYAYQGKGHWGQAHMRYLRELVLPHPAMKAILEEDLMAVTDAGARVARCEAAMKDLLETWRLKPAVEALMAFKGFQIVAAMITVSELGALPRFDHPRQLMGYLGLIPSEATSSKKRRQGAITKCGNPHARWLLIECSQHYATPPKVSKELSRRQEGQPAGVLKISWSAQNRLHRRLMHLLARRVHRNKALVAVARELIGFIWEALRDLPCYQSEPLAEHRAA

SEQ ID NO: 235251 - protein, 366 aa, unidentified
MKKTSTVQVNGNMIFKGHKLTIGLDLGDRWSFYCVLDEAGKIILEQKAATTPEAIKQTFAKIPRGLIALETGTHSPWISRLLTELGHEVIVAHAQKVELITKSNRKDDRHDARTLARLARIDPELLGPVRHRSAKAQIHLTVIRARAELVSARTALVNAARGLVKSYGQRLPKCGTQQVSRELAAGLSKELREVLEPLLQEIESLNERIPEYDERMEKIAQEVYPEVFLLKQVKGVGTQIALTYILTIEDPYRFAKSREVGCFLGLKPGRRNSGNSEPQKKISKEGDRYLRTMMVQGAHYILGPFGEDSDLRRWGLKLAERGGKNAKKRAVVAVARKLAVLLHRLWVSGEVYEPLRNSQKAMRAVA

SEQ ID NO: 235252 - protein, 362 aa, unidentified
MRIIGCDLHARQQTLAMLDTNTGEVVELTLKHEGDNVREFYSSLPRPVRVGIEATGSMQWFVNLMEELGIECLVGHPATIRAAEPRKQKHDRRDAELILKLLVEGRFPAIWLPSKELQDLRSLLRHRHQWVRMRTRIQNALQSIALANGLRRGPALWSHDGQSRIASLPLAPHTAYRRSELQAMYEKFEAEIEKLNQRVEEQASKRPGARLLMSHPGVGPITALATEVFLGDPARFADSKALASYVGMIPREYSSGGRQRLGGLSKQGNPLLRFLWGEAGAHAARKDPELQRFYRRKLVQKGLGKASVAVARKLGIRLWIMLRDPIEYHEFCRRGQKQQKSSDACAGMPETPYGAKSHRPVD

SEQ ID NO: 235253 - protein, 402 aa, unidentified
MNAVGIDVSKGKSMVAIMRPFGEIVSTPFEIKHTSSDINSLVKLIKSIEGESRIVMEHTGRYYEVLAHQLSEANLFVSAINPKLIKDFDNDSLRKVKTDKADSVKIARYALDKWQNLKQYSVMDELRNQLKTMNRQFGFYMKHKTAMKNNLIGILDQTYPGVNTYFDSPARSDGSQKWVDFASTYWHVDCVRKMSINAFIDHYENWCKRKKYNFSKSKAEEIYGKAKELVPVLPKDDITKLIIKQAVDQLNSASITVESLRTLMNETASKLPEYPVVMAMKGVGTSLGPQLMAEIGDVSSFTHKGAITAFAGVDPGVNESGSYEQKSVPTSKRGSSDLRKTLFQVMDVLIKTHPQDDPVYQFLDKKRAQKKPYYVYMTAGANKFLRIYYGRVKEYLASLPES

SEQ ID NO: 235254 - protein, 346 aa, unidentified
MLYAGLDLSRKRLDFHLLDAEGATVEVGAAPPDADGLRGLSERLARHGEAIRAAIESMNGARFVHDRLELAGWQVEIADAQKVKGLAPLACKTDRIDAWVLAELCRRDLVPAIWLPDPLVRAERERARWRLHLVRHRSSLKQRVHAVLLTHGKPCPVSDLFGVRGRQLLARLGLPEPWQGTIEASLRLIDELDREIGDCERELRRLGADHRYVPLLCTVPGISWVLAYTIAAELGDISRFPTPRKLAGYTGLCPRVYQSGERDLRGPLAKQGPRYLRWALVEAATHACTAPVYRDRYQQTKARIGKQRGAKVAQVDLARRLAEAIWHMLTRNEPFAPAGATDPLAA

SEQ ID NO: 235255 - protein, 371 aa, unidentified
MNTIVYVGMDVHKESYALCCYCYDTDKVEYRQTIPSDYRLILKYMERVRNRYEGEVSFVCGYEAGCLGYSLYHQLKEHEVDCKILAPTTMAITNTNHVKTDRKDAANIARCLAFHTYSEVYVPDENDDQVKEYIRMRDDQKLALKKVKQQILAFVLRKGKHFDGGKTYWTLAHLKWLKDLELEGLDKETLSEYLITYDYLVEKIERLDKRIEELASRDRYQEKVKNMGCLLGIKTHTALSMIVEIGDFERFEKASKFAGFLGLVPSEDSSAEDINRYGITKAGNRHLRRLIVEAAQSYTRGAVGHKSIALKKRQEGCSPEIIAYADKANERLRRRFYRLTLSKGVNRNKATTAIARELSCFIWGMMTGNVA

SEQ ID NO: 235256 - protein, 346 aa, unidentified
MTIVDSRAITGGVDTHADSHVAAALDPIGGLLGVESFATTPDGYRQLLSWLGAFGEVDLVGIEGTGSYGAGLSRHLQAAGIRVVEVDRADRQDRRRQGKSDPLDAVSAARAAQSGRATGMSKGRDGAVEAIRTLMVAKRSAKSERTQTINQARAMVLTGPDDLRIQLAGLSAAEFVAKVASLRPRQGEIVDYATRMAVRELGRRVEFLDEQLKRLDELIVPLVKIQAPVLLTLLGIGPDTAALLLIAAGDQPDRLRSEAAWAHLCGVAPIQASSGKVNRHRLNRGGDRHANHALWRIVITRMSSDLPTRSYVERRLKEGKSKMEIIRCLKRYVAREVYPYLRPGAD

SEQ ID NO: 235257 - protein, 343 aa, unidentified
MEVAIGIDSHKGTLAAASVDALGRVIDVREFNNDPKGHRSLLQWVNRQGRPRRIGIEGALHYGSAAASRLLGQGEDVREVSPSLTHVERCRRSKGKSDPIDAVAIARVVAAEDTLPSARRTALLVDLRLLVDHRDQLVRARTQVANRVHADLVVLHPGYEETVPNLRARQHVARARSLVVKDRSVRAELVRHRLRDILRLEAEIAEANHRIADRIREVDTTLTQISGVGPLIAAKILGEVGEVSRIRSKASFALLSGTAPLAASSGQTHRHRLNRRGNRQLNWALHYIALVQSRTTPEAKAYLTRQREAGKSSKEAMRCLKRHLSNVVYRHLLMDGRRLEQAA

SEQ ID NO: 235258 - protein, 345 aa, unidentified
MTIVEAGRTVIGGVDTHLDVHVAAALDPIGGVLGVESFDATPQGHKALFEWMGAFGTVSKVGVEGTGAYGAGLGRFLKGAGVEVVEVDRPNRQVRRTSGKSDPVDAVEAARAVLSGRATGTPKSRDGNVEAIRALLVAKRSAREGRLRAIAQMRHLSYTAPDQLRCRLKGLSIKRFVAEAAAMRPRVGSDPVVYATKVSLSTLGRRVLAFEEETAAIDELLDELVTATAPQMLALFGVGLDTAATLLVTAGDNPKRLHSEAAWAHLCGVAPIQASSGKVTRHRLNRGGDRHANQALWRIVMTRISADPRTREYMERRTKEGRSKREVMRILKRYVAREVFKHLPR

SEQ ID NO: 235259 - protein, 317 aa, unidentified
MKQIKTSTKYAGIDVCKPRLDVAVHGADDFVQLANQASGFTELIAWLRARGVVRVGLEATGGYERGVTAALNAAGFEVVMHQPLEVRLFARLRRLRAKNDKIDARLIAAATAQVETVRAAGDPRLADLAERLSAYEQVTDQAAQMKTFMEHVTLKDVARRLRREIASLERLKRTLADEILAAIKAHDDLFTRFQLLKSLPGVGPVVAATLVVRMPELGQMRKGQAASLIGVAPFDRDSGQYKGQRFIYGGRARPRRMLYLAALAAKRCNCGFKAFAQHLIDRGKPPKVAIVALMRKLIEAANLVLARGQPWTANAPA

SEQ ID NO: 235260 - protein, 418 aa, unidentified
MSKESMKKQTVGRLWAGLDWGGSEHAVSVVNEERRLVDQFKCGVGLKELEALARRLKGLGEVAGIAIESTANPVVQYLSLQGFTIYPVNPKLSKNWREGFSVAGVKSDTRDGHMLAVELSRRHESLTALKQEDPAAAELAGLCETVRALVEQRSALVQRLKAVLGQYYPGVLDFFTDWTSPVAWRFLNRFPEPEALATARKATLIGFLKANQIGLKPVWLERIDARGDAAKWPRPANSAALQIMALATTAQLLALQPRIDQCDRHIEEQAKKMPQHKLLQSLPGAGERMAPALTAIAAIAMGDEDALHALRCLAGVAPVEDKSGKRQKVHMRRRCNKHWRNVMHLFAFCSTNWCPWARAYYDILKERGDSHAGALRKLADKWLKIIQRMLQTKQPYDEERYLQALKKKGSPVYQRLCG

SEQ ID NO: 235261 - protein, 422 aa, unidentified
MSQKPEIQYAAFLAIDWADQKHVWSLQDANSSKCERGEVDHMPEAVEAWVAQITQRFAGRPIAVAVEQSRGALVFMLSKYEQLHIFPVPPAMTANLRKAFYSSGAKTDPADADLLLDLLQRHREKLRRLSPDTEATRLIQNLVEERRKLVDEKTAQSNRLEAHLKIYFPQIPRWFDDVGSPLVCALLERWATLEALQKARPETLRSFFRKHHSRKEELIESRIKAIGEAMPALKDRAVVEAKAAVVKVSVQMIQVLQEGIEGLNRQIQEAAEAHPDFFIFDSLPGAGAVMAPRLLAAFGSQRERYQNAAEVQTFAGIAPVTESSGKSTWVHFRFACSKFLRQSFHEWAALSILRSQWARAYYELQCRRGKKHHAAVRALAFKWIRIIYRCWKERVAYDENVYLAALAKHNSPLVAATKAVAL

SEQ ID NO: 235262 - protein, 321 aa, unidentified
MTYVGIDVSKVTFVVAYSSVKTNKTRTFKNTVNGVHEFVQTISASEHNCVLEATGNYSALLVYLLSEAGITISLENPLKIKNFARVMLTVTKTDEIDARLIALYGEKMQPAPYKLRSDAILVLKQKRTVLRQLKKQLVATRNLKGSMEVLPFFDPKCKKTIEKTITFLEKQIKEMEEELASLAQGEYKKQMDLLTSIKGIGVTLAAALIVATGRFSYFDNAKQLTRYLGLSPTYQQSGTSVNVKGHINRNGDSSLRSQFYVAAFSSLRCNTECKACFDRLRSNGKPGKVVVIAVANKLVRQAFAVVTQGKPYVDGFKSEKP

SEQ ID NO: 235263 - protein, 345 aa, unidentified
MEIHTIGIDLGKTVFHLVGLDARGEVVVRKKCSRDQILRFTVNLQVSLIGMEACGGAHFLARALREQGHDARLIPAKYVKPYVKTNKNDYIDAEAIAEAVGRARMRFVPIKTDDQLDLQSLHRVRERWVSARTAVINQIRGLLLERGITVRKGRSHIEESLPGILEDADNKLTGALRALLSQLRLEMQYLQRQIDECNKSILRISDELEDCRRILAVPGIGPMTATATIAAIGNGSAFKKGRGFAAWLGVVPGEHSTGGKQTLTGTGRRGNRYLRKLFIQGAHAVLQQRMKQSNGLNTWLAQLTSRKRIQVAAVAMANKMARMVWAVLSKGEAYRPPLLAGTVEA

SEQ ID NO: 235264 - protein, 335 aa, unidentified
MSLYCGIDLHSTNHLVVITDEEDRRVLEKRLANELSITIDTLSPYRDELAGIAIESTFNWYWLVDGLEDAGFSPCLVNPAAIKQYEGLKYTDDPYDAFYLAKLMRLGILPTGHIYPREQRGVRDLLRRRLSMVRMSTGLLLAVQSQIWRSTGVNISSNRIRQADFELPLLQGPVYEGAAGQWRLFQRTQDEVQRLEKLALELYRGEENYQLLQTVKGIGVILGLTIGLETGSISRFNSAGNYASYCRCVNSERISNNKKKGENNRKAGNRYLSWAFHEAAHFALRFEPKVQRFYERKRQKRNRIVAIRAVAHKLARAVFHMLKHHQRFNVDRAFG

SEQ ID NO: 235265 - protein, 421 aa, unidentified
MNKRIYRATHVKQVNWRKAIQNTAGKALVLAIDVAKEEQFAMLMDAESQAHITVKWRHPVETPELLKHLTTLSSQQLEVAMEPTGIYGDTLRRQLALAGYRTYQVSAKRVSDAKEIYDGVPSLHDAKAAYLIGRLYWSGVAQPWRESSAQQRELKALCNRYELHNEHYGRNRNRVEAMLQRHWPEALVYLALDSVTLEYLLIRYGCPQALARDSTAAAALMRKVSCGKLAPEKIHGLLEDSRNSIGIPCVEEERRYLQQLGEELRRSRLHQKTVRKQLQGLIDADEQLQAMSAVVGPLTTAMLLSNRLDPRHYGNAGAYRKGMGLNLKEKSSGKFKGQLKLTKRGSGQVRKYLFFSCLRLINHDPIVQRWYQAKVQANGNRGKLRYVVALMRKLACALWHVGHGEAFDARKLFTVKPVVSA

SEQ ID NO: 235266 - protein, 355 aa, unidentified
MLNTKYIGMDIHKETISIAVMNVAGKVVMECVIETKANTVLQFIHGLRGDLHVTFEEGTWAAWLYDLLKPHVTEVLVCDPRKNALLKQGSKSDKIDARKLAELLRLNHLKPVYHGEHGVRTLKELARSYLTITQDLTRVRNRLKALYRSWAIPCSGTQVYAPRHRSEWLGKITEAGVRRRAEHFYQQFDALRPLRQEVRRDLLTEGQKHKAWKLLRQIPGIGAIRATLLIALIQTPHRFRTKRQLWNYSGLGLETHDSAQYCVVEGQLQRSKKPLMLRGLNQNHNHDLKAIFKGAALEASSGAGPFHDFYEALLTKGRKPSMARLTLARKIAAITLIVWKKEASFDAKHLKQQPA

SEQ ID NO: 235267 - protein, 343 aa, unidentified
MEITTVGRDVAKQVFQGHGVDTRGQIVVRKQLRRKEVVEYFTKLPSCEIGMEAGSSSHYWARRLSGLGHRVKLMAPQFVRPYVKTNKSDARDAEAICEAVTRPTMRFVPIKTAEQQAILALHRARQGFVKARTAQANQLRSLRAAFGMVLPQGIHVLLREVPAMVSDEENGWLASVRDLFTRLLAHVKDLDRQVSELEHQILHWHQGKERSRKLEKVPGIGPLTASALVATIGDATAFPHGRQLAAWLGLVPRQHSTGGKPRLHGISKRGDVSLRTLLIHGARSVLRFAARHADPTTKWLQGLQARRNANIAAVALANKQARIVWALWAHDREYQADYAGTSS

SEQ ID NO: 235268 - protein, 367 aa, unidentified
MMIIGCDYHPSDQQIAFVDQETGECSERRLNHSEGEAEKFYRDLQQRGVSVRVGMEATGHARWFERLMAELGFELWIGDPAEIKTRRVRKQKTDRQDAQLLLKLLLEDRFPRVWVPSPENRDLRQLLWHRHRLVQMRTRIMNQLQAVAMNEGIRRKKALWSKSGRVQLESFSLAPWSSRRRQDLLELLDRLNPTIDQLSAAIAQEAEKRPEVRRLMTHPGVGPLTALAFVLIIGSPERFRCGKQIGSYVGLIPCEDSSAGHQRLGHISKQGNSSLRFLLVEAAQIAVRHDPDWRRRFLHLAVRRERRIAKVAMARKLAVRFARGAAREGPWCEVDHCLFDWAPRSLKREIEEVIMVEVLIGEMVGSD

SEQ ID NO: 235269 - protein, 420 aa, unidentified
MQSAPPVLPGAPANGVTCGIDWARDDHAVCVVDAAGRAIHRWIVEHTDAGLRGLLARLDRLGVAEVAIERPDGPVVDQLLDAGLVVVVISPNQLKNLRGRYGSAGNKDDRFDAFVLADTLRTDRARLRPLVPDSPGTVALRAACRARKDLVGHRVALANQLRAHLQRVFPGAVGLFTHLDSQISLRFLTRFDCQDRADWLSPKRLASWLASVGYSGRIDPTVLHARLTAAPRGTTGEHGTATAQITRALLAALASIVAQIKVLSEQISEQLDAHADAHIFTSLPRSGTVRAARLLTEIGDCRARYPTPEALACLAGVAPSTRQSGKHRAVTYRWAADKQLRDAVCDFAADSRHANPWAADLYHRAIARGHDHPHAVRILARAWLYVIWHCWQTNTAYQPENHNALQRVLTQQSKINTEAA

SEQ ID NO: 235270 - protein, 315 aa, unidentified
MQTPVDIGADISKDYVMVSCATGSFPSLRLANRRAALSAWLKRLPAGTRIGMEATGTYHELLATLAHRLGLVVYVLNAKHVHHYAQATAQRGKTDRVDAELIARYVAKEHSHLHIWHPASPAQRQLQRLMRRRGKLTRARAALRSTLQGVPSLRTDVRVLLKHFDALIAKLDTQARALVKASVEREQAFQRLDAIPSVGSAVGIGLLAALERWSLPRADSFVAFIGLDPRPDDSGKRSGRRRLSKDGDPELRRLLYTAAMSASRTRVWAPVYQRALARGLSRIQALVILARHIARTAWSVYTHKTQFDPARVHSS

SEQ ID NO: 235271 - protein, 294 aa, unidentified
MIIVECDDHPGFQQIAFVDTDTGELQERRLQHPEEAEPFYRDLAAHGIKGRVGMEAGGHARWFERLLAELNFELWIGDATEIARKGEREQKTDRQDAQHILKLLRKDDVPKIWVPSWENRDLRQLLWHRHRMVQARTRIMNQLQAVALNEGLRCKKRLWREQGRQQRESFRRAPWASRRRQDLLELRDRLNPTIGELGQAIEQEAEKFPAARGLMTHPGVGPLTALAFVLIIGRAERFQCGKQIAAYLGLVPLEDSSGKRRRLGQITKQGSSMVALLAGGSGAGHSSQPSRMAQ

SEQ ID NO: 235272 - protein, 392 aa, unidentified
MLFVGIDIAMDHHDIAFMDGFGEITNHHLTISNDLVGYKKLHTEILSCMKSVDTVHIGMEETGIYHVNLRDFLIDQDFKVYTINPLLTSFSRKAASPRRTKTDKIDALAIAKYIMQNWRSLHSYTPSLYHYEALKKLMRLYTTKRKLLSKSKSELKRLLQTVFPEFKKLLNPFNKGSLDILLHYPSPHLIKSARLSSLANKLSTHQDHLTHAKALKDAAAHTIGQFDQVSSFLIKSEITSLIHYQTQVENLKELIILKMNDFSQIMTMPGIGPITGATILGETGDIQRFENKHQYFAFFGIDPVVHESGQYKLKKSRLSKRGNVYLRTAIYLAASAACVSPKVGDSKFRRKYLSMISKNNKHYYTIIFAVAKNMVHSIYAMLKSGENYDDKK

SEQ ID NO: 235273 - protein, 418 aa, unidentified
MSKSKSQKSKSVNNETMIVTLDIGKGSHYGYFRAPDGQDVEPFAFYHSYDSFHSFWKKLCRFKRAHGCKQVLVGFESTGPYAEPITHFLKQRPVTLVQINPMHSKRVRELTGNSPNKTDRKDPRVIADVIMLGHALRVVIPQGSSAHLRRLTQARERAIRDRTAILNQLQHLLFVIFPEFLQVIKNISCKTGLYLLGHYPTRQAIAVLGEEKLSTIIKGVSRGKMGQGHARELFQSAQASVGINEGQESIVEEIGHLVDKIGKENDFIDRLECQMRSHLEQVPYSSCLLSLPGVGLITVAGLIGEVGDFRQYRTTAEITKLAGLDLYEVSSGKHQGRRRISKRGRPLMRKLLYFAAINTVKSTGVMHQPYTRMVERGMPKTKALVAISRKLLKVMYALARDQSMYMENFVSHRYQFAA

SEQ ID NO: 235274 - protein, 316 aa, unidentified
MDRTQQFVGIDISKTRLDLAIYPQDVVESVAYDEPGISHVVNHLQALQPTSIVLEATGGFERRVVRALAAAQLPVIVVNPRHVRDFAKATGQLAKTDTLDARVLARFAEAIRPALRPVPDVAMEEARALLARRRQLIDMLPAEKNRLERAASPVRPRIQRHIIWLTAELKRVDADLDASIQRSPIWQTQNDLLQSAPGVGPVMSRTLLAELPELGTLSHKQIAALVGVAPLNHDSGTLRGRRHVWGGRASVRAALYMAALVATKWNPAIRRFYRHLREVGKAPKVALVACMRKLLIMLNAMLKHQTPWRAEVVLAS

SEQ ID NO: 235275 - protein, 357 aa, unidentified
MEQRNKISFKGQNIYIGLDVHLKSWSVTILSETSVLKKYSQDASPEALHKTLTMSYPDAEYYSVYEAGFCGFWIHDRLTELGIHNIVVNPSDVPTMSSEKLRKTDAVDSKKLAVCLRAKQLRGIYTPDAEALEIRSLIRLRNSITKDTTRQKNRIKSQLRYLGIDIPKEYLEPHSNWSKWFIAWLKDVQMKTTSGRQTLDLQIRQLEDLRRQKLEITRALRKLSHSEKFEDTLRLLMTVPGIGQTTGLALMAEIVDVTRFANAEQLAAYVGMIPMCHSSGEHEGVGDITLRKHAILRSNIIEAAWVAIRKDEAMQLCYLNNCKRMVPSKAIVKVARKLVNRIYFVLKHHEPYVNAMA

SEQ ID NO: 235276 - protein, 316 aa, unidentified
MSDALYVGIDVAKDSFDVASDPAGLALALPNDPTGRQHLLDALRNHTVALTVMEATGGYERALVADLIGAGHKVVVANPRQVRDFARGIGQLAKTDRIDARVLAQFASMVKPEPRQKTSEQAVILAELVTRRRQLSDLMTQEANRLPHARHPDVRRSLKKSLRALERQIDDLDKLIRKNIDSDDGLRRKDEIVQSFKGVGPGTSAMLLSHLPELGQINRQQIAALAGLAPWDFKSGKWAGQSKIWGGRMPVRNMLYMAALSAIRWNEVISKFYQRLQSQGKKFKVAITACMRKILVILNTLVRNDCLWSPSLTKNA

SEQ ID NO: 235277 - protein, 343 aa, unidentified
MRVIIGVDPHKATHTAVAISGREEELDRKKVRAGGAQVEQLMSWAAPFQPRTWAIESAGGLGYLLAQQLVAVGETVVDVPATLASRARLLSSGRSNKNDPNDALSVAVAALRSRGLRRVEPVGHAEVLRLLAKRNIDIGNQRTRVVCRMHALLAELAAGGIAKEINASDVDRFLETVKPATPAEQVRYDLAIELLDDIRRLDTQLKTSHQRIRDAVRASATSITDLFGVGPIIAGILIGYTGDVSRFSNRDHYAAYNGTAPVEFSSAGRVVHRLSERGNRKLNHAIHMAAICQLRQPHSAGRVYFERKVAEGKTKKEAIRSLKRHISNAVYGHLAADARRART

SEQ ID NO: 235278 - protein, 337 aa, unidentified
MLVTVGVDTHTDVHVAAVLDAAGRLLETKGFPTTTRGYAQLATWAESFGQVDKVGMEGTGSFGAGLLRFLADYGLTVIEVDRPDRADRRRNGKSDPLDAESAARAVQSGRATGTPKSRDAQVEMIRVLRVARRGAMKARIQAGAQLDALILTAPEPVRAPLRKLTSKQRIRACAALRPGQVADPAAAAKTALRALARRWQALQAEIDDLDVQLTPLVTAAAPELLALPGVGVETAGQLLVTAGDNRDRLRSEASFARLCGAAPIPVSSGRTDRHRLHRGGDRQANSALWRIALVRMGCHQPTKDYVARRTAEGKTKTEIMRCLKRYIAREVFPLLVT

SEQ ID NO: 235279 - protein, 322 aa, unidentified
MGQTKMSKHSIVFAGIDIGKRKLDLALKGSKARLEVENEPAGHDKALSWLKRHKVERIGVEATGGYEKNVVRALRRAGLVVVVLQPLQVRAYAQFRLKLAKNDKLDATIIADCVASIEEIHAAPDPRFEAFAASQTLIDQLNDDIVTYKTRLESAPDETARMFWKQEILARQAQARNARKQLRAAMREHSDLAAKLDLIVSVQGVAEKTAMAVLIRMPEIGALSREKIAALAGLAPYDDDSGDRTGQRHIKGGRTRLRASLYAAAFAATFHWNPQLKSLYQRLRAKGKKHKIALVACARKLLVFINTVVARASPWQASPATT

SEQ ID NO: 235280 - protein, 404 aa, unidentified
MIEVGIDWAEDHHDVAVLDEQGQLLAGRRIPEGVEGLAWLHAMLAEHAEDPAQVMVGVETDRGLLVGALVAAGYQVYAVNPRAVDRYRDRHGQAGAKSDAGDARVLADLVRTDRHQHRRVAGDSELAGAIKVLARSHQSLIWTRQRLANQLRSTLREFYPAALAALAELASPEALAVLAAAPTPAGGRSLTVADLVGVLGRAGRRRDLHARAEAIHQALQADQLAAPALLTDAYGTSVTAIVGVLTSLSAQIDAVHATLSKRFAQHPDAEILRSLPGLGIVLGARVLGEFGDDPNRYADAKARKNYAGTAPITRASGKRLTVLARFVRNRRLTDPLVWWAFCSLTCSPGARACYDRHRARGATHQQALRALANRWVGILHGCLRHRACYDEHTAWPPSPQRHAA

SEQ ID NO: 235281 - protein, 444 aa, unidentified
MRAIGLDIHRDFCEVAIAEGGRVRAAGRVGTAPAEIEAFAGGLGPGDTVTLEATGNALAIARLIEPHARVVLANPKATRAATRLRAKTDRIDARTLAQLLASGFLPEVWTGDEATHALRRRVGRRVHLVRQRTKAKNQVHAVLLRTLAGRPPVSDVFGTRGRAWLERLVLPDDERETLEACLRTVDFLDTEVAALDRALAPLVLASPDMRRLLTLPGVSATTAATLLGVIGDIARFPTPGRLVAYVGLDPRVSQSGNDPAHHGRISKQGASEARHVLVEAAWVATRTAGPLRAFAQRLAARRGWNIAIVAVARKLTVIAWHMLTRGEDYAFARPVLVRAKLREIELRAGAPRARGRSIGVAPTVAERELERELAVAAEVAYERLVKDWVPSRKQVREPQAGRASHDAERQPARQGSAPTLRFGSASLPHQGDYAPDSGQRQDGT

SEQ ID NO: 235282 - protein, 459 aa, unidentified
MTRKQVGKSIVRRGSSAALGPVHPDAAGIDVHSEFHFVAVPAERDPEPVRKFGAFTRDLQALADWLTACGIKTVAMESTGVYWIPLFELLQKRGFHVVLVDPRKLKSVPSRKSDVIDCQWLQQLHTYGLLAAAFRPDEQTCVLRAYMRQRATLVEFSAQHIQHMQKALTQMNLKLEKVLSDITGVTGLAILDAILAGERDPQRLAKLRHERCHHDEATIAAALTGEWRDEHLFALRQSRELFRTTHQLIAACDVQIEATLTAWDDRPPLAPADAKLPPAPLKRTRPGGGDLAFPAQPLLEKKAGVDLTRITGISHHTALKVLSEIGTDMSRWPTAKHFTSWLALCPDNRESAGRRRSGKTRPSTNRVATALRMAAQSLHHSKSAMGAYLRRMKASLGAPKAITATARKLAVLIYHALSKGLEYVDPGQHWYEQKYAERLLHSLTRRAKELGYCLTPLTT

SEQ ID NO: 235283 - protein, 332 aa, unidentified
MYLGIDVHKRYAQVAVMDEAGKIVEEVRVENANLDDLAQRYAGAQAVLEATSNYYHIHDTLSEHLDVTVAHPKKINQIADTDKKTDRVDAKELARMLRLNSVPESYVPTEEVREARALVRGRQILVENRTKYANKVHGLLSDHGITEDVKPLTVEGRESLRGLSIPTPFDTLLESYLDLIESLTEEIQKLDETIEERAGSLKETQLLMTIPGVSYYTALTIYAELGGIDRFDGDKEVVSYVGLNPVIRESGDSRIEGSISKRGSGRVRWLLVQAANTAVHTSNDEYLSRFYDRLASRKNSQKAIVAAARKMLVSIYHMLDRGEAYDPPGVTA

SEQ ID NO: 235284 - protein, 347 aa, unidentified
MRFYTKQHPFYCGIDLHARTMYVCILSQDGEVVLHRNMKASPDVLLKAIAPYRDQIVIAVECIFTWYWLADLCAQEEIPFVLGHALYMKAIHGGKAKNDKIDSQKIAVLLRGGMLPQAYVYPAAMRATRDLLRRRLHLTRKRAELLAHVQNTNSQYNLPEIGKKLAYKANRDGVAERFPDPAVQKSVEVDLALMDYYDQLLSDVELAIVQTAKQHNAQTLYRLQSVPGIGKILSLVLLYEIHDITRFPRVQDFVSYCRLVKCAKESAGKRYGTSGAKIGNAYLKWAFSEAAVLFLRNNPVGQKYLARLEHKHGKGKALTILAHKLARAVYYMLKRDTVFDMAKFLNG

SEQ ID NO: 235285 - protein, 355 aa, unidentified
MENRIRVEVQAVAGVDLGDRSSQICLLDRESGAILEEKRLSTTSASFQSYFEGRRPWLVIVESGTHTPWVRRLLESMGHQVIAANPSKVQAIASSRQKTDERDARCLAQLGRVDPELLSPVHARSEEAQQALAVVRAREGLVKARTMLINQVRGTVKSFGFRLPGCSSKSFARGASKALPQELKAALEPLLEVIADLSERIRGLDRDIEAWAQRFPVTERLRQIKGVGALTALVFVLTLDDPHRFARSRSVGAYLGLVPASRSSGNSRPQLPITKQGDRLLRRLLVQASHYILGPFGQDSDLRSFGLELSQRGGKSGKKRAVVAVARKLAVLLHRLWVSGEDYAPHRRPVVEIAA

SEQ ID NO: 235286 - protein, 501 aa, unidentified
MAAKKNAKTKADSAGEGVQAHGGVAAEVTDEVTQVVEYAAGIDVAKGFGMVCTRVPGSRRGSKRQKVWRVNATFKEITALMDHLVCEGIQRLVLESTSDYWRIWYYLAEAAGLDVWLVNARDVRHLPGRTKSDRQDAVWLCKLNERGMLRRSFVPPRAVRDLRMLTRTRSRLAQDQARHQSRVEKILEDALLKVSAVISDLFGVSGRRFLDALVAGERSPAALAALGDYRLKASKAKLEETLTGQFRDIHATEIAVHLRLIDAINAEITGLDAEIEKALPQVPRTAPVCTACGVAGGGHAPDCQNLGVLLLGLAGRLDEITGIGPVHARVLIADLGTDPSQFPTPGHAAAWAKLTSRLMQSGESSWNGRAGKGNPHLRGALGQAVMSAAKTGTRLGAMYRRIARKRGKQKAIVAVARVICEIAWRLICDPGARYIELGPDYYQPRSARQRTRSSIRQIEKDNPGKKVVLIDDPAIAGTPGSAGPAEPAALPAVLSRLPVTY

SEQ ID NO: 235287 - protein, 356 aa, unidentified
MSQKLDSKVAVIGIDIGKNSFHIVGQDRRGALVLRQKWSRGQVEARLANLPPCLIGMEACTGAHHLSRKLQALGHDARLMPAKYVRPYSKGEKNDYRDAEAIAEAVQRPTMKFVATKTADQLDLQALHRVRERLVSQRTGIINQIRAFLLERGIAVRQGLHLLRAELPGILGTRTDVLSPRMLRVIEDLTGDWRRLDERIEDLSGEIDALAHHDKGCERLMTVPGVGPIISSAIVAAIGTGDAFSKGRDFGAWLGLVPKQMSTGDRTILGSISRRGNRYLRKLFVQAAWVVLVKLGPEQWERYGLKSWIEAAKKRLHHNVLAIALANKLARIAWAVLHKGRAFEYVKTNATASRSA

SEQ ID NO: 235288 - protein, 343 aa, unidentified
MYYIGLDVHKKTISYCVKDAAGCVHQEGKIGSTRRELDAWIKTLPQPRTMAMEATIFTGWIYDHLLPHAEKVKVAHPLMLRAIAAAKKKNDRIDAGKIADCLRCDFLPECHMASTEIRNRRRILRYRGLVQRQAVQMKNRVSGLLMETGVSYNKLRLHRMGYFADLMSSNEEVSESIRPLLRLCREHIDRSIMLDTALLRSLERDPLLADRLRRLRTIPGVGPITALTWALEVGDTSRFRSIKQAISYCGLCSAEKSSADKVMRTPISKQRNKHIQQVLVEAARLAPRYSEELALLYERERQRGNGNRATLAVARKMVALMLAVERRNTDFVPAGEFRRSAAA

SEQ ID NO: 235289 - protein, 354 aa, unidentified
MEFIGLDYHKQYSVATKIKSDGSKEQCRLNNTPEEFSRYFDTEEETSVVFESSRGWSYLYEMIKNKVDHIKMAHPLKVKAIASARIKTDKIDSNILAMLLRADLIPESHLREEENRTHLKILRQRAYFVKVTTSVRNRIHVHLDEQPYEVRQSVPKVSSLWGKKGMEWLKMLRLPIAEHQKLLKSMLKLMEHLTKQIKVSDGIVTKLYAKDADAQILSSIPGLGKFGAVMVSNEIDGIKRFDSAKKLASYAGLVPSTYSSGGRTFHGSITKQGSKWLRWMFIQAVSPAVRSNVQLSNYYEGIKRRKGTKAARVATSRRLLTIAFSCLKENRTFVPWKSNQSKEMYFSNGPSRPR

SEQ ID NO: 235290 - protein, 309 aa, unidentified
MKQEIVYVGIDVAKAHLDVAWEKQFHRLPNDVAGTKQLLCLLKAIAGQVQVIWEASGGYERSVMQTLQRGGIKASVVQASRVRQFARAIGILAKTDCIDAAVLCAFGKAMQPQVTAPSNPQQERLREMESHRRHLSRLLVAEQNRQAQLTDPTVLALTERLVGQIQKQIERIDLLIKELIEGSPGLSSKAQKLMALTWVGPRTAALLLAQMPELGQLNRREAAALAGLAPFNHDSGKLRGRRTIFGGRRAVRTGLYMAALVATRHNPILAAFYRRLRAAGKPPKLALSATMRKLLLTLNTSLKPQPILA

SEQ ID NO: 235291 - protein, 347 aa, unidentified
MKFYTRQHKYYCGIDLHTKKMYVCILDSTGEILLHRNIKTDRDVFLKIIEPYQEDVVVSVECMFTWYWIADLCVKEGIPFVLGHALYMKAIHGGKAKNDKIDSNKIAVLLRGGMLPQAYVYPVKMRATRDLLRRRNHLMRKRAELFAHIQNTRSQYNLPDPLGCIAKPQNREGVVERFDDSSVQKMVATDLAVINAYDPIIAKMERDIIKNAQHHDPVSHALLNTIPGIGRILSLVILYEIESIKRFPRVQDFVSYSRLVKCSKESNGKKYGSSGKKIGNAHLKWAFSEAAVLFLKGNEPGKKYLERLTRKHGKGKALSILAHKLGRAVYFMLKNKRPFDKNKFLGL

SEQ ID NO: 235292 - protein, 365 aa, unidentified
MNKCHSNTELSSHEGTRSQFNGGECAIKLGIDVHQDFYVVVEQVDGTNPKPPQRFPKQAFLRWAARLKENTGAEVHAVYEACGFGFSLQRQLSSLGVQCHVVCPQKLDEQNRRVKTDGLDAKALVLKLDRFVQGNRSALALVRVPTEEEEQKRAIHRQREQLVKARKQLEAQGRSLMVNHGLEPVQSWWKPRAFAALPVPQWMKELLANSQPILVALQQKIASLTIQLQSSATPKQPRGLGLMTSVIIDREIGDWRRFSNRRQIGSYTGLCPGEYSSGNTRLQSCVTKHGNPRLRAALVELAWRLVRFQPNYKPIVKWRQILAKGALATGAARKKAIVAVARQLAVDLWRIKTGRLRAEELGLIN

SEQ ID NO: 235293 - protein, 387 aa, unidentified
MYKRILVGVDDSAAATRALGRNEMDPPLCGSTAMSHNEFRSSEPIEPQEASSMKHDMHVLGIDIAKRVFHAVGMDDRGNIVYRKRLSRHDLIPYIAQLPPVRIGIEACGGAHYWARRFRAHGHEVKLMAPQFVKPYVKSNKNDSRDAEAIAEAVTRPTMRFVPIKDVDQQDLQALHRVRERLMGARTALVNEVHGLLHEYGIIIPKGVAKFRQAVVGKLESEKDKLTSLSREMFWKLVDEFALLEKQLAYDQEKRDTVATTHPECQRLMTIPGIGPFTATALVAAISDASAFKNGRQCAACLGLVPRQHTTDGKERLLGISKRGDTSLRKLLGHGARTTLRWVGRKTDRRSQWMRQLLERRGKNRTAVAVANKNARMVWALLTSHQD

SEQ ID NO: 235294 - protein, 370 aa, unidentified
MEQPTTLCVGLDVHKDSIAVAYAEAHRTDPPHFVGAIGTRQADLDKLIRRLQSKAARLAFVYEAGPCGYVLHRYLIGKGLDCTVVAPSLIPKRPGDRVKTDRRDAVELARLLRSRDLTPVYVPSVEDEAVRDLCRARDAARVTLKAAKLRLKSFLLRLGLHYTGRADWTDAHRRYLARVVCPTPAQQIVFQEAIYAVDEQVHRLDRLDQELRERAPHWRLYPLVEALQALRGVQWIVALTVVAELGALTRFQNPRQLAAFVGLIPSEHSSGDTRRQGAITKAGNTRARRVLVEGAWAYRYPAKISAHIQRRIESLSPVVQAIGWKAQVRLCNRFRQLTARGKHANVVVTAIARELLAFMWAIAQEVPIPA

SEQ ID NO: 235295 - protein, 383 aa, unidentified
MSEFSTLHVGLDVHKESIDLAVADPGRQGEVRHIGTIGGDLTSLDKALRRLISKGMPLHVVYEAGPCGYVIWRHLTAQGINCEVVAPSSIPKRAGDRVKTDRRDAMLLARLSRSGDLVAVRVPDVVDESIRDLVRAREDAVRECRNGRHRLKALLLRNGIRYAGKSAWTAAHLRWLATVKLAHSAQQIAFQEYLHSITQSTERIARLEKSMIEALPQWGLRPVVQALQAMRGIQLIAAMTLVAELQDFLRFDSPRQLMAYVGLVPSEHTSGPKRRQGGITKAGNSAARRMLVEIAWQYVHSPRVSPIIAKRHEGVPDAVIEIAWKAQLRLSGKFKRLLARKVLKTKAVVAVARELTGFVWAIGREVQTSRWPGLKSDQVTPVA

SEQ ID NO: 235296 - protein, 341 aa, unidentified
MKEKITNYIGLDISAGTIDAGIFKIGNPVIASKEPFINEIGGFEDIQKWLASNRCDVSNSVICLEVTGVYSEAVCYYFHEKGYTVWAEAPHKVHRAFYRQVKNDKVSAMQIAEYSYRFLDQMIPFQPKENIIEEVRTLLATREQLVGQLTANKNILHAFNRKKYSSNTALKVLNESIENMKKSIIELDKELKKIIYDNPKYSATANALDSIPGISMLFVANLFAITNRFQKECNYKNLASYIGICPHEHKSGTSVFKKPTSSGFGPNRFRKLLYLAAMSVRQHNPKFYNYFLLKQQQGKNDKLILNNIANKLIKIVCGILKNNCSFNPKYVSVHPNLLKVI

SEQ ID NO: 235297 - protein, 356 aa, unidentified
MNEGSWVGLDVHARSVVAGVIDQGSGELRSLRVPPGNEGTVAWLKTLPAPVRVVYEAGPTGYGLARACAAAGINCVVAAPSRIRPAADRVKTDRRDAERLARLLRLGEITPVRVPEPEEEAARDLVRAREDARGDLMRARHRLSKLLLRHGMVYDATAWTRAHDAWLRRQRFRSGPLAIVFDECYSRMLDAKTRRDALDTAIAELAVTPPYVEVVERLVCLRGVSTLTAFALTVELGDWNRFRPESLGPFLGLTPSENSSGERRRQGAITKAGNSHARRLLVEAAWHQRRPPRLSVTLERRRIGKSLAVRAQADRSARRLHERWHALERRGKPRTIVVVAVARELAGHCWALATMD

SEQ ID NO: 235298 - protein, 315 aa, unidentified
MHREFAQVAIWQDGQVRQAGQVAATPEGLRTFADSLAPTDEVAIEATCNTHAIAKLLEPRVARVVISNPQKTRAIAEAKVKTDKVDAAVLAQLLAADYLPAVWLADDATHALRRQVARRAHIVRQRTRLKNQVQAILHRNLIPRCPAADLFGHKGRRWLAEQTLPADECQAVGALLRQLDFHAQELAIIDAELGRVALGSAEVKRLMTIPGVDATVALSIVAAVGDFARFRSPEKLVSYLGLNPRVRQSGGQPASHGRITKQGRAHAAGCSSRPPGRRRRPPDRCARSISVCAPAAGCRSRWSRPRASSRCSAGT

SEQ ID NO: 235299 - protein, 368 aa, unidentified
MKNYTTVVGLDVHKNSIVAAVLPAGSDSVTERVTIENNPKTLARMVNRIAGKGRAEFVYEAGPCGYDTYRQITGLGHPCAVIAPALTPVRPGDKVKTDRRDAEKLARYYRAGELTEIRIPDAVEEAARDLVRVREDAVKDHLRARHRLSKFLTRQGRVYRETRQWGTSHQEWLRSQRFEQPHQQSSFEAYMRAYDDVEARLASLNVQIDDLAKEEPYKAVVGRLRCLKGIDTLSAITLAVETQDFRRFKNARAYMSFTGLVGSEFSSAEKIRRGSITKAGNAHIRRVLIESAWSYRGWNIVSVGLAKRREGRSAEVLRLAKKAQERLHRKFKHMTSRGKMVQTTVVAVARELAGFIWAIAQAGEKCQA

SEQ ID NO: 235300 - protein, 413 aa, unidentified
MDVLHPRCCGLDVHKSSISACILVQVAGRVEKHQRRFSAMTQDLQELARWLRQLEVTHVAMESSGVYWKPVWNILEGKVAIILVNAQHIKNVPGRKTDQKDAEWIAQLLQHGLLRPSYVPCEIIRDLRDLTRMRASLSQEASRISSRVQKVLEDANVKLASVATNTLGKSGRAMLEEIIAGQDDPEYLASLALGHLRAKVPQLRLALEGKIRPHHRFLLRRLLDQLRFVEHEIVLLDERLEEIGRERPELSQAVARWDTIPGIDRVAGWTLLAEVGHSMAQFPTPEQLASWACLCPGNHESAGKRLGGTTRKGSPWLQRMACQCAWAAARTKHTYLSAQFRRLAARRGSKRAIIAVAHSLLIIGYYLQKNQRNYEDLGGDYFDRINSDGLKRYFVRRLERLGHKVTLVPIQAA

SEQ ID NO: 235301 - protein, 314 aa, unidentified
MGSLGTIGTRQCDIDKLIRKLQAKGATLAFGYEAGPCGYGLYRYLTAKSLACHVVAPSLIPRKAGDRVKTDRRDAMTLARLMRSGDLSPIYGPGIEDEALRDLSRGRDDAMQDLKRCKRRLKSFLLRQDIRYEGRANRNAAHLRWLARVVCPTPPQQIVFQAYVRVVSEQQERVQRVEHELHEAVKGWRLYPVVEAIPALRGVELTGAVILLTELGDITRFDSPRQLMSCLGLTPSEYSSGARRHQGGITKAGNSHARRALVEGAWAYRYPAKVSRHLQLRLEKLPAEVQAIRWSEAGAATDTCTVVANPRISA

SEQ ID NO: 235302 - protein, 377 aa, unidentified
MKRVKFVGLDVHAETIAVAVAEQNGEVRSLGVIPNREDSVRKLVRKLGPVEEPRFCYEAGPTGYVLYWQLTRMGAKCEVVAPTLVPVKSGDRVKTDRRDALKLARNYRAGELTPVWVPDAAPEALRDLVRAREAAKKDELRARHRLNKFLLRQGRRPPMGVKLWTIKYLEWVKREVHFEQMAQEATLLDYLHEVEHAAARIMRLDGAIAEAVKLAPPKMRAVIEALQALRGIAHVAAVTVVAELGELSRFARAKQLMGYGGIVASEHSSGERTRRGGITKTGNAHLRRVVVEAAWNYRHRPAVGTNLRKRQEHVSEEVKEIAWKAQQRLHQRYKKLLANGKNKGVVVTAIGRELLGFIWAIGIKVEAAQKESLQRAA

SEQ ID NO: 235303 - protein, 351 aa, unidentified
MEHTTIAVDLAKSVFQVAVSHRAGRVDAERRLSRDRFLAYLAQQPPATVLLEACGSSHHWARQLEQFGHVVRLLPAHDVHRYVRRNKTDRTDAKALLEAARNEEIHPVPVKTVEHQAITSLHRLRSTWVATRTARLNTLRGLLREFGIFIPVGAQHVVPRVRELLGDPTGVLPVAVRSTLANACAEIDVLETNRRDVERQLAAIARQLPDVALLQTVPGVGLMTATALIAFVGDIGRFGSGRHFASFLGLTPKEDSSASRRRLGAISKQGDVYLRMLLIHGARSVLWHGKSCAHPSGFQTWARCIEQRRGHNVAAVAVANKLARIVWAVWTQQRPFAANHRHAETTSVSSN

SEQ ID NO: 235304 - protein, 347 aa, unidentified
MSEHTPTTMGIDISDRMSTVCVLAGDGEVMEESRFRSTRAGLGRYLEHRAPMRVVLEVGTHSPWMSRQIEELGHEVFVANPRQLRLIYQSDRKCDAVDAEALARLGRVDPKLLRPIRHRAADTQLARAQLRVRDMLVAARTRFILSVRGMAKSMGEVIPRASAESFHVGVPGAVSAPVWQVVEPLVEAVGGLTAKIKGCDAALEELSLTRYPETAALRQISGVGPITALAFVTTIEDPHRFARNRSVGAYLGLCPRRDQSGASDPSLRITKAGDPYLRRLLVGCAHYILGPFGPDSDLRRWGLAYAGRGTNSKKRAVVAVARKLAVLLLSLWKSGETYEPTRHAAAA

SEQ ID NO: 235305 - protein, 428 aa, unidentified
MKITRVAEKINLNQVMDIPVDVHKDTLCFFFEIGGKEYYDTCANRTVVLEKKLHQYHEIAVAHGRQNLRVICEPTGQYHNKLMRSARRLGFFTNLVNAEAVAKFRIVESNDNNKTDQKDPRVIGTLGKLDKVVKLRMLGEEYLRLRKLHKIYDECDVAITSHRCRISKLLVELFCDYSFEKDFLYSNSGLALIEVYGCNPYRIVEDGKPLFFRKMKNAAPRIQDKSLERLWEDAESSARNDVPAGYVDILEGYLYERLDDYFKMVERKEATTGRMIEILEQLRKNDPLIPPPTPNFISEKNLARLLAETGPLADFGSWRKLMRYAGLNLKTRQSGKFQGQNKISKKGRPLLRKVLQGIALCLVKRGRLYGDYYHDKKDRANMPGNKAMTIVARQLLKKIYGWCRSGKAFDEKRFFICKSRYIEMAEAA

SEQ ID NO: 235306 - protein, 342 aa, unidentified
MSEYVGFDVSKEETAFCVKDVEGKILARGKVATDPGALFEALRAHCVCPARIVLETGTLSGWLSRELGKLGIAVDVIDARQAHAVMKLQHNKTDANDAALLAEIARTGFCRPVAVKSEAAQEDRILIKARSHLVRQRRDTQNTIRGLLASLGIRFAKGSGKLAGRVREALEARPELRATIEPLLCAVAALEREIARLDKAVSARAKSDPAVRLLMSVPGIGPVTALAYVATIGDAGRFAKSRAVGAYIGLTSRRWQSGEMDYSGRISKHGDSLLRALLYEAANSLLTVVRKAHPLKDWARRVKKRTSHKKACVALARKLAVILHRMLITGETFRWPQKEVAA

SEQ ID NO: 235307 - protein, 399 aa, unidentified
MFVGWDWASATHAVTVLDDAGVVVDRWAFRHTEQDLVGALERLARLAEPAALPVIIERASGLVVDRLLAAGHPVVPVHPTAFWAARPRWGASGAKSDPGDSYKLADYLRTDGHRLRRLDPPDTGLQELQALVWLREDHVRARTAASNQLGALLEAHWPGPTAVFFRLASPIALAFLSDYPTPQAAARLGQARMASFCRRHSYRGGKTPAQLLARLRSAPTAPVGIPAATLAILVRAHVELLRTLLGTIAELDAAIATRVPCHPRAQLLTALPGVGTINLAQLLAEVGPVLDRVANAEQAAAECGVAPVTRASGKTTGVYFRWAANRRARKALTAFAHNARMQSPWAGRLYADARARGKRNPHATRIVARAWLRVIWACWHTGTPYDRHAHLAEQRHAAA

SEQ ID NO: 235308 - protein, 332 aa, unidentified
MQKIIHFIGIDVSKETLDIALIKNNDKSHVQSFKVTNNPDGFKKMKRWLLSEKVVLEQSVFCIEHTGLYSKAVSRFVLSAQSNLWMEMSLKIIRSMGVQRGKNDKIDAIRIVLYAQRHQEDMKLYDPPRPVVEKLRLLLQLRKHLIMSRNALEVPCRELALIDSKEGAQARRLIRPSVKALQKNIEAVDGQIDALIKSDEKLDHLFEVGTTVPGIGKITLAYLICFTNEFKNYHQAKQLACYAGVVPFEYTSGKSVKGKPHVHNMANKLLKKQLHMGALAAVTYYDEFKTYYKRKLSEGKPKMLVLNNVRNKIILRLAAVIRNDQPYLKMTA

SEQ ID NO: 235309 - protein, 310 aa, unidentified
MTQPLVYLGLDVAKATLAGSLAGQSFALQNKPPDHAVLCARITAHGGPVQVICEATGGYERPVVDALRAAGLTVSVLHPTRARQLARGLGYLAKNDPLDAAALAKIGALLVPAPTLAPPEGVATLAALVGRREQLAELIRREKHHREMTVLTVLLRDLDQNLAALQKRLEKNETLIAKHLQTHRVLAQKAERLQEAPGIGFVGAVTLLGLLPELGIGSQARISSLAGLAPRDHDSGTFHGARRVHGGRPKVRRILYLCALSAVRHHPRLKTFYTRLRAAGKAPKVALTAAARKLLTYLHAALKNPNFKLA

SEQ ID NO: 235310 - protein, 340 aa, unidentified
METVAVVGVDLAKSVFQVHGIDESGAVVLQRRVSRGQFLKLFEKLPPCLVGMEACASSHHWARQLMELGHEVKLMPPQYVKPYVKRGKNDAADAEAICEAVTRPTMRFVGVKTPDQQAVMMLHRVRKILTRQRTQITNALRAHLAEFGITAPVGRIGLERLLAVIADDTDNRLPGEARVSLAVLASQLEMVKEQILDNDRRILADARRSEAGCRLMKIPGVGPLLASAIVASVPDPAIFSSGRSLSAWVGLTPRQNSSGGKEKLGSITKAGNGYLRELLVVGATAVVRYAQRNSTKRPWIAQLLERKKPRVAAVALANKNARIIWAMLASGEPYREVPAA

SEQ ID NO: 235311 - protein, 337 aa, unidentified
MLFCGIDLHSNNCLVVVSDDADKVVYSKRLPNDLAAICAALSPYQQQLFGVVVESTYNWYWLVDGLMAAGHSIHLANTTAIKQYDGLKHRGDESDARHLAHVLRLGLLPEGHIMPKADRAFRDLARRRMQLVGQRTSQIVSIETSMAQHMGAAISGNRVKELTADDIDAMPIGRIEALGMKANLAVMQALQVQIDGIEATLSRYCRRDRDYHLLCSVAGIGSILATVILLETGDVARFSDVGNYASYCRCVGSVHMSNGKKKGEGNTKNGNRFLAWAYVEAANFAIRYCDAARKFYQRKKAKRNGIVAIKAVAHKLARACFHMLKTGEKFSVERCFT

SEQ ID NO: 235312 - protein, 343 aa, unidentified
MKVSIIGLDIAKSVFQAHGADANGKCVFKRKLGRSEISAFFAKLDPCEVVLEACGSAHYWARVISRIGHDVRLVPPDRVKSFVKKGKKNDAVDAAAICMAATHPDTMCVPIKSEEQQGVLSLHSTRALLVKQQTMLSNALRALASEFGLIAPLGTRHLPELMAKIETSADLPAAMKQSAMLLFEHYEKVAQSIDALEVQIRARAKSDEDARRLMTIPGVGPITASLIVASVADIGSFASARHFAAWLGLVPRQHSTGGKTRLGRITKTGNRQIRTLLVLGATAMLHRAHKWDSAAGQWLCELMARRPRRLATVALANKMARIIWALLSRKEIYRPAGVSVSAG

SEQ ID NO: 235313 - protein, 433 aa, unidentified
MSTVVIGMDPHKRSATIEVMAADERVVGGGRYGTDVGGYAAMLAGVRRWRERIWAIEGSRGVGRQLASRLVAAGEQVVDVPPKLSARTRVFTAGQGRKTDVTDAHAVALAATRMKGLQAVSDDDRLAVLRVLADRRRALGEDHARMICQLHQLLADLIPGGAKKALSAAQARALLARVRPRDPAGQARRRVAAELIADLERIYQREKAAGKELTAALKATGTTLTTLEGIGPSGAARLLVEVADITRFPDRGHFASWNGTAPIDASSGDHVRHRLSRAGNRQINRVLHIMAVVQLRHPVTRGRAYYDRKVAAGKTPREAMRALKRRLSDVVFRQMKADARAARTGPGGHSGAAAGSSAAGSDPDAGSSDKSLPGPATSDPTPILPAIPAAIAARRTAAAVKRTVLDGGRTGAHSQGGNNHPLTQWGARCGYSP

SEQ ID NO: 235314 - protein, 355 aa, unidentified
MQKYKISFKGQNIYVGIDVHLKTWHVTTLTETGCKYSFAQHSDAKELFDRLNKKFPDAHFISAYEAGFCGFSAHYALMEQGFENIVVNAADIPTTGKERTMKSDAVDSEKIAWALKRGQLTGIYVKDKSFMDDANLMRLRQRFIKDLSRQKNRLKHLLYTQGVTYPERFAKSGTHWSRNFMKWLREEVVLLSEEKLTLMLLCDQVDNTRDAVLRVTREIRRLSQSDKYKENYDLLTTIPGFGLITSMSLLTELDNNPMRFPNERKFVSFLGLIPTCHDSGEKKVNGEKTFRGNKHLGPLIVEASWIAIQRDYDLGAYHTNCCQRMKPQKAIIKVARRLASKAYAVMKTKKAYVLR

SEQ ID NO: 235315 - protein, 353 aa, unidentified
MAVYIGVDLHVRTQTVCWMNTADGEIHQHTLDHSRDDLRAFYAQFTAPAVVGIESSGYALWFHQLMEQAGHRLLVGDAYAIRQFARRRQKNDRRDAELLLDLLRRDEFPVVHRPAPPSQDTLALLRYRHRLVRMRTMVKNGLQAVALNHQLRLGFRLFTVRGQQQFAALPLSGAYATQRQQAQVLLTTLEAQIAAVNQELATRAAADPRVVRLRTHPGVGLQTALAVVHTLEPVTRFDRARRIAAYCGLDPSEHSSGDTTRYGHISKQGNRLLRFLLVEAAWSAVQHEEDLGRFFRRLRARKKPHAVTVVAVARKLVLRLYRMLREGIDYEEFRRRGRDARRARQCASPAQRG

SEQ ID NO: 235316 - protein, 418 aa, unidentified
MTDQMSWFVGLDWATEHHRACLLDADGRRVAERDVPHGGAGLTELCDWLLERTAAQPGTIAVAIETPRGPVVEALLERGFAVFAVNPKQLDRFRDRFTVAGAKDDSRDAAVLGSSLRSDRPAFRRLSIDDPLVIELREWSRIHEELTAERIRLANRVRDQLWRYYPQARKLGDDVAADWFLDLWQQVPTPAQAARASEKTIARILKTHRIRRLDAGAVLRILQEQPLAVAPGTAEAASAHIRTLAARLRLINQQIKEAQRRLDELCGAIEAAAEVTPGQICEQRDVAILRSLPGLGRITLATLLAEACEPLRRRDYHVLRVLTGAAPVTRRSGKTCFVLRRHACNKRLAQAIYHWARVAKQHDPISNKRYAELRRRGHSHARALRSVADRLLYVLCTLLERQVLFDPDHKALQMARAA

SEQ ID NO: 235317 - protein, 388 aa, unidentified
MTQAPGALPTPGVLDYERTLILAIELSNTSWVLATQIPGLPGVKAKRSIEPTPEALMAAIGSYRVRAEKAGRNVDRVIAVYEAGWSGFWLVRWLAKYGIETHVIQPSSVPVDRRARRAKSDGIDAEHLLRTLLAWLRGEPRVCSMVPMPTEADEDARRRVRERAELIAERVGLVNRISAILATLGAGEYNPLRRDRRQRLDELRTALGDSLPTHARAKIARMLDRLQLLLIQITELEQSRDAVLEDKNPDRAASMIQQLAKLRGVGVQTATVLVHEGFVREFTNGKALGSYAGLTATPYSSGGIEREQGIGKAGNARLRTVMVELAWLWQRYQSDSAQVSWFRERISGTGRRIRKVMVVALARKLLIALWRFATQGVVPKGAVMKPAS

SEQ ID NO: 235318 - protein, 429 aa, unidentified
MSEVEFVKQEPQFAAFLAIDWADKKHVWCLQGVGSEKRESGELEHTPEAVEAWVGQLCQRFAHRPIAVAVEQSRGALVFMLSKYEPLQLFPVPSTMAANMREALYPSGAKDDPRDADLLLDLLLQHRDKLRRLVPDTEATRRVQNLVEERRKLVDEKTEQSNRLTSHLKIYFPQMLDWFEHLDTELVCAFLLRWPTLEELQKVPPAQLRTFFRKHHCRDQELIERRILAIRQAMPAIRDRAVIEAKSTVVKVMVRVMRSLLEGIANLDEKIEEAAAAHPDFFIFNSLPGAGAALAPRLLAAFGSQRERYGSAGEVQTYSGIAPVMERSGKKKWVHCRVACPKFLRQSFHEWAGHSIANSVWARSYYQQLRSRGKGHHAAVRALAFKWIRILFRCWKDGVAYDESKYLAALARRSSPLTAVNVAIAGKAL

SEQ ID NO: 235319 - protein, 421 aa, unidentified
MKGLRTKKVNTIKEGTLIVAVDIGMVSNHGCCTTADGRSTKTFSFDNTRDGLDILWNMILASKNRFQCNEVIIGYESTGPYGEPLIHYLKQKPVTIVQVNPLHSKRMREINDNSPLKTDRKDPRVIADVIRIGHALSVLVPEGDAAYLRRINNARERHIKERTALLNQLQQFVFLIFPEFSRIIKTIYSKTALYILKKYTTPAKVCSVNIEKLGEEMRRRSMGKFGVEHAAALINYAKTTIGIQEGLDGLVMDIQHALVQLEMADSLIAELEHEMETTLHRIPYSRKLLAIKGLGIVTVAGLIGEVGDFTKFTTQSEIAKLAGLDLYEISSGKRQGQRRISKRGRSLLRKILYYAAMQAIRKNGIMHDYYQKLIGRGMKSMMALVAVSRKLLRIIFAIVRDDTKFILNHESQRKEEMRRAA

SEQ ID NO: 235320 - protein, 365 aa, unidentified
MKHCITWWVGLDDSADKIDVAIFQNQEEEPREEIGVSTDDRSLGRLIKKLKSLSGKVRCVYEAGVCGYELQRLLSRRGIECDVVAPSLTPRRPGDRVKTNRRDARKLAKLHRAGELTTILIPNEHQEALRDVMRAREDVLEDVTRRRHRLTKFLLRHGHKYRLGRAWTQGHWQWMANLRFEDPSLQMVLEQYRLSLDQALEQLKTFDQEVEALAQRPEFARLTKCLMGFRGIKAITAMTILAEAVDLRRYVSAPALMSAIGLVPSEYSTGAKERRGSITKTGNAHMRRVVVEASWHYRHSPIASKALKQRRRDLPPEMLRLVQRADQRLHKKFRKLVNKGKPSTVAAVAVARELAGFIWAVGQAA

SEQ ID NO: 235321 - protein, 361 aa, unidentified
MNRTVVGIDVSRDAFYCCFTSKLADGNTKIAATRRFENTPSGYTELVAWAAKHNKEKQPVLFVMEATGVYYENLAHFLYDQGQQVCVVLANKMKSYFKSLSVKTKTDKVDAKAIAAYGLERRAVLWEPMAADYKVLRDYCRELLALKKDRQRAKSQLHAMNASYRKHPQVVALKQSQIDFCESAMETIEKELRQLVGQDPALKDKIDQLASIPGIGFETALILACETNGFKLFGSIRQVVSYAGLDVSHDESGSFKGSSRISKRGNARIRQALYMPALSALQHNEPIRELYGRICEKNPALKQKGVVAAMRKLLVLSYVIWKKDEKYDREYEWNPKASGNERAESSFDEQKKAELLELRTR

SEQ ID NO: 235322 - protein, 339 aa, unidentified
MGLYVGLDLHGKSTFAGVIDGEGKQVYKRRLSNDSEVILDELGPYGGDTVGVVVESTYNWYWLVDLLMDHGYRVHLANPAAIQKYKGLKYADDEHDAFWLAEMLRLGILPEGYIYPKEDRPVRDLLRKRGHLVRLRTSLILSLQGIIARNGGVRLNVNKVKARRTDEISPLLAGNEDLALAGAVSKEAIDFLGDKIWEIEKVVERRVELREPYRYLFSIPGVGRILSLTIMLETGRISRFAKVGNYASYCRKVRSRWLSDNKVKGRGNAKSGNRYLAWAFSEVANMARRYDGEARSYYQRKMRKTNLMVAHNALAHKLARAAFYVMRDQVPFSPVKLFC

SEQ ID NO: 235323 - protein, 345 aa, unidentified
MSRVYVGLDLGSSQFEILAMDREGVALERRSLKTSELNLRDAFSQLRQQLKCELHVHLEAGELAGWAREVIAPMVTKVVIGDPRRSAWIANDPTKNDRLDAFKLADLLRMNRVHEVYYDDAKPRRVFKQVVQHYEDLTRRQAALKVKIKARLRVQGLIRKDTRVFAASEREAILDSLASKQLRSIIKQLYDLLDATRAQQQEALLTMREMSRQFPEIALLKKTPGVKLINACRFVAYVQNPHRFSNLRGFWRYARLGVVQQSSDGKPIGPQHLDRSGCGALKDVSRKTMEAAMRRHDNNLFKRAYEQSFARTGDATHARLSVQRKILAVMRAVWISGKPYCGDLG

SEQ ID NO: 235324 - protein, 351 aa, unidentified
MMIIGVDYHPSFQQMAFLDQETGECGERRLNHSDGEAEKYFRDLKQRGVSVRVGLEATGYSRWFERLLAELGFEVWIGDAAEIKKKRVRKQKTDREDARLLLRLLLENRFPRIWVPSPANRDVRQLLWHRHRLVQMRTRIMNQLQAVAMNEGYRWKKKLFSEQGRALLEKLSLAPWANRRRKELLELLDQLNPKIAELTAAVEQEANQRPDVLRLMTHPGVGAITGLAYVQVIGTPDRFPCGKQIGSYIGLIPCEDSSAGKQRLGHLSKQGNALLRYLLGEAAQAATRCNPDWRRRYVHLAMRRHKNIAKAAMARKLAVRLYWMWRNGWDYSQLVSFGSNAGKLATGHGVN

SEQ ID NO: 235325 - protein, 422 aa, unidentified
MNFCPVAGIDVSKRFSDMCVLSPDNKIFAQEKIYHDETSINRANALLQKAERLFFSKPVIVMESTSHYHLILFQFFSEHGYDVIVVNPLQSNSMKDFSIRKRKTDRVDAFKLAMMYRTKTLRPSQIPQTATRALRQLCRHRTELLNDVSSYKNRLTALLDQTFPGYDKVFSDVGGVTSCAVLARFPTPTILLVEKESELVEVIAAASKSSYSFAKKKAGLLISAAQKAQTLGIHSCADETLIVCTIQMLRTLSESVLQIETAIDNLLAQIKEMRNNVSLLQSIPGVGSHSAALLLGEIGDISLFKKPKQLAAYFGLDPTERQSGSFRGTKNKLSKRGSPYARAALHMGVVNSICKRGKDSAANPVLLSYYEKKCKNKPAKVAQAASMHKLVFIVFAVLRDQKPFELKTPEQHAVEQGFVKVA

SEQ ID NO: 235326 - protein, 369 aa, unidentified
MDNITFVGLDVHKATVCVAVAESGRDGEVRQLGVFENRPDVLSRMVTRLGKNGRRLSFCYEAGPCGYGLQRLLTGAGHECVVVAPSLIPIKAGDRVKTDRRDATMLAKLHRAGELTAIWVPDQAHEAMRDLVRARTTAVRVLGKARQHLQGFLLRHERVYHGPRAWTLAYRRWLTTVRFEHPAQQIVLQDYIHAVQDAETRRDRLTGQIEELLPNWSMAPVVAALQAMRGVALVAAVTVVAEVGDFRRFINPRQLMAYLGLVPSEHSSGGSIRRGGITKAGNALARRVLIEGAWTYRMSARVSRKINHRLEPLSAEIRDIAWKAQVRLCARYRRLVACGKPKVVVTTAIAREMVGFIWAIARISQPKLS

SEQ ID NO: 235327 - protein, 364 aa, unidentified
MKIIGCDYHPSGQQVFGIDKESGEIFADQWIGHSGSELEEFYSKLPAGTVVGVESSGNMQWFESRLEQWGHRLRLGDAAQIRARETRKQKHDRRDAELIARLLVEDTFPELKWVPTLAERDQRQLLMHRHKLVGMRTQVKNQLQHIAMNQGEQKKRRLWTKAGRELLEGLVLDRWTARRRDDLLRWLDLLHSDCESLEREVEQAAEAREDARLLMTHPGIGPVISLGFVLTVGRIERFERSRQLVSYLGLNPSEASSGERRRRGGISKQGSSFMRRLLIQGAQTAVRGDEDLNRQYRRLASKKHRAVAKVMVARKLAVRMFWMLKTQKTHAELVRMRGSSSHPGVGKTDRLSERPASSRIEPQG

SEQ ID NO: 235328 - protein, 349 aa, unidentified
MTEQRRSYAGECVYVGVDVHKETYTVTCVCHKQIVKPATVQAEPGGLAVSLPRGFPGATLYSVYEAGFSAFVLHRVLTKAGITTMIVNPASIAVAANDKVKTDRRDSKKLAIDLADGRLRGIYVPTEAEELARLLPRTRAQIVEHRATIARQINAKLHQFGLIAPSSRRMISNRYLREMATWTLPPELSVSLTLLAEQWRFATRQLIEMRRLLRDQAKAQEEIEKVYRSVPGIGEVVARTFATELGDMTRFANERALFSYTGLTPSEHSSGTAVRRGSISRQGSSRVRHLLVETAWRAIPRDKALKEIFDRIAATRGKKRAIVAIARRLTGRIRACFRQGTTYAVGTAA

SEQ ID NO: 235329 - protein, 346 aa, unidentified
MNQIARIGLDIAKRWFQIHAVDENGREVLNRKLPRDKVLGFLAALPACDVALEACSSSHHWGREIGRLGHRVRLISPNYVKPYLKRGKSDAHDARAICEAASRPDMRFVRVKSEEQQAALMQHTSRQLLIDQRTAVANSLRGQLAEFGVIERKGIENVGELVRMLDEDAEALAQVPVGALTVMKILADQLRAVDAHLSAIDEEIEAWRRENAAAQALKTIPGVGALISAALLAHVPDPSMFRSGRDFAAWLGLVPRQNSSGGKERLGRITKQGNPYLRRLLVLGATASLRWLHKRSDPLAAWTKRLLHRRPARLVTVALANKLARIAWAIMTTGELFRSEIQTASA

SEQ ID NO: 235330 - protein, 348 aa, unidentified
MTVYIGVDFHARQQTISYLTTKDGEVHQLVLEHEKPAAVRAFYEQFAGQPVVVGFESSGYAAWFEELLEELGCEIWIGHAADIRRFARRRQKNDRRDADLMLDLLVRGDFPRIHRYSAASREVLQQLRYRQKLVKMRTMVVNGLLFMASSRGVTLRSQLQSQRGQARMRQLALPPPLAQQRDELCQLLLELSSKLSKVQAWLESRAEQDVRVQRLRTQYGIGPLTGLCLTATLECPERFANGRKVTAYAGLDPTEDSSAERRRMGAISKQGSRLLRFYLVEAGQVAMRKDADLARVYQRVSRRGGHAKAKVAIGRRLLVRAFIMLRDEIDYAEFQRRGVAARSSRGTA

SEQ ID NO: 235331 - protein, 345 aa, unidentified
MNKQVFAPQATVFCGIDVSAASLAVALIAPDGSLARREFSNNASGHEALSVWLKKRDSPVRVSLEATGIYSLDLALALDAEACVELMVLNPKLVNRFQQTVCRSKTDAADAMVLAEYSQRMPFCRWQRPAASHLALRTVSRYIGSLVVEQAALKNRLCSAESTATTPRAVRVDLKRSLAAIERRVKRLRVEALKLVESEVELRERYQLLTTVPGIGPVNALAILSELILLAPAMTVRQWVASSGLDPVHRQSGTSLNKPSRISRAGNRRLRAALYMSALSASRYDRHLAAFYRALRARHKTGMQALMAVARKMLHAIYGIFKSGTPFDGQRLFPNIQTEVESSAG

SEQ ID NO: 235332 - protein, 354 aa, unidentified
MTEEDRRVIGGVDSHDDTHHAAALDDRGGLLGTEVFDVSGEGYRQLLAWLRSFGGIDRVGVESTGSYAAGLTRHLLAQDIVVLEVNQPHPHTRRRRGKTDAIDAELAARHALGLAAPVAPKETTGIVEAIRQLRVVRESAVKSRSAATIQLGGLIVTAPAELREQLTGPRTLKGKAAACRKLRPDTGRLHSPTNAAKQALRSLARRIALLDEEITDLDTQLEPLVAVAAPRTTQLLGVSTGHAGQLLVTAGQNIERIHSESAFAALCGASPIAIASGKHGRYRLNPGGDRQANRALHMIAVCRLRYCPKTRAYAERRTTEGKTKKDIIRCLKRYIAREIYTTLRHDLNTTQTRT

SEQ ID NO: 235333 - protein, 375 aa, unidentified
MEGAPMLDTTTFVGLDVHARSIKAVSLDVMTGEVRCATFGYDAGAVAEWVRSVDPKAKCVYESGVTGFDLQKRLSGLGVDCVVGAVSKMIKPSADRRRKNDRNDAEFLARMLSVGNVVEVWVPDDECEAARDLTRALEDARDDLSRSKQRLSKFLLRHGLVFDERTPTGRRKGNWTRAHWSWIESIRFAEGADNDVLAYYVDAVRRAAEEKARLEGLVEAEARKPRWRRRVDSLRCLKGVDTASAADLVFEAGEFSRFRNARSFAAWVGLTPSEHSSGESDRRGAITKAGNKHLRKALVEAAWHYLTCSARPKDLARGQAPDPGARRHAAKGVRRLVERREALLARGVHGNKANVATARELACWVWAVGLMAEEA

SEQ ID NO: 235334 - protein, 338 aa, unidentified
MGTYAGIDLHSSNNYIGIMDQDHKRLFGKRLPNSLEKILMVLQPFKSDLKGIIVESTYNWYWLVDGLQEHGHRVHLANPSAIKQYEGIKHTDDKWDSFWLAHMKHLNILPEGYIYPKEQRAVRDLLRRRLFFVKHRTSNILSLQSTITRNLGIKMSSNEIKKLDMNDASKLFDCSNLVFMAQNNISTIKHLAKIIKGIEKQVKPQVDLRKEFEMLTTTPGIGLILGLTIMLEVGDIGRFDKVGNYASYCRCVGSKRISNGKKKGENNKKNGNKYLAWAYVEAAHFAKRYIPKAQRFYQQKMAKANGAVATKALANKLARASYFIMRDQVPFDEDMLFR

SEQ ID NO: 235335 - protein, 367 aa, unidentified
MMGWMAPLRHLSAKLLSDRNSSEWEPSMGEVTTIGLDLAKHVFQVHGVDAEGATVLRKQLRRVQVLAFFSRLPSCLVGLEACATAHYWGRELRALGHEVRLMPAQYVKAYIKRNKHDAADAEAICEAVGRPTMRFVPVKTADQQAAVLLHRGRERLVRQRTGLVNALRGHLAEFGVIAPQGLRNVGKLIAIVRDEGDARLPDLARQVLQVLAAQIEQLEAAVAAIEKQLMAWHKSNPVSQRLASVPGIGPIIATAIAATVVEPSGFRSGREFAAWLGLVPRQNSTGGKHRLGGISKRGNQYLRRLLINGASANLLRSKATNADPWVIGLRQRRPSLVVAVALANKTARIAWAVMHRHENYQRVAAAA

SEQ ID NO: 235336 - protein, 352 aa, unidentified
MLIIGCDFHPGFQQVAIFDNLTGEMKEKRLQHRSEAEAYYRSLAGQPVRVGMEACGHYPWFERLLAELGMELWFGDAAKVRASVVRKQKTDRRDAEHLMHLLIEDRFPRIWVPSLEVRDVRQLLVHRHKQVQQRTRTKNQLQAMALSQGVQKKQKLWTKAGRTELEQLPLLEYAAERRKKLLEGLDDLEVEISELDRRVMNEARERPEAVRLMTHPGVGPVTSLAMVLTLGPAERFGSAKQVGSYFGLIPSEASSGGKQQLGKISKQGNSFLRFLLVEAGQTAARYDPQLKRFYKRLAMRKNRSVAKVAVARKLATRLYLMLREGWTYAQLSQAVLQVSPSHPVVEQKKPTV

SEQ ID NO: 235337 - protein, 410 aa, unidentified
MGRVVIGMDPHKRSATIEVLDENEQPLMTGRFGTDSAGYRLLLEAGRQFGQRVWAVEGCQGVGRHLAQRLVADGETVVDVPAKLSARARVFSTGQGRKTDATDAHSIAVVALRTGSLRQVRPDDRTVALRLLADRRDELGAARTLTINRLHRLLVELVPGGAKKALTTRQARALLTDVPAGDVVRETRRQLAAELVDELEVIDTRIKTAKKQLTALVTETGSGLMQLNGIGPSGAARLLGDIGDVSRFPTKAHFASWNGTAPLDASSGEQTRHRLSRAGNRRINRALHIMAVVQLRHPSTDGRRYYDRRVAEGKTPMEAMRALKRRLSDVVFRQLVNDQKQHPANKDDQDTDTRRTGPEGHMGAATESSAAGSNPNADASDKSLPEPVTIDATPTPSPSPERFATRSRRR

SEQ ID NO: 235338 - protein, 397 aa, unidentified
MIAVGIDVSKGKSTVAILNDDGSIRVHPHEMHHSKTELDALIRYIRAVDDHTVILLEATGHYHYPVLNTFLKAGLSPSLINPYLMKKYGDTELRKAKTDKKDALRIARYALEKWYSLVPYTPLDHKYESLRFLSSQYRQRISVVTKTKIQLINLLDESMPGVTRILTLKSRNPEKCMLLQFIRRFHSFDYINGIGKTRFMNSYVILARKVGERNAETKGHAIYELSRSSITTRSGNMYMDSALDQCVDILSDAQRAADEVILQMQNIAVTIPEYGILRAMPGVGDRLGPVILAEIGDIRRFHSSKALNAYAGNDPPPYQSGQFESQNRHISKRGNPALRKACFEVMQALKLTRPQDDPVYLFMMKKEQEGKPPNVAKMAAVNKFLRIYYARAMELYR

SEQ ID NO: 235339 - protein, 410 aa, unidentified
MEPIIERCCGLDVHQSKIVACLLTGPANQKAKKQICSFSAFTRDLAALREWLLAENVTHVGMESTSIYWMGVYAVLEENFELVVGNAHHIKNVPGRKTDVSDAEWIADLLRHGLIRSSFVPPQPIRDLRDLTRYRRALVDSRSAECNRLIKVLEMANVKLAMVCSEVLGVSGTLMIRELIKGNRDRRAISELAKGALRNKKDQLELALDGRLSDHHRRLLEMQLARIDRLDADVEVLDKEIEERLQPYQREFHLLCQIPGVDGTVAAVMIAELGADMSVFPTERQVAAWAGVSPGNNESAGKRKGGRRRTGNVHLTTALVLAAHCAARQNGSYLKDKYWRLKARRGAKRAAVAIGRKILIAGYHMLKTGRDYRDLGDAFLDSIDETMVCNNLVRRLERLGYYVHLEKRAA

SEQ ID NO: 235340 - protein, 465 aa, unidentified
MPNTRKKHATLQRPPDPTAGLPPLNRHAAGIDVGSAEHDVAVPPDRSPEPVRRFASFTADLHALADWLRACHIDTVVMESTGVYWIPLFPILEARGFAVHLVNARHAKNLPGRNTDIADCQWRQKLHTFGLLNSSFRPTDDICVLRSYLRQRDTLISAAATCIQHRQKALTEMNVQLANVISDISGVTGLAILRALLAGERDPAMLAAFKDDRIKASTHTIAKSLEGNWREELLFHLRQSLELYECYQQKIAECDTQIEAHLLTFDSKIEGSAPPLPTPKRRPKKARRNEPHFDLHTQLYRISGVDLTRIDGIEVLTAQTLIAEIGLDMSRWKSEKHFASWLGLCPDNRISGGKVLTRGTRDVVNRAADALRLAAQNLLHSKSALGAHYRRLRARLGAPKAITAMAHKLARLVYRMLKFGQQYVDKGMEHYEARFRQQRLQWLQRQARELNLQLVPNQPVPSPVS

SEQ ID NO: 235341 - protein, 420 aa, unidentified
MSNMNTENEIVCGADIHRDFLVATMISRKGLKLQERFSMNQDGLLEFKSWILNHKCQRVAVESTGSYWYPIFYTLEGYVEFILANAFQIRNIEGKKTDKLDSERIAVYCLNDLIKPSRIYPKDYRDLRSITRSREALVNARSKLKNQIHQLLATCCIKLSSVISDSFGKSGRYILDRLLEGKSIDQIISGIPSKRVRNKEDELRNAIRNGLDPVQLLLIKTNLDAIDDLSEKIKILDDEISIKVKPFEEDLNILLSVPGIGLTSAATILAEMGDYRDFASADKMAMYFGIVPSVYQSAGKLRTGKITKRGSKHMRRILVEVAKAISKTKKNSNLKRFFMRVYKRSGKKNVAAIALARKVLCIIYHLLMNREDYQEPEIKKTKPKISICGSPISAMDIDEMISTLSRAGYLVEKGFKEGCG

SEQ ID NO: 235342 - protein, 366 aa, unidentified
MKKSITPIGAPVGIDVHKRRCKVVEFRQGEIKVRKPMGNTREEWLDLLTELPAEAEIGLEVSTAGYFAMSVLEAAGWRERAHWVHTAGIDSNRRQKNDRLDAERLARKLAAHHVDPLPEAWFPPPEIRALRLRARQRCWLALLRTQAKNHVQSLLEMHGLQIPGSDPFGAAGRRWLAEQKLPAPLAESIPQTLRLLGLLEEEIHTSEQYLQAADKQFPELMLMRTIPGIGPILAPVIWSEIGTIERFRSAKALANGTGLVASFYDSGEVKTTGPITHQGSRWLRWALVTAANVAIQGRNPFARRYHRLRRSKKANVAKAAIAHSLARCVYGVLKHGCPYREDRWGRKVGALEPETRAGARSTKTAL

SEQ ID NO: 235343 - protein, 388 aa, unidentified
MSPFDASRSLTTLEQDNTVIAVIEMSQSRWLVAAMVPGVERQPLKRIDADEEALLKLLHRWRNEAGQAGREIKRIAVAYEAGRDGFWLARWLQARDIEAHVIHPTSVAVSREHRRAKTDRLDTELLMRAFLGWLRGEKRHCSMAAIPTVEEEDARRPNRERENLVTERTRIVNQVKDILARFGIRTLRPTSRKAEEKLEGLCTAEGMPLLENTRAELCRLFARLCVVREQIRAIEQERLRKLAAVPAKEKGPQAMVRLLARVLGMGVETADMLVNEVLSRHLRDRKAVARYAGLTGAPDESGRRRREKGLARAGNARARRGMIEFAWRFLRFQKDSALAQWFTARTADGRRVTRKTMIVAVARKLLIALWRLVTIGEVPDGVILRAAS

SEQ ID NO: 235344 - protein, 363 aa, unidentified
MIESTTVTVGLDVHARSIRLAAVRADELLEERTLAYDEEAVERLLRRWPAVRCCYEAGPTGFGLYRYLVGRGIDCQVVAPGLVPQRAGDRVKTDARDARKLARLHAGGLLEPIHVPSPELEAARDLVRAREDARLDRMRDRQRLSKFCLRHGRLLPTSAWTVIRRKWLGEQRFEHTAEQITFDTYLHAVDLVDRRVEALERAIRETAERGPWRELVARLRCLRGIDTLTALSLVAEIGDFSRFRTAEEFMAFVGLVPSEHSSGEKRRQGSITKVGNSHVRRLLVESAWHARRRPKVGYELARRQRGQDALVIERSWRCQQRLYQRWQRMAGRGKPHQKIVVACARELAGFVWAIATDQPLRQI

SEQ ID NO: 235345 - protein, 348 aa, unidentified
MLHAGLDLSRNRLDICLLSDQGELVDEFAAPSDHDGVRALARRVLDYGEPVRGVIESMTGARFVHDTLERYGWDVLIADAQKVKGLAPLACKTDKIGARVLAVLSEHDLVPAIWLPDPTVRSEREHARFRLHLVKHRSMLKHRIHSTLMTFGEPCPVTDLFGAAGRELLDRLEIPQPWRGTVDASIALIDDLDRQIAKVNHQLRAGGADHPYVPLLLTVPGIGWVLAFTIAAEIGDVTRFPSPKKLCGYTGLCPRVSQSGETDRRGPLSKHGPKYLRWAMLEATMHALRHPAYAERYQRNKRRLGKQRGARVAQIDIARKLTEAIWHMLTNNQTFAPAPGGATLRLAA

SEQ ID NO: 235346 - protein, 345 aa, unidentified
MDHFAGLDVSVKETSVCIVDDTGKIVREVKVASEPDALLPVLRNPAYHFKRIGLEAGPLSQWLFSALAEAGLPVICVETRHMRAVLKAQINKTDRNDARGMAQMMRAGLYRPVHVKTLRSQKLRMLLTHRKLLQSKAIAIDNDLRGTLRNFGLKVGVVGAVKFEARIRELVENLPDLAALIEPLLIVRRTLREQFCILHRRLLAIVRDDEVCRRLMTVPGVGPVVSLTYRATVDVPARFRKSKAVGAVFGLTCAKHQSGESERSGKISRCGDEMMRVMLYEAAQSMLLHSKKWSWLKAWAMQIARRRGMKKAIVALARRLAVILHRIWVDGTEFRWTREQAAAAV

SEQ ID NO: 235347 - protein, 338 aa, unidentified
MMCYVGIDLHATNSVVVIIDDADRILYQKRLRNDLAVILTALTPYQATVQGVVVESTYNWYWLVDGLMDAGYRVHLAHTPALPQYSGLKHADDQHDARWLAHLLRLRLLPTGYIYPKAERAVRDLLRKRSQLVQHKTMVVLSLQSLLTRLTGNRLSLPRLRALTSEHIQTLVPFPEQVQTVESSLTVLRCLEHEVRTIEDQVRETGRSQAGYALLQTIPGIGPILAGTILLEAGDMQRFATVGYFASYCRCVGSEHLSNGKRKGAGNTKNGNKYLSWAFIKAAHFAIRYETVIRTYYQPKQARTHPLVALKAVAHKLARACYHMLREQVPFDLHRAFG

SEQ ID NO: 235348 - protein, 523 aa, unidentified
MATTRSHKRSRSRPRPILHKPRGVIHPRVQKVGPEHFGIVSVDCAKARSKWMLCDFYGNVLIRPTVVEHNRAGLDAAVAQLRQALQAHAIHDLLVAVERTGRYHRPVQRAFAAAGFEVRIVHPFATKQFRQPSDPGYKTDDTDLAAIHRAAVNGFALRETERDETWTTLQLLIRHRRDLVFKMSLVCCQVREHLDAAFPGYAACFDKLWDSACAWRLVQHFATPRDIAAAGVAGLCRSLDEAGVRYQCPTVQRILDWAQSAAAPDLAAAQHRVIALALNDDRARKTQEILGLERQIAARLVHTPYILLLSFPGINVVSAADYAGEMGPMTDYAHHRCITGRAGLRPCRYQSDQVDHANGPLVHNCNRKLRAAILGIADNLIVCNHHFNILNHHWKAAGKDPRDIRIRVADRFCRISFHMVAGRQVFRHPSLQGRHYILDKLNAFHREHETTGPELLHDLEAAIAQLPRKEYQAEAQPLHEELEKIQAGRRRGPQLLGNILPIVLARLGVGALQSTASGEEDPR

SEQ ID NO: 235349 - protein, 452 aa, unidentified
MKKTKGYIRSLERKQWVSGKVIVGIDPAKEKHQAVVLDENRMQKGNAFTFQTTYEGYNERLWEKLDGIVSSYGPDNLVFAVETACDLWTTIVDYLFRQGYNVLLVNPLTTYHSRPLMNSDYSKTDPKDALLVATNAHNGHYTEYKQFSASINNLHRLSITYTKLQQERQAVILRMMAFMDEVFPEYVKCLNVEIETSLYLLDQYFLPEHFQQMDIDEHELRIRKISNGNHKAETLEKIKEHAHRSIGRNIEGEEETLRLILDGWIGEMRHLVQSIKAVKKAMIELASETEYFEILVSVPGISELTAARFIAECRDLDLFCHYKQIEKMAGSNVRLCDSGKYAGTRRINGIGNKRLLNLIYIMTCNAVRFTPEVRTKFLRRQLKRKSYRKNIFAASSILLRLMMALIKDKRKYETREESLKELAKLEKKYNPEKKDTKKSRKRNKKKPMKKAA

SEQ ID NO: 235350 - protein, 326 aa, unidentified
MKKNFIGIDVSKLKLDVYSNTHSQHCIFPNDEEGFEQMIKWLKSMKISVKSMAFCFEHTGIYSEDLALYLSSKKICFYMVSSLNIKYSIGLQRGKNDKIDSKRIASYIALHADQLSPTTLSKTAVAELRKLLSMRSHLEKEKIGIKNRLKNSSKTTGLDLVFQIETDLLKTFKDKLKMVENEIKSLIKSDVHLCQVDELVQSIKGVGPISSWYLIATTNGFEYFENARQYACYSGIAPFERSSGSSIKGKTQTDRRSNRKINGILTMAARSAVLNNPEMREYMERKIQEGKHYNCALNAVKNKLVARVFAVVKRKTPYVDLKKYAA

SEQ ID NO: 235351 - protein, 346 aa, unidentified
MALTIVETPITGGVDTHADVHVAAALDPVGGLLGVAEFPVTPAGYARLLGWLGGFGTVGLVGIEGTGSYGAGLARHITAAGIQVVEVDRSDRQDRRRQGKSDPLDAVSAARAAQSGRARGAPTGRDGAVEAIRALMVAKRSARSERVQTINQARSLIVTGPDDLRARFAGHTVAALVSELASLRPRPGAVVGYATRIALRELGRRAEFLDSQLERLDELIVPLVVGRAPGLLALHGVGPDTAALLLIAAGDHPARLRSEAAWAHLCAAAPIPASSGKVTRHRLNPGGDREANHALWRIVITRMSSHAPTRAYVERRTAEGLSKKEIIRCLKRYVAREVYRHLRPVG

SEQ ID NO: 235352 - protein, 298 aa, unidentified
MSSEKYIGLDVHQATISVAVMDSQGKVIMESILETKASTLLEFFAGLRGSLFVTFEEGTWAAWLYDLLKPHVTEVLVCNPRRNALLKHGNKSDKIDARKLAERLRLHDLKPVYHGETGVRMLRELVRSYLTVVKDCSRVMNRLKALYRSWAIPCAGRDVYYTRHRSQWLEKIPEAGTRRRAEQLYQQLDLLQHLRQQARREVLAESRKHSITAKLRQIPSLGPIRSALAVALIQTPHRFRSKRQLWTYSGLGLATRDSGEYHYVRGQVQRRKKQATIRGLNKDYNPPRCRELGDGPTT

SEQ ID NO: 235353 - protein, 336 aa, unidentified
MRSIGVDLHTNCFTVHYRPERGKSRLLEYKLYDISKFVSSLEKTDRVAVESTGNTRYFVDLIRPSVKKVVVVDPNHFEVIRKSVKKTDANDAESLSLFLSKDMLPEARMKDKEEAQISSLIQTRDQLVKLRSSLYNKIHGIFNSHGLKGKKESYGTEKGLERVLAMDFDAIVKLELKVIVGQIRGLNSGIKELDDEIASKGKELYKGHDNLTSIKGIGDRAATILLSVIGDVKDFADEGRLAAYFGIVPRVSQSNEKQQYGSITKRGSKIGRTTLIQCTLVAKKYSPYLSTYFDRIKHSRGAGKAIVATARKFLGIIYRTLKNGWVFKDFPNFEVA

SEQ ID NO: 235354 - protein, 304 aa, unidentified
MNGIGIDVSKRQLDVGTTDGKTLQVSNSRSGFAELDLWLQGHPAVQIVLEATGGYEQPVLDFLHNAGHPVVRANALRARKLAQGLGHMAKTDRLDAYALAKMAALVKLRSYQPLEPWQREMRDFVRARRQAMHALTVARQQQEMVGNRELRRLLQANITCLQRTVERLGKRISEQVSKQPQLAVLKSMKGVGPGLQAVLASYLPELGKISGKAVASLVGVAPMSHDSGTLRGKRSIYGGRAEIRQVLYMASMSAMRHEPRLRDFYQSLRARGKEGKVAIVAVMRKMLVILNARMRDAQGGSIPA

SEQ ID NO: 235355 - protein, 392 aa, unidentified
MYIVGIDIGKNHHEASIVSPEGKQIGRSLRFATTHKGADSLMSFIFKNIGNSPCVFGMEATGHYWYPIYSFLKAKGYTIYVINPIQSDSLRKMYIRQTKNDSIDSFLIAEVIRFGQFTTTSMADENILAMRQLCRYRDSVISSRTEIKLRISTIMEQIFPEYEKQFSSLWLSTSMGILEKYLTPENIENAPIDELFEIIKDKSHNKLTMKKAISIREAAADTFGIKIAQDAFSFQLKQLIDRMNFLDKQIEALDCQILEYYEKFDCYLHTIPGIGIIGAATILAEIGDISRFKNSSSLIAFAGIDPTVRQSGEFNSTHNHMSKRGSPYLRHAIFLAATTCSFHNSPLNAYYKKKRDQGKHHLTATGAVARKLTTVIYAVLRDSKPYEPKKFC

SEQ ID NO: 235356 - protein, 422 aa, unidentified
MKLTYPVCCGVDVHKTFLVATIIKTDGLVPKYYKKRFSTFSRDLLAFRQWLLDNDCKDVCMESTGKYWVPVWNILEDAIRVVIVNPKWVSAVKGNKDDTKDSRWIGDLFRMGLVPGSFVPSRKIRVLREFTRYRYKLISMRSSERNRFQNAFTVCNSTLDAVLSDMFGKSAAAIQNYLLDTDVVNPAYCASLLQRAAKKKSADVMAAVEGFKMSAEQKERVRIIQEHFSDINARVARLDAEINKMVSEYESQISLLCTIPGVDRNLAITIISEIGTDMSEFGSSKRLCRWAGLTPGNNESAGKKKSVRITRAGVYLKPALVQAAHAAVKSTKSVYFKSKYEHISKRRGKKRAIIAIARMILTAVFAMLKTGEVFHPCDLQKYDMPEQLRRRQVVSSAKNAVKLLVSLGVLQEDSVSLAALAG

SEQ ID NO: 235357 - protein, 369 aa, unidentified
MDHYAGIDVSLEYSSICVVDATGNIVREDKIASEPEVLIAWFGSLGYALTRIGLEAGPLSQWLYAAMKKAGLAVELLETRHVRDAFKAMPVKSDRNDARGIAQLMRLGWFRPVHCKSIGAQEIRAELTARKLVESKLRDIANSLRGILRGFGLKVGATTERSFPGRVRELVKGHPVLEAIAEALLSVHEVLLREFNGFQKRVQSAACSNVKARLLMTTPGVGPVISLTYAAAVDDPTRFKSSKKTGSHFGLTPKKYQSGETDRSGRISKIGDASVRAALYQAAHVILTKPVKGCPELKSWGMRLAKRAGQEKAKVALARKLAVIMHRMLADGIPFNPNAKAERMAATATKAASKVLALPASGTTVAEAV

SEQ ID NO: 235358 - protein, 391 aa, unidentified
MIYVGIDVAKDKHDCFITNSDGEVLFKAFTITNNLDGFNDLYQKIETVMKDITKVKVGLEATGHYSYNLLGYLIDKGLPTYVINPLHTNLYRKSLSLRQTKTDKVDARTIASMLMSDVNLKSYSDTSYHNEELKSLTRYRFDKVKERAKLKTSVSRLVCILFPELEKLVPTLHMASVYALLSEFPSAKHVATAHLTRLTNLLSESSKGRYGKDTAITFRDSARASIGSNMPAKSLELKHTIKLIQELDSEIDEIENEIKIIMDEINSPILSIPGINYRMGAMIIAEIGDFNRFDSPDKILAYAGFSPSTYQSGQLDGAYAHMEKRGSRYLRYALYNATKYVCHWDPTFAAYLAKKRAEGKHYNVAISHAVKKLVRVIYHLEKTKQQYIKAA

SEQ ID NO: 235359 - protein, 320 aa, unidentified
MASRESLFIGIDVSKQTLDVAFGADPHAPLETIPYTDEGVQLLVTRLQRLQPTLIVLEATGGLERMVFAQLLQAGLPTARVQPRRVRALAHAEGRQAKTDRLDARLLARFAERVRPPHHQATDEQRASLRDLLVRREQVIPMRTAEINRLTAAAPNLRPGIQKHIDWLDQEIRALEQERDNEAERTDEVRRKRELRDSVPGIGAITARNLLLRLPELGTINRTEAAAFVGVAPYANQSGAQHKPRHISGGRRDVRSVLYMATLAATRRRLVRRAFDQRLCQAGKPRKVAIVAAMRKLLTILGAILRQQKPWDPAVHTSAP

SEQ ID NO: 235360 - protein, 344 aa, unidentified
MYFIGVDHHKQVSVMTVLDEDGQERKNGRVANLRSHVERFLEGYRPFVAVVEAGRASYVMADLLRELGGEVKMANPLQVKAIAHARIKTDKRDSRTLAQLLRADLIPEVYQRGDWNRRAQRVMRMRAYWVGKQTEVRNKIRALLAQQGEEIRLEVEKREGKLFSSSGAEFLSRLTLEGQDKMILDDLLQGHREIQAHVKMTDGLVKALYGELEDAARIDTVPGFATTLSVLVAVEIADVRRFARPADLHSYAGVIPSTYSSGGRTVHGHITKQGSTWLRWAVIEAVYPAIRKDLALGTLYKRLARRKGPNVAKIAVARRLLTIVYRVLSEKRDYIPGLMKQSAA

SEQ ID NO: 235361 - protein, 379 aa, unidentified
MDFSTVARLPVGEKPATLFVALELSKATWLVALHSPAADKISLHRLAGGDTQGLLTLIERKRDQAQTALARPVHVISCYEAGYDGFWLHRLLCASGIDNRVLDAASILVDRRSRRAKTDRLDAAALLRTLMALERGEPRVCRVVRVPSPEHEDTRRRSRERARLVNERTQHTSRIKGLLMTQGIRDFAPTRRDWRERLDRLRTADGHALLPCLKAEIARECRRLWQVIDMIAEVEAEQYQVAAETTTGASQLSRLRGIGLTIASVLGNEVFFRNFQNRREIAGYLGLASSPWNSGSVSRDQGIQRSGNPRGRQTAIELAWLWLRHQPESGLARWFHERVGASKGRIRRTMIVALARKLMIALWRYVTQGLMPEGAVIKA

SEQ ID NO: 235362 - protein, 411 aa, unidentified
MSKTLLVGCDVSSKTNTVCLMDEEGKEIGYPTFPNTLSGATALESQLLQLIKEKGFSTLKIATEATSFLDLHLVDFLACSQDLAPFNPSIYQFNPKLVSNFKRAYPDKEKTDKIDAFVITDRLRFGRLPEPYESHRPYLPLRRLTRYRFHLIQAISREKAYFLTHLYLKFSAFSLEKPFASLFGATSLALITEFSPDELVHLPLEDLTQFIIKNGRNRFKDPDKIVEALQRAARESYRLRPALSSSINLILATILQTLRALEEALKEVDKAIEKEFQAFPNTLQSIKGIGPVYSAGIFSEIGEIHRFHTEEALAKFAGLTWKRYQSGNFEAEETHMSKTGNEYLRYYLIEASNALRVHNAEYKAYYETKFKEVTKHQHKRALALTARKLVRLVFALLKKGQLYRADYQQEA

SEQ ID NO: 235363 - protein, 448 aa, unidentified
MAKRKLKMEIINPNAAGIDIGSRSHFVAINQDLSDVREFGVYAEDMKELLKWLLENDVKTVAMESTGSYWQNLFTELQNSAIEVILTNGKFTKNIQGKKTDVLDCMWIQKLHTLGLLRGSFLPDLQTEHLRTLVRHRGNLIDTTSKASKRMAQNMRLMNLRLDVVVKDIVGLTGLRIINAICNGQTSSEELAKLRHGNCKKSEEEIAKALQSNNRQDYLFVLKQELQKYQDAQRLILECDMEIKKLLDEFINQDDVKKSLCIDKKVHKRINKNTPKNLDLNLISYQYFDGIDLYAIEGFSHGTVLTLMSELGENGILKFQNAQHFTSWLRLAPNNKVSGGRILSSRTPKGSNRLKIALRQAANSIGNLKDTHLSNFFNRIAYRKGRAVAVSATARKVATILWNMLYKKQQYNPPTVYEYLDQKRKRKVSELQKQIANLDARMSKIRPA

SEQ ID NO: 235364 - protein, 388 aa, unidentified
MQIITDRPQAPTAIRTDLGAIFVSLELSRSTWLITSLSPGGGEKISKHTVRSGDVAGLWARFSQLKDKVQVRTGQVAPIIVIQEAGLDGFWIHRLLQDEGVESHVVDPASIATSRRRRRAKTDKIDGEALVRALLAYKRGEPRVCAMVRAPTPQEEDRRRICRERKTLTAERIEHVNRIKGLLFAQGISDYEPLRRKRRERLEALRTGDGRLLPEHLKAQIGRELDRLELTLQQIKSVETERDAMLSPSDEGTPAPGAMLKSLKGIGPEFAAVLWAEGLFRSFSNRRQVAAYAGLAPTPWRSGSVAHEQGVSKAGNPRLRTTMIQLAWLWVRHQPRSILTLWFHQRVQLNGGRVRKMLIVALARKLLIAFWKYVTAGVVLEGAETTVA

SEQ ID NO: 235365 - protein, 259 aa, unidentified
MKEQQIKHNEVQIKKFVTKLKSEWNEIHCCYEAGVTGYPLYRYLNSLGVNCTLIAPGKIPRQSSDKIKTYKRDAIKLARLLRSGDLESIHIPSEEEEAVRDYLRSRDSLRLDLGRNRQRLMKFLLRKGNVYSATKYWTVSHYKWLNNLHFENEILQETFNDYYSRVKVQEENLKAMDQKIRGVAESEPFRERVGILRCFRGVDYLTAMFLLCEVCDFKRFKTAGSFMSFLGLVPGEYSSGSKRKQTGITKTPLVDLEGF

SEQ ID NO: 235366 - protein, 270 aa, unidentified
MTTMNYIGLDVHKKTISYCVKDVSGRIQQEGKVGSTRRELDCWMKTLPQPWTVAMEATIFSGWIYDHLLPHAAQIRVAHPLMLRAIAVAKKKNDEIDASKIADCLRCDFLPECHMMPAELRDRRRTLRYRHLLVRQMVQMKNRVSGLLMETGVEYNKQRLHRGSYFRELLSANEEVHPSIRPLLKLSRETIERCQKTEYALVSSLQRDPMLVDRIKRLKTIPGVGRITALTWALEIGDVSRFRTIKQAISYCGLCGDERSSADKAMRMPL

SEQ ID NO: 235367 - protein, 312 aa, unidentified
MDEIIIDKGCGLDVHKETVVGCVMGSGIKKEIRTFSTKTNDLLRLKTWLSGLGITHIAMESTGPYWKPVFNVLEDGFTVILANARHIKNVPGRKTDVKDSEWICRLLRSGLLSASFVPPQGIRELRDLTRYRRKLTQAVSSEKNRIQKVLEDANVKISSVLSDTFGVSGLQMIEAIMEGKLSEEQISELAKGRLKSKKAEIREALVGYFQDHHRFMIRASLEHIKHLEKLVEELDREIKEKLGEKYQKEYSLLQTIPGVKEQGAATIIAEIGADMDIFPSEGHLSTWAGMSPGHNESAGKKKVERRPMAIRI

SEQ ID NO: 235368 - protein, 416 aa, unidentified
MKIVRPICCGMDVHKNIIVATIGITNKKTRITEYIQETFSTLNPDLLNLKQWLINHKCFDACMESTGKYWIPIFNILEDEINIYLTHPKYVKAIKGKKTDKKDSKWICDLFKHDLIKFSFIPPKEIRALREISRYRYKLVGMRSSERNRYQNCMTVSNIGIGSVFSDPFGKSAQAIMKEVLESDIIEDEKILKCIHGSCKNKDKILDSIKHCNIETDQRFKMNESMIHMEELQVHIDNCEIEIMKRAAPMFDQFMHITQLPGISTLSAILIISEIGVDMKQFESDKQLTCWAGLAPANNESANKKKSVRISKAGQYLKPLLVQCALGAIKDKEGYFGIKYSRIKKRRGHKKAIIAIARMMLVSIYHMILTGEIFNPSDYESFRNPKPPIKQQDLTEESAIEFLKKSGFDVSKLTKQ

SEQ ID NO: 235369 - protein, 315 aa, unidentified
MTDKRFIGFDVSKDDIAAAFHGSRKAEHIANNREAILAWLKEQDLAAIKIAAFEPTGGYEWELRRALIEAGVFFVRVHPVEVVAYRTRRAIKAKTDDLDAILIAGFAAEELDGRGLLPMVEGNDSLRELAVRRRQLADMRHAEKCRLNMAREAPAIASITRIIQALDDSLEAIGNELEAVIAADAELGQMAANLKSLKGIGPVSVQTLLAELPELGRLDNKEIASLVGLAPKTRKSGKQTFKARIGHGRPGVRHVLFNAARCAIRHNHIMKDFFDRLVKTNRRPGKIALTAVMRKMLVTLNAIARQRKPWKHQIT

SEQ ID NO: 235370 - protein, 387 aa, unidentified
MTVIIGMDPHKRSATIEAIDPAGKVLRTGQYGTDTAGYTEMLTTARRLGERVWAVEGCNGVGRHLAYRLLHDGEVVVDVPAKLSAQVRVFATGNGRKTDPVDAHSVALAALRSPNLRRVQLDSDLVALGMLADRREELGRSRTDTVNRLHRLLLELLPGGAKKFLSAMQARELVATVKPRDPAGKVRRRLTVELIEDLERIDRKIKAADKELRELVTERGPGLIELKGIGPAGAARLLADVGDIHRFSDRGRFASWNGTAPIDASSGEQKRHRLSRAGNRKINRVLHTMAIVQLRNPTAGRVYYDGKKAAGKTSMEAMRALKRRLSNVVYTAMLTDQRNRETASPGGQSGATTDSCATGLTPDTGPSDKPHPGPTNTHHRPDPHTTT

SEQ ID NO: 235371 - protein, 348 aa, unidentified
MKIIGCDFHPSYQQIAMVDTETGELWEGRLEHERGEARRFYEALQGQQVRVGMEAVGNAQWFERMLAALGQELWIGDAAQIRQMVVRRQKTDRRDAQHILQLLLDGRFPRLWVPSAAMRDVRQLLRHRQKLVELRTQVKNQLQHLALNQGVQRKRRLWSREGRAVLEGLPLEGWTARRRADLLAMLDRLEAQVKELDDAVCQEAWQRPAVRLLMSHPGVGPVTGLAYVLTIGPVARFSRGKQVASYLGLIPREHSSGGRQKLGAISKQGNTMMRTLLVEAAQNAARLDQELRRDYQRLKARKHSALAKVMVARKLAVRMYWMLRENKPYTPRPVARMQGGPSHSVVAG

SEQ ID NO: 235372 - protein, 370 aa, unidentified
MEQTSTFVGLDVHKDTIAVAMLLPGHEAPLQWETVNDAAAVRRLTTQLRRRATGEIYCCYEAGPCGFTPQRQLAAAGVACTVIAPSLIPRKPGERIKTDRRDARKLAELLRAGLLTAVRPPTPAEEAARDLCRTREDVSADLKRARQRLGSFLIRRGLTWRQRGRVWGFRHRLWLRSLVFAEPLDRQVFEHYLVAVEYFEAQLQSVDTQLVALADTEPYREPVGWLRTFRGIDIVTALTLVTELHGFARFTTARQLMAFLGLVPSEHSSGATYRRGALTKTGNTHVRRVLIEAAWHYRHRPTISAALRRRRLGQPPRVIAIADKAQHRLHQRFARLTMRGKPPTKVVVALARELVGFVWAALAPHTAMVA

SEQ ID NO: 235373 - protein, 365 aa, unidentified
MTTRQRDTSSSTDPPVRREGVLGVDTHGEVHVAAVISPLGKVLGTESFPATTAGYRQLLVWARKRGTVRRAGVEGTGTFGAGLSRYLLAQQIQVFEVNRPDRSARRLLGKSDPLDAQAAARAVLSGRARARAKSGDGPVHSARIYKLAKDSAVKARTQAINQLKSVLVIADPALRERLTSLGNAELFRTCARLGPSDGEGDEDAVTQATNMVLSMLAQRIEQLTAQINELNQRLTQLVEQHAPQLLVPVGIGPDSAVTLLITMGDNPERLNTEASFAALCGVSPVEYSSGRRSTRRLNYGGDRQANAALHRIVFTRLRHDPRTQAYYERRTQEGKTRREIIRCLKRYAAREVFNLVRTVSSVPLL

SEQ ID NO: 235374 - protein, 321 aa, unidentified
MKDVSEAIFIGIDVSKDTLEVASSEQAWTWQVVNDTAGIEALGAQLLDLRPALVVLEATGGYEFEAACALQSTGLDVAVVNPRQARDFARAMGTLAKTDSLDARMLAAFARVLHQHPERSRFIKPLADEALLRLQALVLRRRQLVGMLTSERQRLRMSHVGARPSIERTIEFLKAQIQEMETDSGEHIKAHHAALAQALSSVKGVGKTTVSTLLAELPELGQLCRRRIAALVGVAPRNRDSGQMRGQRSIWGGRADVRNVLYMAALVASRTNPVFKAFYERLLAAGKLKKVALVAVMRKLLTTLNAIAKSGNHWKESLHAA

SEQ ID NO: 235375 - protein, 349 aa, unidentified
MQHYAGIDVSLELLSVCIVDAKGKIVKEAKVGSDPDTLVAFLRGLDLAIERIGLEAGPLSQWLHAGLTRAGFEAVLLETRHVKAALSAMTVKTDRKDARGIAQLIRMGWFRAVHCKSAGSQEVRALLVARKLLLSKLLDVEFSIRGILRGFGLKMGMVTRKRFEARVRELYADHAMLEQICSAMLTARLALQTEYAKLHKALLVIVREDEVCRRLMTTPGVGPLVAITFKTGVDDPSRIHKSKAVGALFGLTPKKYQSGETDVTGGITRAGDEMVRTALYEAASVLLSRVTRFSALKRWGMDVAKRRGTKRAKVALARKIGVILHRMWVDMTSFRWTKGAPTTMRLARV

SEQ ID NO: 235376 - protein, 345 aa, unidentified
MELHTIGIDLGKTVFHLVGLNLRGEVVVRKKFSRKRLLHFTANLKVELIGMEACGGAHFLGRALREQGHEVRLMPAQYVKPYVKTNKSDYIDAEAIAEAVGRPRMRFVPIKTDDQLDLQSLHRVRERWVARRTAVINQIRGLLLERGITLRKGRCHVDAALPGILEDASAKLSGALRVLLAQLRLELAHLETRINEADAVINKTAGENEACRRLVAIPGIGPVTATAIVAAIGNGAAFRKGREFAAWLGVVPREYSTGGKQKLLGISKRGNSYLRRLFVQGARAVLQQSAKQSSGLSAWLAQLTSRTHRNVAGVALANKLARMAWAVLAKNEKYRPPMLAGAATA

SEQ ID NO: 235377 - protein, 414 aa, unidentified
MRNKLRYVGLDVHADSIAVAVADEKEEPRSLGTIPNSAEAVRKLFTRLGPSERLRVCYEAGQCGFVLYWQLQEMEVNCAVIAPSLIPRRSGERVKTDRLDALRLVRCFRAGELVAILVPSKEQEGLRDLLRALYRAKSDQLRHMHQLSKFLLRQGRSKPRGIGLLGTKYLAWARAHQFEHPAQREVLNHYVLELEHSTQRLQELTKSLDEVCEQLPKPTAALVAALQALRGVAKLLALSLVSELGSLSRFRTPRQLMSYAGVVSREHSSGNTIRRGAITKSGNAHLRRMVVEAAWHYRHQPGLRPALAKRQTGLSEEVKAIGWKAQLRLTRRYRRLVARGKPKPQVIVAVARELLGFIWAIGIQAEQESRLVLAVQPLARGPNPGRRAASRPDSRLRIVLPPPPTAINAPSSCG

SEQ ID NO: 235378 - protein, 344 aa, unidentified
MIYIGLDVHKGFSRMGGFDPATGEVQDLGKLSNEREALAHRLGHLPSPKTVVLEAGRSSYYMAGLLESMAEEVWIVDPAEVRRLQHTISKTDRRDAAALAWWAAKGVLKPQWRPDAETTDLRELTRGKTVLTRLSAQLQTMIRSLLARHGYECPHARLLSERAQLWLDEVELEGYAGEMLAALRQVLAMAHRQADDFEKKVAAAAAAHPAAERLRTIPGLGPFLSLALAVEIGDVNRFPSSTHLRGYSGLTPAVYQSGDTDARGPLTKTGNRWLRYAAVLAAQRIGQMREPDPRLKRLFLSVAFRHGRNPGKIAVARRLLDLIYLLLKKGQDYRAPRPHITATA

SEQ ID NO: 235379 - protein, 368 aa, unidentified
MSEAITSFVGLDVHLDSIAVGSAPAGREEPRFLGTVVPQWAALSKTLSRLGPPETLKIVYEAGPCGYTLARQLRAHGYACEVIAPAKIARAPGDRIKTDRRDALLLARAARAGELVAVTIPDERDEALRDLSRSREDAVRARLKARQQLKALLLRQGRRYTGKSSWTQAHERYLAEVSFSQPAQDIAFAEYRSAVRDAHERVERLTESLRSQLEHWRMRPVVEALMSLRGIDLIAAMTLVAEIGDFTRFARPRELMGFLGLIPSEHTSGTHRRQGRITKTGNSHARRVLVEAAWNYRFPARISRVLEARQQGQPKAVREIAWRAQLRLAQRYRKLAARQLPFNKICIAIARELSGFVWDIACQVKPST

SEQ ID NO: 235380 - protein, 367 aa, unidentified
MKIIHWIGIDDHADKWTIAQFRGDEDKPAKEFELVPDASGYRKLIQFAKELGGEVRIVYEAGPCGYELYRQLTKAGLKCSVAAPSLTPRKPGDRVKTNRRDAKKLARYLRAGDMLTLIAVPGKERESLRDLVRARHAVQKDLLRNRHQISKLLLRYGHRYREGKTAWSKQFWTWLGKIKLDEQHSQFVLEERIITHERLLEQRGRYEEAIEAAEKAPEYVPYVTALTVLRGIDRLSAMTLLSELGDLRRFKTAPQLMAAIGLVPSESSTGDKTTRFSITKTGNAHVRHIVVEAAWQYQRRTTNGPTIRGRRKDQPQGLIDIAEKCDRRLNRKFHRMTSRGKRSTVAVVAVARELMGFVWAIGQIIHP

SEQ ID NO: 235381 - protein, 374 aa, unidentified
MPRHLRYWVGLDAGHLETAVCLVDVEGHVFFEAMTETRAAPIRDILRGFGVEPVQSITIEAGVGTQMVRDLRSFGFPVQVVDVRKSSKFLAIRRQKTDANDAKGLAELGRLAQSFGPYVFIKPVEHQDIRIMINIRRTLLKHRARTDALLQSIFRLHGASIKLLNGRGSLAAEVANQLRLLRTNGVTIRVDLDPLVRMGEDLRSHIWDMDRKMRTMAASIPVCARFQTIPGVGTITALSFYSAVGDPYRFRSNRDVGPYLGLTPNLYQSGATARRGRISRYGNKLTRSHLITAATVLLRTIKTESSLRTWGLQLATKIGFLKARVAVARKLAVIMMAMWKTGASFDPDKSKPRFLQPEEAGLDPVRISGTKIPL

SEQ ID NO: 235382 - protein, 350 aa, unidentified
MTFVGCDLHTRQQHVAVLDTETGEMQERRLAHDDHAVEQFYGSLPRPVTVGIESTGYAQWFHALMQRQGHTLLVGDAARIRAMVVRKTKTDRRDAAHLVQLLSQDRFPIIWVPDPRVRDLRALVTHRMRLVRMRTMVKNGLHAIALNHRLAAGSALFTRRGRAQLQALTLPPHLTQRRDESLELLSWLDEHIDPLNGQIAAAAEADEQARRLMTHPGVGPLTALASVLVLGPVTRFPTSKHVVSYIGLAPAVAASAEKCRLGHITKQGNALLRYILGQAGQVAARSEPELRRLYSAVMHRHGRAKAKVAVARKLLVRLYIMSRDQIDYAEFRDRGRRPRAHPRAEATERA

SEQ ID NO: 235383 - protein, 321 aa, unidentified
MKIIGCDLHTRYQQIAVLDQETGELIERRLEHASGEARAFYAALAGAVRVGVEATGYTRWFERMLAELGHELWIGDAAQIRAAMVRKQKTDARDAAHLLELLLSERFPRIWRATLEERDLRQLVWHRQKLVWMRNAVGNQLHALAMGEGVCRKKKLFTKKGRVELESLQLGPWASHRRQELLTMLDQLGTSLKALDHAVTEQAEQNPRAVLLMTHPGVGPVTSLAFVLTLGPVERFAHSKQVVSYLGLNPREHSSGGRQRLGSISKQGNPMMRSLLVEAGHSAARLDRELRQDYQRLKLRRGSGVGRVAQAFDLGGIRNKV

SEQ ID NO: 235384 - protein, 343 aa, unidentified
MQTVTTIGLDIAKSVFQVHGVDAAGNVVIRRQLKRRHVLGFFQKLPPCVVGIEACATSHHWSRELKALGHSVRLMPPAYVKPYVKRQKNDAADAEAICEAVTRTNMRFVETKTPEQQSCLVLHRTRHLFIRQQTAVINAIRAHLAEFGIVARVGRNGVMSLLEVIADASDSRLPEVARECLAALGVQLRMLKAQILEFDRRIMAWHRSNETSKRLDEIPGVGPTLATALVASVADPKAFRSARNFSAWVGLVPKQHSSGGKDRLGSITKQGDRYLRSLFTAGALAVIRYAKIHGTKHRPWLTALLARRPTKVAAIALANKIARMAWAMMAKGERYKEPAALAA

SEQ ID NO: 235385 - protein, 373 aa, unidentified
MKKITRFVGLDVHADMIAVAVAEAGRDGEVRSLGKIPNTGEAVWRLVKKLGPVARMKACYEAGPTGYALYWQLTQLGVACEVIAPTLVPVKAGDRVKTDRRDAVKLARCYRSGDLTPVWVPDKEHEALRDLVRAREAAKRDELRARHRLGKFLLRHGVRPPTKMKSWTQTHVAWIKTVKFDQPALDATLHDYLSEVEHVAQRIERLEHWIDTAVDLAPPRMRAVIGALQALRGVAKMSAVTIVTEVGCLSRFPRPKHLMGYSGTVPSEHTSGGPPKRGAITKTGNAHLRRVLVEAAWHYRLRPGLSRRMKRHQGEVSEEIQEIGWKAQHRLYRRFCKLAAKGKPHQKVVTAVARELLGFIWAIGVTAEREAAA

SEQ ID NO: 235386 - protein, 329 aa, unidentified
MRARQAGHEQLLAWARGLDVDRLWAVEDCRHVSGSLERFLLARGERVVRVPPRLMGVARRTGREQGKSDAVDALAVARAALREPELPAARLAGREREIRLLHDHRADLVGERTRIQNRLRWHLHDLDAELEIPTGGLDRRLWLDRLGRRLARVEQSAQVRICRELVARCRELSRRVDELQRELAALVRVEARELLELPGCGPLTAAQLLGEIADVERFASDAKLAKHSGTAPLPASSGHKQRHRLNRKGNRQLNCALHRIAVTQGRLHPPARAYLARKQVEGKSRIEALRCLKRHLARAVFQILKTIAARRTPPTSTPPHAPLMAAGLT

SEQ ID NO: 235387 - protein, 425 aa, unidentified
MTNSQSSEIEFAAYIGMDWADQKHDICLQEVGSDQLEVTQIEHKPEALITWVAQLRQRFQGRPVAIALEQSRGALLYSLMHYDFLVLYPIHPNSLANYREAFTPSGAKDDPVDAQLQLEMVRLHRDKLRPWKADDSLTRTISLLVEARRKLVNDRTRLTNRLRALLKQYFPQALAWAGELNTQRAVDFLMRWPQLSQLQQTEPSGVRQFYQEHYRLGEKLDQYLAEISTAQPLTRDSAVIDSSVSLVQALIPQLRELNCGIARLDQQIQELYAKHPDAQIFRSLPGAGQTLAPRLLAAFGADRERFATAEELQRYSGIAPVTKRSGKTKLVQRRFARPKFVCQSFHEFAKSSILWSSWSRAYYEQQRRRGHQYHEAIRALAYKWIRIIYRCWQLRVPYDEAVYIKSLELRSSPLAKLIAPEVTQR

SEQ ID NO: 235388 - protein, 345 aa, unidentified
MEREDARYRVYVGVDIAAETFTAAWLAPGGKPTTPFTSEQTPVGFAVLRHRLQGTGNPPAATLVVLEATGNYWVALAVALHEAGYRVAVVNPRQAHHFAKAQLRRAKTDAIDARDLAQLAAALRPAPWTPPPAVYHEVRQRLVARDGLLAMRTQARNQRHALRQWPVIVAAVRQHLDELIADLDRRVAMLEAEIGAVLKESVWAESLACLSSAPGIGLIAASWLLVGTLNFALCAGPDALTAYAGLAPVPRESGRSVRGRPRIGHDGNGRLRTAFSMATLSAARYNPAITAFYQRLRAAGKPPKVARCAAARKLLHQAWALGSKLQRFDPDHQQQQHEVLPELAA

SEQ ID NO: 235389 - protein, 321 aa, unidentified
MDNNYTPVGFDVSKATLDYLVDSKVNHCDNSKKCFQKLASKLPANSWCVMESTSTYGYRLADYLVGYGFRVSVVNPLSVKRFAQMNLSRTKTDKADAKLITEYAKIADLPIYKPASEEQNELHQLETVLEQLIKQRTALINQLEALKQMPRPSKTAIEALSKAIASINKQIKAIEKKMHQIVQKDCPDAYEKAISVVGIGERTSILLMAITGGFTKFESVGQLAAYIGVCPRIITSGTSVKGKSHICKLGMAQIRAVLYMCSHSAVKHNNACKALYQRLIAKGKPKKVALLAVVNKLLRQVFACVSKNVLFENNYQIKFGI

SEQ ID NO: 235390 - protein, 419 aa, unidentified
MTDTSIAQAEPVLVAIDVAKARHEVLIAVPGKKRRRRLTILNQLDDFNRLAATLTGYNRPVRVAFEATGNYHRALAYHLSAAGFEMKLVSSVALARTREALHNSWDKNDPKDAQVILHMMEIGNEQFYHDPLMRGTNDIQELSKTHDIVSKSKTELWHRILTHYLPLYFPEADRFHRSSRSDWFFAFLEQYPSPHFISAMGKDAFITAAWEVVGRKVSKERLLADIYETAKESVGLPVDPDSDAIRMFRLVLAEGRSLIAQRNEIEDRTVALLKDNPDYQLLTSIPGIGPINALTVLAEAGDLRRFNHHRQFLKFCGMDLATIQSGTFRGQTKLSKYGNARLRRTLWMAGQVAILQRTNSFRDKFERYISKDRHNNHLRRKAYTAIAAKMARTVHAVVKGGEPYRPFFEGAIDSRRTFL

SEQ ID NO: 235391 - protein, 388 aa, unidentified
MPMTADQAQAQTATPTDLGAIFISLELSKSAWLVTALSPGSEKMSRHTITGGDIAGLFSCFAALRQKCRRRKNKFYPLVVIQEIGLDGFWLGRVLKKEAWIESHIVEAASIAMPRRHRRAKTDRIDGETLIRALMAWKRGEPRACSMVKLLTPDEEDIRRLGRERKTLVAERVLHVNRIKGLLFAQGVRDYEPVNRDRRQRLDELRTGDDRVLSKHLKAEICRELDRLELLLAQIKAVEAERDALIVREAPETPARATALLGIRGIGPEFATILYTEGLFRHFDNRRQVASYAGLAPSPWQSGNVNREQGVSKAGNPRLRATMVELAWLWLRHQPKSALTLWFKERIARNAGRLKTPMIVALARKLLVALWKYVSSGVVIEGAIMKTA

SEQ ID NO: 235392 - protein, 418 aa, unidentified
MKVVFPTCCGVDVHKSFLVATIIKTPKESLQPSYQKKRFSTFNSDLNRFADWLHENDCLDVCMESTGKYWVPVFNILEKRGIRVTIANPKWVKAVKGNKDDTKDSKWIGDLFRIGLVKSSFIPAKDIRILRELTRYRYKLTSMKSSEKNRFQNAFTVCNVALDSVVSDMFGKSATAITDYLTSDEDFDPQHCVSLLHRSLKKKAEDVLSSIEGYEITLEQKCRIGIVRDHLHYIEKLIERVDICINTMVEKYDGAISLLRTIPGIDRSSAITVISEIGVDMAQFGSSKRLCCWAGLTPGNNESAGKKKSVRISRAGVYLKPVLVQAARAAVKDKLNPYYALKYERIAKRRGKKRAIVAIARMILTAIYSMLSTGEIWNPVDLFKVDMPEHLKEQQLQKAMKQAVRFLEAQGLTVLDSA

SEQ ID NO: 235393 - protein, 348 aa, unidentified
MKKVLKQVLGTDVAQKELVVTLGRMYDDMSVELLACNIFKNTDAGITALLKWVQKLTTVEVKVRFVMEATGIYHQKFAYYLDEHGFEVSIVLPNKISNYMRTLELKTINDKTCSQAIARFGLERTLDQWKRPKEIYKLLQQLTRERDQLVAERSVAKNQLHAEQAEAYPNKNTVKRMKARIRFLNTQEKEIKQEIDGIVKSNPELKNEIDNICTIPGVGQLTAAIVLAETNGFELIRNKRQLVSYAGLDIREKTSGTSIKGKPRISKKGNKNLRRAMHLPALGAIKHNAVHRTIYTRLVSRSGIKMKGVVAVQRKLLELIYTIYKNKTVFQPDYEESKRGQPQLATPL

SEQ ID NO: 235394 - protein, 379 aa, unidentified
MNRILKIGLDVHTKNITMCALESKFGEEDVILAVVTVSPDYKNVLDFIQKVKYKMDPQGRDIIHVECGYEAGCLGYSLYHQLTACHVKCRILAPTTMLSEKGPRIKTDRRDAKLIAACLSNGGFHSVHIPSKEDNAVKEYIRMRDDHVLELKRTKQQINSLCIRFGQVYDGNKWMGPHLKWLRELKLPELIQETLNEYLATYDTMIDKIARFDKRIQEIAAQSAYCEKVKKLECFLGIKTHTALSLIVETGDFIRFRKGNIYAAYLGLAPGEHSSSENGGKLGITKAGNSHLRSLLIEAAHGICRGVIGYKSKELKSRQSGNSPEVIAYADKANTRLRSKYYRLTRHGKKKNVTLAAVARELACFVWGMMTDNIYGSAT

SEQ ID NO: 235395 - protein, 443 aa, unidentified
MDQLIERCCGLDVHRDTVAACVRVPGPNGKRQQEVRTFGTTTAELLALRDWLEAHRVTHVAMESTGVYWKPVFYVLEEAFTCLLVNATHIKQVPGRKTDIKDCVWIAQCLECGLLRGSFVPPAPIRELRDLTRYRKVLIQDRTRAANRLHKLLQDAGIKLASVATNILGVSGRAMLQALVDGTTDPQVLADLARGRLRKKLPALRQALAGRFRPHHAFLVSQLLSDVDYLEEAIELVSEEVDRRLAPFARPLAQLDTIPGVDKRTAQVLIAELGVDMSFFPSDAHLASWAALCPGNNESAGKHRSGKTRGGNRWLRTTLVEAAWAATRVENSALAARYRRVMRHRGHQKALIAVHTRSSAPPIISSPRAPHFGSRAPTTTIAVTLSGSSGARSSCLSARAIGSCSNLLLERSVTHSRDFLSRTFVSRSVGKKGVGGGGRRASA

SEQ ID NO: 235396 - protein, 354 aa, unidentified
MKTTTLARSYNGVDVYVGIDVHKKTYVVVVRVNQTIVKRWVTAANPTALAQQLLKYFAGGRIHSVYESGFSGFVLHRALESADIDSIVVHAAAVEIAAHNRVKTDKRDAAKLAEQLEAGRLRGIRVPSEAQEQNRLLSRTREQLVRERAAIKQQIRMKAHQFGLIAPDERREMSHQFVQELLDQSPSEAFRVTVEAHWHIWKALDLQIKKLVAQLKQQAQTDTNEAIYRSVPGVGLISARVLSNELGDMAEFQNERCLFSYTGLTPSEDSSGDTVHRGHITKQGNRHLRGILIEIAWRAIGKDPALGSFFERLHPRIGRKRAIIAVARKLIGKVRAAFRKGETYQLGYPDTPAT

SEQ ID NO: 235397 - protein, 336 aa, unidentified
MKKIIIGIDVSKEKCDATAIFVGKGLLEVAKLDYFVFENCAKGFRSMLSWAKKLMSDVLQEEFLFICETTGAYDRALCDYIYSKGLDIWRESALQILMSSGVRRGKDDKADSLMIAEYAVHHMDKMHLYESPDNRILEIRALFLYRRKLEQEKTSKLVRIKELEATAGKSKTLTFILRDAKKSVRQLEKSIKVCEEKIRELMKEDEALQKSYDHLDSVKGLGIVNITALIVYTNNFKAFRTSRKMATYWGVASFRSKSGTSVDKRVDVRNLSSSMLKSYLTQAALHTIAKGGIYHDYYQRKIREGKNHSIALNNTKNKLLHLAMSLVTNDMDYEEN

SEQ ID NO: 235398 - protein, 308 aa, unidentified
MIMQNYVGCDISKQWLDFFDEASGQYHRIDNQADAIAAYVAGLHPSRDFVVMEATGVHDRLLRHALAKAGVPFSRHNPAHTHHYAKSTRRRAKTDRLDVRMLSDYGRRYHPEAEPAPREEGEHLQSLARLRDQMVEIRATLKKQRSEAFGAIVIAEIEELIATFNVRIKGIEGQIAQAIAQAEDMARDNALMISVPGVSKITSFSLLAHLPELGQRSPKSIAALAGLAPFDNKSGKLNRRSQIQGGRSRVRRALYMAALGAIRACERFRTFYTAIAARSGSKKLAIIAVARKLLVVLNAIIRDKKAFA

SEQ ID NO: 235399 - protein, 374 aa, unidentified
MESILYVGMDVHTSNYTLCTYSIEDDREFGLVKFGPDYLNIVRYVRRLKEHHGQNTRIICGYEAGGLGYSLYRLLTANSIECVILAPSTMPKAPNERKTDCRDAAKIARCLAYNSYRSVYIPDAEDEAVKEYIRMRDNTKDHIKQLKQRILALCTRWRKEFNGTKKFWTVAHMKWLQHLEFENPIAQEAFDEYVIQLNEANARLKRYDERIEKWAALPRYAEKVSKLTCFCGIKTHIALAAIAEVSDFDRFPNANRFASYLGLVPGEYSSGNSINRLGITKQGNSHIRKLLTEAAQCYSRALPGKPSAGLLKRQQGNDPKVIAYANKGNERLKRKYRSIAARKARPVAVTATARELACFIWGMMTNHLDPVFRG

SEQ ID NO: 235400 - protein, 329 aa, unidentified
MFLIGCDFHPSWQQVCWLNRTTGETEENKLVHAPGEVERFYRQFPVPARIGMESTGNCQWFVEMVTALGHELWIGDAAKIRASDSRQQKHDKRDARLLLRLLAEERFPRIWTPSSEQRDLRQLLVHRYKLVLLRMQAKNGLQHLALNQGLQRKRRLWSRAGQKLLRALPLRPWASRRREDLTSVVKLLDQQIQSLDLAVIEAAEKDANARLLMTQPGVGPITSLAFVLTLGDVSRFRRGKQVASYLGLIPREYSSGGHQRLGSISKQGNRFLRMLLVEAAQGAVRCDPQFRSEYLHRCHEKPKGVAKVAAARKLAIRLYWVWRTQKGFP

SEQ ID NO: 235401 - protein, 354 aa, unidentified
MKKFFIGVDVSKDTVDVSFFDDDRMKSPEYLAQYSNSPKGFREMVKDLRMCCHGVSSGQWLFCCETTGRYDHPLCHWLVDHGMVVWRESALQIKWSSGIQRGKNDRVDSLRIAEYAWRHQDKMQKFVKPSESLSNLKAAFTHRRRLVEKRTATRCQLKSMSSEKGLSASVARMIVRDLSREIERLSASIMTMDESIQKIIRSDSELDRNYRHIISVKGVGPITAVALIVCSGNFKAITSAKKMACYCGVASFRSQSGTSINRKASVSNLSNRQIKSLLSMAARSASRSNPVFAEYFNRTLSRGKPVALVYNNLRNKIITVIYKLIERDCDFDVDYMRMHSTGQRANEPAIREAV

SEQ ID NO: 235402 - protein, 386 aa, unidentified
MRRKSFRKHMYVALTKGADRPMPSIAPHDIVWVGLDVHKISISAAVIRPGREAPEVANLMADEASVRKFFARQGPPELLRACYEAGPTGYDLQRKLAGMGIACKVAAPSLIPRAPGDKVKTDRRDAQRLAHLLRSGDLVAIRVPTPEEEAVRDLCRARADMVEDLTRARNRLGKFLLRHGEVWAGATAWTLEHRRWLGARDFADKALSLTFSHYMAVMEEREADLAATTADLGAYYTKAPFAEAVARLCCYRGVDRLGALTIAAEVCDFRRFGKAEHFAAFTGLVPCEHSSGGSVHRGPLTRSGNAHLRHQLVESAWAYRHRPGVGATIKARQEGAPAETVARAWAAQQRLSRRFRALSSRKNVQSVVAAAVARELACFLWAEMVA

SEQ ID NO: 235403 - protein, 344 aa, unidentified
MTYYTGIDVSLRSVSICIVDDKGEVCLEAKVAAEIDAIVDRLRQFSSDVKTVGFEAGALTQYLTYGLQAAGFEVICLEARQVSVTLAAMRNKTDRNDARGLAQILRTGWYSRVHVKSLHSHQVRALLASRKAILKKCVDLENELRGLLKVFGIRLPSRVGHGAFDAELRDRVSSDEMLACALVPMLDARTVLYKTYLKLDNAVRGLVRIDPVCRRLMSIPGVGPVTALTFKAAVDDPSRFKSSRTVAAHFGLTPRRFQSGELDNPGHISRAGDADVRSALYVAAHSLLTRNAQWSTLKAWGVGLAKTRGHRRAVVAVARKLAVILHRMWIDGSEFRWGPVVASA

SEQ ID NO: 235404 - protein, 348 aa, unidentified
MRFYTKQHKYYCGIDLHARSMYLCILDQEGNTLLHKNYKASADAFLRAIQPYREDVAVAVECMFVWYWLANLCAQEDIPFVLGHALYMKAIHGGKTKNDKIDSKKIAILLRGGTLPIAYVYPRTMRSTRDLLRRRNHLMRKRSELLAHIQNTNSQYNLPEFGKKLAYKANRDGVPEHFPDPCVQKSVGVDLQLLDFYDRLLTDLELYIVKKAKGHNIRSFYLLRSIPGVGKILSLVLLYEIHDINRFPRVQDFASYCRLVKCPRESGGKKSGSKNSKIGNAHLKWAFSEAACLFLRGNEQAQLYHDRLVSKHRKGKALSILAHKLGRAVYFMLKRKEPFNMEVFFARA

SEQ ID NO: 235405 - protein, 394 aa, unidentified
MRFVGIDIASETHVVAVVGANSEVEVKPTAFAEDSTGYQKLFAVLGTPGEVLVAMEATGHYWKNLFAALATAGFAVALLNPLRTHRFAGEELERTKTDAIDALGIARFAAQKQPLPTQLPDAATDELRELVRLRERLLQDFGDRVRQLHRLVDLGFPEFTRYVHTLDSELASAILHDYPTAAAFHGVSVKRLARLRYDQRHQVGLELARSLIDAAQRSVGRHHGAAYRVQVRYLCEDLDLLRRRLRELDRDIDGKLREHEVGSLLTTIDGIGPTTAARLIAELGDPAHFRTPGALAAYVGVIPGLKQSGKQQRARAGLTPLGNARLRAALWMPTLTAVRKNPWLRAYYEQLRARGKLPKVALVACMHKLLFAVYSVAKHRRPFIPRPATAGAHT

SEQ ID NO: 235406 - protein, 387 aa, unidentified
MIAVGIDIAKRTHEACFMGQHGQQLGKARRFRNTRHGVQALLDDLQQLREPATIGLEATGHYWLALHEALVRAGHTVQVLNPLQTHAYRKTTLRKVKTDRKDAWLIADVVRIGRGRAAYVPDETILQLRELTRFRWGLVDQIGDAKRRALSILDRVFPEYESLFSDVFIKSSRALLQRATTAAEFADADLAELASVLKQTSRNRLGLEKAEAVQAAARDSLGLAKLGGVASFELRALLDHISFLEQQVAACEQQIEPLLATIPQHVTDIKGIGPVLAASLIAEIGDVTRFARLESLVAYSGIDPSVFSSGEFTATETHMSKRGSPYLRRALWLAAISASQSNPDLAAYLQRRLEQGKPWGTAMGAVARKLLSRIYVVLTQNRPYEVR

SEQ ID NO: 235407 - protein, 326 aa, unidentified
MTSWIGIDVSKAHLDGVLLNAQGHQHTQVSNDKHGFRTLENFLKKRCPQGGHVCLEATGLYGDAVAEFLFQHSYVVSVVNPARIKAYGDSQLKRNKTDRADAALIADFCRTQPPDPWQPPAPQVKELRALLRHLDDLQAMRQQESNRAQSGEQSLTVLGQLQQHITFLDTQIQALKHQIDDHFDQYPDLKRQRDLLTTIPGIADLTAGRLLGELSERRGFHSARQVAAFVGVTPRQHRSGSSIHGHSRISKQGNAALRAALYMPALAAKRYNPILKAFAQRLHARGHSKQSIVVAVMHKLLHLAFGVLKSGQPFDPLYLDKRLVTP

SEQ ID NO: 235408 - protein, 418 aa, unidentified
MPKKRNKVGILPVIEPNAAGIDIGATEIFVAVPGDRDAEPVRCFPTFTVDLERLADWLQQCQIRTVAMESTGVYWIPLFQILEKRKVDVRLVNAHHVKNVPGRKTDVQDCQWIQHLHSVGLLRGSFRPDDEICAIRSLWRHRDNLIQLATLHLQHMQKALDQMNLQIHHVISDLDGTTGLAIMDAILAGERDPHKLAQLRHPRVRASEETIMKSLVGDYREKHLFTLRQSLNAYRYYQQLIQEVDLQVKQMMQRLPSKVADGEKPPKGDKPRPRKIPWRNEPPQLRDDLYRAFGVDLTEVPGINTLTAQMLLTEIGPNLARFPIAAAFCSWLRLCPDPKISGGQVLSSRTRPTKNRAALALRMATQGLHRSDTFLGDYFRRMKARMGVPKAMTATATSVGSGLMRYAAVEVGSWPLAR

SEQ ID NO: 235409 - protein, 399 aa, unidentified
MPSTNLQNSIDFKGQKFYVGLDVHKNSWAVTIRSMDIEVGRFTQPPSAATLVAHLQKNYPGGQYFSAYEAGFCGTGIHEQLCKAGINNIIIHAADIPTTDKQKKNKTDVRDSRSIADYLERGKLTGIHVMTREQQELRSLFRLRESKVKDVTIANNRLKSFLMLYSIELPEAISKKKYLSLKALEWLRNLEMASTAGTITLRQHIEELQYQRKQLYLVTKLLREQIQATDPQTYRCLLSVPGIGGVTAMGLIAEIADFSRFEDPDQYSSFLGLCPWEDSSGDTIKTKGMQPRCNRHLRPLLVEASWMAIRKSPALFAYYSKHAVRNPKQAIVKVARKLAMIAKGVATTQQLYQTDYLHNMRQKQQEQKQARKTKRFSSGIAQQHINKQPDNNIPISLPG

SEQ ID NO: 235410 - protein, 310 aa, unidentified
MSTILGIDVSKHCLDCYDSFTQKNQTFSYTSKGIEELVKFYMTLNIDKVIMESTGSYHKLIHKILSQKGFFVTIVNPYKSRCFAKSAGFLAKTDKVDAKMLCAYGEKIDVQQTPYPSQAQQELSNLIHYKELLIEELQRQKNQLEYDHPSCLIREIIDRRISQLEKDIISINKQIQDTIDKNEDYYKKKECLISVPGIGEQTVATLLCYLPELGAVNRKQIAALVGLAPFNYDSGRLRGKAKIAGGRKKVRKALYMPILTCIRCNATVHHFYQRLRKEGKSAKVAIVACMRKLLTILNIMIKTNQLWHSK

SEQ ID NO: 235411 - protein, 424 aa, unidentified
MKVTYQTCCGVDVHKSFLVATIVKTTGGIEPSYQKKRFSTFNNSILEFKQWLLDNHCHDVCMESTGKYWVPVFNLLEDEINVVIANPKWVKAVKGNKDDTKDSKWIGDLFRLGLVKGSYIPCKKVRILREYTRYRYKLVSCRSSEKNRYQNALTVCNVALDSVVSDIFGKSSTSIIDYLLEQSGTSINHEEIASKLLRSLKSKEDAVIESVEGYQMTDAQKYRMRLVRAHMDYITAEINDVDKMIENMISSNPDFENAVQFLCTIPGVKRDSAITIISETGTDMSQFSSSKRLCCWAGLTPGSNESAGKKKSVRITRAGVYLKPALVQCAHAAVKSDKSPYYKKKYESLVKRRGKKRAIIAIARMILTAIYQMLSTGEQWNPSDLYKIDMPVALVEKQKAKAIKQAKKLLQREGLLPPDEPLAS

SEQ ID NO: 235412 - protein, 430 aa, unidentified
MKSTRNKKIEQVKETSMIVGIDVGSEKHYFRAFNWRGIELTRKPIPFSNSMAGFDMFHSAVVELMENNHLEEALVGFEPTGHYWFNLGQFLSGKNIKFVMVNPHHVHKTKELDDNSPSKNDRKDPRIIANLVKDGRYFYTYMPSGVYAELRNASNRRFVLMEEHTRAKNRLHKWIAVYFPEYKGVYTHIDAKGGLMVLKKAATPDEIIKLGVEGIQQIWKDAKLRGSGHKKAMQIVTAATNSIGLKEGLEEAKMELLDLIEDYELQTKRIERVNDLIKNLCSQIKYIDKLLEIKGIGITTVAGFIAEVGDITRFDNVKELQKLAGLELVSADSGKHNGRTRISKRGRKRLRYLLVQAAVSVIGKNDEFKEIHQYYTTRDNNPLKKMQSLIAVACKLIRVFHVILTKGVDYDASKMLGDIRHPGAADRKAA

SEQ ID NO: 235413 - protein, 404 aa, unidentified
MSVHLAPVTSFTIVVAVDVGKTSAVFSVTDAARHRLVAPSEFAMTGSGLTAAAARVMSAVPASGQVKVGVEAAGHYHRPVLDHRWPDGWEVLELNPAQVAEQRRVQGRRRVKTDVIDLEAITELVLAGYGRPVTGRDVVIGEVSAWASHRSRRVATRSATKNQLLGQLDRAFPGLTLALPNVLGTQIGRLVAAEFADPARLAGLGVNRLIRFAATRELQLRRPVAERLVGAARDALPTRDAAIARQILAADLVLLADLDDQIQYAETALGSLLPHSPYATLTSVPGWAVVRVSNYAAALGDPQRWPGPRQIYRASGLSPMQYESAHKRRDGGISREGSVALRRALIDLGLGLWLNEPAAKNYAHGLKDRGKHGGVVACALANRANRIAHALVRDHSTYESARWA

SEQ ID NO: 235414 - protein, 419 aa, unidentified
MAFKIFRKNCCGLDVHKTWIYACIGITDTNGRTEYKQARFSSFTKGLQELADWLAKYECNDVCMESSGKFWIPVFNILEKTCWVSLAHPKYTKPQKGNKTDRKDAKWICDLYMCDMVKPSFIPPSDIRQLRDLMRYRMKLTNMAVSEKNRALNCLTVSNLKLDDVFSDVFGKSSRSIIHHILEHPGEPFDVTPFIDRRCKDPVEEVQAAVDGAISHEQAVKLRECLQHLDELETHKTNIEKEILRLAQQYPYQLELLQTVPGFSGNIMTAIALISEIGADMSVFPSAKHLVSWAGCCPRNDQSSKNVKSTRISRAGVYLKPLLVQVANAIIKSDKYPECKERYRRIKARRGHKKAIIAVCRMLLTAIWNILSKLEPYSAAGYLEDKLTEHSVVISKAQGLELLRKRGYIFRDEVDPAPA

SEQ ID NO: 235415 - protein, 366 aa, unidentified
MTRYVGLDAHSKRCVYVIQDEQGRAVGEGSVPTTPVGLHLLRARYALPAGTRVALESGTMAFFVARLLTRLELDPRVVDAHEVRMKALRPNQKSDRRDALELCEGLRRDSYRSIVHVPPEPIERLRETLGRRRHLVRVKTMQRNAVKRLLRATGLGSLGRSLGTQRAWDRLLEGVAIDPSLHAFCSAHRAVWRCADEQIAALEDSLRVQGEPLQRDLDRLQTVPGVGPIVALTVVAVFSDVRRFPSAKHAASYAGLVASTFDSGERIQHGRITRRGSNELRAMLCEAVHHAGHPDHPLNPYFSSLCVRRGYKMAVVAVAHRLCRILYAMLRHGTDFDVHRLGIEPGHFEHTIVRHYRRKSRTALPA

SEQ ID NO: 235416 - protein, 332 aa, unidentified
MSLVSTVGIDLAKNVFSVHAVDSTGAVVVRRTLSRTKLSELVAQLPPCLIGMEACSGAHEWARRFAPFGHTVKLMAPKFVAPYRKGGKNDGNDAEAICEAVGRPNMRFVPVKSAEQQSDLSLHRVRQGFVEERTATLNRLRGLLTEFGHVVPIRAVEMRRRVPELIGKLPTRVAACARDLLEHAAQLEAKALGYEREIKIHVRTNELAKRAQVRLGIGPLTASALVATVGNGRDFKNGRQFAAWLGLVPRQYSTGGKTRLGHITKRGDPYLRTLLVMGARSVLQRAASLTDPLSRWALAVRERRGYHRACIAIAAKNARVAWALISREPVAA

SEQ ID NO: 235417 - protein, 369 aa, unidentified
MLIIGLDYHPGFQQIAFVDTETGELQERRLQHREEAEKFYRDLAAQGVRVRVGMEASGHARWFERLLAELNFELWMGDAAEIRTKRVRKQKTDRQDAQLLLRLLLEDRFPRIWVPSWGNRDLRQLLWHRHRMVQARTRIMNQLQAVALNEGLRCKKRLWGEAGREQLESFPLAPWASRRRRDLLELLDRLNPTIAELSQAIEQEVEKSPEAQRLMTHPGVGSLTALAFVLIIGTAERFRSGKPIASYLGLVPAEESSGDRRRLGHITKQGNSLLRFLLVEAAQVTVRSDPEWRSRYFHLAMRRGRKIAKVAMARRLAIRLYWMWRKEWDYEQFTKFGSHAGQPGNRFGVPLNTELTIGHPAPLLRGSSN

SEQ ID NO: 235418 - protein, 427 aa, unidentified
MSNGNYRSKHINTLEGKEGKFSNSDSLIIAADVAKKTFYAALTTPEESVDQIVHWDHPWETRKFVRLMNQSGAGSIQLVMEPTSTYQDPLRYIAYEEGWEVWKISPNRVHNAAEVYDGVPSQHDPKACHLIAWLHKQNLSERWWPEELGTRRLKILTSWLAELEKRFQRLEGQLEAKMAKYWPEISSGWNVTSATMLELLAKYGGPDEIVKDPKKSAREMKRTGGHFLKPSRINQVIKWAKQTVGVPMLKEEREMLSQLAEDANRIRCRQNEIKSRIRHLIHKKPEYEDVLRLAEEVGFSTAAVLRVKIGDFREYNSADELVKALGLNLKEKSSGAYKGRLKITKRGSSAARRYLYLATLRKIISCPIFEAWHKKKVKREGGKKKGKSIIALMRKYAGGLWYVPRGNKFDSRKLFDLTKLDIKKKIA

SEQ ID NO: 235419 - protein, 328 aa, unidentified
MARNDRIVGIDVSKAKVDACIRSLQLRCSEPSTPEGVAAMVAWLQAHQVTTAVLEATGQYERPWAAALRKARINVRVVNPTRVRHFAKSAGRLAKNDPIDAEMIAWFGETFDEDIALPHDPAREHLDHFVTARAALTNMLTQIRNQGEHRRPPLIAKAQAAVAKTLRAQIAKLDAEIAALIEANEGFAQRAKIIDSVPGLGDRSVAGLIAWFPELGHVTDREAAALLGVAPFDDDSGRHHGERHIQGGRSELRTLLYMPVVAAATKHNPVIKAYHQRLAAKGKKGKVIIVACMRKLIIILNTMLARGELWNPPTQAPAPSAGAVPATA

SEQ ID NO: 235420 - protein, 350 aa, unidentified
MKTIHPVIIGIDTHKATHVAVAIDTQGTRLAALSIPTNPKGYLELERWSRSLGKVVAFGIEGTGSYGAGLSRSLLAQGHNVIEVTRPNRQLRYTQGKTDSLDAEGAARSVLSGQANALPKTQTGSSEMIRHLKIARDTAVKSRSQAMITLKTLIINAPTDLRDTLDRIRGKVALIRHIAVFRPGDIDNTLASAKAAMRALARRWLWLHDEIIAHDKELERLVTERAPELMASHGIATLTVAEMLILVGDDPTRIHSEAAFAKLCGVCPIPASSGKTHRFRLNRGGNRQANAALYRVAIVRMRGHAPTRAYVKKRTQDGKSKSEIIRCLKRYIVREIYSQLCVPKLAQIAA

SEQ ID NO: 235421 - protein, 341 aa, unidentified
MEQATTIGLDIAKHVFQLHGADAAGHVLFRKRIPRVKLLGFLAAQTRCVVAMEACAGAHYWAREIAKLGHHVRLIAPAYVKPFIKRQKNDAADAEAICEAAQRPSMRFVPVKTEEQQANGIVFRARDLLVRQRTQCVNALRGHLMEYGYVFPKGITHVETLVALVEDLQSSLPDSVRVILKLLVDTFTALEAQIAVLDAEINQRSKSDPTARRLMTIPGVGPIASTAITALVPAAEGFPAGRDFAAWLGLTPLQKSTGGKQKLGAVSKRGERTIRRLLIIGASAVVQQASRRGAPKGSWLAQMLARKPKMLVTVALANKMARIIWALLVKGGTYRTPAAAA

SEQ ID NO: 235422 - protein, 413 aa, unidentified
MQTLVEHGCGLDVHQATVVACLLWVRRDGRVQKQLRTFGTTTRELVQLRTWLVAEGCTHVAMESTGVYWKPVYAVLEGGELEIIVANAQQVKKVPGRKTDVKDAEWIADLLCHGLLRPSFVPPLPIRELRDLTRYRRKLVESRSAERNRLLKLLESANIKLASVATDVFGLSGRLMLEALIADKTSLSEMAELAKGKLRRKIPQLELALEGKLQEHHRFLLRLQCSRLDAVEKDLAILEQRIQQKLEPYAAQLALLLEIPGIDLTLASVIIAELGVDMSAFQSVSQLASWAGVCPGNNESAGKRKSSRVPKGNVYLKTALVEAANAAARAKGTYLRDKFYRLKARRGYKRAAVAIAHKILVSIYHMVSQNVSYNDLGDLYLDKLNTHHVTRNLVRRLERLGYTVTLSSQPTAA

SEQ ID NO: 235423 - protein, 341 aa, unidentified
MIVIGADTHKATHTCAAIAAVVGELVATKTAPARKDGFGALLRWARGLDAERTWAIEDCRHVSGGLERFLIARGERVVRVAPKLTAGTRTSSRERGKSDEIDALAIARVALREGTDSLPVAFLDPEARAIKLLNEHRECLVQERTRRQNRLRWLLHDRWPELEIPAQGLDRARWLDKITRRLVRTQQSVDIRVCRDLVREIRSATRQINSLEREIAARVADRAPQLLALPGCGPMTAATIIAETAGPRRFSTDAKLARTAGVAPIPASSGKRQRHRLDRGGNRKLNCALHRIAITQGRCHPPAIAYLARKQADGKTRKEALRSLKRHLARTIWHHTQTATT

SEQ ID NO: 235424 - protein, 404 aa, unidentified
MNAVGIDVSKGTSMVAALRPMGEVALPPRSFSHTAAELENLAHLILSLGEDTRVAMEATGRYHEPVAAALHELGIYVSILNPILIKQSGGGSVRKVKSDKKDAMKIAKYALDNWDQLREHTPMDTIRQQLKLFSRQYNMYMNTAVSLQNNLISLLDKTFPGANELFTSPGRADGSQKWVDFVATFWHCDCICRMSEKAFVERYRKWCKRKRYNFSAEKAKDLYISSAGNITTLPRNDNTKLLITSATAELTAITKTLVTIRAEMIRLAKELPEYDTVKAMFGVGEITASQLMAELGDVRLFDNRGSIVAFAGVDPNVNGSGKLVRESNPTSKRGSPHLRKTLFQVVSTYLKRSPIDEPVYRFLYKKRSEGKPYFVFMTAAANKFLRIYYARVKQCLVALDNTES

SEQ ID NO: 235425 - protein, 420 aa, unidentified
MKVVYQTCCGVDVHKSFLVATIIKTTSGVQPSYQKKRFSTFNNSILEFKKWLLDNSCRDICMESTGKYWVPVFNLLEDEINVTIANPKWVKAVKGNKDDTKDSKWIGDLFRLGLVPGSYIPCKPIRILREFTRYRYKLTSARSSEKNRFQNALTVCNVALDSVVSDIFGKSATSVIDYLLEQSNNSINHEEISSRLLRSLKKKSESVIESIEGYQMTDSQKYRMRLVHAHLDYITATIADIDSMIDSLVEPYDNAVKLLCTIPGIDRRSAIIIISEIGTDMTQFSNSKRLCCWAGLTPGNNESAGKKKSVRITRAGVYLKPALVQVAHAAVKSNKSSYYKAKYERIMKRRGKKRAIIGIARMILTAAYHMLSTGEVWNPTDLFKIDMPEPLKEKQKEKAIKQAKKLLIAEGILDESLLAS

SEQ ID NO: 235426 - protein, 332 aa, unidentified
MGIDVSKPYFDASLMAVINHEKQTVETARFDNTNAGIKVFEKWLKTHKVLMDENSLLVIENTGIYHRLLWSFCSRKMLPIHIGNAAHIKWSFGIARGKNDKIDSIRLCQYAFKESDTLKATPALNPVLMQLKDLMTARSRLLSQINSIKTYIKELKNVSDKAVQKLLEQAHETAIDGIAKSIKNIEAQINKIIAENEALKNNYDLLVTVPGIGHLIAIYLICCTNNFAGKISGKQLACYAGVVPFEHSSGISIKGRNRVHTMANKDLKKMLHLSALSAIQYYPEFKTYYNRKKEEGKHSMSVLNAIRNKIVLRAVAVVNNQKPYVNNNKIAA

SEQ ID NO: 235427 - protein, 375 aa, unidentified
MLRFRLMIKRGLNETATKHQKVKRSMKYYAGLDVSVKETSVCIVDESGKLCREKKVVTHPDDLVAVLSDPAFNFERIGLEAGPLSQWLFEGLAKAGFAVVCIETRHTKAFLKAQQLNKSDRNDARGIAHMMRVGLFKDVHVKTLTSQKRRALLTARKLLQEKAIAMENDMRGLLRNFGLKVGTIRAFKFDERIRELVEAAPDLAEIIESLLAARQKLREEFVKLDRKVRGEARVDPVCRQLMTVPGVGPIVALAYTSTIDIPSRFRHSRAVGAVLGLTPVLNQSGESSRIGHVSLCGDGMLRGLLYEAAQVLLIRVKKWSWLKAWAMNVAKRHGIKKAIVALARRLAVVLHRMWVDGSEFRWTREATPTTTDATA

SEQ ID NO: 235428 - protein, 345 aa, unidentified
MDNFFVVGVVVSKTKLDYCLMSQDKVLKQGTMVNETSAIRLTFASFLNEFGLSNDQIVICTEHSGQYNYPLIYSCECSKYKLWLENPNQIKFFCSGLQQGKQYKLNSKQIAVYALRNLDKMHLCHQQVSEVEHLKQLHSELEMLEIDSAKLHSKLVDQKNYMSEEVFNINAGRLINLMQGLEDAITTIKSEIRCIFADNLFLSEQMELLTSIESVDTDLALKMIVETDAFTRFDNCRQFCSHVGIAPLNKIIKVNEHLVNASYPKNDKGIKTFLNQAALSILKNNDSELKNYYIRKVKEGKDEKIVLNAIRVKLVARMFAVIKNNQKYQHVLMKEGIVTSVYESL

SEQ ID NO: 235429 - protein, 333 aa, unidentified
MIVIGIDPHKSTHTATAVDPVTNTDLGSLRIDATLTGYKTLIAWAKAWPTREWAVENAEGLGHHLAQWLLVLGEIVLDVPATATARVRQLSRGGRRKNDRIDAAAAACVAALQGDARPVAPEGPTDVLALLDERRTNLSGSRTRIVNQLHALLRQLFRARSEVDRIRVGLCRDLIADIRRLDGQLAENEKQMTRALDEQGTGLREVDGIGPVTAARLIGRTGRVSRFPTAAAYANYNGSAPVQIASADTDRHRLSRYGDRQLNSALYTIAMVQIRMPASAGRAYYDKKLAEGKSPRAATRSLKRHLSDHVWRIMLADEKRSHRQHEKESDRAA

SEQ ID NO: 235430 - protein, 320 aa, unidentified
MSVLSVTVGIDVAKAHVDVCVLGVASGVQRFANDADGHSALAAALLPLGASLVVMEATGGYEAALACALQASGLPVAVLNPRQARDFARSMGRLAKTDAVDARMLAEMAAVLVHREDLARFVRPVADECQQWLAALVTRRRQLLAMLGSEHQRLQITPTKLHPSIEAIIAAIKAQLDDLEAQMMDHVREHFSGLDGLLQSTSGIGPMASATLIAQLPELGRLNRREIAALVGVAPMSNDSGNRKGRRRVQGGRFEIRRVLYMATLTAARYNPVIRAFYERLKAACKLPKVALVACMRKLLTMLNAMVRTGKPWDASLHRA

SEQ ID NO: 235431 - protein, 320 aa, unidentified
MMAQNDLVVVGIDVAKDKVDACIRAFKLRQTWPSTAPGQRKLVAWLRKHQVNKAVMEASGGYERAWALVLREAGIEVRIVDPKRVRSFALSAGRLAKNDAIDAEMIAWFAETFSEAPSQKHDAARAELQALVKARLGLIDFRMRLVSQSEHAAPRLVQKAHAHILKSLAVEIAKIEVAICAKIKSVPDFAERAEIIESVPGFAETSSANLVAGMPELGEVSDEIAAALIGAAPYDDDSGKRRGERHIKGGRRWVRNAIYMPCVGAATQNNPVLKAYYQRLIAKGKKPKVALIACMRKLIIILNTLIARRQKWDSSRYAVS

SEQ ID NO: 235432 - protein, 391 aa, unidentified
MDQTQDLGVAAVLVAIELSKATWLLAIHEPVTGKVSRRRVGGGEADTLIATIEQIRHNAEARLGAAVEIECVFEAGYDGFWLQRRLVQSGIACRVMDPASLKVDRRARRVKTDRVDAECLLRALQAWRRGDRHACSFVRIPSIEEEDARRPHRELARLVKERVAHANRIKGLLALHGVRTYQPLRRDRREALAVLQTSCGGPLPAQCRAEIERELSRLELVLQHIEEVEQTMAESVSMASSESKGVPARSEPATSDAVTMLEKLTCVGRETAVVLAREVLCRDFRDRRSLAAFAGLTPCPYSSGRVRHEQGISKAGNAIVRARLIQLAWRWVRFQSTSDVTAWFLAGTTGNSKRSRRITIVAVARKLLIALWRYATTGLVPAGARIRAAQT

SEQ ID NO: 235433 - protein, 337 aa, unidentified
MKYCGIDLHSNNSVVIVSDDEDRIVLQKRLANDLGQIRGVLEPHRDELVGIVVESTYNWYWVVDGLMDAGYRVHLAHPSAIKKYEGLKHSGDVADAAYLAQLLRLGLLAEGYIYPRAERGVRDLARKRMQLVRYRTAQILSIENILIRQTGARMKGEAVKRLTAAQVDGFALAPDVALAMEANRAVSQALGQQIEALERRLKERVSLRAEYRLLQTMPGVGEILATTIMLETGCINRFAQVGNFSSYCRCVDSLRESNGRKKGEGNAKNGNKYLAWAFIEAANFALRCCPQAKSFYERKKNKSNRVLALKALAHKLARACYHILRHQEPFDVDRCFG

SEQ ID NO: 235434 - protein, 346 aa, unidentified
MAAFAALDVSKKSTSIHIVDEKGVCLWRGKTLTDPDALAEALSPFSDDLALVGLETGSWTTWLWHELTERGFPMVCMDARQAHAALSVTINKTDANDAQGLAHLLRTGLFRKVRVKGWEDVQKRTLLRARSTMLRCVLDLANAIRGALRTFGISLPAGTGNGGEKTFERRVVTCLTARADLAIIIGPLLEAWRAGRTQVARHERAIRAIVRSDPRCQLMMTVPGVGYLTALGFVGAVGDPETFRSGRTAAAWIGLTPRRYQSGTINQQGRISRQGDKLLRAYLYEAAAHILTRSSKDCALRRWGLKLRDRIGFKRANVAVARKLAVVLHAMWRSGRPFEAEGCATG

SEQ ID NO: 235435 - protein, 347 aa, unidentified
MNQIIRIGMDTSKHFFQLHGVDAAERPVLRRKLRRKEMVAFFAKLPLTVIGMEACGASHYWARELCKLGHEVKLIAPQHVKPYIKRNKNDGRDAEGLCEAMSRPTMQFVPVKTEEQQAALMLAGLREQMVARRTQLSNMIRGYAAEFGITAAKGLDKIEPLLAGISANQTLPVLARDLFVMHGREYAQLQAELKKIDARLVAWHRSNADSRRLAQIPGIGPIGATALVMKAPDPRLFPSGRHFAAWIGLTPKDHSTAGKTRLGTITRAGDERLRSVLVAGATAVIQQARRGRGHPSPWLLALLARKSSPKLAAIALANKIARIAWKLLVTGESYHAGAKSIVSAHAA

SEQ ID NO: 235436 - protein, 345 aa, unidentified
MGIDVHKRKWSVATITESGFQRVHTQNASAQELIDFLHRQYPGGEYMAVYEAGFTGFSTYYSLTEAGIDCMVIHASDVPTTQYENVMKTDKIDCVKLAKSLRAGLLKGIYIRPKDSIDDRGVIRMRRAIIKDLSRYKIRVRHLLMSNGVQIPEQFDKRKGSNWSGAFIQWLKGDVSLLSETRCTLDMLIAQVERMRQAQLEATRELRKLSRTERYAGNYDLLCSIPGIGGIVAMTLLTEIYDISRFRNERQFASYLGLVPTSHSSGDKTIHGEMTFRGNKELGPMMIEAAWIAIRNDAGLAASFSNYCRKMKPQQAIVRIARKLANIIISVLKNKKKYVPYSCNG

SEQ ID NO: 235437 - protein, 389 aa, unidentified
MRFYTKQHKFYGGIDLHARTMYLCILNQNGEIVLHRNMRAAPEPFLQAIAPYREDLVVCVECSFTWYWLADLCTQEGIPFVLGHALYMKAIHGGKAKHDTIDAQKIAVLLRGGMLPQAYVYPADMRATRDLLRRRRHLVRHRAELLTHVQHTNSQDHLPAIGKKIADQANRDGVAERFPDPAVQKSIEVDLTLIGHDDALLRDLELAIVTTAKQHDANTLYLLQTVPGIGKILSLVLLYAMHDIARFPRVQDFVSYCRLVTCAKESAGKRYGTSGTKIGHAYLKWAFSEAAVLFLRHNPAGQKYLVRLENKHGKGKALTVLAHKLARAVYHMLKRTTAFDMEKFLRSYGRGAGEPAASRGRDGLSLATVLGHEGRLVSANPSEHRGPVP

SEQ ID NO: 235438 - protein, 342 aa, unidentified
MSISYVGVDLGSSNFQQVAIKSDGSIKVNRSFTTSEANLIKAFSDQRGEIHAHLEAGELAPWAASIIAPLVTRVVCSHPKDNAWIAKDADKCDRVDAYKLAELMRLNRFKEVHYAPDQPRRNFKQLVQHYDEMTAQQARLKTKLKARLRMQGVIVTGERLFSLTGRKAVLAKVESRDLRTAITQLYEVLDQSVAAQQEARLLMLRAAQAFPEIKWFRTAPGVGPIGACRYSAYIHTPSRFSSKRKLWKYCRLSVSHRSSNGKPLRRPRLDYSGCGRLKDVSRKAFEAALRTRADNGFKRAYQRALETTHDKTHARLTVQRKIVSTLRAMWLRRTPYCDELTR

SEQ ID NO: 235439 - protein, 466 aa, unidentified
MGKPRVVPDEDHEVMYQRVAAVDVAKASGVVCLRAPDPARPGRFTSRIWDDVPATRARIAELGAELLVSGVQMVTLESTSDYWRIWYYVLEGAGLAVQLVSASQAKNLKGRPKTDKLDAMWLARLTQQGMLRPSFVPPAEIRRVRDFTRARTDLVAERTRCLQRLEKLLEDAMIKITAVARDGLKAKSVAAMVAALAAGQRDPAALADLAKGPLRAKKDALAQALDGMFDSHHGVIARALLDQVAFLDQQITQMEEQAIAALAAVPQSWGVDGDGQTGPAAGTAPGSPVLAAAHRLAEIPGISVWLAIVIIAEIGLNMAVFPTPAHLVSWLGLCRSAAQSGTRRGKGKPKKGNSYARAAAGQAAIGAARTASFLGERYSRIARRRGKPIAQVAVARSIMIIAWHLLNDPAARYHDLGPDFLAGRVNRDKKIRNHLRGLNALDVTAQDICAALGITAPDIPPGGQAA

SEQ ID NO: 235440 - protein, 416 aa, unidentified
MNAVGIDVSSRKSTVAVLRPLGEVVCLPFDVSHDADGLASLAEKLKALDGETRVVMEHTGRYYEAVAKALHEAGFFVCAVNPLLIKEYGANSLRRVKTDKADAVKIARYALDNWADLRDFTPMDAIRYDFKTLNRQFQLASKQRTASANNLIALLEQSFPGIRKCFDSPVRSDGTQKWVDFAHSFWHVDCVRKQPFAAFCERYRKWCKRHAYLFKQSNAEEVYALAKRAVVLTPKSKVVKVLVQEAANQLISISRSVEVYRAEMDRLAAMLPEYPVVMAMYGVGKSYGPQLMAEIGDVRRFERKQALVAFAGIDPMPNQSGDKNVRSNKSSKRGSPYLRKTLFNVIRTYLQCAPQDEPVFQFLNRKRAEGKPFYVYMLAAANKFLRRYYAKLRDYFASLDTLQSVDPIPATLKASL

SEQ ID NO: 235441 - protein, 319 aa, unidentified
MAQNDLIVGGIDVAKDKVDACIRRFALRQTFPSTPQGHRKLVAWLRKHKVGKAAMEASGGYERDWAKALRQAGIEVRIVDPKRVRSFALSAGRLAKNDTIDAEMIAWFAETFDEAPSQAHDAAREELAGLVKARKNLIDVKTRLQSQNEHAVPGPVQKAHAHVLKSVAGEIAKLEAAISARVKATPEFAERAEIIESVPGLADNTSAVLIAGASELGKVSDEIAAALIGIAPYDDDSGKRRGERHIKGGRRWVRNALFTPCLGAATQHNPVLKAHYERLIAKGKEPKVALVACMRKLIIILNTMIARGEKWDPSRYALR

SEQ ID NO: 235442 - protein, 483 aa, unidentified
MSKRSQTMKKHKKTKPKPEAPKPLHEPEPDAAGIDLAATEIWVAVAPDRCELPIRRFGAFTQDLMAIVAWLLECGIRTVAMEATGVYWIPLYQLLSDAGIKVCLVNARHVKNVPGRKSDVRDCQWLQYLHSVGLLRASYRPDQAVCSARSIYRFRQNLLTQCAEHLQHMQAALDQMNIKLHHVIDDLSGVTGMAIIGAILNGEREPLRLAKYRDTRIKATEETIAKSLEGDWRSEHLFILRLAWENGKHVQEQIKKCDQELMEYTRQLEASTIVAKPIVPIKIVSLDAEPGAPELNAIPAVRPSKPRRKTSKNEPDGPWREELHRFFGVDLTVIPGISILTGITLMTELGNDLSAFKTPQHFSSWLCLCPDNETSAGKVLHNSTRCSQNRVRQALRMAASSLHHDKSYLGEKYRRLRAKLGAPKAITAMAHKIARIIWYLITHQVPFDMSIFAAIEQANQKRRLKGLYSVARQMGYQLIPIAA

SEQ ID NO: 235443 - protein, 403 aa, unidentified
MNSVGIDISKGRSTIAVMRPFGEVVISPFEVRHTGSELSKLARQLKSLDGETCVVMEATGNYHASVAKLLHDAGLYVSVVNAKLVHDYGNNELRRVKTDRKDAVKLANYGLDRWLTLPRYIPEEDTRLLLKNCYRQYRQYSKVQTVLKNNLISLLDTVFPNANRLFSSPIRGDGSEKWVDFVAEFWHCRCVSEKSERAFTSKYLRWCRKHGYNFREAKAHTIYAEASGHIGVMPKSETTKLLVKQAVSQLRATSTALAALKQEMQSLASVLPEYPVVMDLFDVGPTLGPQLIAEIGDVRRFYSKKALVAYAGLDAPPNDSGDVTGRHKSMSKIGASSLRRTLFLVMSVYLQTAPLDEPVCQFMDRKRAEGKLYRVYMMASANKFLRIYYATVKAYLESLEHTA

SEQ ID NO: 235444 - protein, 348 aa, unidentified
MQSTSALPVIGMDIAKNVFQIHVVDVETGEIGRHKLKRERVTAFFANRQKSLVAMEACGGAHHWARTLQALGHEVKLLPAKHMRPFVLRDKTDARDAQGIWVAAQQLQIKAVPVKSEQQQACLALHRMRAQLMKMRIMQTNALRCLLYEFGIVLPEGHRILLDRIQGELGKAQERGRLPAVVVLSVQEQLKRIEGLQADIDQLDKRLASLAKHNQQMQALLAIPGIGPLTATAVVSTATDITSFESGRQFAAWLGLTPRQTGTGGKTRQLGISKRGDAYVRTMLMHGARAVIARSRHGGWIESLLQRRPYNVVVAALANKLARTAWAVLAKGKAFDPLQWNPTEITPA

SEQ ID NO: 235445 - protein, 329 aa, unidentified
MVTMAQFHLGIDVSKAKLDLALRRPDGKLRNKVCLNTPAGFDALLTWLQAQGISADDYAQTHVCMEATGIYWEAVAEFLANQGMTVSVINPCQIKAFATSLLVRTKTDRVDARLIAQFCHERQPDPWQAPSPAEQTLRALVLRLDALQAMHTQESNRLQVCRPILHDKIAEHMAFLDQEIKVLAKLIRQHIDNDDDLKKKRDLLDSIPGIGERTLAILLAFVGSTERFKNAREVAAFGGLDPRQHQSGTSVLGPTRLSKIGHAFLRKALYMPAMVTLYKTQWGQVFRQRLASAGKPPKLIIGAMMRKLAHVAFGVLKSQQPFNPALHGA

SEQ ID NO: 235446 - protein, 348 aa, unidentified
MTTLARSVTGGVDTHLEFHVVAALDERGALLGVERFETTTRGYKKLLGWLESFGPVVLVGVEGTSSYGAGLTRHLHTEGIVVVEVDRPNRLRRRRKGKSDPEDAISAARAAFSGDANGAAKTQDGNVEAIRVLRVARTSARSARSQALNQMRSLVSTAPEPIRGERRGLSVQRLLARASTYRPGANRDVVSLTKLTLRALARRAIELEEEIKTFDAILEPLVSETAPELLSTLGVGPDSAGALLVAAGDNPERLRNEAAFAHLCGAAPLDASSGKQQRHRLNRGGDRQANSALWHIVITRMAYDARTNAYIERRMNDGQLTKKEAVRCLKRYVAREVFSLLPMDRLTA

SEQ ID NO: 235447 - protein, 412 aa, unidentified
MSLALPEALFFTGIDWAAATHAVCVMDAAGKITAEFTIAHSADGITQLIRRLARYGDPASIPIAIERPNGRLVDLLLEAGYPVVPVSPNAIKTWREGEVLSGAKSDAGDAAVIAEYLRLRRHRLQVAVPYSGETQALRTVVRTRSDLAGMRVAATNQLSALLEASWPGAQAIFADVESPISLAFLTRYPTPSSAAHLGEKRIAAFCASQGYSGKRPAAELLARLRSAPAGTADPALTTALGTAVLAMVAVLRALNTAVKDLDRSATARLGEHPDGEIFTSLPRSGQINAAQMLAEWGDCRQAYDGPDAVAALAGCTPVTKESGKHRGVHFRWACNKRLRKAMTTFAGNSRHASPWAAKIYNDARAAGKDHPHAVRILARAWIRVIWRCWLNRTLYDPARHGAATALAEPIAA

SEQ ID NO: 235448 - protein, 354 aa, unidentified
MSQTLKSAIAVIGIDIGKNSFHVVGHDERGAIVLRQKWSRGQVEARFANLSPCLVGMEACVGAHHLSRKLNSLGHDARLMPAKYVRPYSKGQKNDFRDAEAIAEAVQRPTMKFVATKTADQLDLQALHRVRERLVSQRTGIINQIRAFLLERGVAVRQGLRFLRAELPRILATPPDVLSPRMLRIIEDLAGDWRRLDERVEGLSKEIEAIARQDAGCERLMSVPGIGPIISSAMVAAIGAGDVFTKGRDFAAWLGLVPKQISTGDRTILGKISKRGNRYLRVLFVQAAWVVLIKPQSWERHGLKSWIEAAKKRLHRNVLAIALANKLARIAWSVLAHGRSFEASKLAAAVTQPA

SEQ ID NO: 235449 - protein, 416 aa, unidentified
MTTHRIAGIDVHKKMLAVVVLDAAEEGEWRLHRRKFLTTGEDLDALAVWLASLEVREVVMESTAQYWKPVWRVLEPQCHMELAQAQSNRGPRGRKNDFADAERLVRRYVAEELILSFVPDPQQRLWRALSRTKQTLTRDRVRLQNRVEGLLEEMCLKLSSVVSDLLGVSARRMLTALSEGETDPAKLAAMAEPGLRATPERLCDALRAAPSLYPGYRHLLKQYLERIQLQDRHIAELDRELGVALKEHEDAVVRLADVPGLGADSAQQIIAEVGPQAAPFPTAANLCSWVGSCPGQEESAEQSTSDHSPKGNRSMRRILNQAANAAIKTKGTVFEAHYRRIRGRDPKKHNVAVWAVANRLCRLIWKILHHNVKYEERGSRPNPKAVRKRARRLVRQLRALGYCVQVSPPQPQAGTA

SEQ ID NO: 235450 - protein, 477 aa, unidentified
MSAKGKTTKSQPGRPKAPRQKRKRQQPPPQAHMPVLEANAAGIDVGAREMYVAIPPDRDPAPVRVFATFTGDLEALADWLVERGIATVAMESTGVYWIPLCQILEDRGLRVCLVNARHMKNVPGRRTDWYECQWLQYLHAVGLLRAAFRPEQEVVAVRSVMRHRKRLVELVGVHVRHVHKALTQMNLQIHHVINDITGVTGTAIIQAILGGERDAAVLAKLRQPEIRADEETLRKSLEGDWRREHLFALRQSWDLYREYLRAIEGCDGEICEMLGAHEPKVDPAEKPLPTDNKRRTRRHHPRTGDFRLDVRTEAYKQFGVDVTRIPGLQSIGLQLYSELGNDMSRWPSAGEFASWTGLCPDNDKTGGRVVWIGVRQVHNRAGQLFRQAANSLHHSQNQMGAYLRRMKAKLGSEAGIVATAHKIARVFYAVVKHQVEYDETIWGQHDQERQCRLEAKLRRQAQHLGFQLVPIQSSATA

SEQ ID NO: 235451 - protein, 342 aa, unidentified
MKFYCGIDLHATNSFLCVIDDKDKILLKEKLKNDLGDIIYALESFSPRPSVVVEATINWYWLIDGLQEAGFDVKLAHSMALYMITGAKVKTDRRDAFSLAKLLRLDAIPEAYIYPKAKRPIRDLLRKRKQVVRLRANAYGALRRVLLQHGIYGYSQATIKSLTEAQLDQHLEHFATQAGCHLEVQRIRFYSDQIKTLENIILSSVSDDQRFELLQTIPGVGKILALTILYESGDINRFQSAKHFCSYARVVPGIAQSSGVSKRGRGSKQGNPHLKWAFCQAAAISVRYNTGIRKFRQRHLARRRSKAKKLVTLCIVSHKLAIASYNILKNRVPFKQELMFGS

SEQ ID NO: 235452 - protein, 341 aa, unidentified
MPIVTVGIDLAKNVFAVHGVDDAGKAVLIKPRVSRDQLSALIAQLPPCVIGMEACSGAHYWARVFQKCGHTARLMAPKLVAPYRMSGKRGKNDAADAAAICEAVTRPSMRFVPLKDEHQQATLCLHRTRQGFVEERTATYNRLRGLLSEFGVVLPQSPEKLRLDTATHLDSLPGWARRCISDLLEHAGDIEDRLGEYDRAIGEIAREDERSKRLMQLRGIGPTTASALLASIGAGHDFRNGRQVAAWLGLTPGQHSSGGKARLGSITKTGDAYLRSLLVLGARAVMANLGDKQDRFSRWARSLVERRRYWRAAVAIAAKNARMAWAVLKYGGDFRREPVAA

SEQ ID NO: 235453 - protein, 360 aa, unidentified
MVVQRTNVGLDVHARSVVACGLDRQTGEVFEQRLTPSHEEIAAWIRSLPGPAAAVYEAGPTGFGLARSLRAVGIDCEVAAPSKLMRPSGDRVKTDTRDARHLARLLMLGNVTAVAIPSREQEAARDLVRAREDCRGDLMSTRHRLSKLLLRQGIVYRGGKAWTGKHELWLRCQRFDDPALQLAYDTSFEAMLATIARRDRLDRAIEQMAADSEFTPVVSRLCCVRGVATLTAFGLAVEIGDWHRLTGRSIGAYLGLVPTEYSSGASRVQGGVTRTGNGHARRLLIEAAWHHRARYRPGATLRRRWDAASAPARARGQLANQRLHARWQTFDARKKRAVVANTAIARELAGWCWSLAVLDG

SEQ ID NO: 235454 - protein, 344 aa, unidentified
MEYFAAVDVSLRLSSVCVVDGTGHILHEAKVASEPEALVAFLNGSGLAFTRVGLEAGPLSQWIHAGLTEAGFEAVLLETRHVRAVLRSAAIKTDRNDARGMAQMVRMGWFRPVHAKTIPAQEVRALLVARKQLQARQNDLERCLRGILRGFGLKLGEVAKGRFEARVREMVAGQRTLEALAEPMLRARAALRGEYAALHREVLRMVRTDTACRRMMTVPGVGAIVAMTFKAAVDDPGRFKHSRDVGAHFGLTPRRYQSGEVDRSGHISKTGDGDVRTALFEAAHVMLLRVQRFSALRAWALRVARARGLKRAKVALARKLAVVLHRLWVDGTEFRWSREAAATV

SEQ ID NO: 235455 - protein, 390 aa, unidentified
MILVGIDVAKDKHDCCIINSDGEFPEEVFSILNNREGYETLYKRICSLAVDLAKVKVGLESTGHYSGNLLAFLLDKHLAAYVINPLRVNLFRKGQSLRRTKTDKIDSRNIAHLLMTDSSLKPYSLSSYHMEELKSLTRYRASMVRERTKLKTSIARLVTILFPELEQLVSSIHIHSIYAMLEEFPGSAYIAAAHLTRLAALLLKASRGRFGRETAIRIRDTARRSIGAVSPAKSMELQHTIAHLRAYDQEIGEIESEIEKIMGDVNSPITSVPGIGMQMGAVILAEIGSFRRFDSPDKILAYAGMSPSTYQSGKLTGSYSRMEKRGSRYLRYALFNVTRYVCHYDPGFTAYLSKKRKEGKHYYVAISHAVKRLVRVLYAMEISGNRYQTA

SEQ ID NO: 235456 - protein, 466 aa, unidentified
MQELTLGIDVACRAAHQASLADQAGRFAWSGRRFRTTTADLDRLWAAIPSPAAVTVVLEPTRNAWVPLAAWFRRHGARVILVPPEQSADLREYYSKHTKSDHLDSRMLARLPLLHPDGLRPAEGLGPADAMRRATRLRASLVKRRNVILARLDSYLELLGPGWHAAFGGDLATNTALRFMAAGYADPHTARRLGRARLTRFIWRYSHGHWGEELAARLLAAAAETLALWDGELDYTELAADIAAEARLALALSAEIRDLEQKIAALLHQADPAAIMTSVPGVGVINAAQILARLGDPARFRSLAGARSFTGLVPSLTSSGVSGHHGPPTKSGDAPLREALFMAADHARRTDPTLAARYHRLMVTCGKHHNSALCHISTALLTRIIACWRAGTPYQIRDTDGTPLTAAQGRAIAATRYRVRDDIRAQRRTSHHSAKAGRRHQESPSAPTPARPRTTLRPPAKALDTA

SEQ ID NO: 235457 - protein, 343 aa, unidentified
MNAVGIDVSKGKSMVAIMRPFGEIVSTPFEIKHTSSDINSLVKLIKSIEGESRIVMEHTGRYYEVLAHQLSEANLFVSAINPKLIKDFDNDSLRKVKTDKADSVKIARYALDKWQNLKQYSVMDELRNQLKTMNRQFGFYMKHKTAMKNNLIGILDQTYPGVNTYFDSPARSDGSQKWVDFASTYWHVDCVRKMSINAFIDHYENWCKRKKYNFSKSKAEEIYGKAKELVPVLPKDDITKLIIKQAVDQLNSASITVESLRTLMNETASKLPEYPVVMAMKGVGTSLGPQLMAEIGDVSRFTHKGAITAFAGVDPGVNESGSYEQKSVPTCLLYTSPSPRDCS

SEQ ID NO: 235458 - protein, 379 aa, unidentified
MRHVCGLDVHKDSVFVCILNEKGVVFQEKFGVLTPELERMVGVIMEHGVTEVGMESTSVYWMPVWRVIDPYVEQKLVNPYFIRQLPGKKSDVKDAEWIATCILKGLVRGSYVPEERIQRLRQYDRRIFDLNDDIVHKLTRLDAALQRCNIRLSNYVSTTDCKSYGDVVDAIARGETSPDALLRCVHGRIVNRHGADVIRSALTGVITPVDVDVIRQLREEIELARRHRDECQRRMDGLCSEWFPEQYANLQTIPGVKARSATAIIAELGTDMSSFEDAAHLVSWAGLRPRNDESAGRIKARGITHGNRYLRKTLIECAWGASRTRGCFYSRFSHHQTVVRRKSRMKVQVAIARKMLSAIWFILHDGVAYRDFEGDANAA

SEQ ID NO: 235459 - protein, 324 aa, unidentified
MQSDHTSTCWVGIDVSKDWVDVVVLVEEKKVQQGRWARSAEALADLARELLVYRPKGVVLEATGGLEAVVLTALSGMGLPVMRLNPKRVRDFARALGLLAKTDPLDAYALALFGVRMQPELRNLPEAERQQLAAWVTRMQQLVVQRAAERTRLHQITDKPLQQSIQRVVAFLGKELARLERQITTWIEDSQLWKEQETLLRTAPGVGPKTARVLMAQLPELGRINRRQIAALVGLAPFACDSGQMRGRRCIRGGRAAVRAALYLASWTAIRLPGSLRTFYHRLTDAGKPKQLALIAVMRKLLLALNEMMRRSTPWNAEKNSIPT

SEQ ID NO: 235460 - protein, 334 aa, unidentified
MQNVTLIGIDLGKHSFHIHCQDKFGKTMLRKQFTRPKLMEFLAGCTSTTVVMEACAGAHFMARRIADLGHDAKLISPQFVRPFVKSNKNDFIDAEAICEAASRPSMRFVQPRTETQQAMRALHCVRESLIKDKVKTTNQMHAFLLAFGISLPKGEAVIKRLSLVLAEHDVPDYLSRLLMKLHAHYLYLVEQITPLELELKQSIKADDATQRMMTIPGVGPITASLLSSQLGDGKQFLCSRDFAASMGLVPRQYSTGEKPTLLGISKRGNKNLRRLLVQCARAFMMRLEHQHGRLAEWVQAQLSKKHSNVVACALANKLARIAWAITTRQNEYQA

SEQ ID NO: 235461 - protein, 450 aa, unidentified
MDKDNKKEKLKKTIRGLPVIQQFAAGADIGDTQHEIAINDGNGGHVVRSFKSFTEDLEQAVSWLKEEGITTLAMESTGVYYLNFYLLLEEAGIEPYLVNAHHVKNVTGRKKDDTDAIWIQRLHSCGLLQKCFQPDNDFRTLRTYVRQRKGLIKRSSDEVRRMQKALELMNIKVHTVISDILGKTGMQIIKAIIAGQHDPVVLSKLKDPRIKATEEEIIKSLQGIWKEEYIFLLNQSYNTYFFYQQQIRECETKIHEQLMKQVAQVNGGDVTEVSYSEKKGKPKKNQFYFAVSPLLKKITGVDLCKIPGISEVTALEFISETGIDTSCWKHSKRFSGWLNVAPNTKITGGKIISSKMVKKKNIAGQTLRVAASTLYRNKTPLGDYHRRMSFKYGGKGASLATAHKLSRIIFLMLDKKEEFSMTLLIDSQKKFKEMKIKQLERQLAKLKKVA

SEQ ID NO: 235462 - protein, 354 aa, unidentified
MPTIADTVDLLIGVDTHAASHTFALINAATGALADTQDFPTSPAGLRRALAWIQRRTDAQTVLVVIDGTGSYGAVLTEQLLTAGFGVAEAPDVPAHVRRAAGKTDSLDAVEIARAARGLTPHQLRRPRQAGDRTTLRVLTSARDQMTGERTRTVNALTALLRTVELGIDARRALSATTIATIAAWRTPSPSTVPATTRTVCRAEAIRRIRALDTDLATNHTALSSAVTAQAPQLLDLRGVGPVVAATVLQAWSHPGRVHSEAAFAALGGVSPLPASSGNTHRHRLNRGGDRRLNRAIYTVALTRLGHDPRTREYFARRTAEGRTRREMIRTLKRYISRELFRTLTAAHLQPNTP

SEQ ID NO: 235463 - protein, 345 aa, unidentified
MDHFAGLDVSVKETSICIVDDAGKIVREVKVASEPEALLAVLKNLAYHFKRIGLEAGPLSQWLFSALAEAGLPVICVETRHMQAVLKAQINKTDRNDARGIAQMMRAGLYRPVHVKTIRSQKLRMLLTHRKLLQSKAIAIENDLRGTLRNFGLKVGMVGKVKFEARIRELVENLPDLAVLVEPMLIVRRTLREQIVILHRRLLAIVRDDEVCRRLMTTPGVGPVVALTYRATVDVPARFRKSKAVGAGFGLTCAKYQSGEVDRNGRISRCGDEMMRVMLYEAAQSMLRSKKWSWLKAWAMQIARRRGMKKAIVALARRLAVIMHRIWVDGTEFRWTREQATAATA

SEQ ID NO: 235464 - protein, 355 aa, unidentified
MDSKKYIGMDVHKESISIAVRNAAGKIVMESVIETKANMILQFIDGLRGDLHVTFEEGTSAAWLYDLLKPHVTKLVVCDPRKNKSMREGNQNDKIDARRLAELLRLNHLNPVYHGEHGLRTLKELVRSYLTVTKDLGRVMSRVKAIYRSWAIPCTGKQVYALRHRAEWLGKITEPGVRRRAEFYYQQLDALRTVRQQVRRDLLAESKKHKTWKRLRQIPSIGPIRSAVLLGILQTPHRFRTKRQLWTYSGFGIETHSSADHRRVNGQLERAKKQVSVRGLNRNCNHDLKNLFKGAAIVASSKPGPFQEFYTALLAKGIRPEMARLTLARKIATIVLIVWKRGACFDAQHLKPQTA

SEQ ID NO: 235465 - protein, 374 aa, unidentified
MNKFSKFVGLDVHKATIAVSIADGSGSEARFFGEIENTPAAIAKLVTQLAKGGATLSLCYEAGCCGYVIYRQLTKLGHLCQVVAPSLIPKKAGDRVKTDRRDSLMLARLLRAGELTGIWIPDGLQEALRDLTRAREDMKGLQRQSKQQLLGFLLRHGVSGFTGKSNWTQAHFRWLETVKFDQPAQQIVFQEYIDTIHAGIKRVAGLDQHIERTAQASAVWPIIEALMALRGISMLAAAIIMAEIGDLSRFATAPQLMGFLGLVPSESSSGPNTRRAGITKTGNSHVRRVLVEAAWTYRHPARKTATLQRRAEKTPEAVQEIAWKAQQRLCARYWAFDARGKLKVQACTAIARELAGFIWAIGKAMPQPGSSVTP

SEQ ID NO: 235466 - protein, 343 aa, unidentified
MECYVGGDVSLKQTSICVVDQAGLVVREGVVDSDPEAISVYVRSKAPEAVRIGLETGPTSTWLWTELKRLGLPVICIDARHAKAVLKMQINKNDRNDAIGIARIMQTGWFKEVHVKDIDSHSVRALLASRALLVKIKRDLENHVRGLLKNLGLVIGRATFNVFAVRAEELIEDRPDLVAAVRPLLEARNAVEQQVSELDRKVMKLARRDAQVQRFMTVPGVGPITALAFKATIDDPARFARSRSVGAYVGLTSRRHASGEIDWSGRISKCGDAMLRSYLFEAAGVLLTRVPKWSTLKAWGTRLAKRNGLRKAKVAVARKLAVILHRMWIDGTEFNWSKKEIAA

SEQ ID NO: 235467 - protein, 318 aa, unidentified
MTKPSTLTAGIDTSKDKLDVAVHGTATRLTVENCKTGWKSLAGELTKAGVERIGIEATGGYEHDVTRYLQAAGFTVVVLQPLQVKAFAKLHLRRAKNDRIDAALIAACTDIFDVRNKMPPDPRFDALTELLTFVEQTEADIVRFKTRLEHTRDKRLLRTINADIKRLVKRRAVELQRLTAELRRHADLATRFELVLSIPGIGERTALALIVRMPELGRVSREQAAALAGLAPFVHQSGKRQGETHSGGGRSRLRRSLYAAALPASFRWNPALKALYARLIARGKSHNSALIACARKLLVFANTVVARGTPWVVAAAGA

SEQ ID NO: 235468 - protein, 415 aa, unidentified
MNSFCGIDWAEGHHDIAIVDGEGKLVAKKRISDDSAGFTVLTEMLAAAGDSFDDAIPIAIETPRGLLVAALRATGRPVFAINPLAVARYRERHSVAGAKSDHADAMTLANILRVDSHLHRRMPADSELAQAIAVLARAQQDAVWRRSKASNELRSMLREYYPAFLDTFAGKSATNLAKPEARAVLAIAPTPAHAAKLIKTRVAAALRRAGRKRGIDGLAVNILEHLQAPQLRQPELVEKAMGRQALALLAMLDAACTGADELAQTAAEEFRKHPDYAVITSFPGLADLTGARVLAEIGDDRDRFADDRALKAYAGSAPITRASGKVTSITHRRIKNDRLAAVGWVWATYAYINPGPAQDHYRRRRDHGDRHAAALRHLFNKMLGQLHHCLQTRQTFDPIKAFGQPRTAPREPAAA

SEQ ID NO: 235469 - protein, 345 aa, unidentified
MQNMYYIGLDVHKRTISYCVKDGSGAIHAQGTIPATRFDLDRWMRTLPQPWTAAMEATVFTGWIYDHLQPHAAALKVAHPLMLRAIAAAKKKNDRVDASKICDCLRCDFLPECYMASTAIRERRRTLRYRNLLVRQMVQMKNKIGMLLMEAGVSYNKQRLHKASYFRELLTTNPDIDEGLCSLLRLCRETVVRLQKTESALVRSLERDSLLMDRVERLMTIPAVGPITALTWALEVGDVQRFSSIKKAISYCGLCGAEKSSANTVQRTPLSKQRNKHLQTTLIEAAKMAPRNSAELAMLYDKEKQKGHANRATLAVARKLVAYLMAVDRGQRDFQVLEASHCTAA

SEQ ID NO: 235470 - protein, 350 aa, unidentified
MEHPTRIFIDTSKELFQLHGVNAAEAVVVRRRLRRGQMLEYFGKLKPAVVGLEACGGAQHWARALRAQGHEVKLLPAQYVKAYLKRNKNDARDAEAGCEALSRPTMRFVPVKSEENQAVQMLVGVRERLVRDRTRLSNEIRGYAAEFGLVAGKGLDKLQPLLERVAAETQLPELARELFGDLGRELTDLEARLAGIERRLLVWHRQDEVSRRLAAIPGVGPIGAVLLRVKTPQPEGFKSGRDFAAWAGLTPKDHSTAGKTRLGVITRAGDERLRAVLVSGAMSVIQKVKAALKAGRPAAWPWLAELVKRKQPKEAAVALANKIARIAWKLMISGQAYRPQPGDLAQPTAA

SEQ ID NO: 235471 - protein, 316 aa, unidentified
MAKPVTQITLGIDVSKDELVIHHWQNDQLHTISNQSSAIKTWLKQLCGPVHIAVEATSSYHLAVVEVALEMSHEVYLVNGRQLAHYRQAVNVRNKTDAEDAYLLARYLEHEAEQLRPFRPQSRQAQHLWGLITRRATVVQSQQRLQQSMREVRFSIQSLMTQFRRLIERLDRQIQKLIRELGWWNDYRRCLSIPGIGPANAAALVATYHRGAFSGSDAFVAFLGLDIRLRESGRFRGKSKLSKQGEPELRRLLYCASQPARCHQRFADYHQRMINQGRSKIAARVALARKLARIAFTLMNRQQYFEDQGQAHCAAP

SEQ ID NO: 235472 - protein, 447 aa, unidentified
MPLDCCERARGSVSWQRFPPDRRRQARVASRTGRRDVMEVMFDRVAGLDVGKDSVTVCVRTPGPRGGRRSVTRTFKTMFGSLRVMRDWLVETGVTIAAMESTSTYWKPPFYCLEEVMEVWLLNAAHMKAVPGRKSDVRDAEWIAQLLEHGLLAPSFVPPPEIRRLRMLTRYRDQLMGDRVREIVRLELMLEDASIKLSSVVSSLKTVSARAMLTAMIDGESDPLRLADMAKGKLRCKIPDLAQALTGHFDANHARLARSMLRRLDLVEQALAELDAVIVDACRPWQRQIELLQTIPGVGPKVAQVIIAETGGDMSRFPTAAHLAAWAGLAPAMHESAGRQTPTGKRHGNKWLAAMLVEAAGSVGRMHGKNYLAAQHARLLKRRGMGRAQVAVAHSILIAAYWMLKRDEPYHDLGADWHRRRNDEAHTRRLVAQLEHLGHTVTLSPAA

SEQ ID NO: 235473 - protein, 269 aa, unidentified
MGPILGIDIAKVTFHAALLLEDEKTLSKSFPNTIKGFARLDAWLQGRKITAARACMEATNAYWEALAHHLHERGHRVAVVNPSRPKAYGQSEMLMTKNDAVDAALIARFCRAQKPELWTPPAPEERELQGLVRRYASVVDMRQQERNRAHVPGLPKAVKSGISAHLKYLERQAKELERMIRDLFKQHADFGRKRDLLTSIPGIGEITAARLLAEIPNMLDFKSAKEIAAFAGLSPQHFLSGTSDHGLGRHDGESDPEAPKFSAHPVDTG

SEQ ID NO: 235474 - protein, 339 aa, unidentified
MKKDVFDHYIAVDWSAKNMAIARMTKKSNKITAIDVPSDVKELQLYLKNLKGSKVLTLEETTTSQWLYTELAGYVNKIIICNPHRNRLLSEGPKTDKIDAAKLVQLLKSNLLKEVYHSADRFIYLRRLVSGYQDLVKAGVRLKNQKYSLLKACGRDGNKKETVELELEEDRHVLESIERQIEMYEKEKKSYEKEFIRLERKYSEIRHQKSLPGIGVINAVKIISRVVAPYRFATKGHYLSYSGLIKLEKISGGRSYGKKNPRYSRELKSVYKTSALSAIAGNNPIADYYRYLIKEKNYPEHNARNKAARRLAILSLGVFKSKKKYQPYRRYLVKSKQYN

SEQ ID NO: 235475 - protein, 341 aa, unidentified
MQITTIGLDIAKNVFQVHGIGAAEKVIVRKQLRRGQVMAFFEALAPCLIGMEACATSHHWARELTKLGHEVRLMPAKDVRAYVKRNKNDAADAEAICEAVRRPTMRFVRIKSAEQQGQLMLHRARDLLMRQRTQVINALRAHLAEFGITAAQGREGIKELLAIVVQDEGSRLPVDAHASLTVLAAQLQAVQTMIGTLEKRIIAQHRSNEASKRLETIPGIGVIGATTIAAVVPDPRVFRSGRDFAAWIGIVPRQDSTGGKQKLGPISKQGDQYLRRILIVGAHAVLRRARQQPDKYAWLTQLLARRPFKVVAVALANKMARIAWALLAKGGTYRAPQLVAV

SEQ ID NO: 235476 - protein, 334 aa, unidentified
MNSVSLIGIDLGKNSFHVHCQDKTGKALTRKKFTRPKLFEFLVNCPPAIVVMEACAGAHYMARKISDMGHEPKLISPQFVRPFVKSNKNDFVDAEAICEAASRPSMRFVAPRTESQQSVLALHRVRESLVRDKVKTTNQMHAFLLEFGISMPKGLAVIRRLSDVLADNELPPYLTKLLMRLHDHYLYLVEQIKDIENELEQAAKQDETTQRLMTIPAVGPITASVLMVHLGNGSQYKQSRDFAAATGLVPRQYSTGGKPTLLGISKRGDKNLRRLLVQCARVFILHLEHQSGYLAEWVKSQLTRKHSCIVACALANKLARIAWAITTKKTVFQS

SEQ ID NO: 235477 - protein, 369 aa, unidentified
MSYATAIGLDVHARSITGVALFRDTGEVVSKKFSYDPASLAEWILQFDSPKAVYESGVTGFHLVRALKKMGVDCIVGAVSKMQKPAGDKRKKNDRNDAEFLARQLLAHNIIEVFVPDEETESMRNLSRALEDLREDLTRAKHRLTHLLIRWGYVWSEYNEKGQRKKTWSRAHWEWIRSIELPEMAAQETLDLYISEVRHLEAQKKAIEKRIIQYANKERWHNRVEALRCLKGIDTLTAFSLVVEAGIFSRFKNARSFSSWLGLTPSEHSSGERISRGGITKAGNSHLRKLLIEASWHYTRATKERKRSLYDNSVPFSISNHAAQGIERLVKRRKHFMQMRKRPVVANVATARELSCWIWALGCMSEGTL

SEQ ID NO: 235478 - protein, 411 aa, unidentified
MVREPGRAIGLDVHREFCEVAICEEGKVRSAGRVDSSPEAVEALAASLGADDRVALEVTGGAWAIVSILERHVARVVVVSPGDTGIAQARAKTDRLDARTLARLLWAGELEGVWAPDELTRLLRRRLARREQLVRARSRAKNEIHAVLMRCLVGKPPFSDLFGVAGRKWLRRLELPVEECETVEACMRHIEFLDTEVAEVERVVARYALSCSDARRLMSVPGVNVICAATFLAAVGDIGRFRTSRQLVGYLGLDPRVRQSGSSPAKSGRISKRGSGSVRWALVEAAASVIRQPGPMRAYYQRLRVRRGHQIAVVAVARKLAVLFWCLLSREEQYAHQQPSLTAKKLRLLEIRGGAPTKKGSPTGTWATREKMREAEKALALQAEASYVRMVSDWQAAAPKRAGAGVTPGRA

SEQ ID NO: 235479 - protein, 344 aa, unidentified
MERYLGLDVHRDSCSLCVLSEAGKQVQRQVVETNGEALVSFVRQLPGRLHLCLEEGEWSQWLYEVLSPHVAEIVVVWAERRAPAKSDALDALELAERLRTGRLGRVVYKAPRRYRRLRELVRVYGLLTQDVTRSKNRLKSLVRRRGIHCTGDGIYDPQQRDGWVSQLPAELRSIGELLGVELDCAAELKGEAEEAMVLEARRYRIARILQTLPGLGPIRVAQLLPIVVTPHRFRTKRQFWSYCGLGIVTRSSADWVQVDGHWTRARRPMTRGLNRNFNRTLKAVFKSAALTVIIHRMDNQFLTAYRRLCEQGTKPNLAQVTVARKLAAAALAMWKNEEVYDPKR

SEQ ID NO: 235480 - protein, 407 aa, unidentified
MTGLLKRVPVDRVIVAIDPGKVLNRVWVTTGEGLVGEPVSLPTSRAGLERLGVLVSGGGCPVFALEATGSLHRVWAVELERRWPGSLRLFAPSQTQAARTQLGTRRFKTDDRDCAALVWLARQGAGQPARSSAVDALRAAVSHRRQLVLALKPLRQRLHDQLNALAPGLSSPEGHGRVLSLQTSTGRAVLACAVDFAGRPPAVRSLKARADGRLTDATATFWSTRWKDCLPPPQDAGLRAARMGRDLARFDALRDDIAFVEDQIERLLADSAGQILTSLPGVSTTRAAAFAAHTLPVERFATPEQLYSATGLAPASYESSTVRRRGGISRTGLPEHRDALIGIAWGLGQFAPAFQQRLEELRARGKAPLEARVALARHACRLCWRILHTQQPYDDRRYDRARRDRGR

SEQ ID NO: 235481 - protein, 433 aa, unidentified
MQVTRRPDPLVSPDGHPEPEQRRDLIGARLCVTRHSIVRPLLLIGWKLMATAKGAADVTMIGAERSDTEVETILGVDTHLDFHVAVAIDHLGRRLGEASVPTTVKGHERLLRWAERFGPVRCVGVEGTSSYGAGLARHLGAKGIDVLEVERPERRRRGSRRNLKKSDPCDAEAAARAVLAGESSGVPKSGDGTVEMIRTLRAARRSAIKARTQAANQLKGLRVTAPEQLRQRLRELSTKEFISVAARFRLGDDPRDVPTATKFALRSVARRYEALSAEIADLDAHLDRLVAQAAPELVSLPGIGTDSAATLLVVAGDNPQRLGSEASFASLCGVAPIEASSGKIVRHRLNRGGNREANRALYMICLARMRRDRRTKEYVARRTQEGKSKREIIRCLKRYVAREVYRLLISCDARSSPTGPQAEVHIASGSSAA

SEQ ID NO: 235482 - protein, 319 aa, unidentified
MSNIILGVDISKLTFDVALLNDNKVQVKKFTNTSKGFSELKQWLKNKEIDTAHACMEATGGYESKLAQYLYDNNFKVSVINPARIKGFSMSKLSRVKTDKADSKLIARFCQAMQPDLWQPTPKHIEELQQWVRRLDSLIANKTQENNRLDGASEVVAINISTHIEFIDKQIKEVEEIISNHIKGHKDLNDKSKLLDSIPGIGEKTIGVILAFLSVENFNSAKQVAAFVGLNPRPKQSGSSVLGVGRISKTGDADLRKAFFMPAVVSLRFNPVVKDFADRLSGTGKAKMVVVIAAMRKLLHIIYGVLKNETPFNENIKTM

SEQ ID NO: 235483 - protein, 451 aa, unidentified
MATVKPQVIDDEQHERVYERVAAVDVAKDSGMVCTRMPHPSRPGARQSAVWTVRARMAAVGALGRQLKRDGIQMVTLESTSDYWRIWFYVLEAAGLAVQLVNATQARNLPGRPKTDKLDAMWLARLTEMGLLRPSFVPPAAIRALRDYTRARARLTQERARCFQRLEKLLEGALIKLSSVASKLTTESAKDMIKAMIAGERDPHTLAALARTRMKAKHDDLVEALAGMFDDHHGELAQLLLDQAAFCDTRIGQLTARITASVAAMPAAWGVDADGTTGPDAGTGPDAAALPAVARLAEIPGVSPGLASSIIAETGLDMSRFPTAAHLVSWAGLCPRTSQSGPRTHAGKKNQGDSWLRNHLGIAAAGAARTSTFLGERYGRIARRRGKAKAQVAVARSILIIIWHLLSDPAARYTDLGAGYYQARLDTDRKIRNHIRQIQALGFDVTITKAA

SEQ ID NO: 235484 - protein, 375 aa, unidentified
MKKNSSGCKSPKARMKATRATNVTVGMDLGDKTSRYCMLDENGEVSREASVATTKKAMTQVFATMKPCRVAIEVGTHSPWVSRLLQSCGHEVIVANARQVQLISKSSRKNDRMDAQTLARLARVDPRLLRPIQHRSEQAQGHLRVIRVRAALVEARTMLVNAARGLTKATGERLPSCDADQMGVELMESLPTGLQNSLRPLLEEVGSLTEKIQALDQQVEQIARTDYPETDLLQQVSGVGPLIALTFVLTVEDRERFQKSRDVGCYLGLRPRQSDSGESEPQLRITKEGDPYLRKLLVQGAHCIIRRRGPDTDLKRWGLKLSARGGKNAKKRAVVAVARKLAILLHRLWVTGEVYEPLRNSQSGPPVNKSRKAAA

SEQ ID NO: 235485 - protein, 344 aa, unidentified
MAIAVLGIDLGKNSCSVAGLDGTGRVVLRRRLTRESVVRLAGTLPACVVAMEACCGAHHLGRVLREQGHEVRLMPPEYVQPYVKAQKNDERDAEAIAEAATRPTMRFVELKSEAQLDAQILHRARSRLVGQRTALINQLRAVLLERGIVVAKGRRRLEEYLIGLLDGDRPATLSPRTCLLIEDMRLEWSELDQRIAALTAEFVARAREDHAARRLATIPGFGALNATALVAAIGTGETFRRGRDLAAWLGLVPRQATTGGKPRLLGITKRGNTYLRTLLIHGARAALPSLSASQSPMGEWLRGLIGRAHKNKVIVALAGKLARIAWAVLRSGATYVKEGRPVAA

SEQ ID NO: 235486 - protein, 417 aa, unidentified
MGKSKSPKAKCVNDPGMIVGIDVAKHKHFAKILFPDGSESQPFGFENHRKGFETFLAWLSFHRKRVPCDSIIVGLESTGHYWEPLAFFLEEIPGIQVVQVSPKHVKKAKEIYDNSPAKTDRKDAGVIALLIRMGRFQRLVLPKGPFAELRCYARFRERKIVELGVQRNLLHSLVDVVFPEYGSLFSKIEGKASLTILKHFTTPDHILHAGFQNLSQALHQASRGKLPAACAKRLMEAASTTVGGKEGIEATAFAIRNIVASLERIQGEIALIEAELARVLDRIPYVHPLLSIPGVGKITLAILLGEAGDLRRYHKAEELIKLAGLNLFEISSGSHQGRRHISKRGHPLLRKCLFFAALRTVKTGGAFREVYLRWTETNHMQKTKALVAISRKLLGLLFALVRDHVAYQPRRAEFRAA

SEQ ID NO: 235487 - protein, 347 aa, unidentified
MVTLGADCHKQSHTLVAVDESGRPLGELRVVATAGGHMEALAWARRWPERRWALENCRHLSRGLERDLLTAGEAVVQVSPKLMGTARRSGREPGKSDSIDALAVARVALRETHLPVAQLEGRARELKLLVDHREDLIGERTRIQNRLLWHLHELEPGLQLPPRGLVRQVVLVEVRARLQRHSGTVAEIARDLVVLLVALTKSVEELQRRIEALVAELAPSLLPLRGCGALSAAKLVAETADVRRFRSPAAFAMHNGTAPIPVSSGNHQRHRLNRGGNRQLNAALHRIAITQLRLGGEAKVYVARRLSNGNTKTEAIRALRRQLSDEVYRRLRLDTHEPVAMPNALAA

SEQ ID NO: 235488 - protein, 371 aa, unidentified
MAKFIMVGCDLHDKTMLLKIAEGRGKALKRSYQNNPSGRKAMTAALKKRASAAGGAKIIFAYEASGLGFGLYDELAEAGIKCYVLAPTKIAKSVKSRRSKTDEKDADAILDILRAHVLAGNELPTVWVPDPQTRDDREVVRARLDAAQKLTGLKSQIRMLLKRNGISKPSGMGKGWTNGYRVWLRVLLGDGSPLRCGARAGLGSLLRQLEFIEEEIALLDREVVALSKTPRYLRAARMMNCLKGVGVLTAMVFLTEMGDMSRFSNRRQVGAYLGLAPSIHESGESDDRKGHITHHGNARVRKVLCQATWSRVRTDSNEKAVYERIAAKNPKHKKIAVVAAMRRLAIRLWHIGLKAQSRDVPFWEDAKPAVV

SEQ ID NO: 235489 - protein, 400 aa, unidentified
MTTIIGVDIGKDFHQATILNPRGETVGGTIKFDNTALGFTKFLSHLERLISDKENCLVSLEATGHYWLPLYLFLLDKGYKVQVFNPYQSDALRKVFLGRAKTDKLDAELVARLARVGTQKATPLPGEELLSLRNLSRFRSELVFQSSDTKRRLVFLLDLIFPEFEKLFSNVFGKTALVLLTNHPTPEEVLELDEEKLIKLLKTSSKGRLGEKTAAKLKASAKVSVGISFGQKSLVFELKLLLEQLKFLKEQLKDLEKEILKLLSKTDQKLTTIPGVGPMIASSILGEIGDIKRFPNVPSLIAYAGLDPTTFESGSSITKKRKLSKKGSKYLRTALWQGAVYSLVHNPNLRAFYDKKLSEGKPKQVALGAVTNKLTRIIYGILRSGLDYQPALSADRPDFS

SEQ ID NO: 235490 - protein, 344 aa, unidentified
MEHFAGIDVSLEQSSVCVVDATGKVVREAKVASEPEALVRFFRELGVAVSRIGLEAGPLSQWLHAGLAEAGFDAVLLETRHVKAALSAMVVKTDRKDARGIAQLLRMGWFRPVHAKSPAAQEIRALLVARKLLQAKLLDVELSIRGILRGFGLKMGEVSKARFVPRVRELVAGQAMLERIMEPMLRAREALRIEYAQLHREMLSIVKRDAACRQLMTVPGVGALVAITFKSAVDDPGRFAKSRAVGAHFGLTPRKYQSGQTDVTGGISRVGDAMVRAVLYEAAHIMLSRATRFSSLKRWAMDVAKRRGLKRAKVALARKLATVLHRMWLDGADFRWGKEVSAAA

SEQ ID NO: 235491 - protein, 448 aa, unidentified
MKMDIMNPNAAGIDIGSRSHFVAIGQSDSDVREFGVFAHDNTSLANWLQDNNIKTVALESTGTYWQNLYLVLQQKGFEVILANGKFTKNIKGRKTDVQDCQWIQRLHSLGLLSGSFLPDDETEKLRTYCRQRTAWLNQGASVIQKMQKFLRLLNLRLDIAVTDIVGLTGLKIIHAVCNGITNPKKLSKLVHRNCKKSPEEIALALNCNHRTDLLFGLKQEYEMYLTIRDKIEECDKHIKTFIDQHFNLNPQKKFLKAPKKIYKKKNKNAPKNMDLNQIAYQYFNGVDLMSIEGVSDRTVIALMSELGPEGFKKFPTYKHFTSWLRLSPNNKISGGKKLSRRVGKGSNNVKTALRRAANVLGNLKDSHLGHFFRRIAYRKGRVSAITATARKLAVIIWKMVVEKVPYKPPCPYEFRDQKRSRILKEMRNKINKLNISPMDLGLNLNRIE

SEQ ID NO: 235492 - protein, 346 aa, unidentified
MYHHNVIALDLAKRVIQISKVTPPGEILFNKAVSPNKAKEIIANTKPCIVAMEGCGSFHYWGRFAQEHGHIVRGMPPKKVKPFVGKQKTDANDTIGITVAVRAPNMTFCQVMTIEQQNLQSIQSSRRFLDKSLTQIGNHIHALLYEYGIALNVGKKSLRQGMAEYLASDNDTLPPIVKRLLSTLQAQWLETEKHHKAADKLLLQQVKVSEPCKRLMALEGVAEIGAAGLFCSLGDGKGFKNGRQAAVYIGATPKQHSSGGKTIMVGIDKKGGDKKLRSVLYLGALSYISNLPGEPKTLKQRWLIDLVKRAGVKRTCIALVNKTIRTAWALLYSGESYQRLPLPTEA

SEQ ID NO: 235493 - protein, 452 aa, unidentified
MAQPKPRRTVDRRTDMSVVNPHAAGIDVGAQFHVVAVGPECTPEPVRSFRSFTNDLHELARWLRELKVTTVVMESTGVYWLPVFEILESYGFDVLLVNAREAKSVPGRKSDVNDAQWLQKLHRYGLLRASFRPQQDVATLRSYLRQRERLLEYAASHIQHMQKALMQMNVQLHHVVQDITGVTGMKIIRAIVAGERNTDVLAEHRDVRCKASTETIREALGGHYQPEHVFELTQALALYDFYQTQVAQCDERIELALKHLQTGAEPPTTPLPAARYRTKQPNGFCFDARAALYAMLGVDLTQIHGLGPYVALKLVAECGNDMSRWPTVKHFTSWLCLSPGNKISGGKILSSKTRRSSSKAAAALRLAATTVGRTDTALGGFYRRLSARIGKAKAVTATARKIAVLFYNTLRYGMEYVDPGAAYYEERYRKRVLNNLTRRAESLGYVLQAKAT

SEQ ID NO: 235494 - protein, 398 aa, unidentified
MVWRPELRVSVDVGCHRHSVAVGLTNGELLEEFDIDHRPEGFADFFSRIERHQRRYPGPVAVAMEGYNGHARPLDTLVRERQWRLLNINSLKLARFKQVFPAAAKTDRIDARRGLELMQLGEHMPRARDALQEVQAAPAENLELKRLTRRRRALVDEKSRVLSRLQDDLQAVCPGLLEITTDVENLWFLHLLAHGEDITKLARLHEKTLLGIPAIGKKFAAIIRHWQPRALFSHEVAYAGPMIVADTRRVLDLRDQIKALEGRGEALAATSQLARRIDTIPGFALVCSSELAGEIGTLDRFAGEASLALYLGMANLDHSSGQHQGAKAPRHVNSRAKAAMMTGVDRHRKQVPASQRYYEKKRLEGKTHNQAIRALGRHLCRVIYQMLKQDRDYEIREP

SEQ ID NO: 235495 - protein, 383 aa, unidentified
MSALPQKSDIIDFMMGWTPRRRHRCAKVEVLSTTLREASVSEVSIIGLDIAKHVFHAHGADERGRVIFSKRIGRGKLLDFFAAQPSCTVALEACGGAHHWARQLTQLGHDVRLIPPAYVKAFVKRQKNDAIDAEAICEAAQRPSMRFVAVKSEEQQAAGLVFRTRDLLVRQRTQLINAIRGHLTEYGWIAPKGPSHVAMLADLIEEDEMANALPEAAHAMFRLMLDLLAGLNGKIADLDKEIARRAREDEVSRRLMTVPGIGPISATAIAALAPPVETFAKGRDFAAWLGLTPLQRSTGGKQKLGATSKMGERTLRRLLIIGSSAVVQQASKRGAPKGSWLEQMLARKPRMLVTVALANKMARIVWALLVKQENYRAPVAAKA

SEQ ID NO: 235496 - protein, 349 aa, unidentified
MTINYIGADVDSKMTNFAVERCGKIVKEFCVPTTLAAWRTVFESVPGHKKLAIEEGTMAGWLYRNLKDTVDEFMICDPRRNGLIYDDGDKTDVLDARKLAQLLRGGYLRSIYHSDNEERVLFKNWVSLYHDRIRDAVRQGHKLRDRCRLYGVRLCRSVRESPERRRDWLAGQTADLRDQLEVLLIGYEAVRKQVRKARSQVAKFSRRYSIISYWEKLPGVGPIRAATFFVYMDTAFRFGGPKKVWKYCGVGLQVASSGKDRYGKPKKGRQQLAWAVNRRLKDVAMGMAESAINQRRNVFYSYYERMVKNGLMPSNAKHQVARKMLSVMWGMWKNNGRFDEKLVFDKSLI

SEQ ID NO: 235497 - protein, 364 aa, unidentified
MDVHARNTVYVVQDSEGRILHRGRVTTDEKGVKELVDRLGGECGAKAGLESGSQSFWVSEVPSGLGMHPYVISAQEVRAKSRRPNQKSDSRDAFEICDGLRRDIYTSMVYVPSREARQLRTLLYRRRHFVRLCTSQVNAAKSILRSEGVIISFGCLTTWASWEKLLSRIEDPFFKDMVLMHAEVWREAQDKVEKLEEKLKFVSRAFKGVYDHLVTIPGVGKITALTFIAVIADPFRFPASGEVVSYLGLSPSGWETGDRVVHGHITKRGNAELRAMLVETAHHASNVKHPLNPYFSRVCAKHGYKKAVVYIAQRLSRILWRMWIADEDFDVSKLNVVKESRTTTLVVKGHGAFRSSGAPLLFWC

SEQ ID NO: 235498 - protein, 474 aa, unidentified
MRPIILPSTPTTTRLGKKTQPNLRCERFRRIVSQARQTSLLKTYCAESAITGIQELTMKGASMDEQEVIMKVYIGIDWSEQKHDICFLKDNGEVLRNLQIPHTMYGFLEFNKARQEMGVLAGDCVVGMETAHSLLVDYLWELEYQQIYILPPKAVKSAQGRFRQSGARDDPWDARLIADILRTDQKRYPQWHPDSLLTCQIRSAMRMVLHLTREMVRNSNRLRAVLLRYYPAALNLFSRLDSPVLLAFIQAFPTPQSAAAVSYEEFCNFLRCHHYNRTQGWIRSYNKLKELHPPTNCDIVATYTPQAMTLARILTVLVESKGKWLKELTCLYEQHPDRVIYSSLPAAGIFLEPALLAKLGDDRQRFPSPKVLQAVAGTCPVTQRSGKRQVVYFRWACDHEFRYIIHQWAKLSLEASPWAEAYYRSVLPHCRTSNDAIRRLANRWLEVLWRLWQDRKPYDQEYHLKRHTSRIMPR

SEQ ID NO: 235499 - protein, 451 aa, unidentified
MNDGSGVSRGDRNRNARLTRLREAVPVTNAIVGIDLADRKQMVVVTDHDSKVLARRTFRCKAWDLGAALDWAKERAAKAGYAGVTVACEPTGHRWRVLGQLAADRGMPYVCVQPALSSWARKTEDLTSDKTDDKDAVLIARLTAQLRCYLPEPVDETWGRLRHLGARREALLEEHTACVQQIRDLLECVWPAALPTAKQPFKSTTWVAALTVIVARDAGDLARTRRLGATRFAEQVRKEVLRRGKRKPCLRIVRNVFNALSDESGVVTHRRGALERVGWVLADWDAARANRTVVEERMVAVLDELDLTDLVCTIKGLSAVGAAAILAETGDLRRFTSARAVVKHAGLAPRERMSGTFTGKARLTGAGRPGLRLAAWRAIFATLRSNPVHAARYRHLTTRAEHPLKPTQAQTAVAAALLRQLHAIVVTGQVWDPAIATHGSRRPSMEVPQAA

SEQ ID NO: 235500 - protein, 362 aa, unidentified
MRIIGCDLHARQQTLAMLDTVTGEVVNVTLPHEGNNVREFYSTLPRPVCVGIEATGSMQWFVNLMEELGIECRVGHPATIRAAEPRKQKHDRRDADLILKLLVENRFPAIWLPSQELLDLRALLRHRHQWVRIRTRIQNALQSIALANGLRRGPSLWSRDGQNTIASLPLAPHTSYRRTELQAMYEKFETEIEKLNQRVQEQANARSGARLLMTHPGVGPVTALATEVFLGDPARFADSKALASYVGLIPREHSSGGRQRLGGLSKQGNPLLRFLWGEAGAHAVRRDPELQRFYRRKLVQKGLGKARVAVARKLGIRLWILLRDQIEYQEFCRRGQKQQKSSDACAGMPETPYGATSHRPVD

SEQ ID NO: 235501 - protein, 350 aa, unidentified
MLIIGCDYHPAFQQIAFVDTDTGELQEGRLQHREEAEKFYRDLAVQGMKVRVGMEASGHARWFERLLAELNFELWIGDATEIARKRERKQKTDRQDAQHVLKLMLKDDFPRIWVPSWENRDLRQLLWHRHRMVQARTRIMNQLQAVALNEGLRSKRRLWREHGREQLESFRLAPWASRRRQDLLELLDRLNPTIAELSQAIEQEAEKFPEARWLMTHPGVGPLTALAFVLIIGRADRFQCGKQIASYLGLVPLEDSSGNRRRLGHITKQGSSILRFLMVEAAQVTVRSLPEWRSKYFHLMMRRGRKIAKVAMARRLAICLYWMWRKGWDYEQVVKFGSHVGQLGTGDGVQ

SEQ ID NO: 235502 - protein, 387 aa, unidentified
MPEDAPRPAQAAIRTDLGAIFVSMELSRRTWLTTSLSPGAGEKMSRHAVAASDVSGLLQRFAELRRKAAARTGQDFPIIVIQEAGLDGFWIHRVLVAEGIESHVVDAASILTSRRRRRAKTDRIDGETLVRTLMAYKRGEPRVCSMARAPTPQEEDRRRVCRERRTLVGERVKHVNRIKGLLFAQGVFGYEPLRKHRRERLETLQTGDGRPLPVRLKAQILRELDRLEVLLAQLKTVEAERDALLEPATDAVASPAAMLARLKGIGPETAAVLWSEGLFRHFDNRRQVAAYAGLAPTPWKSGSIDHEQGVSKAGNPRLRTAMVELAWLWLQNQPTSALSLWFHERVQRLGGRMRKTAIVALARKLLVALWRYTTAGVVIGGAVMRAA

SEQ ID NO: 235503 - protein, 344 aa, unidentified
MDHVGMDLGKKESQIAIITRARELIEKRLRTLRERLREYFEDRPKAKILIESSTISEWVARLLEGLGHEVIVADPNYAPMYAQRSRRVKTDRRDALALAEACKLGAYRPAHRASDEQRHVRGLVTAREALVRSRARLVTLVQALLSRDGVRVPSGSSRCFAARVETLEVPELLQGEIAPLLAMLGPLNEQIRALDSDIDARARGDERVRRLMSVPEVGALTAVTFVATLDEVGRFRGAHQVEAYLGLVPREWSSSELQRRGHITKAGNSRMRWLLVEAASRLMWPRNTRAQALREWAERIASRRGRKVAKVALARRLTGILYALWRDGTVFDPGRLQRAKTRAA

SEQ ID NO: 235504 - protein, 360 aa, unidentified
MKKDTKDGSGLTVGVDLGDRWSRYCVLDPEGEILEEDTIASTGKAFRKLFGKRPAARVVIEVGTHSPWVQRLLRELGHETITANPRYVRLIYGSRNKNDQLDAERLARLARVDTKLLHPIQHRGGATQADRAVLRSRNALVECRTKLVNHARGMVKSIGGRLPTCSTSSFHRRVRQDLPVELKPALTPVLDTIAALTLKIQRLETRIERLASKSYPETGLLRQVSGVGPLTALSYVLTVEDPERFKSSRAIGPYLGLRPRQSQSGDQDPELRITKAGDTDLRRLLVGSAHYILGPFGPDTDLRRWGLALAARGKKNAKKRAVVAVARKLAVLLHRLWVTAEVYEPLRSQRSAISPQAVSA

SEQ ID NO: 235505 - protein, 339 aa, unidentified
MKKVFIGIDFSKLKFDAAIYSVDTKAIVSTEVFDNEQSGYVDFLQWVKENTRCQKSGMLFCGEHTGYYSGNLSVFLYESGYDMWLVSGLEMKLTQGIKRTKTDRVDACKIAEHAYRYQDKRVLFQPVSKALEEIRELLSYRERLVEIRKVLTTSAQEMKRVKDNASCDYIYQDSLEYIKSLNASVRDCEKRIEALLKQDISLNTNYKLVSSVVGIGLVNAALILVATANFTLFDNPRKFGCYCGVVPFEHSSGTSVRGKTRVSKMANKHLKTKLTLAAQNAARFDPELKEYYQRKRSEGKNNWLVLNNVKNKLIHRIFAVVRDGQMYEKQYVHPLKQVA

SEQ ID NO: 235506 - protein, 403 aa, unidentified
MNNVAGIDVSKGKSVVSVLRPFGEVVAKSFPVGHTGSELKELADYLKSLDGETRVVMEHTGRYYEPVARFLHEEGVFVSAVNPKLIKDYGNNTLRKVKTDKADARKIARYGLDNWVELRQYTPMDTIRMQLKTLNRQQGLYSKTKTMMKNNLIALLDQTYPGVNALFDSPVREDGSQKWVDFATTFWHVDCVRGMSLAAFTERYRKWCKRHGYNFSQSKAVEVHTGAQDLIAMLPKDALTKTMVRQAIDALNAVSASLERLKAEMQALAAQLPEYPVVMAMHGVGDSLGPQLMAELGDVARFTHRNAITAFAGVDPGADQSGTHEAKSTRVSKSGPPELRRALFLVMDCLLKTQPQDDPVYRFMDKKRAEGKPYLVYMTAGANKFLRIYYGRVKEYLASLEEN

SEQ ID NO: 235507 - protein, 367 aa, unidentified
MQKSTKTQTAQRNLRHFPAGSTVGLDIGDRWTHAAVIGPDGELVAEERIASKEPEVRRWLSRLPAAVVALEVGTHSRWMAKVGRECGHTVVVANPRQLRLIYGSDNKQDRLDAQKLARLARVDWGLLKPVQHRPEQEQADLARIAVRESLVGMRTQAVNLVRGMVKAAGGRVVECAPEAFPEKAKDQIPEALRSGLAPMLEQIQELNERIRECEEMIEHVAREQYPEVKLLTQVDGVGWLTALTFRLTIADAQRFQRSRDVGCYVGLRPRRDQSGAQDPQLGITKAGNVRLRRMLVNCAHYILGPFGADSDLRRWGLKLAEQSRARGAKQRAVVAGARKLAVLLHQLWVSGEVYEPLRHSGKVAAAG

SEQ ID NO: 235508 - protein, 407 aa, unidentified
MDVLHPKCAGLDVHQQTVVACARTGAGKAVTYDVRTFGTTTAELLALSDWLTAHGCTHVAMESSGVYWKPVWHVLEGHFELVLANARHIRNIPGRKSDVNDAPWIADLLAHGLIRGSFVPPEPIQELRDLTRTRQQLVREIAQHTLRIQKTLENANINLTAVLAAVLGSSGRAILRALARGERDPERLAELASDRVKASRAELVAALHGRVPPHHRFMLTLHLTQIEALEAAVREVEARLGDALAPFRAALDRLITMPGVSETVARVIVAEIGFDMTRFPSAGHLVSWAGLCPRLHESAGKRLSNRTRSSNPWLTTTLVQAAWAAARKKDSYCRAQFLRIKSRRGPKKAVLAVAASMLTAAYYMLKHGVHYRDLGADHFDRRDKAKLAKRLIARLHDLGLTVEVRAA

SEQ ID NO: 235509 - protein, 332 aa, unidentified
MKKFTSFCGIDVSKDTLDYCIYHANNDKAIYKQITNDAESIKKFFSSSKFDNILFILEATGNYSSKLIYGLKQLKRPCQVVNPLRSKAFMVAMGYNNKNDKQAAYCLSKMGQQSNHNNLYEMPSKEIEMRKQQLSVLQSLIKQRLMLENQIHAIKQLAIIDQTAIECLEKALEIIKEQIAIIEKKMYQPSKDKDFKAKKKLAQSVVGIGAKTAIALLIATNGLNNFDNANQLASFLGLTPYSHYSGSSVRKKGKITKHGSSQVRALLYMATTSAIRYNKTCKDLFERLRKKGKPYKVAIVAVMRKLAVQVFACVKKQTMFDRDYHIDKKQLS

SEQ ID NO: 235510 - protein, 370 aa, unidentified
MLDTTTFVGLDVHARSIKAVSLDVMTGEVRAATFGYDAGAVAGWVRSVDPKARCVYESGVTGFDLQKRLSGLGVDCVVGAVSKMIKPSADRRRKNDRNDAEFLARMLSVGNVVEVWVPDDECEAARDLTRALEDARDDLSRSKQRLSKFLLRHGLVFDERTPTGRRKGNWTRAHWSWIESIRFAEGADNDVLAYYVDAVRRAAEEKARLEGLVEAEARKPRWRRRVDSLRCLKGVDTASAADLVFEAGEFSRFRNARSFAAWVGLTPSEHSSGESDRRGAITKAGNKHLRKALVEAAWHYLTCSARPKEPARGQAPDPGARRHAAKGVRRLAERREALLARGVHNNKANVATARELACWVWAVGLMAEEA

SEQ ID NO: 235511 - protein, 386 aa, unidentified
MTPHSIVRSLLLLGWKVTATLKGAWDVTMIGTERPETKVEVILGVDTHLDFHVAVAMDHMGRRLGESSVPTTVKGYEGLLCWAEGFGPLRCAGVEGTSSYGAGLARHLKSQGIEVLEVERPKRRRGGSRRNVEKSDPSGAERAARAVLAGETSGVPKSGDGRVEMIRTRRAARRSAMKARTQAANQLQGLRVTAPEELLNRLRGLSRKELVSVAARFRIGDDLRDVPSATKFALRSVARRYEALSEEIAELEAHLDRLVAQVAPELVSLAGIGTDHAATLLMVAGDNPQRLRSEASFASLCGVSPIEASSGKVVRHRLNRGGNREANRALYMICLARMRRDRRTKEYVARRTQEGKSKREIIRCLKRYVAREVYRVLISCVSHSRR

SEQ ID NO: 235512 - protein, 408 aa, unidentified
MNAVGIDISKGKSMVAALRPMGEVALLPQEFLHTEVGLEQMAYAILALGENTRVIMEATGRYHEPVAAALHAYGIYVCVLNPLFIKQSGGGSIRKVKTDKADAMKIAKYGLDNWVDLREYTPMDTVRQQLKLCSRQYNLYMKTVVSLQNNLISLTDKTFPGVNELFSSPERADGHQKWVDFVITFWHCDCICYVSAKAFTERYQKWCKRKGYHFSAEKALDIHAGSCDHFTTLPKNDNTKLLISTAAQQLLAGKVTLAALRAEMTRLSKQLPEYDTVRAMYGVGETTAAQLVAEIGDVRRFPRRSSIIGFAGVDPGIDESGKHSAKSVPTTKRGSPHLRKTLYQIVCTYLRKAPADEPVYQFLDKKRSEGKAYFVYMTAAQNKFLRIYYARVKECLEAFDTQQSSTQS

SEQ ID NO: 235513 - protein, 360 aa, unidentified
MFTERTSVGLDVHARSVVAAAIDGVTGEVFRARLVPAPEVVIRWVGSLPGPVAAVYESGPTGFGLSRALAAAGIRCQVAAASKLQRPAGDRVKTDARDALHLARLLRLDEVVPVRVPTEVEESARDLVRCREAARADLMRARHRLSKLLLRHGIVYSGGKAWTQAHDYWLLKQSFPLAGTQAAFQDAYETVVLAAGRRDRLDTAILEMAADGQFTPVVRRLSCLRGISTLTAFSLAVEIGDWDRFTGAGIGAYLGLVPSEHSSGASRSQGPITKTGNAHVRRLLVEAAWHHRKPYRPTAVLRRRWQLASPAAVARAQAGNHRLHQRWVGYSDRKKRPVLANVAVARELAGWCWSLAMLPE

SEQ ID NO: 235514 - protein, 413 aa, unidentified
MKKHTYRAQKVNNMNWQQVKEQMTGEPLVLAVDVAKVQQYALLTTQEHAQSWLMQWSHLEHTQYLIEQLKALEVPITVVMESTSTYGDSLRYKCRQAGFTIYQANAKKVHDAREIYDGVPSLHDAKAAWLIAKLHKDGATKLWCEPTEEERRMNALRLEYELHQDQHLRNQNRLEAYLSRHWPEVLTLMPLDSVTLEQLIKTYGCPQEITAQSEQVASNMWGWGKSKLSTDKIANVIASAKNTLGEPCIEAERQFLMALASELQHSREQKRAAKQALEALVENDEALREMGRTIGKVTTAVLISLHLDPRRFETPKSYQKALGVNLTEKSSGQINGRLRLSKRGSAIARKFLYLAALRLLVNDPMVSKWYEAKKDERVKLKTVVALMRKLPLALWHIARGERFDAGKLLKVAV

SEQ ID NO: 235515 - protein, 355 aa, unidentified
MNDAKYIGLDVHQATISAAVLDSTGKLVMESILETKAATILQFVHGLRGSLHMAFEEGTCAAWLHDLLKPHVTKVLVCDPRKNSLLKAGNKNDRIDARKLADLLRTGLLSAVYHGENGLRTLRELARSYLAITRDLTRVMNRLKALYRGWAIPCAGQQVYAPRYRSEWLGKIREAGVRRRAELYYQQLDALAILRQEVRRELLAESRKHAAMKWLRQIPSIGPIRAALLIALIQTPHRFRTKRQLWAYSGLALQTYSSGEYRFVQGQLQRSKRLLAIRGLNTNHNHDLKNILKGAAIRAAVVPGPFQEFYAALIARGMKPSMARLTLARKIAAITLLVWKKGVRFDAEHLKPQAA

SEQ ID NO: 235516 - protein, 312 aa, unidentified
MRTIAIDGLPACLNPDPDSRLTSIVKVVRLSSIPFFPKRLKDKSMESFYFIGVDVSKKKLDFCVMFEGEVVHEEKTANHPSAIMALIHHLEENYGIEGSRMLVCAEHTGQYTFPLACACKALECKLWLENPAEIKYSSGVQRGKNDKVDAKRIAIYACRFQDKVQYYERPTEDIERLKQLESERTLYVNDLAKYKGQLNDQKDYMPKDLYERKIKRLQALMEDLEEAIQAITEEMDEVINSCPVLSRQKELLMSIDGVGRVVATNMIIVTEAFTRFEDPRKFNCYAGVAPSRILPGVPNTRKQGYRTGQTRS

SEQ ID NO: 235517 - protein, 342 aa, unidentified
MDVGKRKCRAAIVDEDGVLIKEFSFVNDFSGIEGFVRELSDDDAVVMESTGNLWINLYEAIEGNGVNAVLANPLKMKAIASARIRNDKVDARVLASLLRGGLVAECYVPPRDVRELRALVRHRLQLVRTAAMVKNRVHSSLDKYGLKHGFSDLFGKAGMEWLRCVELKPLDRLLLDSFIEQVECLERLVGNVDVEIGRRASLDEDVRLLLSLTGVNVYSALLTKSEIGDVRRFPNYKKLIAWAGLAPGLYQSGNVERHGHITKQGSRLLRWVMVECARSAVRHDARLCEFYERVRRRRGEQKALVAVACKMLKIIWFMLNRREPYQSMNARLYGEKLNRLSR

SEQ ID NO: 235518 - protein, 314 aa, unidentified
MTLALRYVGIDVSKRMLDIFDDAIGVSERIANASQPITEQVARWRCGNVFVVFEATGIYDRALAEVLQEAGIRFARINPARARDFARASGRLAKTDAIDARMLAAFARAMAPTSDQLPQPKRNALALLAKRRDQLVQMRAQEKNRHSEAQDRTMLDGIARHLAFLNDEIKAIEAKIRAFIKTEPEIAEQARVMRSAPGIGPVACMQLISQMPELGQIGPKQAAALAGLAPLNVDSGSYRGKRTIGGGRKRVRDALYMAALNAVRRDPTFKTFYQKLRAAGKPAKLALIAVARKLLTTLNAMLRDRKCYLQPAPS

SEQ ID NO: 235519 - protein, 353 aa, unidentified
MKPNSQMTLDKYFRQCVGIDVSKDKFTACLFMYDMASDVGCCTESVDFPNSKTGFNQMVKWSRKEAQKGFLLTYLMEPTGSYYEPLAYHLHKIGLTLYVVLPNKARSFCEYEGIKTKTDAMDARCLALLGCKNQRLRPWQPPKAIYSELRQLTRLRASLTKMQTQILNHIEAIDHMESVTSEVCKSYKKLLSTIQKQLEQNEQAIAAKVAQDKELETRIKRIATAKGIKSNTITCIVAETQGFHLITNRKQLTSFAGLDVVAKQSGKDDPKHKISKKGNAYIRAALYMPALSAAHCNRQMMQSYSRICEKHPGTKMIGVTAIMRKMLLLVYTLWKSGEEYDETRDKTHTQIRN

SEQ ID NO: 235520 - protein, 386 aa, unidentified
MSRPSNILLPAINYDHTLVLAVELSNKSWVLAAQVPGLPRTKAQRTIEPNKNALLAAIDGYRARAAAVGYTVDRVITTYEAGWSGFWLARWLVAQGVEVHVVQPSSVPVDRRLRRAKSDGIDAELLLRTLLAWLRGEPRVCSMVPIPDEADEDARRCVRERTELLSDRVGLTNQIGAVLATLGVNDYNPLLQSRRRRLAELRTGLDEPIPPNALAKIERLLARLELVLAQIAELERERDEVAAADAPDRAGKMIQQLASLRGIGVQSATVLVREAFVRHFPNGKALGSYAGLTSTPYSSGGIDREQGIGKAGNRRLRTVMVELAWLWQRYQPGAAQVAWFRDRVGSTGRRIRKVMVVALARKLLIALWRFVIDGVMPEGAVMKPSI

SEQ ID NO: 235521 - protein, 346 aa, unidentified
MNQIIRIGMDTSKHIFQLHGVDAAEQPVLRKRLRRKQVLAFFAKLPPTVIGIEACGASHYWARELGRLGHEVRLIAPQHVKPYVTRNKNDGRDAEGTCEAMSRPTMRFVPVKTAEQQAALMLAGIREQLIARRTQLSNTIRGYAAEFGVTAAKGLDKIEPLLAQIAQDENLPALARELFATEGREYARLQAELKAIDARLMAWHRANACSRRLAQIPGVGPIGATALVMKTPDPRAFSSGRHFAAWLGLTPKDHSTAGKTRLGKITRAGDEVLRRLLVAGATAVIQQVRNGRGRPSPWLLAVLKRKPPKLAAVALANKIARIAWKLMTTGESYDGARMPGASAVAA

SEQ ID NO: 235522 - protein, 370 aa, unidentified
MRKDTLYVGLDTDKKHIDIGLAEPLPKGEVRYWGKIANATTALERVRKRLQKDGRELVVCYEAGPCGYGLYRWLNGKAGVTCQVVAPSLTPRRAGVRVKTNRRDCLTLAKLLRAEELTAVWVPDAAHEAMRDLVRARGAAKEDLNRCRQRLGGFLLRQDIRYAGKPWTKKHWAWLGRLAFAEPAHRLLVGELLEALDQATARRDRLTDHIAELVASWSLAWLVEALQVLRGYQLINAATVVAEVGDPRRFGSPRQLMGYLGMGVSEYSTGERVRRGGITKTGNKRARTALIEAAWTYARPAKRPKAAAARQPAAVRAIADKARHRLSARYRKLIARGKLPAVAVTAIARESLGFIWAIARAAAPEAPRQR

SEQ ID NO: 235523 - protein, 341 aa, unidentified
MSNANIYIGADLHKKTCYVTVMNHLGTIKKQVEISTDKDKVSMFFKKYADVPVAVESTMNWIPFYENLESLGCKVLLSNPLQTKAIASARIKNDKVDSKVLADLLRTNLLPTSYIQPRDIRDLKEVVRERANFVEMRTKIKNKIHSVLFKTDNKHCFTDLYGKAGMEWLKELELRSVYKQELNRYLETLKHLNEQIDEISKIIEETAKEDYDCKLLMTIPGISFYSALMIKSEIGDISRFRNANKLCSYAGLIPATYASADKVRHGRITKRGSKWLRKTLVDAITSGSRNPNRISVFYQKLKKNKGTGKAKVAAARKLCSVIFAMLTDKQPFREFTPIKQR

SEQ ID NO: 235524 - protein, 346 aa, unidentified
MDLYIGLDVSLASTAICVVSEHGKVVKETTAASEPEDLVRSLRRLPDTVVGVGLEAGPLSQWLYRHLSQAGFDVVLMETRQVKGALQAMPIKTDRRDAEGIARLLQMGWFRPVHCKSMSAQEMRALLTSRKAIQQALIDLELSLRGVLRNFGLKMGRVAKGRFEERVRELIEGNPMLEAATNPVVAARRGLRTELAGLEKLLRDHARTDPVCRRLMTMPGVGAIVALTVKSSIDDPDRFRSAKDVGPWAGLTPTREQSGERDVVGQITRAGDTGLRTALYQAATVMLNRARPSWLTAWAWGVARRRGKKRATVALARRIGVVLLRMWRDDTDFRFSRAETKEAPAE

SEQ ID NO: 235525 - protein, 358 aa, unidentified
MVDKVTEAAVVGGVDTHKDLHVAAVVDQNNKVLGTQYFSTTRQGYRQMLAWMTSFGTLKRIGVECTGTYGSGLLRYFQNAGLEVLEVTAPDRMERRKRGKSDTIDAECAAHAAFSGIRTVTPKTRDGMIESLRVLKTCRKTAISARRVALQIIHSNIISAPDELREQLRNMTRMQLIRTLGSWRPDASEYRNVTNVYRISLKSLARRYLELHDEIADLDVMIAAIVDELAPELIKRNAIGYESASQLLITARDNPQRLRSESGFAALCGVSPVPVSSGKTNRYRLNRGGDRAANSALHIIAIGRLRTDAKTKEYVARRVAEGHTKMEAIRCLKRYISREVYTLLRNQNRRINSIPITA

SEQ ID NO: 235526 - protein, 405 aa, unidentified
MWYAGIDWSDQHHEVVVIDEQGQRVASCRVPHTPEGVAELTTFLHQTLGTAPAAQELACLIETTHGLLITALLDAGFAVYPVNPKTVDRRRKPSGAKTDAIDAYLLAKTGRSDLADLRRLTPDSPLVQELKALTRDQDGLIQMQTRLVNQLTACLKAYYPVALSLFTKLQQPLTLAFLQTYPTLEAARGASVAQLAELLQQHHHPTASTTAQTLHARLQQPQLEADPITTRTKSRLLLALVSQLAPLLDQIQRYDAEITRLFLQHPDSVSCSSLPRAGKRLAPRLLAGWGDERERYGSAASVQALAGTSPVAYESGKYAKAHRRYACVKAFRNALYQFAWQSTFAEAWAEAYYRRKRAEGKSHSMAVRALANGWVRIIQAMWLQRLPYAASTFLAAQQAHAGQVA

SEQ ID NO: 235527 - protein, 407 aa, unidentified
MELVALYKRVIGLDIHQAQITACALIEESDGGTRIEQRQFGGFKRDRRELAEWVASLRPDEVVMESTGIYWKSPYAALEMVGIRAKVVNARHVKNVPGRKTDVGDAHWLATLARAGLLRGSFVPPAKLRELRLIARQRQKLVGQLASEKNRLHKVLTDSGIRLGVVVSDLHGQSARAMVKAIIAGEPPSEVLKLASRRLKASRAELFEALQGDLTASHCFVLDELMRHIEEIEARIARFDARLLAELASERNALALLQTIPGVDLIGAAMLLIEIGSDMDAFGSANRLASWVGICPGNNESAGKRKSGHVRKGNLYVRRLLCEFAHAASQTTSVFKSKFQSLVVRRGYKRAIIAIGHKILRTIFFMLKRREHYRDSATDYEALSVQRNAPRWIKALTKFGFIASAAT

SEQ ID NO: 235528 - protein, 350 aa, unidentified
MNASTSSIPPVTYALDLGDRFSQLAAVAADGSLLEEGNVPSSLEGLTARFAGLPAARVVIEAGSQSPWMSRLIASLGHEVIVANPRRLKLITASSRKSDRVDAIALARLGRADPNLLAPIRHRPLEAQAALAVVRSRLSLVRTRTSLINHCRGAAKSFGVRLPACDARYFHRKAALGLPPDLRPALQPIIETIAGVSQRIAEMDRELEQIIDSRFPHARLVQQVPGVGPITALTFVLTIADSARFRRSRHVGPYLGLVPRRHQSGGHDPKLSISKEGDSYLRSLLVEAAHFTLSHRAPDSDLRRWAKAQLERRPTEHNTVVIALARRLAVLLHALWTSGEVYRPLSTDPV

SEQ ID NO: 235529 - protein, 430 aa, unidentified
MEGNELASVVDIVHPICCGIDVHKKFLVACIATTDERGHTTHLIKRFSTFTGDLRRLADWLASNNCKDVCLESTGKYWVPVFNILEKTCNVCLTHPKYVKAIKGKKTDKKDAKWISELFKCDLLRSSYIPPFDIRQLRDLCRYHSKLTNINTSEKNRAQNSLTVCNFKLDDVFSDIFGKSASRILDKLIDCGNPDFDFIPLVDKRCKATYDEIKAALDGELPLAQAEKLKIIRRHMENLDNLKSSLEDLILKLAESYRPQIDLLLTVPGISSTLTAVRILAEIGVDMSVFETAKQLCSWAGLAPQNNESAYKKKSTRISRAGSYLKPLLVQIVLAVCKSDKHPELKDKYVALKKRRGHKKAVIAISRKILTAIWHMFSKNEAYNASLYHKADKPPANRVLSPEQAFALLRSKGYQIVEKPKIAVKSNSAV

SEQ ID NO: 235530 - protein, 413 aa, unidentified
MEVLVDRCAGLDVHKKTVVACVRMPGSGRQTRVSEVRTFGTFEHQLVELREWLIECGVIEVAMEATGVYWKPVWHVLDDGQRFQLLLVNPAHIKNVPGRKTDVNDATWIAQLLECGLLRGSFVPPVEIRELREVTRYRRQLTEERARETQRLQKVLEDANVKLSSVASDVLGVTGRMILDALCAGERDPDRLADMAQRKLRAKIGDLRQCVPGRFNQHHAGMVTEIVAHIDYLSAAIVRLDARVEEMMVPFRAARELLTTIPGIQQRGAEIILAEIGIDMGRFATPAHLASWAGVCPGNNESAGKHRSTHTRSGDPWLQSALVEAAWAAVRTKNCYLAVRFWRIAKRRGQQRAAIATAHTMLIICWHMLSNGTVYTEIGADYLARNDNPDRRRRHLVKQLENLGYQVELTAAA

SEQ ID NO: 235531 - protein, 384 aa, unidentified
MMLNLTDTPAATEYATVYVAIELSKAKWKLGVLLPGSQKLSRYTINGGDLDALREYLARWPAKAAAAGKPVRIISCYEAGYDGHWLHRWLSDEGVINYEIDPASIQVNRRARRAKTDNIDIDQLMGTLLRYVRGEPRVCSMVRVPTPEDEDRRRVSRERKRLQKERTQHTNRIGGLLHGQGIRDAMPLKRDFIATLDQMHTGDGRPLPPKLKAELVREHERLCLVNKQLSELERMSKVEVKAAAPGSAGEKIKQLAELRGIGLVAGRDLVNEVFYRTFDNRRQVGSFIGMVNSPYQSGPRNCDQGISKAGNKRARALSIQLAWLWLKHQPESELSRWFQARVGEFKGRIRRIHIVALARKLMIALWKYLTSGLVPAGAVFGRGV

SEQ ID NO: 235532 - protein, 316 aa, unidentified
MLQRRFIGIDVCKARLDVAFRPGGDALTVSNDARGIARLLKIVKSAEPECIVLEATGGFELRLLEELSANSAPVVLVNPRQVRQFARASGRLAKTDTIDAAVLAHFAEVMQPSERLLPDAKTRELRALLSRRRQLVEMITAETNRRTHALELVRQGIAVTIRCLRRQVAILDRKLAAFIQQTPVWQRKAELLRTTPGVGPITSATLIAQLPELGTLNRKQIAALVGVAPFNRDSGLTRGQRRIWGGRSQVRTVLYMCTVAALGRNPVIHAFYQRLRAAGKPGHLAVVACMHKLIIILNAMLNQGTSWSPPLLANQV

SEQ ID NO: 235533 - protein, 371 aa, unidentified
MKSIIYLGMDVHTTNYTLCCYTLEDDRMCHLQQIAPDYRLILKYMDQVRRLYNNDVEFLCGYEAGCLGYSLYHQLTAHQVRCVILAPPTMGAVLGVRKVKTDKRDAMLIAKCLAFHTYHPVHIPTPEEEQVKEFIRMRDDHKLALKRIKQQISAFCLRHGFHYTATKSKWTQAHWKWLKSLKPDGLHQETLNEYLLTCSSLCDKLERLDRRIEELAAQEPFQERVRQLTCLVGVKTHTALSIIVEVGDFNRFPTAGKFASFLGLTPGEASSSDKQNRFGITKAGNTHVRRLLVEAAQSYARGQTGRKSKDLKARQAGNKEQVIAYADKGSERLRRRFRQLLYKGKQHNVIKTAIARELSCFIWGMMTDRIA

SEQ ID NO: 235534 - protein, 356 aa, unidentified
MTASYDHHIGVDYHKAYSHVVVQDSSGKILRSGRVKNDRQSLESFLDRYQENSHAVLEATRNWTVMYDWLDNICDDVVLAHPLKVKAIADAKIKTDKIDATVLAHLLRADLVPQAWAPGERARDLRIALRERMFYVRLRTMMKNRIVTVFDRYPEQTAQLRKMVDLFGKGGRQQLAAIAVSAIDRIQIDRGLSFIGDIDERIKQSEATIRTMTKTNNNVKLLKTIPGIGEFFARLIDAEIDEINRFRTPQKLAAYAGLVPSTYSSGGKTVHGKIIRQGNKWLRWAFVEAVTPAVATDPQLRAQYEHLKFKGTNKARVAIARKLLTIAFQILRDQRPYERRGAMSDGNASSTRSQLS

SEQ ID NO: 235535 - protein, 343 aa, unidentified
MTIVILGVDLGKNACSVVGVDAAGAVIVRRSMRRQTLIDYVAQLPACVVAMEACCGAHHLGRLFASHGHEIRLMSPEYVRPYVKAQKNDDRDAEGIAEAASRPTMRFVELKTQEQLDIQTLHRVRSRLVAERRSLINQLRAILLERGIIFPVGRRKLELGIDGMLADEETSLSPRLRQLMDELRTEWRELDARIEVLNGEFVELARNDPAARRLTSIPGVGVLNATALIAAVGDASGFAKARDLGAWLGLVPRQHTTGGKPRLMGISKRGNTYLRTLLIHGARAALPSLSKSDTPLGRWLKAMIERGVHRNAVVVALANKLARIAWAALRKGATFERSYPVAA

SEQ ID NO: 235536 - protein, 326 aa, unidentified
MKKFTVGIDVSKDKLDFCILQNQDHSVLKRGVIDNHKKAISRWLNKLDPDQHAVAMEHTGHYGAMLAWLLSEKQMCFYMINPLELKNSMGIQRGKTDEVDAYRIAVYAITHNHRLKAYDLPTETLRKIKALVTARERFVKIVVQLKNSSKGNEILNKTIDVKELIQEEKKQIRSITKSIKGIERQIMSLISSSKELKESFKKITRVIGVGPITAAKCIAETDNFLKFSNARKFSCYCGLAPFPYQSGSSVRGKSKTHFLRNKPLKSTLFKAASSAIQHDPQLKAYYHRKLKEGKHKLSSLNAVANKIVLRIFAVVKRDEPFVKLAA

SEQ ID NO: 235537 - protein, 338 aa, unidentified
MAIVTLGIDLAKNVFALHGVDSAGRAVLVRPSVPRAKLLELVAVLPPCVIGMEACSGAHHWARLFAGHGHTVRLMAPKFVIPYRLSGKQGKNDAADAAAICEAVTRPNMRFVPIKSLDQQGELMVHRARQGFVAQRTATLNRIRGLLSEFGVVLPLKAATVRRQAMLQLEDLPGWANTVIGDLLGEVTRLDERIAQYDHHLKQIAKGSEAARALMQLPGVAETTATALVATIGRGQDFKCGRQLAAWLGLVPGQYSSGGKQRLGRITKAGDPYLRMLLILGARSVLQTASAKSDPVSRWAVQLAARVGYWKAIVAIAAKNARMCWAVLARGDQFKLPA

SEQ ID NO: 235538 - protein, 367 aa, unidentified
MRKISTAAGKTAKKFRDHKLTIGLDLGDRSSWYCVLDEAGEVLLEQRLGTTPKAMKEVFGGMPRSRIALETGMHSPWVSRLLSDLGHEVIVAHARNVRLIGESRKKDDRLDARTLARLARIDPQLLCPVKHRGARAQADLTVIRARAGLVRSRTALINTARGLTKSYGERLRGCNPRNLNPEKAQGLSPELQAALEPLLAAIEALSERIHEYNQQIEKIARESYPQVARLEQVKGVGTLIALTYLLTLEDPHRFRKSRDVGCYVGLQPGRRNSGQSEPQMHISKEGDPHLRTLLVQGAHHILGRFGADSDLRRWGLKLAERGGKNGKKRAVIATARKLAVLLHRLWVSGEAYEPLGNRHPAAMPAAA

SEQ ID NO: 235539 - protein, 343 aa, unidentified
MDHFGGLDVSVKETSICIVDDTGRIVKEVKVASEPEALLKVLGKPAYRFKRIGLEAGPLSQWLFSALAEAELPVVCVETRHMQAMLKAQINKTDRNDARGIAQMVRAGLYRPVHVKTLRSQKLRMLLTHRKLLQSKAIAIENDLRGTLRNFGLKVGMVGKVKFESRIKELVDNLPDLALLVEPLLIVRRALREQIIILHRRLLAIVRSDEVCRRLMTTPGVGPVVALTYRATVDVPARFRKSKSVGAVFGLTCSRYQSGEIDWSGRISRCGDEMMRVMLYEAAQSMLRSKKWSWPKAWAMQIARRRGMKKAIVALARRLAVILHRIWVDGTEFRWTREAVPAA

SEQ ID NO: 235540 - protein, 353 aa, unidentified
MERYIGIDAHKESCTMAVMGPTGRRLQELKLETNAKVLKEALKSIAGQRHVCLEEGELSAWMYELFEPLATRVVVIQAAKKEGPKSDSIDAWSLADQLRRGELSRFVFKEPGTYRPLREAVRSYDGMVQDTVRIKNRLGAVFRARGIKVRSEEIYTGSSRSTWLAKLPPKVRQRATLLGEELDGVADIRKQAETWLREEAGKVPAVKLLATAPGIGTIRAAQIVAVVVCPERFRTSRQFWAYCGLAVVTRSSADWVKDAEAAGGWARQNVLQTRGLNRKRNPMLKSVFKGAALKVVQQQADNELARHYMEMLKTTKPNLARLTIARKIAATVLAMWKNKEAYDPKRHERPARS

SEQ ID NO: 235541 - protein, 396 aa, unidentified
MSQVIIGMDPHKRSATIEVMTSDETVVGGGRYGTDTAGYRAMLAEAKRWPERTWAIEGCQGIGRHIANRLLAAGEHVVDVPPKLSARTRVFATGQGRKTDATDAHSVALAATRMTGLRQVVDDQQLAVLRILADRRRSLGEDHTRMVSQLHQLLLELIPGGAKKDLSAAQAKALLARVRPRDAAGKARRRVAAELISDLERIYQRKKEANKELKALLAATGTTLTDLHGIGPSGAARLLAEVGEVTRFPAKAHFASWNGTAPIDASSGDQVRHRLSRAGNRQINRVLHIMAVVQLRNPTEGRAYYDRKVAAGKTPREAMRALKRRLSNIACHQMITDARRMKTGPGGHLGAATGSSAAGGPGRRRMARCYRPQPPVRPSSPRPATIQGLTITSLHV

SEQ ID NO: 235542 - protein, 417 aa, unidentified
MGIDIGKKWLSVCWMAGPADGEPRSEVRSFETTVGALRQLREWIEQEGCTHAIMESTGSYWKPVFNILEGAVKVALANPHEVKARKGHKTDHRDAWWLAHWLRHGMVTPSFLPPRPQRELRDLTRRRKKLLSAASSEKNRIAKVLEDANVKLGSVLSDLFGVSGQRMLEALLEGQSEPAQMAAFAQGTAKKKIPALIAALEQHPMGEHPRKRIRFSVEHLRFLEDQIAELDPEILDRIQQAGYEREWDLLQTVPGVQEPTAAALLAEMGPDTSPFESEKKLSSWAGVAPGNNQSAGKNKSAHTQPGNKWLKSALTETAWGVARKKDCHLRDKFWRIAAKSKPKAVIAIAHDILVLAYFVLRRGTPYVEKGPKELTEPHKQRIIRHHVRRLGTLGIRVRVHPKLASSSKRSKESNASD

SEQ ID NO: 235543 - protein, 488 aa, unidentified
MPLTRHHQRMKMVVCPPYNTLAAGEARSLYLGALSPTLRQTPTTRCTTDCRSLTGSTRDRMTGDGRCTSLRNSCRKECFGMDVVYSHVCGLDVHKKNVVACIITPDHKEIRTFSTMTEDLLALIDWIKSHGCTHVAMESTGSYWKPIYNLLEMEQIETLVVNARHIKNVPGRKTDVKDAEWIAGLLRHGLLKGSYIPSRPQRELRELIRYRRSLMDERAREIQRIQKVLEGANIKLSSVASDIMGKSGRLMIEAIIAGETDAAVLSELAQRRLKAKKADLQKALHGLIGPHQRLMLKTQLRHIDELDKLIEQIDAEVKKRMDPFEEDLERLDTIPGVGRRSAEHILAEIGTDMDQFPSAAHLCSWAGLAPGNNESAGKRKSGKTTKGNQKLRTALIESARAAARCKDTYLSSLYHRIAARRGANRAAVAVAHRILTICYHLLKNKQTYIELGPHYYEERKRTHVARQAIRKLEILGYKVVVEEMDQTA

SEQ ID NO: 235544 - protein, 342 aa, unidentified
MSKLTVFVGLDYHKDSIQVCIMDQSGKVLANRSCANDANAVTLLVAFFGDHVRAAIEACTGAADLADELVNHHGWDLDLAHPGYVSRMKQSPDKSDYSDARMLADLVRVGYLPRVWLAPEDVRQLRTTVRYRQQLVNQRRSTKLRVTALLREARIFEPKGLRRWGTKWRAWLATVEGLGTEAWFVLKCHLAELRRLDEQIALVEVRLAAVTAGDPAITRLLAMRGVGMVTACALRAEIGRFDRFRTGKQLARYCGLSPRNASSGQRQADAGLIKAGSELLRAMLIETAHRLIRFDARWAALGTKMRDAGKPGSVVAAAVANRWVRWLFHQVEGGTIALKTAG

SEQ ID NO: 235545 - protein, 461 aa, unidentified
MTFSPCRTHGLGGGVTGSGGIDRPLIRGMTTGFFGGREALRNVDVAIGAAGRPGEYDRRVHVIDTSDIGAFLGLDVGKGEHHATAVTPTGKKAFDKRLPNSEPKLREVFGKLKTKHGTVLVVVDQPASIGALPIAVARDMGCAVAYLPGLTMRRIADLYPGEAKTDARDAFVIADAARTMPHTLRSIELEDETVAELEMIVGFDDDLAGEATRISNRLRGLLTQIHPHLERVVGPRIQHPAVLKLLDQFGSPAQIRKAGRRRLINLIRPKAPRMAERLIDDIFTALDEQTVVVPGTDAAALIVPSLANSLQAVLDQRKLLAVRIEELLENHPLSKVLTSMPGIGVRTGARILIDVGDGAAFPSAAHLAAYAGLAPATRSSGSSIRGEQPSRRGNKQLKRAFFLSAFAALSDPRSRAYYDKKIAQGKHHTQALLCLARRRADVLFAMLRDGTFYDPQPAPTG

SEQ ID NO: 235546 - protein, 351 aa, unidentified
MEKVIKQCVGIDCAKEKLDVSFAVMNSSFDSSILSTTVFTNDRAGWKKMIKWAEQLEAKDLQTHFVIEATGVYHEQVCLFLFLLHRQISVLLPNKVKKFAGTLKIKTVNDRVSAQTIAQMGLEKKLDSWQPPHEVFNLLRQLTRERHQLIEEKTQILCELHAEQSGAWPNKKSIQRMKQRINLILKQIVETENEMKEQVNEHPWLKEKLAYVCSIPGIGFLTAVTVVAETNGFNLVRNKKQLVSYAGLDVIEKESGSSVRGKPRISRRGNKQIRRAMYFPAFSAIRVKSKMHHLYDRLEAKHGIKMKAAVAVQRKLLELMFLLWKKNENYIENYDIKKLEQPKKAALIEMA

SEQ ID NO: 235547 - protein, 365 aa, unidentified
MTVIHYIGLDVHKKTISYCIKTADGRIVRQGRLEASRAALRAWAEGLPAPWHGAMEATLFSAWIYDTLKPYAEKLVMGHPARMKAITAGKNKSDSIDARTIADLLRCDLLPTCYVLPPELRDLRRLLRYRNLVVQQSVRMQNKMAGLLMESGTAFDKNKLHGKKYFTQLLQSLEEVPQSVKDLLRMSRGSMELFESTQKQLIERLLNEPALEQRVERLMSIRAVGPITALTWALEIADPRRFASIADAVSYCGLTAAFRSSAGKQQRGPISKQRNAWLQSVLIEAAKLAPRWNPQLAALHAHELERGHANRATLQVARKLVAYLLAVDKSGQPFQVHTPPPSANTKAKNKTTRKNKKAAALAPAA

SEQ ID NO: 235548 - protein, 412 aa, unidentified
MEQLLDRVAGLDVHRDTVVATVRRPRPGGGRAAKTLTFATTVAELTALGDWLVAEGVELAGMESTGIYWKPVYFLLEERIPQIWLLNAEHLHNVPGRKTDVADSAWIAQLLEHGLVAPSFVPPAPIRRLRDLTRHRRVLIEERTRVIQRLEKALQDAGIKLTSVASTLLTKTGRAILDALLAGISDPIELAELARGRLRAKIPALQQALRGSFRVEHHGILVAQMLAHVDFLDESLAELDARIEETLADYEPVLQRVMSIPGVGRKTAIALLAEIGADMSVFPSPAHLASWAGICPGNNASGGKPRPARTRHGSPWLKTALTEAAQAAARTRGTYLAAHHAAIRGRRGTYKAIGATRHDLLIAYWHIVHDGVDYRELGADWAHRRHSREHQTRRLVRQLEALGHRVQLTDAA

SEQ ID NO: 235549 - protein, 433 aa, unidentified
MLFRAAMPGAEYILKGDIQLARILNILNKSCCGIDVHKKTVVACVLKADEFGEYTHKIKTFSTMTCELEKLHAWLKEQNCEKVAMESTGVYWIPVFNILEQDFDIVLSNARQIKNVPGRKTDPSDSRWIAKLLALGLVNGSFIPPKDIRELREMTRYRSKLVSMRTSEKDRAHNILETCNIKLGCVATDIFGVSGMRIMKALIYNTEEASPEELAQLAKGRLRKKIPELVKALTGNMDAHHASMLEMILDHLAYINEKIEELDRRIEEKCKPYQQEIELLDTIPGVDKISAQAIVAEIGVDMSVFETPERLASWAGLSPGNNESAGKKKSTRTRSGNQYIKTVTCQCAHAAAHTKDTYLSAKFYSIKARRGAKKAAIATARHIMVAAFHIIQNKESYKELGGDYLLKLRPKNIAHSMKKRLESLGYTVIENVI

SEQ ID NO: 235550 - protein, 404 aa, unidentified
MRHIELDVHRDFCEVAISEAGEVRSPGRIKTTPEVLELFARSLDRKDEVALEVTGNAWEIARIIEPHVKRVVVVSPSDTGIRQARAKTDRLDARTLAKLLATGSLDALWMPDERTRALRRRLSRRSQLVRARTRAKNEVHAVLVRRLIAKPKVSDLFGVAGRRWLKGLELPDEERETLDGCLRQIEFLDQEIAEVERVIALDALARGDVKRLMSVPGVNVITATTFLAAIGKANRFPSQRKLVGYLGLDPRVRQSGSVPATHGRISRQGSAPARHALVEASWSAVRQPGPLRAFYERLRVRRGHQVAIVAAARKLACLFWCLLTREEDYAFAQPSLTKKKLRRLELTAGAERGQVKPGIWSTNKALGKAERELAEQAEVAYRRLVADWQSQRKKKGAGVPVGRD

SEQ ID NO: 235551 - protein, 452 aa, unidentified
MTKKKIALDVVNPFAAGIDVGSRSHYVAIGQTDEDVREFGVYNEDLIALAQWLLDNEIKTVAMESTGTYWQSLFATLQSMGLEVLLCNGKFTKNIKGKKTDVQDCQWIQKLHTLGLLSGSFLPDEATEQLRTYCRHRANLLGQAADTSRKMQKYLRLMNLRLDVVVKDITGLTGLAIIDSICKGESNPENLASLRHGNCKKSEKEIAKALQSNGRKDLLFALTHEYQLYLLFQKKITECDNEINKLLSEQISNDDNKKEHHIDKKIYKRINKNTPDININLLSYQYFEGVDLLAIEGISHSTVLTLMSEVGLGIHKFETAKQFASWLRLAPNNKISGGRILSNRIPKGSNRLKIALRQAANAVGNLKDTALSNFFKRIAFRKGRTSAISATARKLAVIIWNMITKKLPYKTDTQYEFLDQKRKRKVMEMKKLIHKFDITPDDLGLQLNINNL

SEQ ID NO: 235552 - protein, 366 aa, unidentified
MKKNSTVVTGRRQIFKQPKLTIGFDLGDRSSHFCMLDEAGNVILEDHLPTTPKGIRRVFCKIPRSRVALETGTHSPWVRRQLSQMGHEVIVAHARNVRLIGESSRKDDQLDARTLARLARFDPGLLGPVRHRSAQAQIHLTVIRARAALVGTRTALVNAARGLTKSYGERLRKCGTGQMNRESAKGLSQELRDALDPLLGGIESLNERIAEYDGRIEQIAKEVHPEVARLKQVKGVGTLIALTYVLTLDDPHRFRRSRDAGCFLGLRPGRRNSGQSEPQLHISKEGDRYLRTLLVQGAHYILGPFGQDSDLRRWGLKLAERGGKNAKKRAVVAVARKLAVLLHKLWVSGEVYEPLRNSPKVVSAVA

SEQ ID NO: 235553 - protein, 347 aa, unidentified
MRFYTKPHRFYCGIDLHARTMYLCILNQAGETLVHRNMPAAPEPFLKTIAPYREDVVVCVECIFTWYWLADLCAQEGIPFVLGHALYMKAIHGGKAKNDKIDAQKIAVLLRGGMRPQAYVYPAEMRATRDLLRRRVHLMRKRAELLTHVQQTNSQYNLPEIGKKIAYKANRDGVAERFPDPAVQKSIEVDLALIGHYDHLLRDVELSVLKTAKQHDANTLYLLRTVPGIGEILSLVLLYEIHNIERFPRVQDFVSYCRLVKCAKESAGKRYGTSGTKIGHAYLKWAFSEAAVLFLRNNPTGQKYLARLEKKHGKGKALTILAHKLARAVYYMLKRGVAFDLNTFFQS

SEQ ID NO: 235554 - protein, 344 aa, unidentified
MITIGIDPHKSSHTAVALDPSGRILGELRVPASRATPERFLRWAKDWPQRIWAVEGATGLGHLLTQQLVAREETVLDVPATLAARARLLGPGHGRKTDGIDARSVATVAQSQPDLRRVGPEDHSMVLRLLADRRDELTQERRRVVNRLHRLLRDLRPGGAPIELSATRASELLGHIRPRAVVDLERKAMARALVADLRRIDRALVENRTRCAAAVAASGTTLTAIFGISDVLAAKILGHVGDVSRFGSADRFASYTGTAPIEVSSGEVTRHRLSRSGNRSLNNALHLAARVQTMHPGPGRDHYDRKLVEHKSSREALRSLKRQLAKVEECPPEWWDLSEAPDLR

SEQ ID NO: 235555 - protein, 359 aa, unidentified
MQPEASQEVKKEMRFVGIDIGKWKCRAAIMDPGGLILEEFTFTNNHEGIEGLASRLTLADRVVMESTGSVWTNLYNHLDEKHIPVTLANPLKTKAIASAKIKSDKVDARILAHLLRSNLVAESYVPPKHLREIRTLIRHRVAIVKIRTMVKNEVHALIDTHGFTCPYSDMFGKGGIEWLRTLQLPALDRLILDNHLTHLENLNQQTERVDEEVHSEAVEDPDVRLLLSMTGLNVYSALLVKSEIGNITRFPHYKKLASWAGIAPSLHQSGNVEYHGSITKQGSRMLRWVMVEAARVAVNHDDRMRAFYERVKNRRGDQKAIIAVANKMLKITWFMLTRREPYESRNEKRYQKKLNSINN

SEQ ID NO: 235556 - protein, 343 aa, unidentified
MEEKSSIWCGIDVSKAKITVALDLSPELPVRKMPVQTFRRTLDGLGDMMDWCILNKANDIHIHMEATGVYSRELLMWFQLHYPAVPVSCGNPRTIKHFIDSQHLGNKTDELDAMAIARMGSVQKPEATPLPPPEYMQLRELVHSRDDLVVKMRALEVSRDAMLKADSVSAKSFQTVVKVMEKQIKKIEKAISDLVARTPEISRSVKLMCSMPGIGVVSACTILAELGPFSPDYTRSQFSGFTGLQPVLRQSGTSVNSSHVSKNGSPLLRKVLYLCSVHTVSKVPWLKDWNERLVTKGKKPLTARCACMRKMLLILRSMVLNNTEFDENHEVAKKTTTKSDKAS

SEQ ID NO: 235557 - protein, 467 aa, unidentified
MRKSTTSQKTIPASLSQLNPKCAGIDVGAAELFVCIAKNSSKQEVRSFSTFTADIKHMIDWLKKNKVESVAMESTGVYWIVPYEMLEEAGFEVLLVNARFFKAVPGRKTDVRDCQWIQQLHSYGLLRGSFRPEQDIVELRSYVRQRSRLFESAGTQVQLMHKALTQMNIQLNHAISDITGMTGMNIIKAILEGERDPVVLADLSVAGCRKKIDLIAKALEGNYRREHLFSLKQAYEAYEFFHEQIHKCEIEIENILKTIEEKERLLFEDEFQEAPCQDKQQGVLAKKNRPKRTYNRSPYHFDARGELQKITKADLTTIPGINENIAMKILSEIGTDMSRWRSAKAFSSWLGLCPGNKVSGGKVLSSKTKPSDNRVAQALRMAASTLYKSNCYLGAYFRRMRSRLGTPKAITATAHKLAKILYRMLVNGENYRELGENYYEQQYQERILKNLEKRAKEMGYTLTPTAA

SEQ ID NO: 235558 - protein, 457 aa, unidentified
MSQKKRSRRSRDLSLVHPAAAAIDIGATMHVAAVGPNRDKEPVRTFRTFTADLHRLADWFSECGIKTVAMESTGVYWIPVFEILEQRGFEVMVVNARDAKHVPGRKTDVSDAQWLQRLHEYGLLRASFRPQAEMAALRAYLRQRERLLDYAAAHIQHMQKALMQMNLQLHHVVSDITGVTGMSIIRAIVAGERDPNVLASHRDRRCQASVETVCQALVGNYREEHIFALTQAVELYDVYQTKILVCDTQIEAILKRLKKNAPSPRSKLPPARRRARQSNEPAFDVREALHAILGVDLTQINGLGPSLALALVGECGTNLTAWPSAKHFTSWLGLAPHNKISGGKVLSSKTRRTRNRAASLLRLAAGTLGRTDTALGAFYRRLSARVGKAKAITATARKIAVLFYNTLRHGMSYADPGATYYEDRYRQRVLNNLQRRARSLGFVLHRVEPDTAQVGVS

SEQ ID NO: 235559 - protein, 404 aa, unidentified
MYNAVGIDVSKGKSTVAVLQPGGTVIRKPFDVSHTSQNLNELADYLSSLDGTTKIVMECTGRYHEPMVKALSEAGLFVSIVNPHLIKNFGNNSLRKVKSDPADARKIARYTLDNWTELRQYSGMDNTRTQLKTLNSQFSFFMKQKVAAKANLIALLDNTYPGVNKLFDSPTREDGSEKWVDYAYSFWHADCVRKIGLKAFTERYMSFCKKHHYIFQQDKPEKLFNASKELVAVFPKEKTYKLLIQQSIQQLNLASEHVERLRREMNELASTLPEYSTVMGIYGVGKTYGPQLIAEIGDVSRFTHREALTAFAGVDPGVDESGQHKSKSNRASKVGSARLRKTLFQIMTTLLQNAPEADPVYRFLDKKRSQGKPYYVYMTAGANKFLRIYYGKVKECLRNLEQTE

SEQ ID NO: 235560 - protein, 356 aa, unidentified
MTTQQKQSCMFIGIDVHKDTHTAVGISPYGEKLFEITVGNYKEDFEKLTEKVKEHRGVLSPFFGLEDVRGYGERLAGYLYEKYPVYHVPSILVDRQRQNATHPEKSDSLDALGVAKVMIQSIDTLLPYTISQEGEKAKQLKEISIDREDLVLEQTRLKNQVHTLLYRIYNTEYANKFKDPFSLKALRFWRNAKPKCDPFLLKTMKRKVRRLLDIHSEVAELEKDMETLLKDNYTIQTASGCGVVLASTIVGEIGDIQKFKSSASLAKYAGCAPRERSSGKKVRHVKTRSGNRRLNCAFHRMALAQISRMGNDKARTYFKRKVSEGKSKSQALVCLRRQMVNIVWNMLKYKTVYRNA

SEQ ID NO: 235561 - protein, 309 aa, unidentified
MTHSIVGVDVSKDWLDAYRRTDSKNRRFANTKQGRQSLTRWAEGARVAFEPSGPYHRALEQHLAVAGIGAVKINPLQVRRFAEAVGTRAKTDTVDARLIAVMAAQLELPATPPLDQITRDLKALQIARQGLVKDRTTAKNRAQSHECRFLKSQAAARLRHVKSQLAALDAEIATLIAGDEHLARRRDILLTIPGISAITAAALLAEAPELGALEGKAAASLAGLAPMTRQSGKWNGRAMIRGGRAHLRHALDMPALVAARFNPDLKALYDRLISAKKPPKVALTALMRKLLILANALLRDGRPWTEKSA

SEQ ID NO: 235562 - protein, 346 aa, unidentified
MGKSITDLSSVTTVGLDLAKLIFQVHGVDASGRVVVAKAVKRNKLLEFFASLPPCLVGLEACGSAHHWARELIKLGHDARMMPPAYVKPYVRRQKNDAADAAAICEAAMRPSMRFVGVRTLENQATLMRHKAREMLVSQRTQLLNGLRGHLAEVGVIAAQGPRHARELAGLIEACDERIPIEVCEALAELVHQLHRLDEAIARCDRTIAKMAQADETARRLMSIPGFGPITASAMVASVHGASGFSGPREFAAFLGLTPKQNSSGGKQRLGRISKMGNRYLRKLLVVGAHAVLFHRKPHADALRTWAKKLIEKKPFKLVAVALANKMARLAFAILRDKTTYQGIPA

SEQ ID NO: 235563 - protein, 351 aa, unidentified
MAMLADTVELVIGVDTHKDTHTAAVVVAATGAVLEQVTVLATPAGYQQLLKLASRQPGQRVWAIEGTGGYGAGLTRFLAANAEQVVELDRPKRVARRHGAKSDSLDAIRAAREALGRDQLAQPRAAGPRAALSVRLAARRSAVQATTDTHRQLHALVVAAPDTLRSRLRGLTTPRLVSTCGRLRLQTTWDVETIATAASLRALARRIQVLDAEITEHTRAITALVRAWHPELLTPTGVGPIVAAVVLCAWSHPGRCPSDAAFAMLGGAAPIPASSGQTVRVRLNRSGDRHLNQALHLVVLTRLRYDPATRAYAQRRRAEGKTNREIRRCLVRYVARQLYRLLEANPCFDPT

SEQ ID NO: 235564 - protein, 409 aa, unidentified
MELVISRCAGMDVHQATVVVTVRVPDDAGGRRSCTETFGTMTPDLLALRDWLQAHGVTHVAMESTGVYWKPVYYVLEDAFTLLLINMHELKRVPGRKTDVQDSEWLAQVLECGLLKPSFVPPPPIRELRDLTRYRVQQVQDQAQETNRLHKVLEDAGVKLSTVASDVMGVSGRLMLTALVQGTTDPAVLADLARGRLRVKLPALRRALEGRFRPHHAFLLRQILAKIDFLEETIVHLTQEIDARVVPFEPMLTALDTIPGVDRIAAISIVAETGGDMGRFPSAAHLCSWGAMCPGQNESAGKRRSGKTRKGNRYLRRTLIQTALAATRKRDSALQSRYHRVKRQRGHKKAVVAVGHQILEIAYYVMRDRVTYQELGAEYFDRRHHERAVRRHVKQLEAMGFHVTIEKAA

SEQ ID NO: 235565 - protein, 347 aa, unidentified
MENTNWVGVDTHKETLACYTGNKFKEFSTTTLGFKKALEWAGNANWAIEGAYCFGKAFASFLMKNNCKVYEINPYITKSWRCALSANGNKNDYGDAKVISIFSKSLKLEEISLKTVKLKERITARDLLVKERTKLINSIKMLYFTRGEHLVVNNLTTKKAINYLKNNDDIIISNFGILIENLNNSIKTLEQEINNLLPEKILKLTEICGIEKLTAAIIYTETKGKLSTKASFANYCATAPIEKSSGKMSKHCVNRRGNRKLNSIFFRLSICQARYDERGKAYYDKKLREGKSPRHARKCLARQLCNIVFDFEQHDTNENLQEKIQQILLQHPERLKDFYKIAKALVD

SEQ ID NO: 235566 - protein, 338 aa, unidentified
MALYCGIDLHSSKSWIAILDEGLEVIRETSVANDLGEVLRVLEPYREELEGVAVESTFNWYWLVDGLMDAGHRAHLTNTWAVKQWEGLKHTDDRHDARWLAHLLALGILPEGYIYPRQERAVRDLLRRRAFLVRKRTSFLLSMRGAFECRTGLRTRSRDVKRWTEADVEAYLDDPAAVLGITCLLEPLKVVTAQIRTIEKEVLTRARLRDEFAPLQTVWGVGKVLALTIMYEVGDIARFSKVGNFASYCRLVKTARLSAGKSKGTGNRRNGNPYLSWAFSEAAHFAVRHHEVASRYFQRKRSKTNGIVAIRAVAHKLARASYYVVRDQVDFDPVKTFG

SEQ ID NO: 235567 - protein, 351 aa, unidentified
MNRSAPTHCPLYCVDLAKHKFQVHGYSADGHRQQCLTLSRSQFDRLFCEESNSDCLVVMEACASSNYWCRRLLALGYRVKRVPAQFVDKQRIGNKTDGNDADAIFAVHQDRRVGAVAVKTVEQQDLCAQHRLRELLVGQRTQLLNQARSLLAERGQIAPQGRVALEALIRLVCQEEPNQEVSAGLIELLEQITCQVDGIDAQIQSIEGRLKAASQASVLIRQVQSIHGVGLITATAVVAEYGNNISHFADARQFAASLGVTPSERSSGQQRRLGGITRRGNPYLRTLLVQGAQSVLNHCQRREDAISQVARRLLESKRRTVAVIAIANRLARIIYAVIKHNTPYRAQPQQA

SEQ ID NO: 235568 - protein, 412 aa, unidentified
MGTITNLFWRLQMISVGIDVSKEKSTVCILKPYGEIVSKPFEVYHVEQELSELATMLLRLNDEVRIIMEATGIYHLPVLSYFKEKGFFVAVINPFEMKEYRCQGLRRVKTDKQDAIAISHYGIDHWYRLKEYEAQENIYTELKLLGRQYCHYMRMRVESVLELTHLLDYTMPGIKTLLQGWNEKNGKDKLGDFAEEYWHYDNITKKSEKQFIDSYLKWAKKKGYHQNQDKAIKIYALAKEGIPTVSSNTPSTKMLVQEAVRVLREVDHTLMTILTQMRSLAKSLPEYPIVRAMGGVGDVLAPKLIAEIGDVRRFHSGKALIAYAGIDAPPYQSGRLVGTERKISKRGSSNLRKIGYEVMRSLKTHKAPEDAAVYEFILKKEREGKSKRAAKIAGLNKFLRIYYARVMEVYRK

SEQ ID NO: 235569 - protein, 346 aa, unidentified
MMIIGCDFHPSWQQIAWLDTATGETGEQKLVHASGDAKKFYGQLAAPVLIGMEATGNSQWFVELAEDLGHEIWVGDAAQIRASYVRKQKTDKRDAAHILKLMVEGRFPRLWTPDREQRDLRQLVVHRHKLVEIRSRVKNELQHLSLNKGMQKKRTLWSQAGQKLLRELALKPWAACRREDLLGLLAMLNQQIGKLDAAVQHAADGHPQAQLLMTQPGVGPNTALAYVLTIGDVTRFPRGKQVASYLGLIPREHSSGGHQMLGSISKQGNRLLRSLLVEAAQIAVRFDPGMKKEYLHRCHQKPKGVAKVAAARKLAVRLYWMLRTQVAYPEIVRIESSPRVPLVGAS

SEQ ID NO: 235570 - protein, 338 aa, unidentified
MFMIGIDPHKGSHSAAVLDEHEQLVGEFRVRAGRRQREELVTFAARFEPRCWAIEGATGTGALLAQQLVAAGEHVVDVPPTLSARARLLDAGRVDKTDAHDARSAAVVALRHSKLRTVMVEDHTAVLRLLAKRHHDLVAHRTRAVCRLHTVLCLLVAGGLPRHLSATRAAAELRRIRPADQVGIERRRLAVELLTEVRAADRDLAALKTRVQTAVTASSTTVTDVIGVGPVMAAYLIGYSGDVRRFPTAGHYARYNGTAPIEASSGPRVRHRLNPRGNRQLNHALHIAAVTQVAHDTAGRAYYLRKQAEGKTKKEALRALKRRISDAVYRQLLADTTR

SEQ ID NO: 235571 - protein, 317 aa, unidentified
MALLLFFVGIDVSKAWLDVWIESQRKFERFGNDPDGRKALIDRLAELGPVAGIVVAFEATGGYERDLREALLRAGLQVRRLNPARVRLYARSLGQLAKNDRIDARVIARYAQSADLHPEVLVPARERLADLVAHRRRLIDERTAIGNQLETTSLPKLRAHHRQRLAVLAKQITETDRLISQAIAKEPTLLAKVALLKTVKGVKDVTATTLIALLPELGTLPGGAIASLVGLAPFDHDSGRHKGQRRIGGGRSAVRTALYMAARAAARSKSPLGEFYSRLRERGKSAKTATVALMRKMLVILNAILRDQEPWSHAPSR

SEQ ID NO: 235572 - protein, 322 aa, unidentified
MFTFNLGIDVSKAKLDCALRLANGKLRHKVLANSRDGFEALRAWLSHQGVEQCHVCMEATGIYWEAVAEFLAGIEGCTVSVVNPAQIKAFGASRMVRTKTDKVDAQLIAEFCAERNPRPWQPPPAAEQALRALVLRLESLQTMHTQESNRLEVARPVIQAGITSHLDWLDKEIKQLIKQIKNHIDADPDLRDKQRLLDSVPGLGERTIAVLLAFYAQPERFGNARQAVAFAGLDPRQHESGSSVKGKPKISKVGHAFLRKALYMPAMVTLYKTDWGEKFRTRLAASGKPSMLIIGAMMRKLIHVAFGVLKSGKTFDPAMHGA

SEQ ID NO: 235573 - protein, 343 aa, unidentified
MQTVSTIGLDIAKSVFQVHGVDANGLVVVRRQLKRRYVLAFFEKLGPCLVGIEACASSHYWSRELQALGHNVRLMPPAYVKPYVKRQKNDMADAEAICEAVTRANMRFVPTKTPEQQSGLVLHRTRHLFIRQQTSLINAIRGHLAEFGVTAPVGRKGIEELLRVIADPSDKRVPDVVRACLAALGSQLLSLKKQILDFDRMIMAWHRSNQTSKRLNCIPGVGPLLATALVASVADPKVFRSGRNFSAWIGLVPKQHSSGGRARLGSISKKGDRYLRGLFVAGALAVIRYAKLHGTKYRPWVAALLARRPTKVAAIALANKLARMAWAMMARGERYNYPAALRV

SEQ ID NO: 235574 - protein, 346 aa, unidentified
MGHFVGVDVSLELSSVCVVDTTGQVVKEAKVSTEPAELVRFVQNLGLEVERIGLEAGPLSAWLHDGLAGAGLEVVLLETRHVRAALSAMVIKTDRRDARGAQLLRMGWYRPVHRKAAPSQEVRALLVGRKLLVAKLVDVDGGIRGMLRGFGLKVGPVGRAGLPRRVRDLVEGHAVLRSILEPLLAAREAIRTELARLHGQVLALARTDEVCQRLMTAPGVGAVVALTFRSGIDDPTRFRSSRALGPYLGLTPRRYQSGETDVSGGISRAGDTMVRAALYEAATVILSRAVRFSTLKRWAMAVAARRGVKRARVALAQKLSTVLHRIWVERTTFRWAGEAHTSGRAA

SEQ ID NO: 235575 - protein, 350 aa, unidentified
MSESYEGRQIVGMDLHRRRSVLVRMTESGERLETVRISNDPEYLKQVMARAGEAPEVVLEACYGWYWAADTLAELGAHVHLAHPLGVKAFSYRRVKNDERDAADLADLLRMGRLPEAWIAPPATRELRGWVRHRAKLVGLRSNLKCQVHAVLAAAGINVVMSDLFGVSGKDLLASARLAAESRARVDSALRLIENLDFEIELFGKLVAGRLRTDPGYLAIQAIPGVGPVLAAVFVAEIGDIGRFAKPAQLASWAGLTPKHHESDTTVHRGRITKQGSRLVRWAAVEAVQRVGPHTALGAFRDQVAARRGRNIGVVAAARELVELVFYGLRDGQIRRLSAPGSAGRAEPAA

SEQ ID NO: 235576 - protein, 399 aa, unidentified
MIGNHESIDVFIGLDVGKGEHHAVALDRAGKKLFDKALPNDEVRLREILDSLNKHGSILLVVDQPATIGALPVAVAQAAGVTVGYLPGLAMRRIADLHPGEAKTDARDAFIIAEAARTMPHTLRSIQIADEQLAELTMLCGFDDDLAKQATATSNRIRGLLTQIHPALERVLGPRLDHPAVLDLLRTWPTPEALRHAGRRRIGNRLKKLAPRMGERLAGEIIAALDQQTVTVIGTNAATIVLPQLARMLADIRESRDTVFTQVEALVEAHPLHPVLTSLPAVGVRTAARILTEIVGKDFATAGHMASYAGLAPVTWRSGSSIRGDHPSRKGNKILKRALFLSAFAALKDPPSRAYYDRKRAEGKRHNQALIALARRRCDTLFAMLRDGTFYEPRTPSAT

SEQ ID NO: 235577 - protein, 398 aa, unidentified
MTESSDYESVQVFIGVDVGKDTHHAVAINRSGKRLFDKALPNDENKLRSLISDLKQHGQILLVVDQPATIGALPVAVARSEGVLVGYLPGLAMRRIADLHAGEAKTDARDAAIIAEAARTLPHALRTLKLADEQIAELSMLCGFDDDLAAQTTQASNRIRGLLTQIHPALERVLGPRLDHPAVLDLLQRYPSPEKLASLGEKKLAAQLCKLAPRLGKRLAADIAQALAEQTVIVPGTNAAAVVLPRLALQLITLRKQRDEVALEVEQRVLAHPLYPVLTSMPGVGVRTAARLLTEVACRAFASAAHLAAYAGLAPVTRRSGSSIRGEHPSRRGNKALKRALFLSAFAALRDPISRAYYTRKMSQGKRHNQALIALARRRCDVLFAMMRDGTFYTPQAS

SEQ ID NO: 235578 - protein, 403 aa, unidentified
MNMNAVGIDVSKGKSMVAILRPFGEIVSTPFEVKHTVSGIHSLIEHIKAIDGESRIVMEHTGRYYEPLVRELSQADLFVSAVNPKLIKDFGDNSLRKVKSDKADAVKIARYTLDSWTELRQYSLMDEIRNQLKTMNRQFDFYMKHKTAMKNNLIGVLDQTYPGANTYFDSPAREDGSQKWVDFATTYWHVDCVRKLSLNAFINHYQKWCKRRKYNFSQSKAVEIYEASKEIVSVLPKDDLTKLIIKQAVEQLNMASQTVEQLRTMMNDAASKLPEYPVVMAMKGVGKSLGPQLMAEIGDVSRFTHKGAITAFAGVDPGVNESGSYEQKSVPTSKRGSGTLRKTLFQVMDALIKTKPQDDPVYLFMDKKRSQGKPYYVYMTAGANKFLRIYYGRVKEYLSSLPK

SEQ ID NO: 235579 - protein, 344 aa, unidentified
MQIAVLGIDLGKNSCSVVGLDSTGAVIKRRRMRPENLVAFTEKLPACIVAMEACCGAHHLGRTMSSQGHQVRLMSPEYVRPYVKAQKNDDRDAEAIAEAATRPTMRFVELKSESQLDVQTLHRARDRLVGERTALINQLRAVLLERGVTIPQGRRKLEQHLDAMMASDDDHSLSPRVRRLIDDMRAEWLELDRRIAAFDNEFAAYARSDADARRLATIPGIGVLNATALLAAIGDGQTFARGRDLAAWLGLVPRQVTTGGKPRLVGITKRGNKYLRKLLIHGARAALPSLATSATPLGGWLRALMQRVHKNAAVVALANKLARIVWVVLRRGEEFNAAAVTATA

SEQ ID NO: 235580 - protein, 410 aa, unidentified
MDALVERCAGLDVHQASIVCCILIGTPGCKPQKLLRRFGTTTRELEALRAWLVEHGVTHVGMESTGVYWKPVYAVLEGHVDLIVGNAHHIKAVPGRKTDVKDAEWIAQLVRHGLIAKSFVPPPAIRDLRELVRHRRTLIETRTATRNRVLKLLEGANIKLSGVASDVFGVSGLAMLEALAAGVTDASAMAGLARGRMRRKHAELEAALEGRLREHQRFLLAMQLRTLKAIDHDIAALDTHIEAHLEPFRAQHRLLMQIPGVDWASAAAILAEIGPDMSVFVTARRLAAWAGVAPGNHESAGKPKGAAVRRGNVFLKSVLFAAASAGVRTKGSYYRDKYHRLRSRRGPVRALMAIAHKLLIAAFHMLTTGETFRDLGESYLDQVTRKRSTTRLVQRLSSLGYDVVLVPKAA

SEQ ID NO: 235581 - protein, 341 aa, unidentified
MKHSAGLDVSVKETAICIVDEVGKVVRETKVVTEPEAIIALLNGTGLEYERVGLEAGPLSQWLVNGLAEAGLPVICVETRHMNAVLKAQQVNKSDRNDARGIAQMMRVGLYKPVHVKTLASQQERMLLTTRKLLRDKLQDMENELRGTLRNFGLKVGVVSPGRFEARIKELVAGRLRLEMIVAPLLAVRRVLREQLAKLHKMVLDQVRGDPLCRRLMTVPGVGPVVALTFRATVDQAQRFARSKMVGAHFGLAPRRFQSGEMDYDGRVSKCGDAMMRTALYEAAQVLLTRTQKWSWLKALGYAGRSPARRQEGDRRSGPTPRRCPAPHVGRRYGVPLAQGG

SEQ ID NO: 235582 - protein, 394 aa, unidentified
MRYAGIDIGSERHVVALVDECAEVLTPSSGFLEDADGYAQLLARLGDPADVLVAMEATGHYWQNLFAVLSGRGFAVALLNPLSTRRFAQAGLERAKTDAIDALSIAKLAALKRPRPSRLPDEATRELREHVRLRDRLQQDLGDRVRELHRVVDLAFPEFTRLLTDLGSLTAITVLSAFPTAKSLAITSVRSVAQLVYDGRHKVGEELARALIAAAKSSIGQHQGHVYAREVKYFCADIKVLRERLKEIDDDLRQAVDGHELATLLTTIEGIGPNTAARLVAELGDPSDWRSAGALASHVGVVPQLRHSGKHAPVRSGISPLGNHRLRQALWMPVLGAVRRNPWLRHHYRRLRANGKLAKVALIACMRKLLEAIYSVAKHRRAFEPRVPIASSPA

SEQ ID NO: 235583 - protein, 399 aa, unidentified
MLAVGIDISKSKSVAAILNQDGSMHTSPFEFHHTQPELDAFIKYILNSNQSATILMENTGHYHYPVLKAFQEAGFPVCMVNAYQIKKFGDMDLRKAKTDKKDAVRIARYALEKSYSLVPYTSMEQKYEDLKFLARQYNQRMLTLKTNKVFLLNLLDETMPGITNILPLTTRTPETSLSVLFINRFKSYDRIKKMGKSRFLDAFEKITRKSRNRQTKTYGLAIYEAALRNITTRGENEYTLAAQDQCLELVCESQKAADSIILKMQTLAETLPEYAVLRSMAGVGDRLGPLILAEIGDIRRFHSGKALNAYAGNDAPPYQSGTFESHNRHISKRGNAALRKYCFEVMQALKLTQPQDDPVYLFLLKKEQEGKPYNVAKMAGVNKFLRIYYARAMETLKQQ

SEQ ID NO: 235584 - protein, 343 aa, unidentified
MVSGKKRHSELTAVPMLPNESLYIGVDIGKFKHVAGFLSKTLLERHKHFEHCPAFIFEQSREGYRAFVERIQAYSPLEQCFILMEQTGHYHRPLLQYLVELDPPVFVIHIQRRQAGMIKTDKRDALGLANQLYTQLELGAQVADTLQVIRRALPPSEAAAQLKGLMRHRYELVNEATQRKNKLIAMCDELFPEFTRVFKDPNAPIALGLREQFPTPRAIATIGSIGNFEGAAHLKSYFGWAPTRAQTGVSFDRTRLTKGGSREMKKVMFLVAWKAIQTDTEWAKLYKCLVPRLCSYDDRMQAYKGKGKVLGHSIGRLIVLIFALLKKPFPREGAKNRIVQVSQ

SEQ ID NO: 235585 - protein, 412 aa, unidentified
MQAIIERCCGLDVHQGTVVACLLIGAPGAQPTKEVRTFRTVTRDLEALRDWLRAVGVTHVGMESTGVYWRPVYAVLEGHFELIVGNARHIRNVPGRKTDVKDSEWIADLVRHGLIAKSFVPPRPLRELRELLRYRRKLVESQAAERNRLLKLLETANIKLASVASDVFGVSGRAMLRALIEGEASAEAMADLAKGQLRRKRADLILALDGRIEEHHRFLLAMQLRRLEAIEADIATLDLRIGERLEPYGAQHALLMQIPGVDWLVAAVLIAEIGVDMSVFLSVYHLAAWAGVCPGSHESAGRQKSGRARKGNIHLRTILVGAAISAARTKGAYLKDKFHRLKARRGALRAALAIAHKILVSAYHMLAKNLPYRELGEAYLDQIGQTRTVANLKRRLQRLGYRVTLEPTVQAA

SEQ ID NO: 235586 - protein, 361 aa, unidentified
MDPAPITLETTMNYYAGIDVSLGSSSLCVVDASGTIFREAKVASEPAALISWFFGLGVSLERIGLEAGPLSQWLYAALREAGLAVELLETRHVRAAFVTMPVKNDRNDARGIAQLMRLGWFRPVHCKSLAAQEVRATLTSRKLLQKKLHDVEMHLRGILRNFGLKVGRTTQKGFAGRIRELVTGHATLEGLAAALLSVHEVLVREFAGLEKQVRGMARADKLVRRFMTAPGVGPIVGLTYAAAIDDPLRFSSSKKVGPHFGLTPTKYQSGETEYDGRISKAGDASVRTALYEAAHIILTHPVKGSVLKSWGMRLARRAGMKKAKVALARKLAVILHRMWVEGSDFDFTRGAASVASDKKAA

SEQ ID NO: 235587 - protein, 338 aa, unidentified
MEQQREYVGIDLHRRRSVIVRIAESGEVLETVRVDNDPLSFVRAVMHDDPNPEVALEATYGWYWAADMLQAEGATVHLVHPLGLHWDSRRVKNDERDATELAKRLLRGDLPEAWIAPPELRELRELVRYRAKLTALRTSAKAQIHAVMAKEGVLPAYGRMFGPAGQRLLDEMPVEGVYRDRVESLRDLLEIYERELVLVQSHLSRRLKHHEGYSAIQAIHGVGPIMASIFVAEIGDASRFPSARHLCSWAGITPSHRESDVKVRRGHITRQGSNLVRWAAIEAVARYHGGAAIEPTFQRVAKRRGIMIARVAAARKLLSLVYYGLRDGEIRCLAREAS

SEQ ID NO: 235588 - protein, 355 aa, unidentified
MNQEKYIGMDVHQATISVAVMDAQGKLIMECLLETKAATIVDFIRGLQGTLSLTFEEGTAAAWLHDLLKPHVSRLVVCDPRKNALLKDGNKSDRIDARKLAELLRGNQLHPVYHGEHGVRTLKELGRSYLTITQDVTRVMNRIKALYRSWAIPCAGATVYAPRHRAEWLAKIAEPGVRVRAERLYQQLDLLQPVRLEARRELLVESHKHSGVKLLRQIPSIGPIRSALLVALLQTPHRFRTKRQLWAYSGFAVQTHDSGEYRSVRGKMQRNRERMTVRGLNDNHNRELKNLFKSAAVSASTRPGPLRDFYVARVEKGMRPTMARLTLARKLAAISLTIWKKGVDFDAKQLDQQAA

SEQ ID NO: 235589 - protein, 318 aa, unidentified
MAEQVRTVIYGVDVAKATLEVASGEEGGESIANEARAIERWLRSLAAPACLAVEATGRYHEELVEQALSAGHRVYLIDGKQLHHYREAVGPRAKTDAEDARLLWRYLAHEHQQLRPISALGEGEKRLWRLLKRRAALVRIRKQLQASMSGLREMEELTGGVVKDLRAAVRELERMLRQQALDLGWGRELGICRSVPGIGELNALALVSCYHRGEFSGADQFIAFLGLDVRVKDSGQMRGKRKLTKRGEPELRRLLYNAAMSFARDPRYRALYDRLVAKGRSSTAAHVILARKLARVAFSLLRQGEWFDPTRFRACATT

SEQ ID NO: 235590 - protein, 333 aa, unidentified
MGWSPRSKGCFMSILHLHVGIDVSMDTLDVAFIGARGKPCSFKVPNDREGFDETFRRLAGAAPPEAWRIALEATSAYHRAVVAAMLERGVEVLVLNPKQARDLARGLGVLRKNDKTDAGVLALCAKMAWRKPERLAQGAGYEIQEVSRRIEGLTAQRAGEKKRLLKPGLCRLVRESCERHVRALDEEIRLMERAWTELLERSCELKAAFDNVRTVPGCGRATARKVVSEMLVVPRARTTAQCVAYAGLAPHEQTSGSSFRRKSSTFSSGNKALRTALYMGAVSALRHDAQSRDLYLRLVAAGKPKKVAITAVMAKLMRRIAAVANRGTPWVKA

SEQ ID NO: 235591 - protein, 319 aa, unidentified
MKTTTNANTNVTERNVGIDVGKSALDIFILELDLHWQCDNSEEAIKALVTRLARYKLSRVVVEATGGYERKLVYALAEKELPAVVVQPMQVRQYAKAQGVLAKTDKMDARILAEFGAVIKPEVRPIQTKKIRFIRDLLARRRQLMEARTQELNRIQKAEKALQATHARLIKIFDKEVQWVDKHLSKEISEVTEWQQTYDLLKSVPGVGDGVAHTLLGELPELGSLTSRQVGALCGLAPYNRDSGQMKGKRRIKGGRAPIRTMLYMAMMSAIQHNPVMKKFFNRLVAEGKHKKVALTACMRKMMTILNAMVRDGKHWQEA

SEQ ID NO: 235592 - protein, 412 aa, unidentified
MTAINQFAAHVGLDWADKKHDVCVQFKNGERIFQVVEHTPEALDIWLNELHQKVKGRIAIALELKKGPVVYALQKYPFVTVFPVHALSLARYRQTFWPSGAKDDPQDAELALELMLRYPQKIKAIEPDNGNIRLLQQLVEQRRLLVEDKRRFVNRLINTLKQYYPQPLEWFSHRGSLLLCELIIRWPSLQQLKRARRDTIRNFLNAKGGRAMALTEQRVANIDNAIPLTTDLSVIEANALMATALATQIKVVSEIIKTYDERIETLFDTLPDAGLFKSLPGMGPCMGPRMLAALGDNRDRFNSAEEIQNYAGIAPVTERSGQKSWVHWRWQCAKFVRQTFVEWAAKTVNSSYWAKLYYQRQREKGKSHQSAIRALAFKWIRIIYRCWKTRTRYDEAKYLLTLEARKSPLLKP

SEQ ID NO: 235593 - protein, 416 aa, unidentified
MQYALPLVLPDVPAGGVCAGIDWATADHAVCVVDLAGRVIDRFSAVHDKAGIAAISTRLRKSKVTEVAIERGDGPLVDALLAAGITVVVITSRQVKNLRSRFGAAGAKDDRFDSFVLADTLRTDRARLRPLIPDALATISLRMAVRARRDLVAHRVAAGNQLRAHLAVAFPAGLRLFHDLDSPISLAFLARFGSQDAAAGLDEQAIGAWLATIAVRGRPAPASELHARLRAAQAGVTAALTAALSALSAQIKALETQIAGQLAAHPDAHIFTSLPRPGTVRAARLLAEIGDCRPRFPDPESLAGLAGVAPVTRQSGTRTAHHFRWAVNRQLRDAPCDFAADSRHASPWAAAIYDNARARGKDHPHAVRITARAWSYVIWRCWHDGVAYDPAKHNALQAILARHGAQAASPAPQEDQ

SEQ ID NO: 235594 - protein, 364 aa, unidentified
MERVQYVGLDVHKKSIEVSVLNGSNAAPEIEKALPNEGAKIKSFFDRLKMQGSVIACYEAGCIGFELQRILESIEIPCIIAAPGLLPRRPGERVKTDRRDARKLARNLRNGEVTPIHIPTREDEAVRDYLRMQGDFKVERKKTKQRLLHFLLRHNLIYTDGNHWTGKHEKWLRALEFDNPVLKETFDEYFFHLKELEEKIGRMKEKIEEIALRDSYREPVAKLKCLKGIETLTALSMVVEVGDFRRFMKAEEFMAFLGLVPSENSSGDKRKQGGITKAGNSHLRRLLVEASWHYRFDRGVGKCLMARRKGQPVCVVSYANKAGKRLSRKFNRLIFRNKKSQVAVTAVARELAGFVWGMMVGQTA

SEQ ID NO: 235595 - protein, 396 aa, unidentified
MDRAWAGVDIGKQHHHAVVVDDQGTRVLSRRVANDQAALVELIGQVTNLAGVVTWAIDLHSSEAALLVALLLDHDQMVVYVPGVMVNRAASAYRGAGKTDAKDAYVIAEQARMRRDLQVLRAADELIVELRLLVARRQDLRADRTRAVNRLHDRLVAVCPALERVLDLGNRGALVLLTGFQTPAALRGQGVAGLEAWLGSRKVRGAGKLAAAAVGAANAQTISLPGEQLAARLIADLAEGVLALDQQIKDADELIEGRFRRHPAAEVICSLPGMGVLLGAEFLAATGGDMAAFGTPDRLASLAGVAPVPRDSGRVVGNLHRPRRYQRGLQRVFYTSALISIRCCPESRAFYDRKRAEGKRHTQAVLALARRRVNVLWALLRDGRCYALTPPESQAA

SEQ ID NO: 235596 - protein, 428 aa, unidentified
MSNQEIIRRKQYCQIFKEITGSDQYLVVGIDVGKDKHHAFMGSATGKALFRKLIFENNLDGFSRLLKTVEAIKSQNGLSKIVYGLEPTGNYHKPLARHLIRCDCNVALVSGVAVKRNRELLNGRWDKNDTKDAANIADLVSRARCFYYDSPSPSIIELRSLLSLRRRLKREEHGLRMRIRNNLLAQYFPELDRFYSACESESLAIVQWFLNPDTISAMEFGEFFHMVTTTRRGIAQTLRLRKIHGLATESVGCPMGPATEFEADLLVEKLKQVRQQVKKTNNLIEDFCLEFTEYSYLLTIPGFGPYISARVLASIADPFRFENRKQLIKLAGYDLCADRSGKTSAKAVPVISKKGNGELRYALYQAANVAAARVDLFRTYFTRLLRGRERERGIKTKMRVKLATKMLVIAWTLMKKREPFDPAYLNIE

SEQ ID NO: 235597 - protein, 441 aa, unidentified
MDQDVEHDAGLVHGSPQPVLYPGDFEHDLIQVPFVAATRQAATDLVGELLANFARPRSHRFVADDDAAGGQQFLDHTQPKREPKIMRWTVPDYPEDCATDFLRRPAMAIVTIGLDTAKSWFQVHGVDESGQVVLRRKLARGRVLQFFAGLTPCVVGLEACGGAHFWARELAKLGHDARLMPARYVRAYVKTNKHDAADAEACCEAVQRPGMRFVPVKSEEQQGMLMIHRSRDLLVRQRTAAVNALRGHLAEYGITAAKGTARARELMSLVDTDERVPAIARDALLQLVEQIRDTERKIEAFDKQILSLARENEVCRRLMTVLTIGPFAATALTATVGDPRYFASGRHFAAWIGLVPKQYSTGGKERFGGISKRGDAYLRKLLIHGARAAVHRVRSHQRPGAWIAALLARRHFNIATVALANKTARIAWAVMVNGSNYRAAA

SEQ ID NO: 235598 - protein, 339 aa, unidentified
MNCTVFGLDLAKRVFQLHWLEMETGGICRLQIRRQQVPEFFANRKPCIIAMEACGSAHYWGRKFKSQGHEVRLIAAQFVRPFVKSNKTDTADAQAIWEAAQRPGMKFVALKTEEQQSVLTLHRMREQLVKMRTMQVNQLRGLLYEFGVDLPQGRKKGMARVVEELVQLDSTLSAMVIDLTRQQIHRIHGLDQDIVGIENKLLLWKKEDKASKKLMDIPGVGILTATAAVATMGDAKTFKSGREFAAFLGLVPRQSGTGGRVKLLGISKRGDVYLRTLLIHGARSVIQHQKKKAPWLEKLLSRRPHNVAAIALANKMARLIWALLAHDRRFEKEYAASAA

SEQ ID NO: 235599 - protein, 451 aa, unidentified
MTKSKRSRPERDLMPTHPDAAAIDIGARMHVAAVPPDRDGEPVRTFGTCTGDLQRLADWFERCGVRTVAMESTGVYWIPAYEILEQRGFEVMLVNARDAKHVPGRKTDVSDAQWLRRLHEYGLLRASFRPKGELAALRAYLRQRERLLDYAASHIQHMQKALMQMNVQLHHVVTDMTGTTGMRIIRAIKDGERDPSALARHRDPRCHASVDDIRAALSGNWREEHVFALGQALELYDAYQAKIVDCDAQIERVLGRLRDTAARPAGPLPPARHRNATANAPAFDARVALHAVLGVDLTQIHGLGPSLALKLVGECGTDLSAWPNAKHFTSWLCLAPGNKISGGKVLSTRTRRSGSRAAALLRLAAVTVGRTQTALGAFYRRLSARVGKAKAVTATARKIATLFYNTLRHGMNYADPGASYYEERYRARVLANLQRRAKSLGYVLQQQPTPT

SEQ ID NO: 235600 - protein, 406 aa, unidentified
MEAVHKRVAGIDVHRMKHVVTILIEHDGAVSSQTREFGGFKRDMRALVGWLQEHRIQQVVMESTGVYWKSVFSHLEAAGIAALVVNAYHVKNVPGRKTDVSDSEWLAQLARFGLLRGSFIPPKDLRELRIVSRYRRKLSAVAAGEKNRLHKLLDDAGIKLGGVVADIDGVYARKMVEGLIEGRAPEQLSALGRGRLKSGREVLQAAMDGDLSARHRLVLTMVLNHLRYLEQQLDELDRTLVAAMKPYAGAWRLLQTIPGIDQISAAMIIIEISDDLTRFGSASRLASWAALCPGNNESAGKRKTGKVRHGNPIVRYLLCEAANAARKTKTFFRAKYESLVIRRGYKKTIIAIAHKLIRTIYIVLDRRKPYRDSTFDYEAASVAKNAPRWIRALKKYGYWPQPAPAT

SEQ ID NO: 235601 - protein, 405 aa, unidentified
MAVMDFESTKPIATFAVPNNEPGAEEMAKHILEFLNTESSLKRLVIGLESTSFYGVHIANYLSTSPMLMPYHTEVYCLNPKSIANYKKSYIGLSKNDCIDAFVIADYARVGRITTKPWRGCQYLALQRLTRHRLHLVKALTREKTYMLSNIFLKFSEFNTLDAEEQPFSNEFGATASAVLTEFLSTEEIVDMPMEKLVEFICEKGRNRFPDPQKTAKLLQAAARNSYRLDKCLYEPITVAIASSFTMISTYYAEIKKVNQAIETTIKGLNPNAFLSLQSIPGLGPVMAAGIMAEIGDISVFKSQESLAKYAGLVWRENQSGQFKADDTSMSKAGNSYLRYYLLEATSHIRLHCPEYSEYYSKKYAEVKTHQHKRALALTARKAIKLIFGLLAKNQLYSGNRVGQA

SEQ ID NO: 235602 - protein, 369 aa, unidentified
MEKNTIYIALDDSKRKLVVAMLRPGATEPEEREIPKDPSPIQRLFRRLQREGPVQACYEAGVSGYDLYRQLTACGVTCQVIAPALTPRRPGQRIKTDRRDARKLVRLFRAGELTPIHVPDEAEEAARDLVRCREAVRRDVVRWRHRLLKLLDRHGRLWVTEKNWTQRHWTWIRAQHFALPALQRAFEATVFALEQALARQAALDHEIEALAQTAPYRDPVGWLRCFRGIGTLSAMVLLAEIVDFQRFRRPRELMAYLGLVPSEYSSGETQRRGALTKAGNPHARRVLIEAAWHYRHRPTVGRALASRSQAQPEEVVGQAWRAQQRLHRRYRHLIGHGKRPPVAVAAIARELVGFLWAAMTRRETRVQVA

SEQ ID NO: 235603 - protein, 340 aa, unidentified
MKFIRIGVDLAKNYFQIHALSSEDAPAVKRKLTRRTMREFFSRIEPCRVGMEACGSAHYWARELKAMGHDVSLMPPAYTKPYVKRGKNDAVDAEAICEAVSRPAMRFVPIKSADQQATLMLHKTRELLVKQRTMSVNALRGHLAEFGLVVAKGTGRVDELLGLAEGDATLPDAAVLAAKVLGQQIDALGGALDDLEREIAKAHALSETSRSLGEIPGVGKLVASVITASVPDPSVSNSGRDFAAWLGLTPRQISSGGKPTLGTITKAGNRYIRKLLVLGATSLLNVVEKRRGGLRDWIVGLLAKKPARLVTVALANKLARIIWAMMKTGECFRAEMFAKL

SEQ ID NO: 235604 - protein, 344 aa, unidentified
MGEVNTIGMDIAKSVFQVHGVDAAGSITIRKRIGRAKVLEYFGELPPCLVGIEACPSAHHWSRELQSLGHTVRFIPPSYVKAYLKRSKNDANDAAAICEAVARPSMRFVPIKTTEQQSALMLHRTRQLLVRQRTMLSNALRGHLAELGIVSAKGRNGTAELLEIIADGADSRVSPAVRGILEVLARQYGVIGTEMASIDKSIMALHRTCEASRRLAEIPGIGPVGATALVAEIGDWNAFSSGRSLAAWIGLVPKQNSTGGKDRLGSITKQGNRYLRWLLVVGAMAVIRYARKHGTQRRPWLARLMERRPTKVAAVALANKIARMAWAIMVGGEKYREPQLPLAA

SEQ ID NO: 235605 - protein, 470 aa, unidentified
MIHTVGIDLHQGQHRARCLDEKAQPCDGFSFSTTPEGLATMEEHIFKDGANPTVVLEPAGLPWLMVAVYLRAHHPDCHLVKAKTQKVAALRRYLRGPVKSDRLDALTLAKMPFIDPEELDKIYLPPAEIHALQRLTRQRKQIEQDITGRKVKISAIIDGYLPGVRPAFNDAWSLPFRAFLRSRLNPFSIVRDGEAALHTFLSSASPRMSHTKTRVVFLACQNVARVCESSIVGTLNEDFFLALQDEVARELRLLENDEAESEAVANRIEELYRKLHPSDDLTSIPGVGQHTAPIFLAVVGDPTRFHSQSAFANWEGVVPGARQSSNMEAKGLRMTKAGPSIIRMALYQAGEIARRYDPQLAAIYYREMVSQGKNHRQAMGAVMSHLGARVLTVLKENRPFEFRDIDGRPITRQEARALVLAKYQVSDDIRRERRRRNPRAINSRETAALRINEAAGTPQPVESISLPSIF

SEQ ID NO: 235606 - protein, 402 aa, unidentified
MNCVGIDVSKGKSMIAVMRPFGEVVVSPFEVRHTANELSELAGLLKSLDGETRVVMESTGNYHAPVAWLLHDAGLYVSVVNAMLVHDYGNNSLRRAKTDKKDAVKLANYGLDHWLTLPRYIPEEDTRLMLKICYRQYQQYSKVQTMLKNNLISLLDTTFPDANRLFTSPPRADGSEKWVDFVATFWHCECVCGLSKKAFTAKYQKWCRKHGYNFSQDKALDIYASACGRFGVMPKTNTAKLLVEQAISQLQATSAALAALKQEMQSLAASLPEYPVVMGMFGVGPALGPQLMAEIGDVRRFHSKKALVAFAGIDAPPYQSGQIDVRSRSISKRGSASLRRTLFLVMSVILQCAPIDEPVYQFMDKKRSEGKPYRVYMMASANKFLRIYYASVKAYLESLEHD

SEQ ID NO: 235607 - protein, 417 aa, unidentified
MKLLFIGDDWAEGHHDVAAQDDAGKTLARRRLPEGADGIARFHEMVGSCPGEDAEPDPARVIVVIETDRGPWVKALAAAGYRVYPANPGQAARHKETVANPGKKDDFFDAGCLADMGRTRRHQMRELAAGSDVAEAVKIAARAHQKLVRERTRHLLRMRPALREYFPAALEAYADLTLAGKDALELLAKAPNPESAARLTVTQVTAALKRAGRRGDLAQRARDIQAALRAPHLAQPDVIAEAHAASVQAAAAVITALNEQVKIMEAKVSGLFRRHPDAGLYLSQPGIGDITGARIPGEFGDAPGRYATAKARKNYAGTSPLTIQSGKKKTVHARYIRNRHLIDALPAQALTALSVSPGARGSYDDLRARETGHDDAMRRVASRLAGILHGCLKTGREYDEATAWSHRAGNPEATKAA

SEQ ID NO: 235608 - protein, 356 aa, unidentified
MSRLVVGCDAHKHYSQVEVQDSDGRVLRQARINHARASLHTFFSSVPPGTPVALESVGNWYWIADEIEACGCRPLLTNPAKAKLLMGHVNKTDKLDANGLATLLRLGSLPSVWLPPAELRDQRELPRTRMALCAWRTSIKNRIQSMLAKYAMSPEDGVKVFSQKGRLWLSEALKHLPPETARCLSQQLQLLKELDAHITTMEERIHTQIALTPTMQLLKSLPGVADILAIVIEREVGTIERFPSAAQFASYSGTTPRVSSSGGKTRYGRMRTESNQYLKWAFIEAANAVSAHHAQSGWSTRHCARLYVRIRGRKGASVAIGAVARHLAQSAFWVLAKNEPYREPTKVSPKQERAPA

SEQ ID NO: 235609 - protein, 461 aa, unidentified
MRTKKPTGKQKRSVQKKVDWKALEIVHPAAAGIDVGGSEHWVAISPERDAEPVRRFGCFTADLREMGRWLVEKGVRSVAMQSTGVYWMPVFEVLEQHGLEVYLVNARHTKNMPGRKSDVQECQWLLKLHAFGLLNNSFQPTDEIRIARTLWRQRGALVAEAASTIQRMQKVLTEMNVQLSNVLSDISGASGMNIIQAALDGERDPWELAALVESGVKATPEDIAKSLEGNWREELLFVLRQHVELYRIYQEKITDCDLQLRKHLESLGSKVDLQTQPIGPRPKGKNKSRNAPAFDLRTELYRITGIDWSQINGMDVLTAQTVIAEAGADLSAFPSEKQFASWLGLCPSNETSSGKILNRRTRKVVNRATVAFRNAASTLVRSQSYLGAQYRRLRTRLGAPKAITAMARKLACLFYRLIKHGKPYVDKGTEYYEARYREQQIRSLSKKAQKLGLQLVIPKTA

SEQ ID NO: 235610 - protein, 343 aa, unidentified
MLTGVDMKEFYVGLDLGRKWTYATMIDGEKRIIKQMKLPCDERAMDGFFGAIPKESLSAAVEACGIWYGLYDYLLGRCNVVKVVNPQQTKMDIGGKKTDKLDSKRLAELLKADMVHESYVPPKAGRNYREKVRHRQSMVSRGTEFKNVIHAILRRENIKPPVGITDIFTKKGIIWLKQLGRTEILSYLELIDAIELQVNRSEAAIPNNIYKKEIELLHTMPGVGEVTAPVIMSEIVDIKRFGSPKALCKYAGLVPKVHQSGDCDRHGGLVKQSSKILRTALIQSAHGAIKKKDSRFKILFVRLLKRKKYNTAITIIAHKMLYIMWFMLTNCEEFHDGGIRVGE

SEQ ID NO: 235611 - protein, 317 aa, unidentified
MPQGTCVVGLDVAKRKVDACIRSMRLRLSTPSTPEGEAELLAWVRTNRVDRAVMEASGGYERRWAEALRADGVEVRIVDPKRIRHFAKAAGRLAKNDPIDADTIAWFAEAFPAADPQPHDAAREELDRLVQARAALKDEEDRIKQQHEHRPPPIVAQALAAVAKAIRAERRKLEAVIAARIKANPAFARPAEIIHSVPGLADQTAAGVIAWAPELGRISNGAAAALIGAAPYDDDSGGRKGARHIKGGRRKLRNLLYMPVMGAATQHNPVLKAYYQRLRARGKEAKVALIACMRKLIVILNTMLARDETWNPARAAA

SEQ ID NO: 235612 - protein, 338 aa, unidentified
MSAIKTIGIDLGKSTFHVVGHDYTGQQRYRHKFSRSKLLQFISVHEPVLIAMEACCGAHWLARKCQDYGHQVKLIPPQYVKPYVKSHKNDFIDADAIAEAATRPRMRFVSPKTEQAQLGVVIRRIRTGYIRERTAIMNRIGSILTEFGFSFPRGHANMKRLFQWLADTGQQVPPLLIFELRNQLDHSNELNNKIKEQDKKLETLNSGNELFTILQTVPGVGPMTAACCISSVSDPEDFSNGRNFAAWLGLVPFQYSTGGKPRMLGISKRGNKELRELFIHAARAVLWRDGTAEKYFGKWLIELKHRKPFNVALVALANKLARIAWSVMATKKPFEIRI

SEQ ID NO: 235613 - protein, 290 aa, unidentified
MEQYTEAFVGIDTAKNKHALAIADPGRDGEIRYLGEIDSAPAAVQRMIRKLAGRYEKLYFCYEAGPTGYGLYRQVRALGHGCIVVAPSLVPKRPGERVKTNRRDAVTLARLLRAGDLTPVWVPDAVHEAVRDLVRARTAASEDLRRKRQQLLSFLLRHGRIYSGRKHWTKMHLHWLAQQKFDHPAQQIVFQDAVDAIEDAATRLRRLDQQVAEIVPSWSMAPVVEAYQAMRGVSFGVAATFVAEIGDLRRFDNPRQLMAFLGLVPSERSTGERVRRAGLTLAGNKRARRY

SEQ ID NO: 235614 - protein, 413 aa, unidentified
MNKRWDKACGADVHKRFIDATILTLDGTKKHKRFLTDIDSLLAFRDWLIEEDCQVVALESTGVYWIPINTVLEGIVKVVVANAYKIKHIPGRKTDIKDSEWIAELCINGMIEPSRIFPKGDRELRDLTRAREAIVNSRSQVKNRIHAILDTANIKLSSVFTDLFGKSGIELVKGITSGQSIEAIIIGTNNPWIKKRADEIRQAVKGTLGAAQTFVIKECLEVIKTIDEGVENITAEIRSRMKAKEEDLNIAMSIPGIGFIAGSTVIAEIGDFRDFETPDKLAAWTGIVSSVYQSANKLSLGRITKQGSKHLRWILVEVANAVIKVKGRNKLKSFFLRIKSRQGFNKAIVALARKILCILHHLLTNRELYIEDGKTWVKKSKIPKEKVSGNMTADEMIKILSDAGYVVLKPVLG

SEQ ID NO: 235615 - protein, 338 aa, unidentified
MSVAKVIGIDLGKSTFHLIGHDYSGREIFRHKYSRAKLVDFLSVQESTVIAMEACCGAHWLARKCKQFGHEVKLIPAQYVKPYVKTHKNDYIDADAIAEAATRPNMRFVSVKTEEAQLGIVIRRVRSGYIKERTACMNRIGSILLEFGLSFPRGHHQMKNLFQWIADQNEVLPPLLIAELTTQYEYYNQLNVWIKAQEDKLLALNKENDIAKLLQTIPGVGPMTASCCISAVGSPQDFDNGRNFAAWLGLVPFQYSTGGKPRMLGISKRGNKELRELFIHAARAVMWRDKTAEKFFGTWLIDLKCRKPFNVALVALANKIARIAWSVMTKKKPFEIRV

SEQ ID NO: 235616 - protein, 403 aa, unidentified
MVGVDIAQELHVARAVNFRGIIVGDPLTFENDEEGFARLLQWINQLKTLKGFTSTIIGMEPTGHYWINLSKWLYDQDIEAVTVNPHLVKKNKENRDNSRSKSDKKDALVIADMVKNGYYSFIRPTSEAFEKLRVLMSNRDMTVKRLVSAINQINRWVDIVFPELRQVFKDVKGKGAMATLRLFPTPVELRSMKAPDVVVGWKTQMKRQPGLIKAQVLIELAKHSVGTRQALDAYKLHLEQLIEEFDLATAQLKRVENEVTEVLKRIPFAKKLLAIKGISEIALAGILGESGDLSGFAHGNSLLRHAGLHLSEASSGKWKGQIVLSKRGRSRLRRFLYLATMSLVMNNPDFKELHANNVKVKKMKKMKSIMKLIHKFARVIVGMARKNDSYRPEKVQPIMSMAA

SEQ ID NO: 235617 - protein, 384 aa, unidentified
MLKGAGEAAQNRKGRGSSNFPKAGEPVGEQERRATTKSAGSPNSRWSRTSELELRKAGSRPKRKWVSPMPAGKVYVGIDVAKASLEVAVSTGECFSVANDDEGIAQLVPRLSAAQPVLVVMEASGGYERQAWVALWEAGFSVALVNPRDTYHFAQAHRQLAKTDAVDAGGLMWFGAQMQPAPTAPPSAADQELRELVGRRRQLINMLTAERNRRQQMLTAAGKQSIERTIKTLLRERKAIDRAIADKLSHNVQLTDLVQILRSVKGVAAVVSATLITRLPELGSLTSRQVAALVGVAPFDRKSGRWVGESRIFGGRADVRTALYMAVITAKRYPGPIRELYQRLRGAGKKPKVALTACMRKLVIILNAMVKHHTQWSPSCAVVS

SEQ ID NO: 235618 - protein, 378 aa, unidentified
MKDIRYVGWDVDSEKILVAVAEPGGEVRALGAIPYREESVRRLIRKLGPAKRLRVCYEAGPHGYGLYWLLTKLGVHCDVVAPTLVPVKSGDRVKTNRRDAEKLARCYRSGDLTAVWVPDAAHEALRDLVRAREVAKKDQLRARHRLGKFLLRRGLRAAEGVKNWTLKHLLWIKTLRFERPEQEATFLDYLHEVEHQAERVKRLDLAIDQAIESAPVEMRALIVALQALRGIQTVSAATLVAEVGPVSRFARPKQLMGYSGMVSSENSTGTSVRRGAITKTGNAHVRRILGEAAWAYQYRPAMSPELKKRQEGLSEEVKEIAWKAQHRLCSRYRRLTAKGKLRQKVMTAIGRELLGFIWAIGIQVEKELSHRKRPEKAA

SEQ ID NO: 235619 - protein, 390 aa, unidentified
MGLCPKPHHLREYVIMKKRSFNDKVIAGHKTKTSKERSMNQIKYIGMDVHMAMTVIAVLDSTGKVVAEAIIETKAQTILDFLAGQRGTLHVTFEEGTQAAWLYDLIRPHVAQVVVCNLRRNGVPENKADKSDAKHLAELLRNNGLKAVYHGEHSTQAVKELAQSYSSIVSDSIRVKNRLKALFRGRGISCSGTSVYSSKDREHWLHQIDNTAVRSRASRLWKELDLLTELREEAEKDLLAEARKHVATKILRTIPGIGPLRAAIILAFTITPHRFRTNKQFWNYCGLSVRSKVSAEYELIQGSVRRSKKQPLVRGLNRNYNRALKEAFKGAAASAAIGQWKTQFNTMVEGGTRSSLALLTFARKISSITLALWKKGERYDKDKLKYTHAV

SEQ ID NO: 235620 - protein, 422 aa, unidentified
MEAFNVSDFAALIGIDWADRKHDICEINRDTNTQHLSVISSEPKSINAWALELKQRYNGRSVAVACELKKSPLIYALSKFKHIVLFVINPSSVAKYRAAFTHSGAKDDPTDAIIQVEILQLHMDKLTVIRPDSEDVRCLAQLVEYRRKLVQDRVNLTNKIATTLKNYYPHVIDWFKEKDTQIFCDFLLRWPSLAHAKKARKQTLLDFFNQHNSRYPLVNEKRIKEIKDAEILTEDMAVITPNLLLIECLIPQLKQLMLAITRFDDEIKTLYKQHTDRAIFDSLPGAGPQLAPRLLAAMGSNRDRYKCAADIQKYAGIAPVTERSGKKEWIHWRYSCTKFLRQTFVEWAGLSVRYSFWAKAYYRQQEAKGKPHNTIIRSLAFKWIRILFRCWKTHTPYDESTYLTALKSKGSPLLKFAVESEL

SEQ ID NO: 235621 - protein, 335 aa, unidentified
MEFEFFIGIDVSKNELDFAVQQGNCFLFHREIANEPLAINTFLKELGRLPGFKLSNAVFCMEHTGIYNNHGLMCLHKKKAHVCLEAATQIKSSLGKLRGKNDKIDSIRIAGYAYKERETLRLWNPKREVVQQLAHLAATRLRLITVKKQLKVPLKEHSLFSRNKTTRQSAAICSHSLKAIDEDIVRADKAIGQLIEADTELSRLFALVTSVSGIGKVTAVQVIVTTNEFKDINNPKKFACYSGIAPFTDDSGKVVKKARVSHMANKKVKTLLHLSAIVAIQYNTDLKSFYKRKVEQEKKNKMSVINAIRNKLILRIFACVNQNRPYEKNYQRLIA

SEQ ID NO: 235622 - protein, 369 aa, unidentified
MGKYIEVFVAFDVAKKKHAVAIAEGGRTGEVRFLGDVENSPLPIERTIKRLAGRYNRLHICFEAGPTGYGLYRQIQALGHECMVVAPALIPKRSGERIKTNRRDAVTLARLHRAGELTGVWTPDAAHEAVRDLVRAREAATDDLRRKRQQLLSFLLRHSRIYSGGGHWTMAHRRWLANQKFEHAAQQIVFQEGIDAIEDAVQRLRRLEKQLALIVPEWSMAPVVEAYQAMRGASFLVAVTFAAEIGDVRRFETPRQLMSFLGLVPAERSTGDTIRRNGLTLAGNRRARRALIEAAWTYRYPARVSETLRARLEALPKPVRDIAWKAQIRLCARYRRLSATGKKLPVVVAAIAREMAAFLWAIGREVAPA

SEQ ID NO: 235623 - protein, 582 aa, unidentified
MFYTNKRQVKKYDKNDEKEGYNLPTMSKLTSPHVRLLTKVELELLRTTELCKLLRLKKVPGRSKFTRKTARAAALEGIATQGDLRSLNIPPPQEVEVYEPRKAEKKPIKPGKGKRIDEPVGGMDVHKDTLFAAIATPAGIKDEKVFRNIESGIKDLINYFEFHRVEHVALESTAEYWLKVFWKLAEGGIKVLVANPLQTKAAQGVKTDPEDARRIAIAFRDGRLKPSVICTPEQYSMRKLNRDAIKKVQEGTKAVNRLKAMFEMFDAEEWITKLHTSNRGQRIMSRTLDLSDKEKILTVLIEEYSTGPKQIRDRSKLLKRAAELTTFLANMDISSNYRIRYGQLLEDFVRCERMATQLRSRIIEFAANDKQFKKDIELLLTLPNVGINTALTIRVEIVDIRYFWHSKSLVKWSGLAPRVNQSGHRKRKTGHIYKGGNKWLRSAVWISAKNCYAHYNESEEPIGAFVNRLYNHKHKHYFTAVTAGARKLVSYIYQVLTQQRPFEEVFELEHLEQLEKNRKRKLSVLQRMLNERSVVDVLPIIAESLKEECYQLEECEKHLAMEIAIKLGVTPRYYIDDRSIRY

SEQ ID NO: 235624 - protein, 341 aa, unidentified
MGEVSTIGLDLAKHVFQVHGASASGAVVIRKKLRREQVLTFFAGQPRCQVAMEACASAHHWARAIGELGHEVRLIPPAYVKPFVKRQKNDMADAEAICEAAQRPTMRFVAVKSEAKQASAVIFRTRDLLVGQRTQITNALRGHLAEYGFIAPQGLSHVERLIAEVEDPASGIPDAARSCLVRLVGMLRHLQTEIAELDREIAARAKADDLARRLMTVPGIGPVIATAIEALAPAPETFRSGRDFAAWVGLTPVQRSTGGKERLGRTSRMGERTLRRLLIIGASGVVRWAKRKGVPPGSWLGRMLARKPPMLVIVALANKIARIAWALIAKGGVYRAPAVPA

SEQ ID NO: 235625 - protein, 343 aa, unidentified
MTQYVGLDVSLKETKLHVLDGAGNRLWRGRCATDPAAIAAAVRRYAPTAVRIGLETGPLTAWLWTAFTAEGLPMVCLDARHAKKALDMKVNKTDANDAEGLAHLVRAGWYREVRVKSRSAMLAKALLGARSQLLSMSLALENQIRGILKTFGRIVPKGAGGLFEKNVRALIMDDGEIVAVIMPLLQAREMARSKCAALDHRLIRSVQGDATCRMLMSMPGVGPITAVAYVAALEKPDTFKRSRAVAAWLGLTPRRFQSGEVDYDGHISRRGDRQLRALLYEAAAVLLTRVRKESALRRWGLMLWKRLGFKRAATALARRMAVVLHAMWKSGTPFNPTLGAATP

SEQ ID NO: 235626 - protein, 470 aa, unidentified
MNHRRLVGIDLGIATAHTVRVLDGEGNIVAKRKAWPTVESLIAVEAAALAGCPQDIRLEVVIEPTGPAWLPIAVFFTRRGHRVFRVSSQKAADLRRFLSRHAKSNGIDADTLARLPLFDPAGLRPLVLPGAERAALDRRVRATDRLTRDAAERKVRIKDLARQLLPASPLARDLGIADLAVLERYADPRALAKAGQAKLTALIAKASHGHQGADRARQWLDAARASLDLYAGHPAVDFTGLAAEVATEIGLLRAVQAELTAHAAERETHYRAVDPAGLARSLPGLADIGGPALAACMGEPARFANGKQFRSFTGLVPKASETGETDRKGQPMSKAGSSLLRTTLVRAANTARTQDPQLARTYHQQMTERGKDHLGALCVVAAHLAERAWTVMRRGTPYIICDTDGRPVTAEQAKAIIAERWTVPPDTRARRRSKKTGKAPQKVLDGQCTRGSLPRGTTSPRHPGPVKTAP

SEQ ID NO: 235627 - protein, 337 aa, unidentified
MKVTLIGIDLAKSIFQVCGVNQAGKRVFNRQVRRAKLMELLIQHPNATMAMEACSGSNYWGRELQQRGFQVKLIPPQHVKPFVKGNKNDRNDAFAITEAARRPNLRCVEPRTLAQTDMIQVHRVLDRMVGQRTALINQARGFLNEYGIVVSRGKEKLLSAIPDLLEDADNGLTSSSRALLQALLDEWRQMNEAINRVDKVLKNQAKADEAAQRLMKMKGVAERIATATIAHIGNGHGYENGRHFSANLGLVSKEHSSGGKQNLGGITKRGNRYLRRMLIQGAWSVIRNVDKNDDRMSRWARQLIERRGKHKAAVAVANKMARIMWSMLYHQTEFRAN

SEQ ID NO: 235628 - protein, 469 aa, unidentified
MDLLKLPIYTFYCEFLDMEERFMKKVFIGIDVGKFKNSISIIDSEGNPIIKKGISIENDYYGFAKLEEKIDLIMNNYGFTYEDCIAGVESTGHYWFNLRDYLKDIGIETVMIKTDSVKHRRALEEGQKGKNDTLDARVIASCLRNGNYVYIRDNERELRALQKLTRMRNDISDEVVALKNKIHRCIDICNPVFFKIFENLNSKTGVALIKLYPSPEDIINVNLDNIKRELGEIVDKPNMRMVSLYKEECEIWGRLIKEPSYAEKVEMVAYIDKFLLQNKSKEHLDKQIKEIAKNIIPLYSEFEQIKGIPLIQLISVLSEIGDIRNFKNTRAILAFLGLSLKGNASGKYIGERRINKAGSRIVRKHLFNIMDTLVKHNEYFRIAYCYYKSYNHKNPTKKRSMQIAVMCKFVRVMYGMLKHNTNFDYKEMLKGYYFGDCNMKVFKEEFEGEKRTKKIENYKLAYSIFVNYS

SEQ ID NO: 235629 - protein, 355 aa, unidentified
MDNTKYIGMDVHTETISIAILNSAGKLVMESVIETKALTVIQFVHGLRGDLHVTLEEGTWAAWLYDLLRPHVNQVLVCDPRRNALLKVGNKSDRIDAHKLAELLRGGHLSSVYHGEHGVRTLKELSRSYLAISGDLALVMTRLKAVYRSWAIPCAGKQVYAPRCRGEWLGKLHEAGVRRRAEIYYKQLDALRSLRQQVRRELLIESAKHKASKLLCQIPLIGPIRAAQLIAILQTPYRFRTKRQLWAYGGLAIETHSSADHRYVEGQLQPSKRQVSLRGLNRNHNHELKNIFKGAALIAATKPGPLQDFYAALVAKGMRPEMARLTLARKIAAITLLVWKKGVSFDAQHLKPQTA

SEQ ID NO: 235630 - protein, 319 aa, unidentified
MAIVGFDVGKYSLVAVRIDRRVQQKEIFKIKNTQEEIAVLLDTLKTNFEHLEIGSEATAEYHKTLALEAIKREIPFRLLHPITTKQFTRATVRKKKTDLTDALVIAKLIHQKEGRLLSEKDFSNSKILFRTAVKLTMHSQSLILMKQHISDHYPEETKAIEILDNCIKVIHDSVKGFRKGSEIELSQDKEILDLLKSIPGIGTTISQIVLAEIGDINRFKNSSSLIAYTGIDPKVRQSGAILSKNTHLTKRGSPYLRRAVFMAASISIKHDQDMRDYYDKKRKEGRRYKEAIIALSRKMINRIYVVWKRKTPYVKVPIT

SEQ ID NO: 235631 - protein, 425 aa, unidentified
MNFTQNAKINQVTDKTLVIGMDIAKRTHYACMVDERGLLLKKSFPVHQSRQGFEYFYECILNAKKQFGKTDVIIGIEPTGHYWLNLAYFLDDRGIPLVICNPMHVKKSKELDDNLQTKNDAKDALVIARLVKDGRYSYPRILRETEAELRVGATLKGNLTEELNAVKNKIIRWTDRYFPEFQQVFPSFGKMALAALECTPFPNDVAGKEPIELVEIYRNVEGMKSPQIPKAKKLIDSAYISIGVTEGQTMARIEIATLVQRYRQLEKELESLQEQLTELIQATVEYEYLQTVPGLGDATIIDLLSEIGSFAHYDHPRQLLKLAGLTLRENSSGQHKGQKRISKRGRRQLRALLFRVMMPMIRHNKAFRQLHEYYTTRQVNPLRKKQSIVVLCGKLLKVLHAICTKHMAFDAEQMMRDIPKLERAA

SEQ ID NO: 235632 - protein, 459 aa, unidentified
MGLVGRLRMDVVNFNASGIDVGSRSHYVAIGQELDDVREFGVYAENLTELCQWLLDSGVTTVAMESTGDYWQNLYVELISFGFEVVLANGKFTKNAKGKKTDVKDCRWIQKLHTLGLLTGSFLPDNTTEQLRTFCRQRGNWIGLAASTTHKMQKYLKLLNFRLDVVVKDVCGLTGMKIIEDICKGNLDPKSLADHRHYNCRKPIEEIARALHGNNRTDYLFGLQQEFECYKFFQKKIADCDKRIEHFIKHELKQHPERSKMKTTEKPHKRINKNAPQIKDMNQIAFRYFDGVDLFAIEGLSHSTVLTIMSEIGPDGFYKFGSSKQFTSWLRLAPNNKISGGRILSNRIPKGSNRLKIALRQAANAIGNLKDTHLSDFFRRVAYRKGRHSAVSATARKLAVIIWNMVTKKVEYQPPKQYLFLDQKRKLGLMNRIKKQIDKFELKPEDLGFTNKLIINNLT

SEQ ID NO: 235633 - protein, 506 aa, unidentified
MAQTAKAARQKEKESVSKRRSTPVTAESKAAKPKGKVKRGDRRRRTQKGEAIENRPVFEPNAAGVDSGAREVYGAVPPDRDKQPVRICETFTADLQELANWLTACGITTVAMESTGVYWIPVYEILEAHGIRACVGNARHMKNVPGRRTDWHACQWIQFLHAVGLLRAAFRPEPEVCALRAVIRHRGELVQMAAKHVQHMHKALTQMHRQIQHVITDLTGLTGWAIGDAILKGERNPSRLAQLRDPRVKASPETIEKSLVGHWQPEHLFTLKQSRRLYAEYQREIGECDAEIERLVGTFQPRVDPEVKPLPPDQKKRNRNYAKSRKRRARPQSSTREFDLRTEVYKLYGVDVTQIPGLEFLALQLFSELGRDMSRWASAACFVSWLALCLDNDISGGRVLWRTKRRVHNRAGQLFRMAAYALDRSPTPLGAYLRRMKAKLGPQAAHTATAHKIAVIFYAMIKNQTEYDETIWEQRDAQRHQRHMTGLKRQAQRLGYKLTPIEEEAA

SEQ ID NO: 235634 - protein, 355 aa, unidentified
MSQEKYIGMDVHQATISVAVMDAGGKLIMECLLETKAATIVEFIRGLHGTLWLTFEEGTSAAWLHDLLKPHVNRLVVCDPRKNALLKDGNKSDRVDARKLAELLRGNQLHAVYHGEHGVRTLKELGRSYLTITQDVTRVMNRIKALYRSWAIPCAGTTVYAARHRAEWLAKIAEPGVRVRAQRLYQQLDLLQPVRLEARREFLAESHKHSAVKLLRQIPSIGPIRSALLVALLQTPHRFRTKRQLWAYSGFAVETHDSGEYRSVRGKLQRNRERMTVRGLNDNHNRDLKNLFKSAAISASTRPGPLRDFYVARVEKGMRPTMARLTLARKMAAISLTIWKKGVQFDPQQLQRQTA

SEQ ID NO: 235635 - protein, 318 aa, unidentified
MGLYMINNFLGIDVSKDRFDVFLSFISKKGKRETRKRSFKNDDHGFQGLLSFLQKHNVEQVKACMEATGCYSEALAEFLHNTGHFVSVVNPYCIKSYARSKLTRQKNDQTDAEIIADCCQRQEPTRWTPPSPELKKLKHLYRCSVALKDELILVNNHLEKKERLPKEVANAWEDLAMNIAQKIETIKNSVRELLKQHKELLENFQLLLTIPGIGVESAVAILAEVPDIEVFRNARQLAAYAGVIPRNITSGSSVYAKPRLSKSGSQPLRKALFFPAIVAKNHNPIIMSFCQRLKEKGKHNMAIVGSAMRKLLHIVLVF

SEQ ID NO: 235636 - protein, 330 aa, unidentified
MQTQVTKKIDFTGKDIFIGLDVHKKSWSVTIIVDGMEHRTFTQPPDPGALNNYLQRMFPGGIYNSAYEAGFCGYGIHRELNSLGIRNIVINAADIPTSQKDKLQKRDPVDSRKIARSLEKGSLHGIHIFDRELEELRSLNRTRFYLMRDLRRSKTRIKSFLQYYGETIPVEYDNNQWTLKFVSWLKQVKMQTKSGQDAFSNLISSYEYHRSQLLILSRQIRERIREYDRELYTLLKSISGIGPLTASALITELGDINRFKNIDQLGSYIGLIPRIRESGEITYTGGITFRCNSFLRTLLIESSWQACPDFIGSNQDGSCIDAVLSFASGQ

SEQ ID NO: 235637 - protein, 438 aa, unidentified
MKKIRTHAAGIDIGAKKVYVSIEDLPVKSFDTFTQDLEALGVYLVAHGIETVAMEATGVYWVILYDILVSQGLDVWLVDGAGTKQVPGRKTDVKDCQWIQQLHSYGLLNKCFVPDIRVQELRAYQRLREDHIRSGAMHISHMQKALILMNIRLKEVISQIHGTSGMRIVRAILSGERNAEKLALLCDQRILKTKKEWVIRSLKGHYSEAALFELGQAVACYDFYGEQIAMCDIKLEEVLKKMDLGGTPKPRSKGTRKAIRHNRPDIENMGGHLLGIFEGKDATVLPGITDYNWMQLLSEVGTDLGKWKSEKHFTSWLGLAPKQHNSGKMKRNYKPKGAPRAGLIFKQAAVGLLNSKHIALGAFGRKIRAKKGGLVAIKAVARKLAELYWKLFVKGLEYVENGIQKYQEKMLLNKQRAVTRMAQELGLGITPLKIQSAD

SEQ ID NO: 235638 - protein, 322 aa, unidentified
MSQTTTTTTTMNQILPPVYTGLDVAKATLQLHLQGKSFDLANTPSGHAQLVKRLRAISGAHVVCEATGGYERAVAAALQAAQIPVSVMNPARVRQFARALGTHAKTDPIDAQVLTAFGSALVPETTPPRTPTELKLTAYVNRRAQLIEMRIAEEQRADVCIDPVLAKSFVGALRHFQSALAKIDLLIKELVADNARLAEQVRRLAQISGVGLVTAVSVLAQMPELGTLTRGQAAALAGLAPYNRDSGKSTGKRCISGGRPELRKCLYMAALAASRSNSVLKPFYQRLIANGKPGKVALTAVMRKLVILMNHILKNPTFALAK

SEQ ID NO: 235639 - protein, 408 aa, unidentified
MNPLYVGIDVSSKSNVVYFMLPDGSKHCNFSVANSHTGSSQLVKRILSAMTSCSLDSVLIGLEATSVYGDNLVYFLREDAALARFNSKIHVLNLKQVSKFKEAYNDLPKNDLIDSFVIADCLRFGRINKEVYIGDYRYKALQNLTRARYFAVSNLIKEKQRFMNILFKKYSTMTQEKVFSDTFSTTALAVYDEFESAEALADMDLHELTAFIMEKGKNRFPNPNAVAKAIQKAARSSYRLPKTVNDSVNQVLSISITSIKALEAQIKEFDKAIATQMELLPNVLISIPGIGPVFSAGIMAEIGDINRFHNQAQLAKYAGLAWKQHQSGDFEAQTTRLINSGNRFLKYYLCEAAFSLVRCDKEYSDFYHLKYKEVNRYQHKRALALTARKFVRLVFRLLKDNRLYTSAE

SEQ ID NO: 235640 - protein, 412 aa, unidentified
MELLHRRCCGLDVHKETVVACLRLVSDGKVTTEVRTFQTTTADLLRLSEWLATNDCTHVAMEATGVYWKPVWHILDDGDFVLVLANAAHVKNVPGRKTDVNDAMWLAELLAHGLIRASFVPDAQTQEMRNLLRTRKQLVREQSSHVQRVQKTLEDANIKLDSVLADLMGKSGRAMIEALIAGETNPAKLASLADRRVKASPEEFCEALRGRVTKHHRFLLRLHLNQIDALDAAMATVDAQVEENLGPFRTAVEQIISIPGVKNLGAHVIVSEIGIDMSRFPSAAHLLSWACICPGNDESAGKRRSNRMRKGAPWLKATLLQCAWAAVRKKDSYLQAQFYRIKVRRGPKKAIMAVAASILTAIYHMLKDGTMYQDLGCNHFDRRSTDQQKKRLVKRLADLGYAVEIKPLAAMA

SEQ ID NO: 235641 - protein, 353 aa, unidentified
MLYLGIDQHRKQLTVCIRDEQGDVTLRRQVSTEWERVRGFFTEMSNEAGEAGFVAIVEVCGFNDWLVRLLNEYGCREVLVIQPEKRSKKKTDRRDANALGEVLWVNRERLLAGKPAQGVRRIHLPTDGEAEDRQLTELRKRLGQLRTRSINGVKHLLRKHNLEQECPTKGIDTIRAKKWLATLPLGRMDRLQMDLLLTQWKLWDEQIQTLETEITRRQAENKTAAVIATVPGCRAYSSLALASRIGSIERFPRPSSLPNYWGLTPGCRNSGDVTDRLGSITKQGSSLARFQLSQMVMHVLKRDRWMKNWYRRIKSRRGAKIARVAVMRRLATILWQMVKHQQPYVVGGFCPGT

SEQ ID NO: 235642 - protein, 344 aa, unidentified
MTNYAALDVSLEATAVCVIDEDGRILIEKKIPTCPDAIASWLTKTVPDLVRVGMETGPLAVWLWNELHDKGLPIVCMDARHANAALKVRPNKTDRNDAAGLAQIVRTGWFKQVRIKSRVGYELRCLLAAREVLVRSRVKIENETRGLLRTFGVLFGKSVGGFSRRVDEIIADELDASPAIRDVIIALAKARAALLDRIKDLDRRVLASAKAHSTARLFMSAPGIGPITALSVASAFDDASRFKRSSSAGAYLGLTPRRYESGEVSRNGRISKHGNKMTRKHLYEAATTLLTRNIGFSTLKAWGLRLAKKVGFKKARVAVARKLAVILHAMWKTNTAFRWSANAA

SEQ ID NO: 235643 - protein, 426 aa, unidentified
MTFLFKLAYPKCCGADIHKNSIVATIVTTDKNGISVYLQKSFSTINSDLQRFHDWLIENDCWYVCMESTGKYWIPVFNYLEHDIYVCLTHPKYVRAIKGKKTDKKDSKWIADLFKFDLVRNSFIPPKDFRQLREIARYRFKLVCMKSSEKNRVQNCMTVSNIGIASVLSDPFGKTATQILSYLLEHSSDSMDEKAVRRLIQKKAKVKSDDIIEAVRGYHIEADQAKKLELARGHLDYLENMILQTEVELYVRMKPYYRFVEYVSTMPGMTELSSTIVLAETGVDMSVFEDAKHLCSWCGLVPANNESAGKKKSVRISKAGDYLKPMMVQCALAAVKSRKDPYFARKYQPLKHRRGHKKAIIAIARMMMVCLYHMVSEQKPFNPTDYTEMTDPHFYQPKAVLNDENVFAYLEAQGYDTSLMTKRNDN

SEQ ID NO: 235644 - protein, 353 aa, unidentified
MKLYLGVDLHKRSCWVTAMSPEGEVRESRRLSTERESLLGYFGKVAKPAAVAVEATFNWYYFLDLIEPLGLELHLVHPWKTRAIASARIKHDRLDSRILAELLRTGFLAEAWIAPREVRQQRQLLRYRAHTVRWATRAKNAVHGIVNRNGVRAPVESLFGPKGRAFLQSVVLPELDRWEVEGQLARLDLLGEQIKELDREIRQRVKAEPVAQALEAIPGIGPFIALLLVAEIGDVGRFPSAKHVASYAGLAPSLYASGEHRWGGPITKQGSSLLRWALVQAAHRAAQSPRFTGFYERQRERQGAGKAIVALARKLAVISYYRWRAVKAASCPRSNKFGSAPEVAHGQSIDPTV

SEQ ID NO: 235645 - protein, 408 aa, unidentified
MEVLHPRCAGLDVHKDSVVACIRIATEGGVRQEVRTFGTTTMALESLADWLRAEGCTHAAMEATGVYWKPVWHVLDEVIELVLANAMHIKNVPGRKTDVNDATWIADLLAHGLIRGSFVPEASIQELRALTRTRKQFIREKAGHVQRLQKTLEDANLKIASVVADIMGTSGRAIVEALIDGETDPEKLADLTSKRLKASRATLVESLRGRVTANHRFLLKLHLGHIKAIEQALVAVDKEVDALLAPFLDAAKRLTTMPGISDIVAEVVISEIGLDMSRFSTPAHLISWAGLCPRNDESAGKRRSTRLRKGAPWLKTTLVQAAWAAARAKKSYLSAQFFRLKSRRGPRKAIMAVAASMLTAIYFMLRDGVAYRDLGHDYFERTDKMKAAQRLVRRLTDLGYEVTLKAAA

SEQ ID NO: 235646 - protein, 433 aa, unidentified
MTSRLSVGIDFSTKWADASLVAPDGTPVVPHQRFDNSLPGFQGLKQLLLETLATHSYTEVDIAGEATGMYWLPFFLELAADPDLRAHHTQLFVLNPRWVKWYRHSFSQVDKTDRHDAFIIADRTRVHRPRVPWDPDTLVLALRCFTRYRHHLIKLLAAEKSFFCAYLFLKANAYQRLAPFSTVFGATSRMVIEQAVTLDTLAALPVNDLAAQLDALSGHTLRAPEHNAAKLQQVAAQSFQLPATLALPVHQILEAVLQHIAFLESQIAQVEGWIAGYLPHFPAIQQLRSIPGIGPVFSAGIGAEIGNVQRFLRGTKSDARGRTRPRNLRDAEDAVAKIAGLWWPRSESGTFAAEDRRMAKSGNAYLRYYLIQAADQLRHREPEYSAFYRRKFREATKHHHKRALVLTARKSVGLFVGLLHRNEPYRSKEARRT

SEQ ID NO: 235647 - protein, 402 aa, unidentified
MYNAVGIDVSKGKSTVAVLQPGGTVIRKPFDVEHSSSCLKELNDFILSLDGDTKAVLECTGRYHEPILRSLSGAGIFVTAVNPHLIKNFGNNTVRKVKSDPADAKKIARYTLDNWAQLKEYSGMDNTREKLKTLNAQLDFFTKQKASVKTNLISLLDMTYPGVNDLFSSPPRNDGSEKWVDYASSFWHVDCVRTAGLKTFTARYKAFCKREGYNYSEVRAAELYEDSKELVPVLSKELSYKSLIELSIKQLRSLTESVVQIKNEMDSLASTLPEYATVMSMCGVGKTLGPQLIAEIGDVSRFTHREAITAFAGVDPGVDESGTRYSKSNRSSKCGSARLRRTLFLVMSVLLQQKPDDPVYHFLDRKRSEGKKYKVYMTAGANKFLRIYYGKVKAALTAQAEH

SEQ ID NO: 235648 - protein, 421 aa, unidentified
MESDYRIYVGIDWASEAHQACVLNHERGIVAERSFAHAGKAIVEFAQWLSGLTDDPGQVAIAIEIPRGAVVETLVERGFHVYAINPKQLDRFRDRYSVGGAKDDRRDAFVLAHSLRADQPCFRRVELDDPRVIQLRELSRVDEDLQREGNQLANRLREQLHRFYVQALQLCPAADEPWLWTLLELAPSPSVAQRLRPKRVERLLRAHRIRRLKADDVVSALRVPALQVAPGVVEAATEHIALLLPRLRLVHSQRQRCGARIEALLDELRAAGEEDDKPGEHSDVAILRSLPGVGRIVAATIIAEACAALTERNYDALRAHAGIAPITKQSGKHRTVLMRYACNGRLRHALYHCARVAVMGDLPSKTYYTAQRQRGHTHGRALRAVADRLLRILVAMLTTRTLFDCTIARPPQLSSPSEKVA

SEQ ID NO: 235649 - protein, 351 aa, unidentified
MKLTTIGIDVAKSVFQVHGTDERGKVVLRRQIRRSQLLLFFSNLEPCLIGMEACGGSHHWARKLAGLGHTVRQMAPQFVTPYRKNDKNDGNDAEAICEAVQRPNMRFVPVKSLQQQAELVLHRIRRRLMGERTALINQLRGLLAEFGLVLAQGANHVRSKLPSLLENSSDSVPPLALELFQSLYEELCRLEQCIAGYDRRVQQLYRGNPLCQKLGELQGIGALTATAFVATVAHAAQFKNGRQCAAWLGLTPKQDSTGGKTRLLGISKRGDVYLRTLLVHGARSIMRHTPKRDDPKSRWVEQLRKRRGENIAAVALAAKHARILWALMVQGQSSPQPPSNQSIAPHVQPGS

SEQ ID NO: 235650 - protein, 347 aa, unidentified
MVPFYLGIDLHLKRTFMVLMNANGEVIDKQRITNQEITTYLQEKVPQETYAVLEATRNWPFMYDLLHEHVQQVDLVHAKAVRTIANAAVKTDQIDASTLAHLARLNYIPKAYAATKEMRDLRQLLRHREWMVNQRSKAKNRIHAVLAGYNLVSPVTDLFGVAGRKYLDEVLQTELRPAARQVVSDHLSIIDHLSERIQSLEKGISLSEAQTCVMRLLMSMPGVGKLIAMILLAEIGDIERFNSPKALCSWAGLTPKVHSSDAVVQHGHITKEGSRYLRTAMVRAATVACRVSPKWYVTHSHLALHCERRSARVAVARRLLSVIYYMWKRDQPYQENYEQDQPEALGA

SEQ ID NO: 235651 - protein, 360 aa, unidentified
MHRQYSHSNFSGQDVFVGIDMARKKWQIAIYLGDAFHKSFPVDPSAKAVEHYLLRTFPGARYHSVYEAGYFGYQAHHDLVSLGIDNMIVNPADVPTSDKHRRTKNDRVDANKLGRELLKGGLRPLYIPERVAIEDRALVRMRSTFVRKQTRCKNQIKAALAFFGFPLPPEDIIERYWSRAYIRWLEGLHFEHESGHQAFHTLLGELLSLRTTITELTRQIRHLAREDRYRSRVLLLCRIPGISMMGAMIFLTEIITLDRFKNLDRLASYVGLVPGEHSTGETEIDTGLTPRRNILLRYILIECAWIAQREDPALLAAFKEYCKRMPKNVAIIHIARKLLSRMRYVLKYNQPYVTGVIANN

SEQ ID NO: 235652 - protein, 356 aa, unidentified
MSPKLNSAIAAIGIDIGKNSFHLVGQDRRGALVLRQKWSRGQVEARLANLPPCLIGMEACVGAHHLSRKLQALGHDARLMPAKYVRPYSKGEKNDYRDAEAIAEAVQRPTMKFVATKTADQLDLQALHRVRERLVGQRTGVINQIRAFLLERGIAVRQGLHFLRAELPSILAKRTDVLSPRMLRVIEDLAGDWRRLDERIENLSDEIAALARQDKGCERLMTVPGIGPIISSAIVAAIGGGDAFSKGRDFGAWLGLVPKQMSTGDRTILGSISRRGNRYLRWLFVQAAWVVLVKITPEGWERYGLRAWIEAAKQRLHRNVLAIALANKLARIAWAVLHKGRAFECVKTNATASQAA

SEQ ID NO: 235653 - protein, 400 aa, unidentified
MRTVFGIDVSKASSEVAILVNGERVHSYTMPNDIIGFSHLLKDLKTVSNPEIIFEATGVYSRRLQAFLEENSYDYTRLNPLEAKKQLDSLRVRKTDKIDAEKLASSQFVLNRKPTYVQEEVYQNLHDLSRFYQNLTEDIVRTKNRLHKVLQVAFPEIENLLSTPTGEQYWNLVSIFPTKHWVLELSDVELKETIRNSTSKRISENRVGNLAEKLVGLAKQSYYAISKTSPMIEEVKYNAQELIRLTNRREQVLEQLIEFAKPLPEYEILLSIPGIAETTATSIIGELGDIRRFKSANQINAFIGIDLKHYESGDFLGQEHITKRGNPYARKILYKCIYNIASACHTNPCHIADFYEKRKRQSQTTSTKPHTIASIHRLIRTMYYLIMHNKLYDYTLAQSL

SEQ ID NO: 235654 - protein, 414 aa, unidentified
MLKIVYRVCCGMDVHKSFVVACIASTNEYGVTTYKSKRFSTFTKDLRRCADWLSENNCKDVCMESTGKYWIPIYNILEPTCNVVLAHPKYVKAIRGKKTDKRDAKWIADIFKHDLVAGSFIPPADIRQLRDLVRYRWKLTNFTTGEKNRAQNCLTVSNFKLDDVFSDVFGKAASAITTRILQDPTEKITDVSGFRTKGMKATNEQVLAAVDGEMCEEQAEKLRIIRSHLDSLELCKLNLESLILSTAEQYLPQLNLVMTVPGIQSFAAIGIISEIGVDMSVFPTSKHLCSWAGLTPQNNESAGKKKTTRISRAGAYIKPLLVQCALCAIRAKQFPELRNRYLALKKRRGHKKAIIAIARMLLTAIYNMLKKNETYNPEIYRKGDRPPAHREVSVEEAIFILQRQGYLVTAPPTS

SEQ ID NO: 235655 - protein, 341 aa, unidentified
MKVTTIGLDIAKSVFQVHGEDCNGKVVVQKRLRRSQVVAWFSQLPRSLIGIEACGTAHHWARTLRAVGHDVRLIPAAYVKPFVRRNKNDARDAAAICAALNRPDMRFVAIKSVEQQASRGLERSRDLLVKQRTQLMNCTRSLLAELGIIAAQGRRGFAELVARVSASDAAIPPVLLTALLPLIRQIEGLHTTIAALEDRIIAAARENPVMRRLAGIPGIGGLTAHAIVTAVGDGRQFGSARDFAAWCGLTPQEHASAAKRHDKGISRQGDIRLRKLLALGASTVMRSARSRTDRATAWQRGILARRPVKVAVLAQAAKNARIAWALLVSGETYRTATPTAA

SEQ ID NO: 235656 - protein, 407 aa, unidentified
MNAVGIDVSKGKSMMAALRPMGEVVLPPKEYPHTEVGLERMALDILALGEDTRALMEATGRYHEPVAAALHEYGIRVTVLNPLFIKQSGGGSIRKVKTDKADAMKIAKYALDNWVDLREYTPMEAIREQLKLCSRQYNLYMKNVVALQNNLISLTDKVFPGVNELFSSPDRADGSQKWIDFVITFWHCECICLVSEAAFTQRYRKWCKRKGYHFSERKATELYMGSMGHITTLPRNSNTKLLITTAAKELASAKATLAVLRAEMNRLAQQLPEYETVRAMYGVGETTAVQLMAEIGDVRRFPRRSSIVGFAGVDPAVDDSGKHISKSNPTTKRGSPHLRKTLYQIVCTYLKKSPTDEPVYQFLDKKRAEGKPYFVYMTAAQNKFLRIYYARVKECLIAADTRELPED

SEQ ID NO: 235657 - protein, 407 aa, unidentified
MNKLFVGMDISLDDVKVHILDQDGIDACSRFSIDNNPSGCNILVSHILDCCNKYNIQKVFIGLESTSVYGWHIQYYLADHASLKPFNPSVTTFNANTVKAFKKSLGNLPKNDWVDAFVIAEKLRFGRLPKSCPVDFRYLALQRLTRHRFHIVDSIVREKNYFLSNLFLKFSGLCQTKVFSNNFGTTATEIFNEFLTLDDIAARPLEDLVAFLVDKGRDHFNDPNATAKLLQEAVRKSYRINANVNDSLNFVIKSCLDNIQYLEKQKKASEKTIVNEVKGFKNQFLCLTSVNGIGPTIAAVLISEIGGISRFDNDNALAKFSGIYWSEYQSADFKAEDTYLKRTGNEYLRYYFIQAVDQLRKYCPEFSQYYARKFNESKTHKHKRALVLTARKAVRLVFALYFHCCFW

SEQ ID NO: 235658 - protein, 444 aa, unidentified
MIKKKSTRENFQYVRPNAAGIDIASEMHYVAVPPDRDEEPVRKFGSFTDDLHQLAQYLKKCRIDTVAMESTGIYWIQLYLILESYGFEVFLVNARHIKNVSGRKSDVLDCQWIQQLHTYGLLNPSFQPDNLTRELRSYMRHRKNLTENYSIQILLMQKAFEQMNIKLHNVLTDLCGKSGQLIIQSILAGERNPKELIKHIDKHVKSSEENIIKSLTGNWREENVFELKQAYELYLVFKEKISECDQQIENVLAKSEIINQSNHVDHKKARGVYTKNRFNFNATNYLHNILGVDITKIFGISEISATEIISETGIDMSKWKTQKHFTAWLNLAPNNRVTGGKLLRPKKSKKKNKAGQSFLMAAYSIQRSDNWLGAFYRRMKAKHGPLIATKSTARKIAIIFYKMIKEKVDFNPIALETYNQYFREQKLKYIQKQASILGLALVPA

SEQ ID NO: 235659 - protein, 387 aa, unidentified
MPRPNDLSRSLVALDQDSTIIAVVEMSQSSWLVGGVLPGIERQPCKKQEPSPARLLALLHRWRDGSVRAGRTITRIAVAFEAGRDGFWLARWLEARGVEAHVIHPSSVAVSREHRRAKTDRLDTELLKRGFLGWLRGERGHCSMARVPTIAEEDAKRPNRERECLVKERTRLVNRIKGTLARLGIRNFKPTLRQATERLATMRTPEGTPVPPNALAEVQRDLARLRFVVGQIKQIEEARRQRLEEQPERGPHAMVRLLARVVGIGIETADMLVNEVLSRPMRDRRAVARYAGLTGAPDESGAKRREQGLAKAGNARVRRGMIQLAWRFLRFQKNSALAQWYHARTADRRGATRKTMIVALARKLLIALWRFGTIGEPMDGVTLRPAS

SEQ ID NO: 235660 - protein, 358 aa, unidentified
MNRNILKVTLGVDVSKENLAVCLCRLRVNLAKEFETPFEVSNDLSGFKKLVRWLDKEVASREDVWIVMESTGIYHEALVYYLYEAGFNVSVMQSGRVKRYAQSLNQRSKTDALDSRMLAMLGCERELPLWTPPDPTLRELKGLSRERSFLLKEKQIEQNRLHAMEHAAYKNNRELRRYKQRLKLIAKQLEEIEKEMAILIHNTTDLKRRIKHLESIPGISFVSAATVIGETLGFTGFTNAKQLTSYAGFDVVLKESGVYKGKTRISKKGNKNIRRALYMPAMTAVRCNPTLKKFYERVKPTKATPMIALIAVERKLLLLMYSVWKNEMNYDPEYEQKKTARTEVLAAQDRSNLALTSS

SEQ ID NO: 235661 - protein, 347 aa, unidentified
MTIVEAPPGITGGVDTHLDTHVAAALDPLGRLVGTESFPADAAGYRSLLAWLEEFGQVTKVGVEGTGSYGVGLARFLRRKGVEVVEVNRPNRQARRNHGKSDPLDAVEAARAVISGRASGAGKTKDGPVEAIRVLVVAKRSARQARVKAIVQMRHLGITAPDQLHSRLKGLTVTALVAEGAKLRSTRSSDPVTAATKASLSSLAHRVQSLDQEIAELDKKIESLLLATVPDLLALFGVGPDTAASLLVAAGDNPERLHSEAAWAHLCGVSPVPADSGKNAGHLRRHSGGDRQANSALWRIAMVRIAHDPETTHYFDRRVKEGRTKRDVIRILQRYIAREVYRYLPRG

SEQ ID NO: 235662 - protein, 440 aa, unidentified
METTERPEMVLAIDFSLDRLDVALRGPAPPWIWGHRAYANNWAGYQQLKQDLLAELQRVSPVQFTAVGESTGPYWWHAFYQFSHDAELAPFDPQLALLNPAHVKGYRKALAEQDKTDPDDARLIERYYRSVGIEHPYQFADRYLRLRTFSRAYARVLHTLAAEKAYFVAVLYLWGSEYQRRAVRPFSDLLGVTSQFIVDEYADLQQLSAIPEAELAALLEQHSHHTLRQPQETAQKLHQVAQNSYPLPAPLGQALHQVLQLTLELIRVLSDNQNAYRQLLEAELATLPEAQRALAYKGLGPVLVAGCLAEIQDTTRFTTGTKFDRRTQTDRPRTYRDGQAAVAKLAGLWWPKQDSGHVQGVQPRLARERNPYLRFWLVQAAYTLQRYQPEYQQFYWQKYREAHDHHHRRALILTARKATRLIFALLHKGRLACLEEGTLT

SEQ ID NO: 235663 - protein, 417 aa, unidentified
MAMKIVRFNCCGMDVHKNLVVATIGITDRKTNITEYFQRSFSTLNSDLYWLKDWLKSYHCFDVCMESTGKYWIPIFNILEDEINVRLTHPKYVKAIKGKKTDKKDSKWICDLFKHDLLKFSFIPPKEIREMREISRYRYKLVCMRTSERNRYQNCMTVSNIGLASVISDPFGKTASNIMKEVMKSNVIDDDKILKLIHRNCKNKDKILDSLHGYHIESDQRFKMKKSLDHMEYLNHLIDSCEVELIKRAYPLRRSFQHITQIKGISALSAILIISEIGIDMSQFESDKQLVSWAGLSPANNESAGKKKSVRISKSGQYLKPLLVQCALSAIKDKTSYFGRKYSNIKKRRGHKKAIIAIARMMLVSIYHMILTGEEFQPTDYESLMNPKSNTDQSPTVEKALNFLKQSGIDISSIPVN

SEQ ID NO: 235664 - protein, 397 aa, unidentified
MIAVGIDVSKSKSTVAILNGDGSIRAKPFDVHHVADELQALVDYIKRTSEPPTILMEPTSHYHYPLLKAFQEAELPVCLINPYQMKKYGDTELRKAKTDKRDSLRIAQYALEKSYSLIPYTPQDQKYEDLRFLSRQYSQRISTLTVAKVQLLSLLDETMPGITTILPLKSRDPDNCVLLRFIKRFKSFDVIRKMGKTRFLDSYQVLVKKTKDRFAGSKGLAIYELVLNSVTTRGENPLSAMTQDQCVDLVSTSQKAADEINLQMRIIAETMPEYKVLRSMAGVGDRLGPIILGEIGDIRRFHSGKALNAYAGNDAPPYQSGQFESRNRHISKRGNPALRKACFEVMQALKLTKPQDDPVYLFLLKKEQEGKPYNVAKMAAVNKFLRIYYARAMELYK

SEQ ID NO: 235665 - protein, 365 aa, unidentified
MTVVGIDAHKDWHTLVAVDEVGRRVKELTVEARAAGHRMIMTWLEAFEDVTVAVEDCRHLTRRLEADLLEAGHRVVRVHTRLMAGMRRSSRERGKSDPIDAEAVARVALREEGLPTAELPGASRDIKLLSDHRRTLVARRTAMQSKARWFLHEIDPELEIPSRALRRYHLLDELIEYLEPVEGAVADIALDLLVDIRELTVRINALESRLSRLVRSSHPSLVAVPGMGTLGAAMIIGETAGITRFRSRDAYARFNGTAPIPVWSGNKVRVRPSRGGNRTINTALHMAALTQIRMGAEGAAYYDKLIAAGKTRKEALRLLRRRLSDRVYAAQRADVVPAVQVPASDGPLEPPTIEEPASSMTLIAA

SEQ ID NO: 235666 - protein, 337 aa, unidentified
MDYFAGLDISMDETHVCVLDREGVVIHESKTASTAEAIAGELAKAPSCRRIVFETGRMAPILFHGLSQLGLPVVCVESRQAYQALKSLATHKTDRNDARGLAHLARTGFFKPVHVKSLSAHALRSLIIARKKLVGQRVTLENQIRGLAVVFGIRLPRALTAAFIDKALKASEGIAGLSAAMRGLIAARTAVMTAVAAIDADMRRMARALAACRRLMTIPGVGQLTSLAFVAAIDDPSRIRRSRDIGAYLGLVPRRYQSGEVDYVGSISKCGDRRVRTLLYEAANVMLTRYKGQLKLKDWAFAIARRSTMRKARIALARRLAIIMHAMLRDGTEFTLA

SEQ ID NO: 235667 - protein, 467 aa, unidentified
MKHNQQRARSGKKSRGSISLLERIQPAAAGIDCGQNSHFVAVPTDRDPQPVREFRTFTAELHRLADWLAQCGVKTVALESTGVYWIPLYEILEQRGFEVLLVNARDVHNVRGRKSDVKDCEWLRELHSVGLLRASFRPAATIVPLRSLMRQRQTLVEEAATRIQRMQKALTEMNLKLHTVLTDLTGQTGLKIVRSILNGQRDPEQLAAHRDHHCHASHQEIVAALTGNYRAEHLFALRQNFAAYEFHLQQIAECDTAIEKLLAKLAEQQPPPSGPLSTPRRKRGSKHAPTFDIRTSLHRLTGGADLSQIHSIGPHAALQIVAEIGTDMRRWPTEKHFTSWLTLAPNNKVSGGRLLTSRTPPSANRAAVILRRCAMSLGRTSTALGAFYRRLAARTGKAKAITATARKLAVLVYRVLSGDLIYNDPGAAAYHQLNRARELKSLRKRAKLLGYQLVNHSTGEVLSIPVS

SEQ ID NO: 235668 - protein, 363 aa, unidentified
MTKQRLSSNQLLEFIGVDEKTPVWIGLDVHKKSYHVALRRADGVCQSWVSPADPTVLARQLCAISQRISLIVYEAGPTGYCLERVLKVNGYKVSVVAPSRIPRPVTNVAKTDKLDCLKLAEYAAKGMIEAITTPSEQESAERSVLRRRNQLVDSTRKTKQRIKSFLLFHGIEEEYGLRYWSRSAKSKLSKLPLQSDLKFVLKSLLRQLSYEEEELAKITNRLTRIAKRRPHWEVVKNLKTVPGVGDIVACAFRTELFRPERFRRAEEVCSFLGLAPAIRQSGEKRQGGWLMRSGQTRLKSLLIEAAWMWQAKDPWARKKYRTHLSRCGIAQKAITALARRLAVILWRLSVENRAYVMLKVDIV

SEQ ID NO: 235669 - protein, 483 aa, unidentified
MSLIGTSFTIADEGIVPPCSVWTASARCGQVPGSGVSRGDRNRNARLGRLREAVPVTNAIVGIDLADTKQMLVVCDHDSKVLARRTFRCKAWDLGKALDWAADRATRAGYTGVTVACEPTGHRWRVLGQLAADRGMSFVCVQPMLSSWARKTEDLTIDKTDDKDAVLITRLTAQLRCYLPEPVDETWGRLRHLGQRRARLLGVHTESVQQIRALLECVWPAALETAKHPFKSHTWIAALHVIVSRDGGDLDLTRRRGLARFEHQVGRELIRRGYQRPCRRIVTRLFTALDDPAGVLEHRRSAFERISWILDDFDHAHTQLVEVDQRLVAVLDELGLTELVTSIDGLSAVGAAAILAETGDLTRFTSARAVVKHAGLAPRERMSGAFTGRARLTGAGRPELRAAAWRAVWGCLQNNQVHAARYRHLTTRETNRLKPTQAQAVVAAGLLRQLYAIVTTRQAWSPDIASTGSRPVATVVHLEAIAA

SEQ ID NO: 235670 - protein, 409 aa, unidentified
MERLFERVAGLDVHKQTVAACVRVPGIKSSREQQVRVFGTTTAELLALRDWLQALGVTHVAMESTGVLWKPVFYLLEDAFTCLLVNPVHVKRVPGRKTDVQDCIWLAELLEHGLLRGSFVPPVPIRELRDLTRHRKSLIQERTRAANRLHKVLEDAGIKLASVATDILGASGRAMLSALVQGTTNPDVLADLARGRLRTKLPALRQALVGRFRPHHAFLVTQVLTHLDYLDEAIVSLTGQMEALLAPSADALKRLDTIPGVNRRTAEVLVAELGTDMTIFPSAAHCASWAGLCPGNNESAGKHKSGKTRKGNPWLRAALVEAALGAIHTRGCALGARYRRIMRHRGHKKAVVAVAHAILVTAYHILKLGTTYRELGADYYDKRSAQRVARRAVETLERQGYRVTIERVA

SEQ ID NO: 235671 - protein, 425 aa, unidentified
MNYKQNEKINQVKESTLVVGIDIGSTTQYARAFDWRGIELGKVFTFSNSREGFEAFKAWMQHLQDKYRKSDVILGIEPTGHYWFDLGAYLEDEGILLVMVNPYAVKQTKELDDNSQSKNDRKDPKVIAKLVTEGRYSAPYTPDGVYADLRIMVANRKRLIREMTQIKNRFARWFAIYFPEYTDVFGDYEAQSSMLLLKKVCTPEAIVELGAEKINQIWRDAKLRAVGMKRATTLCETAKRSIGLKKGSSAARYEMKLLLEDYEYKKAQLDAVMEEIEKLCRKIPESEQMLAIKGIGVITVAGFLAEVGDVRRFESPRQIQKLAGLSLRENSSGKHKGQTTISKRGRSNLRAVLFNAAIPLIAKNPEFKSLHEYYTTRANNPLKKKQSVIAISCKLIRVFYAILANGVTYDPQKMLSDIHRQPQAA

SEQ ID NO: 235672 - protein, 406 aa, unidentified
MNMNAVGMDVSKRKSTVAILRPGGKVVVKPFDVPHLSTDFQSLKKLIRQLDGETRIVMECTGRYYEPVARELSQAGFFVSTVNPQIIHNFQGQDNPLRKVKTDKADSVKIARYTLDSWANLKQYSLMDELRSQLKTMNRQFDFYMKHKTAMKNNLIGLIDQTYPGANTYFDSPARKDGSQKWVDFIDTYWHVDCVRRMSLEVFTNHYQKWCNRRKYNFSKSKAEEIYGKAKELIPVLPKDHFTKRILKQAIDQLNTASQTVEQLRTLMNETASRLPEYPVVMAMKGVGPSLGPQLMAEIGDVTRFTHKGAITAFAGVDPGVNDSGDYSQKSVRASKRGSPVLRKTLFQIMEVLIKTKPDDAVYWFLDKKRSEGKPYYVYMTAGANKFLRIYYGRVKEYLSSLPKSE

SEQ ID NO: 235673 - protein, 338 aa, unidentified
MQAYAGIDLHSSNNYIGIINEQDHRLYGKRMPNDLNHVLMALEPFRDQLEGIVVESTYNWYWLVDGLQENGYNVHLANPSAIKQYEGLKHTDDKWDAYWLAHMRRLNILPEGYIYPKESRAIRDLLRRRLLFVRHRTSHILSLQSMITRNLGFKVSGNNIKKLKGEDVDRMFNSSNLKFMAKNNIAVIQFLKKIIVDIGKNVKSQVKLRKEFKTLLTIPGIGDILGLTIMLEVDNINRFPKVGDYSSYSRCVKSERISNGKKKDQNNRKNGNKYLSWAYVEAANFMIRHNAKAHGFYQKKKAERNGIVAIKALSNKICRASYYIMRDHVPFDEDMLFR

SEQ ID NO: 235674 - protein, 435 aa, unidentified
MEEVEDEPLFCERAAGIDIGKQVVSVTIRVPSETRRGGRQQETREFGTTRRQLLEMADWLRCWQVQRAGMEATSDYWKPVYFLLEREGLDCLLYQASQVKALPGRPKTDKLDSAWLAKVTERGSLAGSFVPPEEIRRLRTHTRYRRRLVQMRTAQKERCEKLLEDAHLKLSSVISDIHGVSGRDMLRAIAAGERNPRVLAEMARGVMRGKIRRLEEALDCSFFTGEHAFILTMMLDSIDQLTAQVAVLDEKIAEMCEPYERQIAQLDAIPGFGVTTAQDLIAEIGTGMSVFPTAGHLASWARQAPRVAESAGKRKGKNATGRGNPYIGGALGEASVSVGRTQTFLGAKYRRLNTHMPKKKAQVAIMRTQLVIAHALLSDPAAEYQDLGPDYYERRADARRRARGHARALERLGYKVTLQAPDPETGEYLPIATAS

SEQ ID NO: 235675 - protein, 350 aa, unidentified
MLIIGCDYHPSFQQIAFVDTETGELGERRLVHREEAAQFYGKLREQSVAVRVGMEASGHARWFERMLGEMQFELWIGNAAEIRTKRVRKQKTDRQDAQLLLRLMMEDRFPRIWVADAANRDLRQLLWHRHRLVQMRTRVMNQLHVIALNEGLRRKKALWRAAGRQELESFALAPWASRRRQDLLDLLDQLTPKILDLTRTLEEEVEKRPVTRRLTTHPGVGPLTALAYELVIGTPERFHCGKQIASYVGLVPAEESSGDRRRLGHISKQGNVLLRFLLVEAAQVTVRSQAEWRSKFFHLAMRRGRKIAKVAMARKLAVHLYWMWRKGWDYGQLQTLGSHAGEPGHRDGVQ

SEQ ID NO: 235676 - protein, 345 aa, unidentified
MKEITTIGLDLAKQVFQVHGADARGHAVLRRKLRRSQVLPYFAQLPPCVVGMEACAGAHYWARQIERLGHAARLIPPQYVKPYVKTHKTDMADAEAICEAVQRPGMRFVPIKNAEQQAILAVHRARESLVRARTATANHIRGLLSEYGIVLPQGMRYLAKVREAMINHELPGVFCELIDLQLEHLREIDGRIDLLEKQLALWYRGNEACQRLRTIPGVGLLTATAIVASVGSARHFSSGRHLASWVGLVPRQHSTGGKARLMGMSKRGDGYLRRLLIHGARAVLRHAQKQPEAERLWHVRLMLRRHKNVAAVALANKNARTIWALLTSDAVFDPLRRVLRPAPAV

SEQ ID NO: 235677 - protein, 382 aa, unidentified
MGRRRGRIASGAFDVVDGARSRHRSAIEWFVGANHMRGAVHMQITTIGLDIAKNVFQVHGIDAAEKVVVRKQLRRAQVMKFFAALPRCLVGMEACATAHYWARELTRLGHQVRLMPAKDVKAYVKRNKNDAADAAAICEAVRRPTMRFVEVKSAEQQGRLMQHRTRDLLMRQRTQTINALRAHLAELGIVAAQGREGLKQLLEIIADKTDERLPIDARASLIVLAAQLQALQTMIGVIERRIIAQHRANEASKRVATIPGIGFLGASAITATVTDASAFRSGRDFAAWIGLVPRQDSTGGKQKLGPISKQGDRYLRRILIVGAHAVLRLAKKNPQNYPWLAQLLARRPFKVVAVALANKMARIAWVLLARGGTYRTPQLAAA

SEQ ID NO: 235678 - protein, 343 aa, unidentified
MIYIGMDVSSKEFFIHAIDQRQQKIFEGKISPSCAGLRKLVKDLGVGPKLFVFEAGNQMKWIALMLMKQEGVRIHVVHPNEIKWINQSSGKTDKVDARKMAQLARGNLLPRQVHVVEGKARQLRELVSARGQLQSKRVALINTVRGYMKQEGVGLPEKFFQRSDWKSALGEKSLGDTQKLIVRSFMDGIDAMERSEGEITEKMTEIRDSRCELLETIPAIGKIASRVLVGALDDANRFDNKKCVANYGGLAPTIYQSGDTTNLGRINRDGRREVRKVLLQCAHTIQRMVSHDAAPVREFFERIEKRRGKKRAVVATARKLLTIAYGVLKSGVPYDPMRLRAFA

SEQ ID NO: 235679 - protein, 426 aa, unidentified
MKSNTQNAKITAITEKTLVVGIDVGSETHFARAFSWRGYEFSRKPFEFSNTEEGFETFRTWIEELKEKKGMDKVIPGMEPTGHYWFNLGKFLQDNGMRPVHVNPHHVKKSKEMDDNDPSKNDRKDPKVIAGLVNEGRYFYPYIPDGIYAEIRALSGLQVLAQSEIIRLKNRIARWFSIYFPNYKDVYGNVGAVSGLMVLKVAPLPEDIVKLGVDGVNRIWRDAKVRGVGMKRAKTLVTAAEHSVGIREAQEAARIEFQILLSDLELQTKREAELMEMIREKIAEVPYVDKLLEIRGVGLKTVVGFVAEVGDIRRFDDPKQLQKLAGYAIVKNQSGKHKGESHISYRGRKRLRYVLYEAAVSVVGHSPEFRSIHQYYTTRDKNPLKKMQSMIAVACKLIRIFYMILQTGATYDAAKMMGDIRRPAAA

SEQ ID NO: 235680 - protein, 417 aa, unidentified
MKKNSNPVKKCEPSTKRMKVRASERRDAREVMAELVAQLTKQLDAESSPVAEPEKGMRGAECPNLDRLTVGVDLGDQWSNYCILGLAGETLAEGQFRTRRQETSEFFQDLATSRVVVEVGTHSAWVREVIAGFGHEVLVANPRLMEGSKRRRRKNDRIDANKLARLGRTDPKSLHPIQHRSTEVREDLLVLRARDALVASRTELINTVRALVKTMGARLSSCSSEAFAKKAELDIPNELRETLQPLLRLIATLNDEIKSYDQRIGQLASEKYMHTQLLRQVTGVGPITALAYVLTLETPLRFARSRDVGPYLGLVPKQEDSGDSQPQLGISKAGDRMLRKLLVGSAQYILGPFGPDTDLRRFGMRLCERGGKNAKKRAAVAVARKLAVLLHRLWVSGEVYEPLGHGVPSSPARSAAA

SEQ ID NO: 235681 - protein, 341 aa, unidentified
MNVAGALYGGLDLHGDNVFCSLLNDAREVVFERRLPNDLATIREALEPFRKRVRTLAVESTYNWYWLVDGLRSLHYDTRLANPARMQENIGLKVANDKTDARFLARQLVNGILPEGYIYPAEMRGVRDLLRRRMRLVHTRTGEWLSLEGLVARHTGQDLTVKELETAKIGELLAGHPEAILMAQASFRHIAFLDREIKELEKSVMAALPDDTAYKRLMTVPGIGPVLARTILLETGPIGRFREAGNYASYCRAVRSEHTSNNRKKGKGNDKCGNKYLAWAFVEAANFAVRYSPELRAWFQRKQARSGKRVVAVKALACKLAKACFFMLRDGTEFDVKKLVG

SEQ ID NO: 235682 - protein, 409 aa, unidentified
MKRYYIGVDWGDRLHQVYVGDEEGRKVRDIKVPESVEGLAEMGRWLDEQRAEGVELWAAIEKPAGRIVDFLLDHGVEVYPVNPKAVDRVRDRYRMSGSKSDAFDAYVLAEFLRTDQAHLKALQPSSEKAQELKMLCRDQRRVGRHKARLLNQLTITLKEYYARPLDAFGDLDTELALDFLTRYPTPAHLSALKRKEFNRFATQEHHLSKQRCEELWEKLSPAQLKVPEHVVRAKAQLVEVLIDQLRAAIKAVKSYNHKVESFFASSLAAPIAKTLPGGNSGTLVAAIWAELGDGAGRWESFRHLQAEAGVVPVTKASGKSRVVHFRFACNKHLRYLLYWFSFVSLNHSEWAKIYYRQQRAQGHNHPQALRALGAKWLKIIFVMWRDHKAYDEKLHLANIALQKMRQAAA

SEQ ID NO: 235683 - protein, 394 aa, unidentified
MAFKIFRKNCCGLDVHKTWIYACMGITDTNGRTEYKQARFSSFTKGLQKLADWLAKYDCNDVCMESTGKFWIPVFNILEKTCWVTLAYPKYTKPQKGNKTDHKDAKWICDLYMCDMVNPSFIPPPDIRQLRDLMRYRSKLTNIMTSEKNRALNCLTVSYLKLDDVFSDVFGKSSRSIIRYILEHPGETFQVAPFIDRRCKHPVERIQAVVDGAISHQQAVKLRECLQHLDELKVHKTNVEKEILCLVQQYPYQLELLQTVPGFSGNIMTAIALISEIGADMSVFPSAKHLVSWAGCCPRNDQSSKKVKSTRISRAGVYLKPLLVQVAIQPFTANADKLSAAGALEIRCQICDGRFLSMWAALFIFLGCPLPPCPKNLHVHNGRIVILASVAWIF

SEQ ID NO: 235684 - protein, 402 aa, unidentified
MNAVGIDVSKGKSMVAIMRPFGEIVSAPFEIKHTASGINSLVELINSVEGESRIVMEHTGRYYEVLAHQLSEANLFVSAINPKLIKDFDNDSLRKVKSDKADAVKIARYTLDKWQNLKQYNVMDELRNQLKTMNRQFGFYIKHKTAMKNNLIGILDQTYPGVNTYFDSPARSDGSQKWVDFASTYWHVDCVRKMSLNSFIDHYQNWCKRKKYNFSQSKAEEIYGKAKELVPVLSKDAITKLIIKQAVDQLNSASTTVESLRTLMNETASKLPEYPVVMAMKGVGTSLGPQLIAEIGDVSRFTHKSAITAFAGVDPGVNESGTYEQKSVPTSKRGSADLRKTLFQVMDVLIKTHPQDDPVYQFLDKKRAQGKPYYVYMTAGANKFLRIYYGRVKEYLSSLPES

SEQ ID NO: 235685 - protein, 470 aa, unidentified
MSCRTGRKGALVRMIIGIDVACRAAHQASCADAGGTLLFTGHRFLTEATELERLWSKLPEGADEVVVVMEPTRNAWVALAAWFRRKGARVVLVPPERSADLRAYYSKHAKTDRLDSRVLARLPLLHPEGLHAEEGLGPGDPLKRAVKLRCSLVTRRSANMRRIDSLLEIMGPAWTHALGSDLGVTALEFLTRYAEPAAVKRLGRARLTRFLHVCSHGRWGEAQAEALMDAADATLLLWGDDEPDFAALSADVALEARLALDLTREIKDLSARIAVMYEAADPAGIVLSAPGVAITLAAQILGRLGDVGRFDSLAGVRSFSGLVPHHKLSGTGGSTGGPTKAGDSCLRDALYLAADHARRQDPQLAARYWRLMVKEGKHHTSALCSVAAVLLTRIASCLRDGVPYVMRDVNGEVITPEEGPAICARHYTVPAKERAARRTVSRNKIVKGRDEAATSGVAKRSKAAPVPVSA

SEQ ID NO: 235686 - protein, 351 aa, unidentified
MNKITTVGIDLAKAVFQLHGVDLAGKVVWRREVRRAQLMKFVAQLEPCLIGIEACGGANYWARRFAEFGHQVKMMSPQFVKPYRKSDKNDRNDAEAICEAVTRPSMRFVAVKSVEQQEMLTMHRVREGLMKERVALINRIRGSLSEYGIVIAKDVSNLRRELPGILEDAENELTAVARQLFSELYEDLSAREQRIRQLEHSIRALGSQHDVVRRLQTVPGIGYLSATALYGTVGDAKHYRNGRQLAAWMGLVPRQSSSGGKQRLLGITKRGDKYLRKLLVHGARSITTRAERTPRPPDRWLNELRERRGKPRSYVAQANKTARIAWAIMAKGEVYRAPTTAALEASAAVAA

SEQ ID NO: 235687 - protein, 372 aa, unidentified
MDEDRAVCVGLDTHKAKITVAVAEPGRSGEVRFWGEITNEPKAVRQLMERLGTKHGSLRVCYEAGPCGYGLQRQIVTFGHDCTVVAPSLVPVRAGNRVKTNRRDAVTLARLHRAGELTAIWVPDPTHEAMRDLIRARTAAMEAVRRTRQQLQGFLLRHGRLFTGRKTWSPAYRRWLAGLRFDHPAQQIVLQEQIDAIAETERRRDRLAEQIRTLASCWSMAPVVAALQAIRGIAFLSAVVLAAEVGDFRRFAKPSQLMAWLGLVPSEHSSGPKVQRGGITKAGNGRARRVLIEGAWSYRFPARVTCELQARLEGLPDTVRTIAWKAQLRLCARYRRLVVSGKNAKLVTAAIAREMAAFAWAIACQVQPERAA

SEQ ID NO: 235688 - protein, 338 aa, unidentified
MTTIRVIGIDLGKNTFHLIGHDYSGREVFRKKLNRQKLLQLLSVHEPVIVAMEACGGAHWLARRCESYGHQVKLIPAQYVKPYVKTNKNDFIDADAIAEASMRPNMRFVSPKSELAQVCAVVRKIRAGYLKERTACMNRIGSILLEFGISFPRGHHNMKNLFQYLADNKEPVPPMLILELREQLDHYNQLNTWVKEQEKKLEHLLKDDELLTLLQSVPGIGPMTASCCLSTVGNPTDFANGRNFAAWIGLTPHQYSTGGKSRMLGISKRGNKELRELFVHAARAVIWRDGTAERYFGSWLIDLKRRKPFNVALVALANKLARIAWSVMVTHKVFEIRV

SEQ ID NO: 235689 - protein, 338 aa, unidentified
MQITTIGLDLAKSIFHVHGVDAHGCERIRKKLRRGELLKFFAKLPPCMVGMEACAGAHHWARQITALGHEVKLMPPAYVKPYVRRQKNDMADAAAICEAVSRPSMRYVPIKSASQQATLLAHRGRSLLIRQRTSLINAIRAHCLEFGLVAARGPANIAALIATIQDDRNPLLPQEARPALLILVEQLHFLNQRIAAMEKEATATRRLDDRVKRLMSIPGIGIITATAIAATVPDAKAFRSGREFAAWIGLVPRQHSSGGKERLGGHIKMGDSYLGRLLISGAQAVIAHSSRRKETAATWLGALIARKPRMVAAVALANKTARIAWVIMARGEHYRAIA

SEQ ID NO: 235690 - protein, 346 aa, unidentified
MTIKTVGLDLAKNVFQLHGVDDSGNVVLRRRTLRRTQVTQLFAQLPPCIIGIESCSSSQYWARKLIGLGHQARLIPPQFVKPYVKSNKNDANDAAAICEATGRPQMRFVPLKTPEQQSILAVHRIRESFVQGEDGLCQSNSGHHGRVWTHAPQGIGHVSRSAGEQVSHAADPVPGMVRDLVLKLLEHLRYLERRIAELELVIKGWHRHNADSQHLAGIPGVGVITATALVATIGDARQFKSGRHLAAWLGIVPRQHSSGGKERLLGISKRGDVYLRTLLIHGARVVLRHLTAPPHKVGIWLIRLGNRAHPNVVATALANRNARVVWALLVHKSSYDPALPGRACSG

SEQ ID NO: 235691 - protein, 341 aa, unidentified
MSDYSYFCGIDLAKNHFSLHAVDQNGKVILHKSVTRSKLLTTIANMPLMRIGVEACGGAHYWARTLNKLGHDARIMAVKYVVPYRTKGKNDLNDAVAICEAVQRPSTRFVPIKSPDQQAILSVHRMREHWVRERTALMNRMRALLSEFGLIIPVGRSSLMKHVPLMLEDAENELPHLARTVIADAYHHLGELNQRIADTEQVFDSFAKVSANVQRVMKVRGIGPQTATAILASIGNGSQFDKSRDFSAWLGLVPKQYSTGGKPRLGRIAKHGDKYLRTLLVHGARTVIANLGDKQDKLSQWCRGVLERRGMNRAIVALAAKNARIIWSLLHNQTEYENYAA

SEQ ID NO: 235692 - protein, 428 aa, unidentified
MSNHKATRRQQFCQIQSEINGSDQYLVVGIDVAKDRHHAFMGTATGKTVLKKLVFENDIDGFRKLLQRCKVARVQNDLAKIVFGLEPTGNYHKPLANHLIESGCHVVLVTGKAVKDNRRLLDGRWDKNDTKDAANVADLVSRGRCLYYDVPCAQIEQLRDLLSLRRRLKKEEHSIKMRIRNTVLAKYFPELDRFYSACESESLAIVRWALDPAKIAGLDVDRFFMMVTRSRRGIAQKLRLQKIHQLAAQSVGCPMGPAAEFEAALLVQKLKQLREQIKQVEDLMQQVAGDFDQYQILLSIPGFGPYVAAVVLAAIADPLRFEGSQQVVKLAGYDLCANRSGKSSDDALPVISKNGNAQLRYALYQAALIASVHNAHFSAYFTQLLRGRQRERGIKTKMRVKLAAKMLIIAWTLMKKKEPFNPDYLHRQ

SEQ ID NO: 235693 - protein, 405 aa, unidentified
MFYVGLDVALKNHRCNLLDQEGEKIAKSLSFDSCQSGFLKLKNYLNGFSSKPENFTIGLEATGSLWENLYEFLVTQGYKVNLLNPLQTSRFREVANKKAKTDDIDALVIAGLLRTQHAAACYIPDEQVQSLRELTRLKNSFQDQLKNAKRQLISILVVTFPELQSLVKDLFSKLILNILKYYPTAKEIALLKPRQILKIARSIQGNNFDEAKAQALIDLAKNSIYSGKAKYARGHATIILASHIQSLSATIEELEKEIQDILKPKDSDRFNSVELLETIPGVGKKTIATLIAELGNISRFSTCKQLIGYLGLFPNISESGKSKNPHPKLSKRGPRLAKKALYMASVACLKHNQELRELYLKKLSQGKAVKQALIVVARKLVSIIFGMLKCNTAYIPNRVFVRAHY

SEQ ID NO: 235694 - protein, 290 aa, unidentified
MHIASIGIDLGKTAFHLVALGERNKILLRKKFSRSQLLAYTANLPSSLVGLEACAGSHFLGTVLREQGHQVQLIPAQFVKPYRKTNKNDFIDAEAIAEAVTKQNMRFVQIKTQEQLDIQAMHRVRDRLVQRRTALINEIRGFLLDRGLTFAARPIYLRKNLPTVIEDAEQNLSSRLRWLLDRLWQEWKQTEINIKAIRDAITRISNEDGLCQRLRQIPGFGPLVSTANVAAIGNGAAFRRGRDFAAWVGVVPRQYSTGGKQKLFGISKRGTSVITSKAANDYHFKTGQRK

SEQ ID NO: 235695 - protein, 405 aa, unidentified
MNAVGIDVSKGKSMIAVMRPMGEVVQRPFEVTHDKESLRFLADFIANAGGDTRIIMEATGRYHEPMVEALHEKGLFVCILNPIVIKQSGAGSVRKVKSDKKDALKIAKYGLDNWNTLREHTPMDTTRQQLKLFSRQYDMHMKTATALQNNLTSLLDKTFPGANKLFDSPVRSDGHQKWVDFVMDFWHCDIINSISQESFVERYKKWCIRRGYKFSQAKAKFVYSASCNRFTTLPKNENTKLLITSAVTGLLAVMKQRAVIKNEVIRLARQLPEYDCVQTMYGVGEITGAQLMAELGDARNFANRGAIVAFAGIDPEVNQSGSQNKESNKSSKRGSPHLRKTLFQVVSTYLKRSPTDEAVYQFLDKKRREGKPYHVYMTAAANKFLRIYYARVKNYLNESDSTLEK

SEQ ID NO: 235696 - protein, 338 aa, unidentified
MELSVIGMDIAKNVFQLHCVDRQTGEIERIKLRRNEVLPYFARRTPALVAMEACGGAHWWARQLQQLGHTVRLLPAKAVRPFVLRNKTDAADARAIWTAVQQPEMKTVAIKTEYQQSILALHRMRAQLLKFRHMQTNAIRGLLLEFGHPVPESYLALRKAFPTVMATLDKQLPGILIETLREQWARVQSLDNEIALIEGRLKRALAETPTCQMISDIPGVGLMTATAAVATMGDPASFKTGREFAAWLGLVPRQTGTGGRIRQLGISKRGDAYLRTLLMHGARAIIARRTYSDWVAGLIARRPYSVVIAAIANKLARTIWAVLATGKRYDGAAFAAAI

SEQ ID NO: 235697 - protein, 353 aa, unidentified
MAHPTAPQLTVGVDTHLDVHVAHAADHLGRRVATVQVPTTPAGYQRLLAWARGLGDPVAWGVEGTGSYGAALARFLAAQGQVVVEVNRPDRAARRRHGKSDPVDAQAAAKAVQAGDATVVPKAGTGQVEMIRSLRVARQTAMRARTQTINALKALLVTAPAELREQLRGMSVTRLVRAAAGQEPGPITSPLAAAMLALRTLARRHQALSAEIDSLTSELDRLVATAAPKLVALFGGFEDSAGALMVAACDNPGRLHSDACFSMLCGSSPIQASSGKTTRHRLNRGGDRQANAALHRIVVVRLCHDQQTKDYMVRRLTEGKTKKEIIRCLKRYVAREVFAVLSQIGQDTPTATA

SEQ ID NO: 235698 - protein, 402 aa, unidentified
MNAVGIDVSKGKSMVAIMRPFGEIVSTPFEIKHTSSDINSLVKLIKSIEGESRIVMEHTGRYYEVLAHQLSEANRFVSAINPKLIKDFDNDSLRKVKTDKADSVKIARYALDKWQNLKQYSVMDELRNQLKTMNRQFGFYMKHKTAMKNNLIGILDQTYPGVNTYFDSPARSDGSQKWVDFASTYWHVDCVRKMSINAFIDHYENWCKRKKYNFSKSKAEEIYGKAKELVPVLPKDDITKLIIKQAVDQLNSASITVESLRTLMNETASKLPEYPVVMAMKGVGTSLGPQLMAEIGDVSRFTHKGAITAFAGVDPGVNESGSYEQKSVPTSKRGSSDLRKTLFQVMDVLIKTHPQDDPVYQFLDKKRAQKKPYYVYMTAGANKFLRIYYGRVKEYLASLPES

SEQ ID NO: 235699 - protein, 344 aa, unidentified
MKVTTLGIDLAKNVFQLHSVNEYGKTVIKKQIRRDQMAEFFANLPACLIGMEACGSAHHWARKLEGFGHTVKLMAPQFVKPYVKTNKNDAADAEAICEAVARPNMRFVPIKNIEQQAVLALHRVRQGFVKARTAQANQIRGLLSEFGLIVPQGIGYIASRVPELIEDAGNELPGSFRMLIERLLDHLRALDHQVVELEAQIVSWHRQSAASSKLAQVPGIGPITASALVASLGDAKNFDGGRQVAAWLGLVPKQHASGGKQKLLGISKRGNTYLRTLLIHGARSVIYRAQNKPESCRWINGVVSRRNKNVAAVALANKNARIVWALLANEREFRPDYTTAKAAT

SEQ ID NO: 235700 - protein, 355 aa, unidentified
MNSEKYIGLDVHQATISVAVLDSTGKLVMESILETKAATILEFLAGLRGTVSVTFEEGTWAAWLYDVLKPHVAKLVVCNPRKNALLKDGNKSDRIDAHKLAELLYLNKLSSVYHGETGVRMLRELARSYLTIVKDLTRVMCRLKAVYRSWAIPCAGRDVYYTRHRDEWLGKINEAGVRRRAERLYQQLDMLQYLRQQARRELLAESRKHAISVKLRQIPSLGPIRSALAVALIQTPHRFRTKRQLWAYSGLALETRTSAEYCYVKGGLRRSKKQISIRGLNKDHNHDLKGLFKGAATRASVLPGPFQDFYQRSLAKGIKPTMARLTLARKIAAITLTLWKKGENFDADKLKSQAA

SEQ ID NO: 235701 - protein, 436 aa, unidentified
MRGCRCSMIMGFTKPIEHFNLQRKKVITMNTLYVGIDVSSKSNVVYLMLPNGDKHSNFSVANSHEGSTLLVKKIYSALTSHSLDTVLIGLEATSIYGYNLVYFLREDATLAPFNRKIHVLNPKQVKKFHDTYNDLPKNDYVDSFVIADCLRFGRINKEVYMGDYRYKALQNLTRARFFAVQNLVKEKQRFMNVLFKKYSTMTQEKVFSDTFSTTALAVYDEFESAEALANMDLHELTDFIIEKGKNRFPDPDAVAKAIQKAARSSYRLPKTVNDSVNQVLSISITSMKALESQIKEFDKAIKALMELLPNVLISIPGIGPVYSAGIMAEIGDINRFDNQASLAKYAGLAWKQHQSGGFEAEVTRLIPSGNRFLKYYLCEAAFSLVRCDKEYSDFYHLKYKEVNRCQHKRALALTARKFVRLVFRLLKDNRLYCPAK

SEQ ID NO: 235702 - protein, 363 aa, unidentified
MNIELYSELSSLEETRCQFNGGNCAIKLGIDVHQDFYVVVMQVGGQNPKPPQRFSKEAFLHWAAKLKQHYGQVYAVYEACGFGFSLQRRLAVLGIECYVVCAQKLDEQNKRVKTDGLDAKTLCLRLDRFLQGNCAALALVRVPSEEEEEARALHRQREQLVKLRKMLEAQGRSLMVNHGSEPVQWWWKRRAFAMLSVSQWMRELLGNSQPILLALQQKIDQLTLQLQNAAIEEPPRGLGKMTSVIIDREIGNWHRFNNRRQIASYTGLCPGEYSSGQKRLQSCVTKHGNPRLRAALVELAWRMVRFQPHYRAVRKWNARLRKAQLTTGAARKKAIVALARQLAIDLWRIRTGRLTPEALGLEI

SEQ ID NO: 235703 - protein, 315 aa, unidentified
MPAKSVFVGIDVAKRKLDIAARPSGDYWTCDYDDAALCDLIKRLRRLRPQLVVMEATGGYEFALVLALADAGLPLYVANPRQVRDFGRGLGILEKTDKVDAKLLAHFAEVVRPQPRPMLSESMRKFRGLVLRRQQLVAMLTAEENRRATAIEELRGSIEAHIRWLAEELSTLEAQLRQLISTDPAWCEQDRILRSAKGVGPVLSWSLIAGLPELGQLDRREIAKLAGTAPLARDSGTFKGRRAIFGGRSAIRAVLYMGALSAARHNVPIRALYQRLIAAGKLKKVALVACMRKLLTILNAMVRDHKPWQPAPCPA

SEQ ID NO: 235704 - protein, 410 aa, unidentified
MNYQNYLFVGVDTHKNQHTAVVINCFHKSLGYTQTVNDPDFFENFLTKLNSLSHNNQTLIFGLEDTQGLGHSLAQLLIEKGYTVKEVNPSITKRERDHSTNPDKSDLVDAEAIANALYANLDKLPTVEKDATYKAISQLNNHRKSLVKRQTQLKNRLHNLIHQQYPQYEQFFSDPFGKTAMAFWEKFPHPAELKHYGQKRLNKFLKDQAKNISNSKAKTILSLINKNSKQDISTETRSSLIPMLISQLRLVMNHIEQINQKLKEAIDKSDYKLTTMPGIGFILAAEFIANIRNINRFDSASKLARYAGLAPAEYSSGKSRKQSFKKYGNRDLNHAFYTLALQQIGTTKNGGIKNPVAYNYYRKKLAEGKARKVALTCLQRRLVDIIYAMMRDNSAYKLPEIPKYEVSKAS

SEQ ID NO: 235705 - protein, 349 aa, unidentified
MTTLADRSGRVTVGVDTHADTNVVAVLDAQGRRLGIESFPTTSEGHRRLEAWVLEFGLIDAVGIEGTGSWGVGIFRHLAGQGHRVVEVDRPNRQTRYRHGKSDPIDAEAAARAVLAGTATGTPKARTGLVEAIRVLRVARRSAVKQRRQAIQQLRDLVSTAPDALRERLGDLTAAQLVTTCAGFRPGDLTDVIEATKFALRSIARRHQHLSAEISELDDQLEPLVRAAAPPSLLARRGVGIDVAGQLLVTAGDNPERLRSAAAFAHLCGAAPIPVASGRSSTYRLNRGGDRQANSALYRIAICRLRWDPDTRAYVERRMKEGKTKKGALRCLKDYIAREIYNDLRQLTP

SEQ ID NO: 235706 - protein, 348 aa, unidentified
MLIIGCDYHPGFQQIAFVDTETGEADERRLTHREEAEQFYRTLKTGKVRIGMEASGHARWFERLLIELQFELWIGDAAEIRTKRVRKQKTDRQDAQLLLKLLMEDRFPRIWVPDAENRDLRQLLWHRHRLVQMRTRVMNQLHVVALNEGVRRKKALWRPAGRSELESLVLAPWALRRRRDLLDLFDQLTPKIHNLTRALEEEVEKRPIARRLMTHPGVGVLTALAFELVIGTPARFGCGKQIASYVGLVPTEESSGDRRRLGHISKQGNALLRFLLVEAAQVTVRSQPHWHSKFFHLAMRRGRKIAKVAMARKLAVHLYWMWRQDCDYGQFEKLGSHAGEPVHRHGAQ

SEQ ID NO: 235707 - protein, 402 aa, unidentified
MSSSVALAPAAAVVAVDVGKTMAAVLVTDAVRRRLLGPLEFPMTAVGLGRVITQAQAVLSGTPIRVGVEAAGHYHRPLLSRSVWPGWEVVELNPAHVSEQRRVMGRRRVKTDALDLEAMTELLLAGRGVPVGEPSAVIIELTGWVGLRQRRVATRVATKNQLLSQLDCCFPGLTLVLPNVLGTRVGRLIAQDFADPHPLACLGASRFIRFAAVRGLQVRRPVAERLVAAARQALPSPGAATARQILAADLSLLASLDEQVQVAEATIATLLPQTPFAPLLTVPGWAAVRASNYAAAVGDLDRWPGAPQLYRAAGLSPIQYESAGRRRDSSISREGSVSLRRALIDLGIGLWHSDPAAQRYGKQLRARGKHGGVIGCAMAHRANKIAFALVRDQAGYDPTRWA

SEQ ID NO: 235708 - protein, 343 aa, unidentified
MQAVTTIGLDIAKSIFQIHGVDAAGNVIVRRKLKRRYVLPFFQRLSPCLIGIEACASSHHWSRELQALGHTVRLMPPAYVKPYVKRQKNDAADAEAICEAVTRSNMRFVETKTPEQQSCLMLHRTRHLFIRQQTAVINSIRAYLAEFGIVARVGRNGVEDLLDIIADPSDGRVPELARACLTALGAQLRMLKTQILRFDHHIMAWHRSSEMSKRLDEIPGVGPALATALVGSVADPGAFRSARHFSAWIGLVPKQHSSGGKDKLGSISKQGDRYLRSLFTTGALAVIRYAKIHGTKHRPWLTALLARRPTKVAAIALANKIARMAWAMMIKGERYKEPAALAA

SEQ ID NO: 235709 - protein, 375 aa, unidentified
MDEIARAQIARVGVDLAKQVIQVHAVDTSGRRVVARAFKRDQFFAWCTQLPTGCVVAMEACSSAHHWARKLSAQGLNPRLIAAHFVTPYRMEGKGGKNDATDAAAICEAASRPSMRFVPVKTCGQQGVMSLHRVREGLKEERTACINQIRGVLTEFGLVFGKSPKVLRAVLADVIEDASNELSTTARLVIQRAFEHWRGLDEHLRWCDRQVGQHVRASPAAKRAAKVIGIGELGASALTAGVGDFTQFKSGHQFGAWLGVVPRQASSGGTIRLGRITKRGDDYLRTLLIQGAKAAVMSAHKRDDPISRWLVQLTARVGWQKACVAMANKNARILWAVMTREDGFDSKHVSVKPQAKQQDRHPVVDPPSISAACVA

SEQ ID NO: 235710 - protein, 370 aa, unidentified
MRTSQKITGIVTTIGIDIGKNTFHLVGFDQRGAIILQQKVSRSQLERRVANIPRCLIGMEACSGSHHIGRQLAEIGHDVRLIPAQYVKPFLKGHKNDYRDAEAIAEAVQRPTMHFVTIKTPEQMDLLALHRVRSRLVGRRTGVINQIRGFLIERGITVRQGPMPLRKALSEILSSDTGALSPRMVGLIADLAQDWRRLDERIAAVSAEIEALAEQDDSCQRLMTVPGVGPIISSAVVAAIGNGTGFKQGRDFGAWLGLVPKQESTGDRTILGKISKRGNKYLRTLFVQAAHVVLERRPSAAMRGLWPWAEQASKRLHRNMLAIALANKLARIAWAVLARGGTYQPATPLRHHHSPAGASERRWLRGDGFT

SEQ ID NO: 235711 - protein, 352 aa, unidentified
MKITTIGVDLAKNVFQVHGVDARGKAGLKKQLKRAQVLPFFANLAPGLIGMEACAGAHYWARKLEGLGHTVKLMPPQYVKPYVKSNKNDAADAEAICEAVERPNMRFVPIKSASQQAILAVHRARQAMVKARTAQANQIRGLLGEFGIVIPVGIASIGRRLPDILEDGDNELPGSFRELLSRLQDNLEWLQRQVDELQGQIARWHHDSEASQRLAQIPGIGVLGASALVASVGDATCFERGRQMSAWLGMVPKQASSGGKTTLLGMSKRGDCYVRTLLIHGARSVVAQAVRQPARADAWLRALLARRPKNVVAVALANKNARIAWALLRHARGYDRQFTTAASKVSAAVAVQ

SEQ ID NO: 235712 - protein, 353 aa, unidentified
MPSKTDTAIARTIGIDTGKNTLHMIGLDEKGAIVLREKVSRTRIAARFVNVPPCLVGIEAGMASHHIARELVALGHEVKQVPPGYSKPFRQGHKNDFRDAHAVAEAVERPSTRCVPIKTDEQLDLQALHRVRSRLISNRTAVTNQIRGFLLEHGIPVRQGHHFLRRQLPQLLGTRTDVLSPRMIRVIGDLMSDWNYLDERIERVTDEIESLARADEGCQQLITVPGIGPIISSAMVAAIGTGAAFCKGRDFAAWLGLVPKQMSTGDRTILGRITRRGNRYLRTLFIQGARAILLRPTGWAKHSFGSWLAAAARRMHRNVLAVALANKLARIAWTVLAQARCYEARVEPRVEPA

SEQ ID NO: 235713 - protein, 364 aa, unidentified
MNKCHLNTELSSLEGTRSEFNWSKASIKLGIDVHQDFYVVVKQEEGSNPKPAQRFRKEAFVHWAAKLKSQGGEIHAVYEACGFGFGLQRQLSALGIQCHVVCPQKLDERNKRVKTDGLDAKALCLKLDRFVLGNREALALVRVPSEEEEQLRAIHRKREQLVKARKVLEAQGRSLMVNHGIEPVQQWWKRRAFAQLSVPEWMKELLSQSQPILLLLEEKIRALTAQLQGAAEPKQPRGFGGLTSVVIDREVGNWYRFSNRRRVSSYTGLCPGEYSSGNTRVQSCVTKHGNPRLRAALVEAAWRLVRFQPDYRAVKKWRHLLAKGALATGAARKKAIVAVARQLAVDLWRIRTGRVSAAQLGLII

SEQ ID NO: 235714 - protein, 338 aa, unidentified
MSAQAVGIDLGKTTFHLVALDSTGQVVEKKKCSRPQLLRRMSNLSAHVVGMEACAGAHWLAQALTQQGHHVRLLPPQYVRPYVKTNKNDFVDAEAIAEAVQRPTMRFVAIKTEAQLDLQALHRTRQRWMGRRTALINQIRSFLLERGIAVRVGPAWLRKQMPALLANENGTLSGSLLNLLAELWQEWLQLEQRMERANQSLRATAEQDPGCQRLLSIPGIGLLTATALVAAIGNGGTFRKGRDLAAWLGLVPRQHSTGGKTKLLGISKRGNAYLRQLFVHGARAVFFHLKREPHRMGHWLNQLSARKRTSTVIVAMANKLARIAWAVLVRGQPYQATA

SEQ ID NO: 235715 - protein, 312 aa, unidentified
MTSGTVVGIDVCKRSLQVRVYGENKDEVFGNDADGIMRLAEKMKVLKPELIVFEATGGYERRAVRALNEANFAVTIVNPTRVRRFAEGLGILAKTDKIDAYVIAYFASVVRPSVNSRQTPLEEKLAALVERRRQLIVELTAEKNRLSTCPDCVRDSIEEHVDWMEERIERLETEIKVCIGSKPEWQQRAEIIDSVPGVGIVTATTMVAELPELGQLNRQEIASLVGLAPFNKDSGPKKGKRRIFGGRSGIRRTLYMAALSAIRYNPVIRKFYENLLKRGKEKKVALTASMRKLLVIINALVRKGEAWRYSPV

SEQ ID NO: 235716 - protein, 339 aa, unidentified
MNVTTIGIDLAKNVFHVHGADARGRCVFSVQLSRAKLAAFIANLPPCLIGMEACNGAHYWARRFRSMGHEVRLMNPQFVKPYVKSNKNDRNDAEAICEAVGRPSMRFVAVKTPAQQDRQALHRVRERLVGHRTALVNQTRGLLAEYGIVLGRQVAVLRRRLPEILEDGENELTGDSRKLFAELYEELLELEQRIAPLSERITREANDNELCQRLQALDGVGPIIASAVTASVGDARVFRNGRQFAASFGLVPRQYSTGGKTRLGGISKRGDKYVRKLLIQGATVAVYHAARKQTPRAQWIQGLVKRCGKQKAAVAVANKNARIIWALMARGETYRAQAA

SEQ ID NO: 235717 - protein, 362 aa, unidentified
MNRNTGMSAGQIIGTMNGLQVMGLDIAKHVFQLHTVDMGTGEIANVQIKRAKVLEYFVNKPKSLIAIEACGGAHHWARELTALGHSVRLLHTKIVRPFVSGNKTDATDARAIWLAVQQPGVKFVGIKTAAQQATLTLHRQRELLMKMRTMQTNALRGLLYEFGATFAQGRKALFKDVERALEELSTQLPQMVRDSLREQVGRIKEMGDAMLEIEKRLALQLKADPHMQRIAQIPGVGLLTATAAIATMGEASAFKSGREFCAWLGLVPSQTGTGGKVRLGGISKRGDTYVRTLLIHGARSVLSHAKEPSPWLQQIKERRPANVVIVAQAAKMARTIWAVTAKEQSYQRGFQSVRPSAAMQAA

SEQ ID NO: 235718 - protein, 424 aa, unidentified
MNLTQNDRLKQVTSDTLIVGVDVGSQTHFCRAFDWRGFELSRRVFKFSNTGMGFLTFLRWTEELMNKTEMKKVIVGCEPTGCYWLTFQKFLQDHAIQLVTVNPFTVNRSMELDDNSPEKSDLKDPKTIALLVKDGRFSTSYLPSGVYAEIREASVCRDQIMKQHVRLSNQIQGWLQKFFPEYFECYADWDSTSGLMLLREAPLPQDILKIGAGGINQIWRDAKVRAAGIKRAQTLVEAAQNSVGLEAGEAASLEIWVLVNDYILKAEQLKRLDEYLEEKVKEVPNVEKLLAIKGVGMSTVIGFIAEVGDIGRFTDPKQIQKLAGLEIVKKSSGKKKGQPRISKRGRRKLRRTMYESAKALMLWNPAFQDVFLYYRNRTRNPLGGMQAKIAVACKAIRVFYVVLQTGCDFDEEKFRKDIIRPEAA

SEQ ID NO: 235719 - protein, 341 aa, unidentified
MKKNLFFIGLDIAKADFAASIYQTPDQPIVTKEAIPNDRKGFEMLLLWLYDYHIDKKNCRICMEATGVYSQAIAYYLLFQGFPVSVEPPLKVKRAFDPVGHKTDPVDSKQIAEYAYRFQDELTSWKPRDEILEKIRQLLSVREQFTKQKVALDNSLQAYSKQRVQVTLIRKAQKETLNQLKKQIARIDKELANLIKQDPQIFQRANNLDSIPGCGMLLAAHLLVITENFTKIQNSKRLAAFVGIVPYQHQSGSSVSKRAKIRHFGPGPSRKLLRLAAQSVATHNVTFRRYYLRKLDQGKPKPLVLNNIANKLLKIACTIIRSNTRYIKDYRSIHPMYLKSA

SEQ ID NO: 235720 - protein, 389 aa, unidentified
MPSVSERPEAPTAIQTHLAASFVSLELSRSIWLITSLSPGSGEKMSKHSVRAGDVAALLARFSELKRKASERTGESFPIVVIQEAGLDGFWLHRVLQSEGVESHVVDPSSIATSRRRRRAKTDRIDGEALLRALLAYKRGEPRVCAMVKAPTPEEEDRRRLCRERKVLIAERVKHVNRVKGLLFSQGISGYEPLRRDRRQRLDELTTGDGRPLPVHLKTQIRRELDRLELLLDQIKEAEAERDALLAAPQPAAPAPAGRMLLEFKGIGAELAAVLWLEALFRHFDNRRQLASYAGLAPTPWQSGSVDHEQGVSKAGNPRLRTSLIQLAWLWLRHQPQSALTLWFKERVSGNGGHFKKSTIVALARKLLVALWKYVTAGVVIDGAVMKDA

SEQ ID NO: 235721 - protein, 410 aa, unidentified
MDVFLERCAGLDVHQASIVCCVLIGAPGRKPQKLLRSFGTTTRDLETLRAWLAEHGVTHVGMESTGVYWKPVYAVLEGHVDLTVGNAHHIKNVPGRKTDVKDAEWIAQLVRHGLVAKSFVPPPAIRDLREMVRYRRTLIETRTAMRNRVLKLLEGANIKLSGVASDVFGVSGMAMLEALAAGTSSTTEMAGLARGRMRRKHAALEAALEGRMREHQRFLLGMQLRSLGTINQDLEALDARIGTQLEPYQAQHQLLTQIPGVDWVTAASIIAEIGTDMDVFASARRLAAWAGVAPGNYESAGKPKGAGTRRGNVFLKSALFAAASAAVRTKGSYYRDKYNRLRARRGPVRAIMAVAHKLLIAAFHMLSTGEAFRDLGEGYLDQVARKRSTTKLVQRLSNLGYDVMLVPKAA

SEQ ID NO: 235722 - protein, 345 aa, unidentified
MKKNLFFIGLDISEANFVASIYKTPGQPIVTKEAIPNNPEGFDLLLLWLKEHHIDKKNCRICLEATGVYSQAIAYYLLFQGFPVSVEPPLKVKRAFDPVGHKTDPIDSKQIAEYAYRFQDELTSWKPRDEILEKIRQLLSVREQFTKQKVALDNSIQAYSKQRVQVALIRKAQKETLDQLKKQIARIDKELEKLIKQDPEIFQRTNNLDSIPGCGMLLAAHLLVITENFTKIQNSKRLAAFIGIVPYQHQSGSSVSKRAKIRYFGPGPSRKLLRLAAQSVATHNVTFRSYYLRKLDQGKAKPLVLNNIANKLLKIACTIIRNNTRYIKDYRSIHPMYLKNAVKSA

SEQ ID NO: 235723 - protein, 381 aa, unidentified
MVIGVDPHKGSHTAVAIGAAEELLGQVRVRACAAAADGRWRGLGVGLAGADLGGGGRRRPGHLLAQQLIAAGERVLDVQPKLAARVRLLAAGTVNKNDPNDARSVAVAALRSAACPQVRADDHAAVLKVWAKRHRDLSRARNQVACRLHAVLCDLIPGGVSKEITAAQAARILEQAEPCGAARQARGELAVVFLADLRYIDAQRRDTKPKLAAEVRASGTTVTEVFGVGPVVAATVIGDVRDVSRFGGPDCFAAYNGTAPVEVSSGNRVIHRLSLRGNRRLNHAIHMAAVTQIRCLAQPRPRLLRQEIAEGKTSKEALRALKRQVSDAVYQRLKADARRAAGATGPGGHPGNGSVASVAGLHPADRLFGQATPGPAPLALA

SEQ ID NO: 235724 - protein, 416 aa, unidentified
MKKHNNSRKNSELTSKRAKSRGPVQRDTKEVLAELVGKLKEKLDRKKVAARSTGEEHPGGELRPNLDRLTVGVDLGDQGSHYCILGLEGETLAEGQLRTTQEDLATFFQGLNAARVVVEVGTHSAWVQEVISGCGHEVLVANPRLMDGSKRRKRKNDRIDANKLARLGRVDPESLYPIQHRSREVRQDLVMLRARDALVAARTEIINTTRGLVKSMGTRLPKCSSRSFAQKGEEAVAVEMREALLPLVRLAATLSADIKEYDKKIETLGREKYGHTALLRQVKGVGPITALAYVLTLENPQRFAKSRDVGPYLGLVPKQEDSGESQPQLGISKAGDTMVRKLLVGSAHYILGPFGPDTDLRRYGLRLCERGGKNAKKRAAVAVARKLAVLLHRLWVSGEVYEPLHNAMSAPIAAAA

SEQ ID NO: 235725 - protein, 354 aa, unidentified
MQNDRQSSETVILGVDTHLDIHVGAVISQAGKLLGTHIIQTNQAGYLELLDWARSFGSLERAGIEGTGTYGAALTRYLIKNGIYVVEVNRPDRSKRRLEGKSDPLDAENAARTVRSGSSKAIPKMQSGACEAPQIISVARRSAVKARTQAINQLRTLLVSAPQDVCDKLWKSKPHECVTACINSEVSEHSPLRIALCSTLRSLAKRWMALTEELNELDESLDKLTRKYASNLRSQFGVGPQTAATLLAVAGDNPERLKNEAALASLCGVNPLPASSGKTVRHRLNRGGSREANNALWTIALVRMRSDPRTRIYVDRRTGEGLSTKEILRCLKRYIVRDLYPLILSDLAYANRRS

SEQ ID NO: 235726 - protein, 467 aa, unidentified
MAERMQKQKRMSAQVVEDEGYQLRYEVVAGIDVAKDSAVVCVRMAPAEGKKQRRSQLHSVPATVPAITELAALLKEQGVQMASMEATSDYWRIWFAVLEEAGLQVQLVNSSQARNLPGRPKTDKEDARWIARLTEMGMLRPSFVPPPEIRALRVHTRLVFDLTADRTRCWQRLEKLLEDALCKLSSAVSKLAGHVTARAVIEAMIAGERDPGALAALGRGRMSIQRVDALEESLSGMRFGPQHAHAAASLLRQVDLLEQEIRDAEDAATAHLATISAAWGVDAGGATGPEAGHGQDAAVLPAADRLDEIPGMGRQSAMALIAEIGLDMSRFPTPDALVSWAGLTPTARQSGPRKGRGKKGHGNTYAKRVCVLAASAAANTDTFLGERFRRIASRPGGGGRKKAGCAVARSILVIVWHLLNDPAARYRDLGSDWHARHTDRSRKARNARRQLEALGFDVVITLREDAA

SEQ ID NO: 235727 - protein, 412 aa, unidentified
MSLPVGDAVCYVGIDWAAASHSVCVLDPDGERRAEFTVEHSAAGFAELARRLGRFGEAGDVPAAIERPDGRLVDALLQAGHPVVPVSPNAIKTWRESEVASGAKSDAGDAHVIADYLRCRARRLTPAVPYSVETKALRTVVRTRDDLVDMRVAATNQLSALLDTHWPGAKAIFADVESPIALAFLTRYPTAAHAERLGEKRLAAFCAKHGYSGRRTASQLLTRLRAAPAGTTDATVCEALRDAVLALVRVLTALGGALKDLARSVAATLGEHPDSEIFTSLPRSGQINAAQMLAEWGDARQAYDGPDSVAALAGATPVTKASGKHRAVHFRWACNKRFRLAVTTFADNSRHASPWAAKVYADARARGHDHPHAIRVLARAWIRVIWRCWVDGVPYDPDRHGAASRLTTQEAA

SEQ ID NO: 235728 - protein, 315 aa, unidentified
MNNLPEKTAAVYIGLDIAKATLQLHCQNQQTTLPNNAQGHIRLIKRLRAVPGAHLVCEATGGYERSVVAAFHAANLPVSVVNPAQVRHFALAQGRRAKNDPLDAAVLTAYGHALQPAPTPVPEAVLAELRALVQWRDQLKEQRARLRMQTEHLTLRFALRQQAKLITHLEKQMAGVEAELARILALTPNVQAQVQALIALDGVGWITALSVFAQMPELGRLNRGQTAALAGLAPWTRQSGPWEGQRHIGGGRAGVRHALYMSAVVLARKTETALGKFYARLRLAGKPAKVALAAVMRKLLIQMNQTLKDHALKTT

SEQ ID NO: 235729 - protein, 382 aa, unidentified
MTQTASHRKFTAVPQQLCVALELGWSTWRLAFGSGVGERSWQVTIPARDVAALRQAIAKAKLRLGLPESCRVFSCYEAGRDGFWIHRLLEQLSVHNLVVDSSSIEVDRRARRAKTDRLDAAKLLSMLMRYHGGEEGLWSVVHVPTPRQEDARHLQRQIRTLKKEQTRLINRAKGLLASQGVALKSSRGGVLTSLEDIRIWDGSPLPQGLRLRLESEVRRHSFLHRQLLDLESRRDARIREAGDRAAEITRRLMRLRGIAEVGAEVFAREFSWRRFRNRRQVGSLAGLTPSPYQSGDSCREAGISRAGNRHVRGIAIDLAWIWLRQQPRSQLTRWYNRRFASGSPRLRKIGIIALARKLLIALWRYADFGEIPNGALLKTQNA

SEQ ID NO: 235730 - protein, 365 aa, unidentified
MSGIDLHSNNALCGLMDQSGRRLVHKQLPCDLPSILQLLAPYKERIATVAIESTYNWYWLADGLRDHGYNVVLANPARMKPYDGLKHTDDVSDAYFLTELLRLNILPTGHLYDRKTRPVRDLLRRRLLLVHQRTSLILSFKSLNERTLGQRVALSRVKAMKVEEARALFTEPADQLLSGTEIELMGHLTGAINQIEAHVLSVAGKWSTYQRLQELPGIGKILGLTIALETGDAQRFAGAGNFASYCRCVKSLRTSNGRKKGENNRKCGNTYLAWAFVEAAHFACRYDESCRRFYERKKQQTNPVIATKALACKLAKAAWHVMAQDVPYESERVFGPGKKRDLEKTDLGETRREPAKGSGHPSQQN

SEQ ID NO: 235731 - protein, 340 aa, unidentified
MGEVSTIGLDLAKNVFQVHGADASGAVLFRRKLRRHQVLTFFADQKPCTVAMEACGSAHHWAREIGKLGHAIRLIPPAYVKPFVKRQKNDAADAEAICEAAQRPTMRFVAPKSEQTQAAALVFRARDLLVKQRTQIINALRGHLAEFGLVVAKGPAHVSQLVQAVADPEEPIPEIARPVLQMLVETLHRLDKQIAGLDQEVARRAKENETARRLMTIPGVGPVTAVALAALAPPAETFKRGRDFAAWVGLTPLQHSTGGKQKLGATSKMGERTLRRLLIIGASAVVRWAARNGAPAGSWMARMVARKPPMLVRVALANKMARIVWALMARGGVYQAPAAA

SEQ ID NO: 235732 - protein, 410 aa, unidentified
MGYETKNRRAHVMTRKNTLKSLPTDTEFRVVGLDLAKSDVSVAAIPVDDNTPSLVDRMTYADLLDWAGKISPTLFAMEPCNGYSLLCLQLENLGHEIKVISGSTVSMWINTHLSGQKTDLNDAIALARLAVSDAELTPIRHKSITEIRIQTVQAVRQQLMSQRSKSIVSFKALAQQWGIPCAAGHRNLKKLRESIEAKVDLITRPVANAMLFLLDAVKSLDRQIGQLNQTLQELVMSDERGRLLQSVLGVGTQISARVITVVGNIERFNSPRSLVAYVGVAPRNFITGHKNLTKKKHGNCPDLSHKGQGKISRRGDKLLRSLFIQGAACLYMQFCKDQLPECQLKRWILKQLAMQKPYGKLMVSLAAKLIRIVWAVLTYREKFNIQKAGMTRSMWSEMALETPLNKEVPA

SEQ ID NO: 235733 - protein, 459 aa, unidentified
MNRKRSKPKIDRKMPMVHPNAAAIDVGATMHMAAVRPDRTPEPVRSFGTFTTDLHRLVEWFKECGVETVVMESTSVYWIPIFELLDAHGFTVFLVNARDAKHVPGRKTDVSDAQWLQRLHSYGLLRASFRPKGQISELRAYMRQRERLLEYAASHIQHMQKALIEMNLQLHHVVADITGATGLRIIRTILAGERDPKVLALLRDYRCHSSAETIEKALTGSYRAEHLFALEQALALYDAYHEKASACDARIQAVLKELSIGRGRCSGTELPSPRRSRTDQANALAFDVRAALFALLGKDITKIDGLGPYLSLKLIAECGDDLSAWPSPKHFTSWLCLAPSNKISGGKVLSSRTRRSGSRAAALLRLAAVTVGRTDTALGAFYRRLSARIGKAKAVTATARKIAVLFYNAVRYGMEYVDPGASFYETRYRKRVVDNLHRRAKAFGFVLMPLEAPPSVVVS

SEQ ID NO: 235734 - protein, 381 aa, unidentified
MTTPATRTAYGTTPAGTLWMALELSEKNWKLGFTTGPAQKPRERTVTALAQERVLDEITQAKRRLGLPEMAPVVSCYEAGREGFWLHRFLEAHGITNHVVDSSAIEVSRRQRRAKSDGLDVRKLLSMLMRYEQGERQVWQVVHVPSVEAEDQRHLHRDLETLKRERARTTARIHGLLSSQGLRVTSLTKLPEQLDALRLWDGSPLPSGLRQRVLRVYAHHQFLSEQIAAVEAERRALLQTSTDASIDKIRQLMMLKGIGINGAWLLVIEFFGWRAFTNRRGVGGLAGFTPTPYQSGESAREQGISKSGNRHVRWMTTELAWSWLRYQPDSALSVWFRERFGSGGKRLRRIGIVAVARKLLIALWRFLETGGLPEGAVLKEG

SEQ ID NO: 235735 - protein, 339 aa, unidentified
MKLYVGDDLHGNNNFLAMVDRKGKRMEQKKLPNDLSVILEYLKPHQKEIVGIVVESTFNWYWLVDGLMDAGYKVHLANPSAIQQYSGLKHVDDKHDAFWLAQMLRLEILPEGYIYPKEERPIRDLLRKRRHLVKLRTSLIISLQNIISRNCGVQFQANEMKRLKEDRVSPLLEGNEDLALAGKTSKETIDHLTRQIHKIEGAILHRLKLKESYRYLLTLPGVGKILALTIMLETGPIARFAQVGDYASYCRKVPSRWTSNEKTKGRGNKKNGNKYLAWAFSEAAEFARRYDAQARAYYTRKMRKTNFMVAHSALAHKLARAAYYLMKDQVPFMPEKLFS

SEQ ID NO: 235736 - protein, 399 aa, unidentified
MKDICGIEKTDGIKDLWVGIDLHSNNHVIGIQDSSHHRVFRKKLENDLKMTKDCLERFKDRINAITVESTFNWYWLVDGLMEAGYDVRLAHPAKIRQYNGIKHTDDKDDAFFLAHLLCLGLLPEGFIYPKEERSLRDLNRKCRRFIQERTTHILSLNSLFNRNLSQQLSAYNIKKLSDEQVRKMIAEPNLLACALAHVKTIRYLSAAIADLEELLLSQVTLKPEYQRLLAIPGIGKVLAISIALETGLITRFLTPGDYVSYCRCVGSLRKSNDKIKGHNNRKNGNPYLAWTFMEAADKAKRYCPHAKAFFERKLREGNIFIARKALASKYARACYYILKDHQEYDVRRVFDSAKGTTGATGKNKPKPKTQIKGRASKPARGLDAEPSAPIGIAGATTLS

SEQ ID NO: 235737 - protein, 351 aa, unidentified
MPRFIGLDIHKTVVAGCVVDPHGTVCTRLRFPLTRTTLAAWARQLTAEDAVAVEATTNTWAVIALLQETPARLVVSNPLRTRAIATAKIKTDRVDAEVLAQLLRCDYLPPVWIPDAATLAARRLTTRRSRLVAERTRLKNRLHSVLHQLLLPCPVADLFSRAGLAWLTTVELPAAERAAVDADGRLLAAVEQELTALEQSQVVDAAADPRVRLLLTLPGIDVAVATALLAAIGEISRFPTPARLAAYLGLVPSVRQSAQHCYTGHITKQGASHVRWLLVQAAQHLDRHPGPLGAFVRKLQRRKNRNIAIVAAARKLVTLAWHVLRSGEPYRYAVPRATQEKLAEESSLGKV

SEQ ID NO: 235738 - protein, 317 aa, unidentified
MQTVLNVGVDVAKDTVVVASADQRWPVQQVRNQRSALRAWLKPLPAGSRIGLESTGPYHELLADLAHAHGHTVYLLNPMETRHYAKALGARAKTDRVDAMLLARMIAQEHAGLRAYTPPTAQQRQVDRLMRRRAKIVRLKSALKLTMANLEGCTSEVNAVVRKLDVLLAKLDATMATVAAQSPSHQQAQQRVETIVGVGPLVGMGLTNTLERVPFRNADAFVAFTGLDPRAKDSGQKSGRRRLSKRGPAELRRLLFNAAMSAVKTKVWKPIYDSYRIQGWSSTATLVIIARKIARAAWSIHRYQTTFNPDRLIRGLT

SEQ ID NO: 235739 - protein, 351 aa, unidentified
MRTSQKITGIVTTIGIDIGKNTFHLVGFDQRGAIILQQKVSRSQLERRVANIPRCLIGMEACSGSHHIGRQLAAIGHDVRLIPAQYVKPFLKGHKNDYRDAEAIAEAVQRPTMHFVTIKTPEQMDLLALHRVRSRLVGRRTGVINQIRGFLIERGITVRQGPMPLRKALSEILSSDTGALSPRMVGLIADLAQDWRRLDERIAAVSAEIEALAEQDDSCQRLMTVPGVGPIISSAVVAAIGNGTGFKQGRDFGAWLGLVPKQESTGDRTILGKISKRGNKYLRTLFVQAAHVVLVRRPSAAMRGLWPWVDKASKRLHRNMLAIALANKLARIAWAVLARGGTYQPRITHAA

SEQ ID NO: 235740 - protein, 413 aa, unidentified
MNSYKIAAIDVHKSMLAVVVTDAAVEGELPFQRRKFGALGSDLKALAEWLAAQQVQEVVMESTAQYWKPVWRRLEGQCRLHLAQAHSNRARKGRKDDFRDAERLARRHLAGELILSFVPDPEQRLWRTLTRSKHQLTRDRVRLHNQMEALLEDARIKLAACVTDLLGVSSRRMMEQLAQGETDPARLATLADPMLRATPEELSDALSAAPEMSTLHRQILRLFLERLELMERQMAVLDRNIAAALQLHQDAVVRLAAVPGLGADSAQQIIAEVGPQAATFSSPQELASWVGVCPGREESAEVSKSDESPKGNQTMRRVLNQAANSARKTKGSIFQSLYQRWVSRLGHNKTIWAIAHRLCRVVWIILHRGEPYIEFGNSRDPRSAAKRTARLIHKLRSLGYQVTPPTPTPRVAG

SEQ ID NO: 235741 - protein, 387 aa, unidentified
MEVRVENTPSAAVNNDPVQCFVAIELSKSSWVVGFQTPLSKQTSRYQVEACNAKALLELIERVRTRVAREVGLPVAVMSCYEAGYDGFWLHRVLEAHGIHNHVLDPASLQVNRRARRPKTDRIDADRMVRALIRYLRGEPEACSVVRVPSPEQEDARRLHRERGRLIAERVGHVNRIKGLCATQGIYNYEPLRRDRLERLDKLRTGDGRSLSARIKAEIVRGIKRLEVVLEMISTLEAERDAILKDKKSTHLNAEKIKMLAKLKAIGAEFATVLVGEVFYREFANRRQLGSYVGLASSPFCSGSLDRDQGISKAGNSKARATIIELAWTWLRYQPGSALSRWFCERVGNLKGRPRRIAIVAMARKLLVALWRYLQTGVIPAGAELKA

SEQ ID NO: 235742 - protein, 351 aa, unidentified
MITIGIDPHKRTHTAVAVSGVGQLLDELTIAAEDAGQRELLDWAHAFEGPEKIRFALEDCRHVNGRLERFLLQSGEQVLRVPPKLMAGARKSARTRGKSDPIDALAIARAALREEAELHPASHDPEARELKLLVDHRDTLVGERTASACRLRWQLHDLEPDLEPLARSLDQASTRRSLSQRLARREQSAQVRICRDLLARIGDLTRRERQLASEIGERVRDYAPELLEVPGVARLSAGKLIGEIAGIERFKSDAQLAHFAGCAPIPASSGTTQRWRFDRHGNRQLNAAFYRIALTQARVHPGARAYLARKRAEGKSSAEALRCLKRLLVRVVWRTLRVSGEQRIALSQSDF

SEQ ID NO: 235743 - protein, 392 aa, unidentified
MVVSVGIDVSKDKHDCFILSSEGEVLADVFTIPNTMDGFNLLLQKIRECTTPQGKIKVGLEATGHYSYNLLGFLLDNGLATYVLNPLRTNLYRKSLSLRKTKTDRVDARTIAAMLLSDVGLKPYTDTAYHNGELKSLTRYRFDKVKERAKLKSSISRLVCILFPELEKLVPTLHMASVYALLEEFPGAKQIAAAHLTRLKALLETTSKGRYKRDMALEIRDAARISIGSWMPAKSLELQHTIRLIRELNAEITEIEQQIQSIMDELHSPITTIPGLGFRMAAMILAEVGDFTRFDSPDKLLAYAGMSPSTYQSGQLKNCYPHMEKRGSRYLRYALYNATKYVCHWDPTFADYLAKKRAEGKHYNVALSHAAKKLVRLIFAMEKSRATYRLAA

SEQ ID NO: 235744 - protein, 412 aa, unidentified
MLKIVYPICCGMDVHKSFIVACIASTNAQGVTTYKSKRFSTFTSDLRRCAAWLTEHNCKDVCMESTGKYWIPIYNILESTCKIVLAHPKYVKAIRGKKTDKKDAKWIADIFKHDLVSGSFIPPADIRQLRDLVRYRWKLTSLTTGEKNRAQNCLTVSNIKLDDVFSDVFGKAATAITTRLLENTDEKITDISEFLTKGIKATNEQILAAVDGEICAQQAEKMRIIRSHMDTLSLCKAELESLILSTAEKYLPQLDLITTVPGIQSFAAIGIFSEIGADMSVFPTSKHLCSWDGLIPQNNESAGKKKTTRISRAGAYIKPLLVQCALCAIRKKSNPEIRKRYLNLKKRRGHKKAIIAIARMLLTAIFNILKKIEPYNSDLYTKSDGPPVHREVSLEEAIFILQRQGYIVTAPT

SEQ ID NO: 235745 - protein, 341 aa, unidentified
MENKYILGVVVGKIRLEFCLLFGDKVLKQVEVMNETTAIRQAFSLLLNEFHISNDQLLICAEHAGQYNYPLIYTCESGLYKLWLENPGRMKYYCSGLQPAKNYKLNCKQIAVYASRNADKIAMCQPPDSEVEHLKQAYNELNMLEGDSAKLQSQLFEMKNYMSEEVFDVNAKRLVDLIKGLEAAIITVENEIKCIFAGNSHLARQMELLISIEAIGRDVAIKMIVDTDAFTRFENSRQFCSHASMAPVHKDLKAVQHLQPNGVVTRDKSIRLLLNQAVEFILKKDDSELKNYYIRKVNEGKDEKVVINAIRVKLVARMFAVIKNNQVYQPVIQEELQCHHQ

SEQ ID NO: 235746 - protein, 414 aa, unidentified
MAGIINKVCGLDVHKKFLIATILSIFGEKKQLRFERTEKGILDLKNWVISEKCDVVACESTSDFWVPIYESLINHLTVIVGNARDMKAFTHKKTDKIDSEFIAQLALNNMIKPSRVFSKNQREFRSYIRLRHKLVQKRTDIKNVAHAILASEMFHLNDVLTDIFGKNGIIILSGISSGKNVDQIIESLSPNVRKKSDQIREVLDREMSLSAAIRIQTCLSLINNIDEQINILEAEIFRYAYTNHNREMKLLMSSPGVGEISAATIIAEVGDFNDFSSGAKLASWLGLVPNVYQSADKYHNGRITKRGSKVARWILIQVAQAAARKNGSMLKEFFERKKKTIGHSKAIVALARKIVTILWHLITNNEMYEDEMGYKKGEVQKRKIVESEEFSVDERISIISEIFAIVKKEETDST

SEQ ID NO: 235747 - protein, 387 aa, unidentified
MIYVGIDIAKLNHFASALSSDGEILLQPFSFSNSYDGFCKLQSKLEPFGTDNLVIALESTAHYGNNLVEYLVLHGFNVCILNPIQTSSFRKNNIRKTKTDKLDTFLIAKTLMANPTRFVTKRDIDILHLRNLGRFRQNLIKKRTRAKIQFTSYVDQAFPELQYFFKSGLHIHTCYALLKEAPTPEAIASMHLTHLTHLLGTASHGRFTRNMAVNLRILAQKSVGSNDSSISIQITQTIAQIELLDSQVDTVESQMKAIMRSLDSVIMTVPGIDYVNGGMILGEIGDISRFPNPAKLLAFAGLDPAVYQSGNFQARRTRMSKRGSRVLRYALMNAAHNVVKNNQTFKTYYDKKMADGRQHYNALGHCAGKLVRILYKMLTENMVFQLN

SEQ ID NO: 235748 - protein, 428 aa, unidentified
MKNRNVQKLEAITPGTLVVGVDIAKETQWARFVDYRGLELRKVLKFKNHKNGFDSILASIEAICQNRRLDNIIIGMEPTGHYWKPLANYLLKNKVNVVMVNPYHTKRAKELDDNSQTKSDKKDALTIARLVRDGRYYEVYMPQDIFAELRVLSNSRISLMKRSNALKNTITAVMDEYFPEIVTVFKKPLKGKAAMQILKSCPFPSLILELGIEGVLAEIKKAVKKTVGRKKAQQLVETAKNSVGVGYGLVSAKLKLGLMIEELELLIKQLEQLEKAMEKALADTGYGEIILGIPGIGVVTAASFLGEIGDPRRFDHPRQICKMAGYNLIEDSSGKNKSGTKISKRGRKNLRSVLYQMARTMVAVNAEMKELYQYLKTRPNNPLKKKQALVVISKKIVTIIYSLVKKQTGYQAELALGEFRKNQIKQVA

SEQ ID NO: 235749 - protein, 387 aa, unidentified
MQKPHDNSKASPAAFMQDNTLVAVIELSLSSWLVAGLIPGVSREPLKKLEPNPEDLLKLLHGWRDEAIKAGRLITRIAVAYETGRDSFWLARWLRERGIDAHVIHANSVAVSREHRRAKTDRLDTAMLKRGFLGWLRGERGHCTMAIVPTMEEEDAKRPHREREGLVHEQTRVVNRMKSALIQFGVRNFNPKLRKASVKLETVRTPEGKSLPPNTIAALRRDMERLKIIKQQIKAIEQARLQQIEQKPEALANRMIYLLVRIYGFGLETADLLVHELLSRTLRDRKAVARYAGLTGSPDESGSKRREKGLSRSGNARVRKIMIQLAWRMVKFQPDSALVQWFKQRTENAKRSRKPMIVALARKLIIALWHYANDGVIPEGFRLHSAA

SEQ ID NO: 235750 - protein, 298 aa, unidentified
MCFLNGTVIQNIQIDNDLKSLRCFVKRASSFSNDLALDVDPADPIFIMEFTGIYNNLLLEVLHNQSKTCYVVNAVEIKNSLGLTRGKNDIVDAQRIAEYAYRFHDKLSIWAPLEANILKLNGLRTHRSQLIKVRKQLTQGAQDNKKFLGSDVFKVIDKSNSKIEKILNEQIDAVDEKILETIKADLKLKTNYDLLTSVPGIGPITASALICVTKNFTRFDSAKKLSCYCGVVPFEKSSGNKIGKPHLSHAANKDLKALLHLGAGSILNSKHFLGQYYRRLVADGKHKSLARNNLKIKC

SEQ ID NO: 235751 - protein, 439 aa, unidentified
MICFGLDVSKGYTNIGIINEQGIQLKETFLIDDTKSGHEAFKETIKWAVKLNGDGVIKIGMESSGGYELNFLNLCFNMQDEYDLLVYRLNPLSVKKFIETDLHRAKNDDTNAIDIAKYILKKDIRPTQKSGKEIQGLKDVVKAIERDVKESTKLRNIVQMYIQEYFPELLKYCGYGINDWVLKLLSKYPTAFDIKLTNTVNLTEIPYLMELKAKDIIELANKSIAAEAGFLTKISIKQTCKRILQIDESASEMKREMININKKLSLNRLSTIYGIGDYTAGVLTAFTVNIDNFSDFKKYTAFFGLDPRANDSGDEIKRRRITKKGNHIVRKVLYTSVLTCISKEGHPVKKMYDRLRNRGVPHYSAATACMRKLLSIVFGILKSGKDFDINYEDSKKTEEQSNKSIVQKKLRLKKCESLNLDAPISIKERKRRIKIAAMS

SEQ ID NO: 235752 - protein, 437 aa, unidentified
MISPSPCLASDAAVFAAFVGLDWADQKHDVMLYDQRGGEAERSQLTHTPEAIDEWACGLRQRFGGRPIAVCFEQSPTTAARRCPAIAYALLKYDFLMLFPLPPSRLAAYRESFSNSGAKDDPTDAALLLDYVLRHRDQVRVWQPDTPATRELQLLAEARRDAVDQRTRFSNQLTAVLKRYFPQAVALVGCDVDTLLACDFLSRWPTLAAVQAAAPSTLRKFYYAHRCRQEERIAERLQLAQVAVPLTNDAALIQAGTLQVQYLVGQLRAILRAIQKFETRLKQLMEEHPDAALFLALPGAGAALAPRLLVAFGSDRQRFQTAAELQTLSGVAPVTKRSGKRRTVHRRWACPKFLLQTFHEFAMCSRKKSVWAKAFYLLQRSHGKGHHAALRSLAFKWIRILFRCWKTNIPYSEKRYLQSLQRSNAPLLAFLSAPAGA

SEQ ID NO: 235753 - protein, 309 aa, unidentified
MEKNSTVKQSSKRARVRARGPITIGMDLGDRTSRYCVLDENGEVEAEGSVATTKTGMAARFAGLGRCRIAIEVGTHSPWVSRLLSSFGHEVIVANARQVRLISASSRKDDRMDAETLARLARVDPQLLRPIRHRGEEAQQALWVIRARAELVEVRTSLVNAVRGLAKSAGERLPSCDADTLRVERLAPLPEGLREPLTPLMREVESLTEKIQEYDRQVEQIARREYPETQLLRQVSGVGALIALTFVLTVEDAGRFEKSRDVGCYVGLRPKRSESGERQPQLRITKEGDIYLRKLLVQGAHCSKGRTAS

SEQ ID NO: 235754 - protein, 389 aa, unidentified
MLYVGIDIAKEIHEASLINEQGKLQGRSIRFSNTLTDFQRFLEWLPSDPLEMAMEATGHYWLPLYDFLKARGYEVIVLNPLQTEAHRRGQIRKTKTDKRDSFIVADLLRTKAISPSYIPDEWIHQLREITRFRFGLVDTICDLKRQILCVLDKVFPEFESLFSNVFIKSARTLLKEGTMPEELAEMDLSELTGILNSSSHGRFGLQKARDVQSKALYSVGISYLKDSAKVQLRCLMAHLEFLNSQIEEVDACIQDLMAQRETFLTTIPGISQTLAATITAEIGDIDRFESPEKLAAFAGIDPTVYNSGKFTGTRMVMSKRGSPYLRRALWMASASARRFDPELAAFFQRKLAEGKHYNTALGAVCRRLLNRVYSILKEHRPYQPKVVSL

SEQ ID NO: 235755 - protein, 369 aa, unidentified
MDDITFVGLDVHKATVCIAVAEGGRGGEVRQLGVFENRSEILSKVASRLSKGGRRLSFCYEAGPCGYGLHRLLTGYGHECVVVAPSLIPMKAGDRVKTDRRDALMLAKLHRAGELTAIWIPDAAHEAMRDLVRARATSVRVLAKARQHLQGFLLRHERIYCGARAWTLAYRRWLTTVRFEHPAQQIVLQDYIHAIQEAETRRDRLTQQIEELLPNWSMAPVVAALQSMRGVALVVAVTVVAEVGDFRRFANPRQLMAYLGLVPSEHSSGSSVRRGGITKAGNALARRVLIEGAWTYRMSARVSRKLHDRLEGLPAAVRDIAWKAQLRLCARYRRLAATGRPKVVVTTAIAREMVGFIWAIARLAQPAPV

SEQ ID NO: 235756 - protein, 339 aa, unidentified
MKYTPVGVDIAKHVIQVHFIDEHTGEVIDKQLRRQDFLMFFCNREPCLIGIEACGGSQHWARELTKLGHKVRLLQARFVKAFVTGNKNDVMDARAIWMAVQQPCKEIAVKTEEQQSFLVLHRTRMQLVKFRTAQINSLHGMLLEFGETIHKGRAAMDREFPEALERLKERLPPYVISVLDNQFNKLNELDLQIDDIEKQLTSVARQNETYRRLLDIPGVGPLIATAAVAIMGEASAFKSGREFAAYVGLVPRQTGSGGKIRLPGISKRGDKYLRTLFIHGARAAALLTKEPGPWITELKKRRPASVAIVAMANKLARTVWAIAAHGRKYNKNHVSIRPY

SEQ ID NO: 235757 - protein, 338 aa, unidentified
MFIIGIDPHKGSHTAAVLDRTETVIGELRVSADRRQRDRLLHFAASFTPRRWAIESASGLGALLAQQLVAAGETVFDVPPTLSARVRLLDSGCTDKSDPHDARAAAIVALRHSRLRRVIAVNHTAVLRLLADRHHDLTGLRTQAICRLHALLCGLTPGGAGRLLSAQEAGRILRGVRPFGPVEIERKRIALELLGDVRRFDNQLVATNQRIVEAVLASGTTLTDIHGIGPLGAAIILGHTGDIDRFPTSGHYARYTGSAPIAASSGPKQRHRLNPRGNRQLNRALHVAAVTQVRNDTPGRAYYQRKLDEGKSRKEALRALKRQIAKTVYRHLVADAHR

SEQ ID NO: 235758 - protein, 386 aa, unidentified
MARKRTLSTLDTSIAYAVGLDLAKTDVALAAFDSDHKEPYLIDRIPYDKLYELLADMAPTLVAMEPCSGAHQIAEQIQELGHEVMMISGRHVQAWVKDHCNGQKTDLNDAFAILNLAYDRWLTPIRGKTREECRLLALQASYRQLKGQRTKTMVHVKATLHAWGFPIRAGSFNQKVLHELIDTNREAFGDEVVETLHLMINRVRDLDHDIATVLKFLTEATKRDPRASLLRSIPGFGILTTSRWCAVIGDIARFDSPKQTMAFVGLVPNNRITGHHTETSSGREARGQGRMSKRGDKMLRSLCIMGAGSLCLMVRNDRLPDCPFVASIKERLASPRPWFKVLVYVAAKLVRIATALLKYGETFSFEKAGISKAVLKQWELEQAKAA

SEQ ID NO: 235759 - protein, 459 aa, unidentified
MNRKQRREMMRRIQSENLSLEVVHPDAAGIDIGNESHYVAVPPTRDSEPVRRFGCTTAELKSMADWLKQCRIRTVAMQSTGVYWIAVFDILEEAGFEVYLVNARETKNLPGRKSDVQESQWLMKLHTYGLLRNSFRPSQEIRTMRTYWRQRNDLVQAAARHIHRIQKALTQMNVQLANVLTDVSGLTGQAIIKAILAGERDPHKLAAFRDPRVKATEEEIARSLEGNWREDLVFVLKQEQDAYEFCQKQMAECDRRLQDYLQQRKDRSAGADLPEEKRKTRLKNKKGNKPQFDLRRELFRMTGADLTRIDGIDVMTAMTIISEAGWDMSKWKTEGHFVSWLRLCPDNKISGDKLIGKGRLPSNNRVTIALKMAASSLRTSHSYLGAQFRRLKTRLGAPVAIKAMAAKLARLVYRMLSHGMQFIDRGADFYEAQHHHRQINALKWKAARLGFQIIEAPAA

SEQ ID NO: 235760 - protein, 328 aa, unidentified
MIEHYIGVDLHQAFFQACAVTATGSRVWEDRFPRTEAGIAALLARCDRRTALAVEASTPTWQFADALGDTLGELRVVDPVKTKLKAGYAAKTDRLDARRLADALRRDSAVGIYYPPLAIREMRELCRGRHAVVQVRTSLVNRLRAVLLRQGVVDRRALAKTNSDAWLETLRLPPRAIANVATLRRLLDAVRAEAVVADQHVRTAAAADPIAVGLQQIPGIGPVLGLMIRAEVGDIRRFPTPGHLASYAGLVPSVDASAKRVRYGRITRRGSPWLRWALIEAAIQGPKRTDATGRWGRRLAIRKGALKARVALARRLCEDVFRSWSAIG

SEQ ID NO: 235761 - protein, 406 aa, unidentified
MIFVGDDWAQMSHDVYICDENGKRLASRHLPEGIEGITTLHELIAAEVNDPSEVCVGIETDRGLWVQAMIEAGYTVYAINPRAASRYRDRHTLSGAKSDPGDAKMLAELVRTDRHNHRQVAGDSALGEGVKILARAHQNLIWDRTRATNRLRNALREYFPGALETFPEPADRDTLAVLGTAPTPVAAAKLTPGKVATLLANAGRQRNIDARAQAIVEAIRRPALTAPDAVVSAFAATTKAQIAIITELNRQIAALDTELATHFEQHPDADIYLSLPGIGVILGARALGEFGDDPNRYADSKSRRNYAGTSPITRASGNRSVVLARFIRNNRLADAVDQWAFCSLTNSPGARAYYDHRKELGDSHHKALRALGNRLVGILHGCLRTRTRYNETIAWAHRRQEDKMAA

SEQ ID NO: 235762 - protein, 338 aa, unidentified
MKVYCGIDLHSNNNYLVVLDDERQVVLSRKLPNCLETILDCLAPYREQLVGIAVESTFNWYWLVDGLMEQGYHVQLVNTSAVRQYEGLKYRDDRHDARWLAHLLQLGVLPCGYIYPKEERPLRDLLRRRAFLVRQRTANLLSLKNLFSRQTGQQVSSNELRRLKVEEIEQRFTDPCLALSFTSTIKVISDLNAQITTIEKAALKQARLRPDFQRLLEIPGIGQTLALTIMCEAGSIARFPDVGHFCSYCRCVPSKHLSNGKVKGSGNVKNGNPYLSWAFTEAAHFLIRFEPRAKRYYERKSAKANPILALRAVANKTARAVFYVLHDQVPFRAEQAFG

SEQ ID NO: 235763 - protein, 406 aa, unidentified
MDVHKNFLVACIATTDERNHTTHQIKRFSTFTGELRRLADWLAANNCRDVCMESSGKYWIPIFNILEKTCSVCLTHPKYVKAIKGKKTDKKDAKWISELFKCDLVRSSFIPPPLVRQLRDLCRYHSKLTNMCTGDKNRAQNCLTMCNFKLDDVFSDVFCKSATRIFDAFIKHGNSDFDFASLIDGHCKATVEEIRAALDGELIPAQADKLNLIKKHIEYLTYLKDSLEQLILDLAKEYQPQIDLLMTVPGISTPLTAVRILSEIGADMSVFETSKQLCSWAGLTPQNQESAGKKKTTRIGRAGDYIKPLLVQIALAVVKSDKHPELKNKFQTLKMRRGGKKAVIAIARKLLTAIWHMLSKNESYNAELYRKADKPPVKRELTPEQAFALLRIQGYTISSWDSVPLT

SEQ ID NO: 235764 - protein, 339 aa, unidentified
MKVSTLGIDLAKNVSQLHGVGCNGQTVLKKKLTRDKFLPFLMQLEPCLIGMEACASSHHFARVLRQYGHEVKLIPPQYVKPYVKTNKTDAADAEAICEAVARPNMRFVQIKTAEQQAILVLHTERNILIRERTACANSMRAILAEFGIIMPRTLSQLYKKIPEILEEYDNELSPFVRCSVARQLEHLQGVEDQITLIEQELSRWAKTQPACQRVMKVPGVGLMTATYLVASVGNGQQFHSAKQFAAWLGLVPREFSSGGKQRLGRISKRGDRYFRYLLVHGARAVAAVIERHKDNMPWLYRLLNKKAYNVAVVAQANKTARILWSMLVHHTEYRTLSAV

SEQ ID NO: 235765 - protein, 495 aa, unidentified
MNNCAASDTRAGGGPASARPQSQPQYPPRVTGRPLGEPKALAPTSNRKTPREGHYISLMDGRAKRPKKQKERKQTMNDSEPWQQHRAFGGLDWASQKHSVIVVDPRGKVIEDFEIEHSALGWKKFREKLRPYGSIAFAIETSQGVAVEQLLEAGMRVYPLNPKSAQAYRERKAPSGVKDDRLDAWSFADALRVDGQNWKALRPEDPLIKELRLVSRDEVTLIEQRTAFINQLRHALAEYYPAALEAFEDWTSVSAWMFLQRFPTPESLAQAGKRQWQKFLHSRRLWGSDQGPRRMEIFAHASEFAGTAPTVKAKSLLALSLVEMLFAVQKHLELYRQRIEELFARHPDHDLFGSLPGAGPKIAPRLLSEIGDDRQRFDGDPQNLQCLAGTAPVTKRSGKQRSRKYWPVHQRWACDKHLRHAIHLFAEQSLSRCVWAELYYQHHRKKNQSHANALRRLGQRWLKIIHKMWIDRTPYNAELHHRNQLQHGSWIFQLQ

SEQ ID NO: 235766 - protein, 346 aa, unidentified
MGNDTLVAVDLAKSVFQLAVSDRPGRVDRRERLTRDRFLAFFAQQPASTVIMEACGSAHFWARRIEELGHKVVLLPPQYVRPYVLRNKTDRTDTDAMLEAYRNEQIRMVPIKSVTQQVLGTLHRLRSGWVEERTARINSLRGLLRELGVFIPLGRREVLPHAWEIIQDANSGLPDALRPSLAAVCQEIVEMSKRIEDVEKQLNALAQQQPAVAHVYSVPGIGLLTATALYAFVGDPLRFPSGRHLASFIGLTPREYSSGSRRHLGRISKRGDAYLRTLLIHGARATLWHAKKLEHPDRLRAWALRLEKKSGHNKAAVALANKLARIAWAVWKNDRDFEPVPEAQVA

SEQ ID NO: 235767 - protein, 343 aa, unidentified
MHIASIGIDLGKTTFHLVALGDSGKVVVRKKFTRKQLLAYTANLQSSLIGIEACAGAHFIGAALRSQGHEVRLMPAQFVKPYVKSNKNDFIDAEAIAEAVTRENMRFVPIKTEDQLDLQALHRVRDRLVHRRTALINQIRGFLLERGITFAKGPANLRNQMPVILEDAERNISPRMRLLLTQVWQEWKQLEIEIAAASDEIERIASEDPACQRLRKIPGVGPLVSTATVAAIGNGAAFRKGREFAAWLGLVPRQHSTGGKTKLYGISKRGNIYLRRMFIHGARAVLFRVKYDAGGFGHWVHQLAARAPRNKVAVAIANKLARIAWAVLFRGKDYQPLAVCPQV

SEQ ID NO: 235768 - protein, 348 aa, unidentified
MSNATLNHRWCVGIDLHKDTLTACTYCACCGEISFRKLACKCRKQICEYFAALPHPHVVAIEAVGFYRWLWEMLDPIVDELILADATQARALAGRRLKTDREDAFNIAELLSARRLPTSYAPPAEVQLLRDLTRHRNGFSRQHARVLCRVKSIMNANNRPGPARLKSDGLIRYIKAQGSKLPERHVTMLWHCVDQLALTERQIDQAERELHNIVGSEPFRDSYRILTSFPGVAMVRAATIMAEVGDFKRFTHRKAIGRFAGLNPTVYASGGSNRTGHIAKAGSPNLRWILQQAAWTACRTDDHVKGLFLRIQKRAGRKAAAVAIARKMLTWMWYAMVKGETYNSRMAA

SEQ ID NO: 235769 - protein, 339 aa, unidentified
MEYYIGIDLHSSSNHLAIIDQSMKRVLKRKLPNDLTVILHTLYPYEGEVAGIAVESTYNWYWLVDGLMESDYRVHLANPSAMRRYTGLKYADDTHDAFWLAELLKLGILPEGYIYPKEMRPVRDLLRKRGHLVRLRTSLILSLQNTITRNYGVKVSSNEIKKLTGERAWPHLIDHEDIAMSVRVSKEAIDFLARQIAEIETVVEKKVKLKKPYQNLLTIPGIGKILALTIMLETGPISRFPKVGHYVSYCRKVASKWTSNGKIKGRGNRKNGNKHLAWAFSEAAEFARRFNPASRDFYNRKRSKKNLMVAHNALAHKLARAAYYIMRDNVPFEEAKLYA

SEQ ID NO: 235770 - protein, 346 aa, unidentified
MDQFVGLDVSQEMTHLCVIGSDGKIVWQGRCLSTPEDIAGNIRSKAPDVVRIGLESGPLSTWHWHALKAMGLPVLCLDSRHAQATMSGQVNKTDKNDAHGLAQIVKAGWYREVGVKSLDSHAVRSMLGARAQLVGMRVEVTNQIRGILKTFGVVLSRRTGEPFERLVDEACDNSDPMLNQTVRSMLCVHSCLKEQIRQLDRQLMSRARASAVCRQLMAIPGVGVLTALAFVTAVDDPSKFAKSRSVGAYFGLTPRCYQSGEIDRNRGISKCGDSLVRTYLFEAAGTLLTRVEKWSALKAWGLRIAKRSGLKKAKIAVARKLAVVMHRMWVDGVSFRWSAAGAEAVA

SEQ ID NO: 235771 - protein, 341 aa, unidentified
MSIITVGIDLAKNVFAVHGVDDNGKAALVKPKVSREHLLSLIAQLPPCVIGMEACSGAHHWARQFRQYGHDVRLMAPKFVTPYRMSGKRGKNDAADAAAICEAVRRPHMRFVPVKEEHQQIILCLHRTRNGFVEERTATYNRLRGLISEFGIVLPQKVANLRRDIAEHLEDLPGYANQCVGDLLAHADVLDARIAEYDRAIAQAAREDARSKRLMQLPGIGPITASALLASIGGGHDFANGRQVAAWMGLTPGQYSSGRTARLGRITKAGDSYLRSLLVMGARAILSGLGDKQDRFSRWARSLQERRGYWRAVVAIAAKNARLAWAVLRYGEEFRLQPVAA

SEQ ID NO: 235772 - protein, 319 aa, unidentified
MNTNTNQSITVGVDTGKTLLDIYIRPLDIYFSVTNDDDGIKKAIKEIKTYRPERIIIEATGRLEFAFAVACKKANLPISIINPAHIKKFAGAIGRLAKTDKLDAQLIAHYGEAIQPAESELRPDTMQLMSDLLSRRKQLISMQTMEKNRLTILPKTLHKSVNALLKILMREIERVDTLMNGIIENCPEYQAKNTIIQSMPGVGKVVAFSLLSNMPELGYITNKQASSLIGVAPINRESGAYQGQRKIKGGRHQIRTVMFMAMMSAMQCNPVFKTTYQRLVEQGKPKKVAIIACLRKMIVILNSMVRDGVMWDENMAKIQ

SEQ ID NO: 235773 - protein, 351 aa, unidentified
MLIIGCDYHPSVQQIAWVDTETGETGERRLKHSDREAEGFYRELKEKGFSVRVGMEATGHARWFERLLGELGFELWVGDPGKIRAKQVKKQKNDRRDAEHLLKLLMKDDFPRLWVPTPENRDVRQLVLHRHRLVGMRTRVMNQLQAIAMNEGIRRKRGLWNKQGRGLLESLSLPPWSSRRRQELLELLDHLDPSIEQLSQAIEQEAEKWPEVQRLLTHPGVGPITALAYVLVIGTPHRFRCGKQVASYLGLAPSEASSGDRQRLGHISKQGNAMLRHLLGQAAQSVAHCEDQWRGQYVHLALRRNHAIAKVAMARKLAVRLFWMWRKEWDYQQVKNFGSHVGQLVQSHGVE

SEQ ID NO: 235774 - protein, 356 aa, unidentified
MISIRHSNVPGIIIGVDTHKDEHVAVAVDSLGVRIGQRNLPTTDTGYAGLEHWARSLGEIDAFGVEGTGSYGAGLARFLRGQGHRVFEVNRPDRSTRRRLGKSDPTDAEMAARAVLAGVSRDRPKSGVDEVEMIRMLKGTKDSAMKGRTQAINQMKALVVTAPVELRAKLRNMNTFRLVARCARWRHGHLETPTAAAKYALWSLARRHAQLTREIEALDAELARLTTAFAPALTESSGIGPDTAAALLITAGSNPERLKSEAAFAALCGVSPVPASSGKTNRHRLNRGGDRQANAAIHRVVIVRLRYDDRTRAYLQRRMEEGKTKTEVIRCLKRYVAREVFGILHDIGNRHAFQNA

SEQ ID NO: 235775 - protein, 397 aa, unidentified
MAKRKQSTYERLKSGKMNRKQRRELTRRLCSDDPGLEIVHQHVAGIDIGNKSHYVAVPPTCDAESVREFGSWTGDLVQMAEWLKSCGIKHVVMQSTGVYWIAVYDVLEKAGFEICLSNARDTRNLPGRKTDVQESQWLMKLHTYGLLRNSFRPTEEIRNVRTIWRLRNRHVQEGAREIQHMQKALTTMNVQLSNAISDVSGVTGLAIIRAILKGERDPFQLAKLRDYRIQASEEEIARSLEGNWQEDVLFELQQAVEAYDFCQKQIGECDRQLQKYLAGLPDRTIPQPRQPKPAVMSGEENGPKRERGAKNRQKNRSKQSKSQRNQPKFDLESELTRICGVNLKSIDGVDVMTIATFISELGTDMTKWKDEDHLVSWLKLSPRWPVSGGKVIKKQER

SEQ ID NO: 235776 - protein, 421 aa, unidentified
MKSTAASKLRQIPQGYLVIGVDPHKKTHAAVSITQDFTIHAKFKFSNSMEGLEMMLQRTKAEMIKTGCRGVIFAIETGGHYWRNLAYVLDERGIPFHFINQFTLKRRREGKDLNRRKNDYRDSEVAAQLLCTGEFTESKLPQGVYAELRAAHNAYRRLVKERTRITNLLKGLLDSLFPEFTQVFKDPCALTAMSVLSTCAIPKVISNMPDDGFVTTVKAEHHGRLMIKKLLVLHHIAKTSIGIEASARSVSMEISFLVEKFNLIKQHIRTIEGTLVRFVDETEEGKYLLSIRGLNYIAVAGLLAEIGSFKQYRNAKQLIKMAGSNPTESESAGKRGTHTPMSKHGRPVLRYCAWTSVIPMLRFNSDFRAWAKKMRERPVHANPLNGREVVGACLNRLLRLSFALAKKQSYYQMPELARIAV

SEQ ID NO: 235777 - protein, 344 aa, unidentified
MEDFDVAGIEVSSESFLVRVVRHGRLGSPQTFPNTAEGRLAILRLLTRAGARVRVCLESTGLYGLDLALTLHEKAVIEVMVANPRSVRHFGEAMMQRSKTDPLDAALLCEYAARMPFQRWQPPTLTARQLCAITRQIHALTVMSTMDKNRLHAANLSETTPKIVRDELERNLAAQKASIGRLTRAALKLIDTDPELKRRFALLVNGPQKAPGIAQTSALQILGELVLVGPDFNVHQWVAYAGLDPREYQSGKSVHKKVRISKVGNAHLRRALYMPALVAVRCNAYFRAFYQHLLAKGKLKMVALVAAMRKLLHALYAMMKYNQPFDGSKLFPNACPPLSEATRA

SEQ ID NO: 235778 - protein, 480 aa, unidentified
MAHPTQGPPDLQAVPMLKYESLYVGIDVGKQRHVAGFVSTTLLERHQRFEACPALAFEQSREGFRALMERIRSYAPLEQVSVLLEQTGHYHRPLVQYLQEFDIPVYIMPVQKRPPGILKTDKRDALSLANHLFNQLERGIQLADKTHLVRRLLTPTQTALQLQGWMRHRYELVQACTRRKNKLTAICDELFPELTQVLKDPNLPTALALREHFPTPHTLAIAPFSALLALRAKSRPTLGQLEHLQQVASQSIGTREMTRQRGLVLEQSQLIRELRLLQEHIEQLDTEIRRSIEQSREGKILTSIPGIGSIQAAAIIAAMGNVLNFERASRLKAYFGWAPQEERSGTSLDRVHLTHGGTRSMKQMLFLCVASAIQLDCEWARLYKRLVPKKCPYDERTQSYRGKVKVMGRIAGQMIEMVYALLKQDAEILSQLAPGETPPDPILYDPEVHKRHRNGEYAPIKNVPCQRKVIRLPERILQKQ

SEQ ID NO: 235779 - protein, 345 aa, unidentified
METMYYIGLDVHKRTISYCVKDVSGRVYAEGSVPATRFDLDRWTKTLPQPWTAAMEATVFTGWIYDHLQPHAAALKVAHPLMLRAIAAAKKKNDRIDAKKICDCLRCDFLPECYMAPTAVRERRRTLRYRNLLVRQMVQMKNKISMLLMEAGVSYNKQKLHKAGYFRELLATNPDINEGLGSLLRVCRETVVRLQRTESALVRSLERDSLLVERVERLMTIPAVGPITALTWALEVGEVQRFSSIKKAISYCGLCGAEKSSGSTVQRPPLSKQRNKHLQTTLIEAAKMAPRYSPQLAMLYDQEKQKGHANRATLAVARNLVAYLMAVDRGQRNFQVVETSTCIAA

SEQ ID NO: 235780 - protein, 408 aa, unidentified
MEVVHRRCGGIDVHQASLAVCVSIKEEGRMEKHRLRCGTTSRELLRLCDWLREHQVTHVAMEATGVYWKPVWHVLEGQFELLLANPTQVKALRGRKTDVRDGERIADFLQHGLLQGSFVPPQPVQQLRDLTRSRTVLIQEQVRISNRILKVLEDANVKLKTVMSNVMGVSGQQMLRAIIQGQTDPAKLAELARGRWRGKIPLLEQAAQGRLNEHHRFLLQQWVAIWDELAARIAQFDLRIEEQMRPFEPVVQAWRSLPGIDRRTAQTMVAEMGPDMRQFPSAAHAASWAALCPGEQESAGKRQSGRTRRGNVWLRRALTQAAWGARVTKGSYFKTLYHRLAVRKGKKRAIVAVAHALLVTGYLVVATGRPYQDLGADYFDRIDRQRLTTRLVKRLQALGHRVTLQPAA

SEQ ID NO: 235781 - protein, 393 aa, unidentified
MQTIGIDVGKRQHIAAVCHQGEREARRAVFRFSADRAGLCDLERWMGQQGEIARAVLESSGHYHLNLAAALQRRGVPVAVVNPIESKYFGKRRLQRTKSDPADARTLALLAMVDQPEPRDVVAGAELREAARFAMALVDERGRVSQKITRLIELGFPELERAYDDPTCTSALAVLRQAPTASAVARKHTATLAAAARPGGGRRIGTTKATQIQVLAKDTIAAPELAAQIGFQMRLRIAQYDLLSAQIAEAEAHLGTLLDGELVRRLRTIPGVGPAICATLIAEVGDIHRFARFDQLVAYVGVHPAEKSSGEKGANPETSWRMSKAGNAYLRTALYQLAIVGIQHNPIIRAHYARKRAQGKSKMNAVGHCMKKGLAIVWGVWRSGEDFAAPKTP

SEQ ID NO: 235782 - protein, 354 aa, unidentified
MSIVADNYRFVVGVDTHAATHTYALLESPSGKELGTETFPTTTAGLNRAVAWLGRRTGGDIDGVLISAEGTGSYGAVMADLLSETGYRVVEAPAPSVKRLRGTGKTDTLDAIVAARSTLVMDVQRLRDRRAGELQAALKVLTVAREQMNADRLRSINALTALLRTHDLGLDARRALTLTQIRSVAAWRRREEPLSLFVARADAVRHAKRVIHLDADLKSNREQVTKLVRDHAPVLLDMTGVGAVTAAVIITVWSHPGRVRSQAALAQIAGTCPIPASSGNTTRHRLNRGGDRQLNRAINTIALTRMRMDPATRAYVQRRTAEGRTKREITRCLKRYVTRQIHRTLTANPPLLIA

SEQ ID NO: 235783 - protein, 403 aa, unidentified
MIYAGIDIAKNDHVVGATDERGRDASKPMKFANSAGGFDRCVAYLEGLAESKSDLLVGMEATGHYWLPLFCRLQDAGYAVVVINPMRTDAMRRFKGSSRVKTDIVDCVLVAETLRCGGFQPSRLGDEAVIELRQLTRLHQALKESVADLKRQVIVALDQVFPEYDSVFSDTFGESSKAFLKRCPTPEECLAVRADSLAKTLERASHGKLGRPKADEIKGIAKASCGIGLATSAFSFQIKLLIDQIDFIEGQASEVEARIRAGIEKVEPLILTIPGIGYTLGAQIVSEIGDVRRFRNASSIVKYAGINPSISQSGKFSSGENHITKQGSPYLRRALYLAAMAQLKLKSPFHDYYAKKRADGKSHREALVAVARKLVHVIYAVLSKQEPYDPNAAKSPELASRSE

SEQ ID NO: 235784 - protein, 407 aa, unidentified
MEVLHARCAGLDLGKDSLVACIRLHGQPVRHEIRAFGTTTRELVALSEWLTAHGVTHVAMEATGTYWRAVWHVLESDFALVLANAGHIRQVPGRKSDVKDAEWIADLLAHGLIRSSFVPPAPIQEIRDLTRTRKQLVREIAQHTQRIQKTLDRANLKVTGVVSRILGVSGRAMLKALIAGETDPTRLADLARGTLRQKRAALIEALTGHLTPHHRRLLALHLDVIEHLEATVVTLDADLGDALAPFHEAVRRLDALPGIDTIAAQATIGEIGVDMTRFPTHQHLISWACLCPRLEESAGRRKSTRTRKQNNWLKSLLIQTAWTTIRGKDSYYRAQFYRLKARRGPQKAIVAVAASMLTAIYYMLRDSTEYRDLGAQHFERLDKTHVTRRLVHRLEALGYHVQLAETA

SEQ ID NO: 235785 - protein, 395 aa, unidentified
MTGVIIGVDPHKLSATIEVVDHHEKLLGSGRFTTDRAGYIAMRRYVAAWPDRVWAVEGSNGAGRPLAQRLLEAGERVVDVPAKLSARVRLFDTGHNRKTDARDAHSIAAVAVRTKTLRVLRVDGELEALRMLADRREELTRSRVQTVNRLQRLLSELLPGQAKRDITTAQAKALLATVRPRDIAGKTRRRIAAEELAELVAIEVKMKKSTAELKALVLARGSRLMDLHGVGPVVAARTLADVGDVTRFADRNRFASWTGTAPLDASSGEQIRHRLSRAGNRRMNHMIHIAAISQIRLDTPGRVYYRRKLAQGKTPLEALRCLKRRISDAIYRQLLADAQTAEGADPGGHCGASLISSAVDSHPPHRHFGSATPGPATPTLRPTPTTRKSQLTPPA

SEQ ID NO: 235786 - protein, 338 aa, unidentified
MEREYVGIDFHRRRSVVVVRVSAAGERLSVVRVDNDPVAIAAAVTEAGPSPEVVIEATYGWYWVVDLLQDLGATVHLANPKALNWGDRRVKNDVVDATDLADMLRLGRLPEAWIAPPAVRQLRELVHYRAKLVQLRTGLKAQVHAVMAKEGVLPAVGDMFGRAGTAQLDEMPLGRNYSVRVQSLRDLIEVYDREVVMLERDVHAHLLHHPGYQAVQAINGVGRTIAAILVAEIGDVNRFPTPAHLCSWAGLTPGHRESDAKGHDTGITKQGSRLLRWALIEGISRYHGGPKLTGDYRRIAERRGKNKARVAIARKVLTLAYYGLRDGEIRCLAQPTAA

SEQ ID NO: 235787 - protein, 354 aa, unidentified
MKLYVGLDVGLEETSLCIVDSDGNTVREVKVSTEPEAIRCALEGSADRLDRVGIEASSLGIWLYRELQPAGVPIIVVEARHMRVSLSTMRNKTDRNDARGIAQMMRLGWYRAVHVKNIDMQRMRSLLGNRKLLKRKLIDIENHIRGTLRAYGLLMGSVGRGGYEARVRELLEHSDPIFSVMMETMLDVRRAIFEGYERLHKVLVQVVQHDAVCRRLMTVPGVGPVAALSFKVGVDDPRRFARSRTVGAHFGLAPRRHQSGTSIDYEGRISKQGDVAVREALCEAAASLLLRVRKWSALRAWGLRIAKRSSMLCAIVAVARKLAGILHRMWVSETDFHVGFGAKVTQRLRLKPAQ

SEQ ID NO: 235788 - protein, 355 aa, unidentified
MDNTKYIGMDVHTESISIAVRNGAGKIVMECVIETKASMILEFINGLRGDLQVTFEEGTWAAWLYDLLKPHVTELVVCDPRKNASMREGNQSDKIDARRLAELLRLNHLSPVYHGEHGLRSLKELVRSYLTITKDLARVMSRVKAIYRSWGIACTGTQVYAPRHRVEWLGKISEPGVRRRAEFYYQQLDALRALRQEVRRDLLAESKKHQAWKRLCEIPSIGPIRAAVLLGILQTPHRFRSKRQLWTYSGFGIETQSSADHRSVNGQLQRAKKQICIRGLNRNCNHDLKNLFKGAAIVASSKPGPFQEFYTALLSKGIRPEMARLTLARKIATIALIVWKRGASFDAQHLKPQTA

SEQ ID NO: 235789 - protein, 324 aa, unidentified
MVSLPSTRSEMPIPVGIDVAKDTLDVAIGPQGPSFTISNEPTGFDELLERLSTVKVALVVVEATGGWEAAGVCALQARGYAVAVVNPRQARDFARSMGQLAKTDSIDAHVLAQLGEVIERHPQRSKFVKDLPDKNQQELAAMVTRRAQIVAMLVMETNRLRLAHQRSKRSIQRIVAALRAELAATDKDMHTHVRKHYADLAALLHTAKGVGDTTIATLIAQLPELGRLSRREISALVGVAPMNRDSGCYRGRRTVYGGRTSVRKVLYMAALVATRYNPSIRPFYEHLVAAGKPKKVALVACMRKLLTILNAMVKTATPFQPAAA

SEQ ID NO: 235790 - protein, 418 aa, unidentified
MSPLAEHSFTAYVGIDWADTKHDICLQASGDTRRESCCIRHQVAAIDEWANTVHRRFGGPVAVAIELAKGPIVAALQKYEFFVLFPINPATLAKYREAFQPSGAKDDPGDAELALDLLLHHPERFGPMKPQSAPMRTLMSLVERRRQLVGDQTRLTNRLCDTLKQYYPQVLEWFDDRGTMLFCDFLDRWTTLRSVKQARTATLEAFFHAHHCRSEKRISGRIGAIRGAAALTEDPAIIGPCRLHVLALVAQLRAVLAAIVQFEREIAAVASTLPDYPLFKNLPGAGAQLAPRLLAAFGEQRERFRNADELQKYAGIAPVTERSGKKSWVHWRLQCPKFLRQTFVEWAAQTIRRSFWAGAYYRQQRAKGSSHHIAVRALAFKWIRVLYRCWQTRTPYNETVYLNVLSKRGSLLLGKQGA

SEQ ID NO: 235791 - protein, 339 aa, unidentified
MKYTPVGVDIAKHLIQVHFIDEHTGEVIDKQLRRQDFLTFFSNRERCLIGMEACGGSQHWARELKKLGHEVRLLQARFVKAFVIGNKNDVMDARAIWMAVQQPGKEIAVKTEEQQSVLVLHRSRRQLVKFRTAQINALHGTLLEFGETIHKGRAAMDRVLPAALERLKTKLPPYLINVLEDQYNRLSELDSLIDGLEKQLNSVARQSETCKRLMEIPGVGPLIATAAVATMGEASAFKSGREFAAYVGLVPKQTGSGGKIRLLGISKRGDTYLRTLFIHGARAAALLTKEPGPWITELKKRRPTSVAIVAMANKLARTVWAIAAHEREYDKNHVSIRPY

SEQ ID NO: 235792 - protein, 358 aa, unidentified
MKKHTTGKEAKLVIGVDLGDKHSEVCVIDESGEVRVRTQLKTTAAAFEKFFAGMGPARIAMEVGTHSPWVSRLLNSWGHEVLVANARKVRLIYQSSSKSDRMDAEALARLARLDPKLLSPIQHRSGERQSHLALLRARDALVRARAQLVNHVRGSVKAMGGRLPACSTVAFATRASSHLPETMRLALVPLLKVIEKLTEQIDEAERGIGQVARQHYPEVVVVTQPTGVGLLTGLRFVLTLEEPGRFRRNRTVGAYLGLTPRRSQSGDQDRQMHITKAGDSDLRRNLMQCSQYILGRFGPDSDLRRFGMKLAERGGKSAKKRALVAVARRLAVLMLSLWKTGEVYEPLRHAQVMARVPA

SEQ ID NO: 235793 - protein, 338 aa, unidentified
MYQHYLGVDLHKRRTYVVLMDADGNVSDQRRLPNDAMPDYIAQLPKNTFAVLETTSNWSYLYDVLEAQVAGVALAHPKQVRAIAAARVKNDRIDATTLAHLARTNLLPTSYAAPQTVRELRELVRHRAKLVRERTRHKNRIHRVLSIYNLQSPCSDLFGKQGRLFLEEIQVRLSATHQTIIADYMLMIDTLGDRIKQLDKRLLEWSKTDPRAALLMSMPGIGLYSAAIILAEIGTITRFQGAKQLCSFAGLVPSTRSSDMKVHHGRITREGSSWLRWIMVSAAHTAPRHSPRLNAFLERIAHKHGRKTARVALARKMLHIVFFMLQRNEPYQEAYSLR

SEQ ID NO: 235794 - protein, 355 aa, unidentified
MNESKFIGLDVHKTSVSAAVIDADGKLVMQSIFATGAVAILGFVHGLRGTLRVTFEEGTHSAWLFDLLRPHVSEVVVCNPRKNALLKSGNKSDQIDARKLAELLRAGLLSAVYHGETSTLTVKELGRTYLALTEDTTRVMSRLKALYRSQAIATEGKKLYSKRRREQWLTQLAQVGRRYRAERMFEQLEALQCLRRKARRDLILECGKHSATAWLTSIPFMGPIRAALLIARVQTPFRFRGKRQFWAYAGLALETRSSADYRFVEGELRRAKKPVFIRGLNLNHNHDLKNIFKGAATSASAMPGPFRDFYENLLGKGMEPEMALLTLARKIAAISLIVWKKGERFDPEHLKAQAA

SEQ ID NO: 235795 - protein, 358 aa, unidentified
MNAQVTQIDFKGQNIYAGFDVHLKSWKVTIMAESSVYKTFTQPPKPEILYNYLSKNFPGGTYHTAYEAGYCGYWIHYKLTSYGVNSMVVNPADIPTTYKERVQKEDKRDSRKIARSLSSGELTPIYIPSLKTQEDRTLLRTRAMLIKDLTRIKHRIKSFLYFYGFSVEEVFPQSQSHWSNRFISWLDGLELSGESGKQSLQALIDEFKHLRISTLEITRQIRHLAQTDTYNGKVELLRTVPGVGLITAMTFLTELESINRFSSLDKLCSYIGLVPSTRSSGDKEKTGDITPRGHDTLRTALIESSWIAIRNDPSLMKSFLTYQSRMEPNKAIIRIAKKLLSRIRFVLLNNEPYKCMIP

SEQ ID NO: 235796 - protein, 327 aa, unidentified
MAKRTMICAGIDTGKRKLDIALDGGSEQLQVDNTPEGYKVLSDWLRRHRVKRVGIEASGGYEQAVVAELRRKRFVVVVFQPAQVRAYAKFHLQRAKNDRIDAALIAACTAAVRKIHAAPDARLLPFAEQLTMIDQIGEDIARLKNRIETCRTPRFRQLWKEDIARLTKRKKIELKALVAAIREHRDLAERLDLIHSVSGAGLPTAVAILVRMPEIGQITREQVAALAGLAPYDDDSGDHAGVRHIEGGRERLRRALYTAALPASFRWNPQLIALYNRLIAAGKGHKRALIACARKLLIFVNTVVARGIPWSHQRPPIASMTAAPLAG

SEQ ID NO: 235797 - protein, 417 aa, unidentified
MPKLYAALDVSLNKTAVCIMDHDGRIVREVEVVTCPDAVADVLGAYHDQLERVGLEAGPMSEWLIRGLLNHSIDAVLMETRQAHKALSAMTVKTDRNDARGLSHLLRMGWFRPVHVKALSAREQRARLAARQTLVRQVRDLENSIRGLLRGFGLRVPVRLGGRWSATVRSLVEDHPSLATTFEPLLRAQETLREQLAIIDRQVRNAARDDKVCRQLMTAPGVGATVALTFRSTIDDPHRFRSSRSVGAFLGLTPKRYQSGATDRVGAISKVGDPAARVALRGGARAADQGQQVVDLESLGRAGSAATRCQARESRGRPQARRHPPSHVGDRQQLLLYEPDPSQGALIGSVTHNRSRVRPSADDGGSKPLDTWLHLTVTPLWRSALPTYRTVSCGCHAQTTNRSKIRRSTNSLTITAQ

SEQ ID NO: 235798 - protein, 346 aa, unidentified
MNNHNIIGIDLAKNYFQVCALNQAQKVQFNKKLTRNKFAEFIQQQEPTLVAMEACSSSNFWARKFVEMGHNVKLVPAQHVKPFVKGNKNDRNDAVAICEAALRPNMHFAMIKTHVQQDMQMIHRIRQLHVKQVTAISNQIRGYLAEYGIVVQKQVTHLLRALPAIIDNEENDLTPLSRQLLLSQYHVLNSTREKVSELNQQIEISNKQNLYCQRLQALPGVGPIISSALYAAVGNGSQFSKGRQMSAWIGLTPAHFGTGGINTNVDTTKKGDHYLRTLLIHGARTVVTWSARKKDPLSCWIQRLVARRGKRKAYVALANKLTRAAWKILQGDEYDIKKISAQAISH

SEQ ID NO: 235799 - protein, 390 aa, unidentified
MIYVGIDVASLKHDFTIVTDQGEILIDGKTIGNDSEGFDVLLRALRTHGPSGEQTKIGMEETGIYHQRLRAYLKQSGYVVYTINPALISHSRKAESLRRTKTDRVDALAIARYLMMYKRSLHSYTPSLYHLEALKSSTRIYHTKRETLSRTKIELKRILQVVFPEFAKHYDPLSQWALNLLEAYPTPEKINRMHEATLVRILRTKGDRKPVARHIRKLAKSSVGQSDAMSERLIRFAISDLKHFKAQINEIKQALVEQMKSFQHLTSIPGVGAVTGATILAEIGDIHRFPHKTKLLAYAGLDPVIYESGTFKATNTSLSKRGSRFLRSAIFMAARIACVGQTRDNKFRAKYKAKIASGKHHYTAVFAAAKNLTYTIYAILKSGKSFDYAK

SEQ ID NO: 235800 - protein, 497 aa, unidentified
MSEKSFHDPPETVILEEGVEVQQTKAYGVGIDTHSKFIQVSVYVKRDMRFFEYRHEFSTRWNDLVLAKQWILNVVRTCSNPVPDLTESPFHYCIESTSTYHFPILLAWEGNPSIVNPTIAGSTKRKTDVLDAKLLALHDLTGVWPSSYLPSRDVRELRVLISERNRYVHEATAASNRINNVIVQFGLTIGREGSVSKNKEIRSIIENQVSDHPSPETGLCPYGIPEKVKGVIRDEYQKYDSSIAMSASLMEHIHQKALSMEWETSSGTLSGSDMISILTTAPQIGRVTAITWLAHIITPRRFPNSKAIAAYCGLDPSLKVSAKHVTSTVKRGGCKELHKALTSSADRLIRNHTELFGRWGYNLYLQTGKWKKAANAVARKLAVALYYMMLTGQEFSYEKYNLVKDISVFDVPVSALPSVIPDFKRYVRILEEKGIHTTSEMTAAYLSCELGSVKGLGKKFFSTIKEFLNNQKKYKEAFKSISKGGTGDEPQQTDTIQ

SEQ ID NO: 235801 - protein, 341 aa, unidentified
MQVTTIGLDLAKNVFQVHGVDATGKVTVTKKLRRSQVLALFEKLPPCLVGMEACATSHHWARELKALGHDVRLMPASYVKAYVKRGKNDAADAAAICEAVTRPSMRFVPMKSAEQQAVLMLHRTRDLLVRQRTQLINAMRAHLAEFGLVAARGRDGRKSLIAIVRDEANRLPDLARRALRAILSQLDALQQQIGDIERDIHAQHRSSEASRRLETIPGIGVIGATAIAATVTDPTTFKSGREFAAWIGLVPRQNSSGGKERLGSISKQGDRYLRRLLIVGATTVVQHARKHPDKHPWLISLLARRPAKVVAVALANKMARIAWAVLARGETYRAPAIAVRV

SEQ ID NO: 235802 - protein, 387 aa, unidentified
MTGQTQVSRFIPSNYDIFAGLDVDKRSIAMTFSDHKTLIKSQRLPYSSEQLLNYVRRHFPGQRVAFVYEAGPTGFGLHDDLTANHQTCLVVAPSMVPTAPGQRVKTNRIDSKKLSLGLRGGELRSIHVPSRSYRELRHLVQLRDTQVQQLKATKLRIKALLLCEGIPFPEAPPTSQWSARVVAELRVLPCTSEVRFKLDHLIGTLYFHFNSAAVVQKRIRRFCQNDPELRQSISLLKSLPGIGWIVAAHAVARLGDWREIENVRSIAGFLGLVSSEHSTGDKVNRGSITRAGDSRLRNKLIQSAWVAIGKDPELRAFYRRIFDRHPKKVAARKAIVAVARKLTTRMYAVLKQQRPFVIRPDSSIAPLTTEETVGPRVRLDAAQNDQP

SEQ ID NO: 235803 - protein, 378 aa, unidentified
MATTRSVLRHELTAKSGDLYMSLDLGDKRWHISIGDGRCGLSHYSVGAGQTEELADCIAKARARLHSSRKAIVHSCYEAGRDGWWLHRWLTEVGVDSIVVDPASIEVNRRVRRAKTDRLDADKLVAMLVRHHSGERVWSVLREPSPEDEDARRTHRELQRLTHERVAHTNRIGSLLVLHNLRPNVVIGGRYWSVWWERHRAQVPSSLAAELEREVMRLQLVKQQVRAIEAIRSQELLEGKQPLVAQLTRLRAIGAKGAWVLVKEVFGWRNFANRRELAGSLGLVPTPYASGDSQIEQGISKAGNRRVRGLLVELAWGWLRLQPGSALTNWFNRRFASGGKRLRRIGIVALARRLAIALWRYLKNGEIPAGAQLKPAGA

SEQ ID NO: 235804 - protein, 377 aa, unidentified
MKRIKFVGLDVHAETIAVAVAELDGEVRSIGIIPNRCESVRKLVKKLGPVEELRFCYEAGPTGYVLYWQLTALDAKCEVVAPTLVPVRAGDRVKTDRRDALKLARSYRAGELTAVWVPDAAHEALRDLVRAREAAKRDQLRARNRLTKFLLRHGKRPPEGVNPWTLNYMNWVRKDVHFEPLAQQATLLDYLHEVEHMAARVARLEQAIEEAVQLAPHQMREVIEALQALRGIAKVSAVTIVAELGELSRFGEARQLMAYSGTVSREHSSGESCKRGGITKTGNVHLRRIVVEAAWAYRHAPAVTACLRKRQERVSEEVKEIAWKAQHRLHGRYRKLTARGKNTGKVITAVGRELLGFIWAIGVKVEAEQRKALGQAA

SEQ ID NO: 235805 - protein, 374 aa, unidentified
MLSARPAGACRPPSDQQKELAITTIAQLQRPRVTVGVDTHLDVHVAHAKDQLGRRMATVSIPTTPAGYQDLLAWARGLGEVQAWGVEGTGCYGAALTRFLGDQGQVVLEVNRPDRQARRRHGKSDPVDAEAAARSVQAGEVTTVPKAGNATVEMIRSLRVARQTAIKARTQAINALKALLVTAPAQLREQLRGRSAAMLVRQAAALEPGPLVTPTAAAKLALRCLACRYQALHAEVATLDTELDRLVAKAAPGLVARFGVGPDSAGALLVAAGDNPGRLRSDACFSMLCGSSPIEASSGKTRRHRLNRGGDRQANAALYRIVVVRLRWHQPTKDYMARRLTEGKTTKEIIRCLKRYVAREMFTLLNQTVPTPAT

SEQ ID NO: 235806 - protein, 312 aa, unidentified
MTQIICGVDVSGATLDARIGRDGVAERFAHTTAGIAALAAFCKAHGVGLVVMEATGGYERMPFALLWAEGVPVAIVNPRAVRRFADAMGRLEKTDRIDAGMIAWYAETKRIVPEPPASRTQDRLEALVTRLRQLTELRTAQTNQRRLIKEATVLDGFADLLGCIRRQIRSLEQQIAELIDDDPLWRKLDAVFRSIKGVADRTVARLMADMPEIGTLSNKAISKLAGLAPLAKDSGQRKGPRPVRGGRSQVRSILFVVAEIVRRYDPDFAAFHKRLKDAGKPRKVVRVALAHKLLVRLNAKARECRAQLAVAA

SEQ ID NO: 235807 - protein, 343 aa, unidentified
MQAITTVGLDIAKSVFQVHGVDAQGEVVVRRQLRRARLLPFFQKLPPCLVGIEACASSHHWARELQALGHTVRLMPPAYVKPYVKRQKNDAADAEAICEAVQRPNMRFVPVKTPDQQACLMLHRTRHLFIRQQTAVINSIRAHLAEFGIVARVGRGGVTELLDIAADADDGRIPELARQCVQALGHQLQQLRMQILGLDRQINAWHRANETSRRLDELPGVGPALATALVASVPDAKVFRSGRDFSAWIGLVPKQSSSGGKERLGNITKQGDRYLRSLFTAGALAVIQYVKVHGARHRPWLTRLLERRPVKVAAIALANKIARMAWAMMAKGEAYREPVALAR

SEQ ID NO: 235808 - protein, 401 aa, unidentified
MLYLGIDQHKAQITVNLRNEQGDVIQQCQVSTGHAKIDEFFTGLKKQAARTKGFMAILEVCGFNDWLLKKLDEFGCKEIVLMQPDNSSNKKTDRRDANALCELLWNNRKRLKNGERLNGIRRVVLPTPEESGVRQQAHLRQHLVYQRTKCINKVRGILRKHNMEQDCPSKNYKTKKAKEWLKTLEFANPTDRMEIDIHLKIWETLDEQILKVEHEMAKQAETNKEVMLLVSIPGITAMGAITLLSRIGDIERFPNPDSLANYFGLTPGCRNSGETNRPGSITKAGSRIARHVLNFAIIQVTKKDKSMHDWHKAIKKRRGAKIARVAVMRKLATIIWHILKRRTMYQFRYDPIATTQPETKLNKKSRSGFSRHGNNAIDVSKRRSETKTPSPPRRQAKAKVP

SEQ ID NO: 235809 - protein, 385 aa, unidentified
MTATTRSFDPTALHNTLCLSFELGEGTWKLTFSPGFGENVVRRTVTSRDREAVLRAITAMKDHFGLPREARVVSCYEAGREGFWLHRFLEAHGVENLVVDSSSIEVSRRRRRAKTDRLDGESLLDLLFRHLAGSRKKVWSVVRVPSVEQEDRRHLHRELQSARRDRTRVTNRMKGLLANHGLTLDLKKNVAAQLAAFRQWDGRPLPMALRARLAREWERVEFYTGLIEHLEKERRVLLRTATDPAIEKIRQLNALRGIGTNSAWLYVMELFAWREFRNRREVGAIVGLTPTPDESGKKEREQGMSKAGNRHVRSMAIEIAWGWLRFQPESDLSKWYQRRFGGGSKRVRKIGIVALARKLLIDLWRFLETGVLPEGAQLKADVRIR

SEQ ID NO: 235810 - protein, 402 aa, unidentified
MIGIDPHKGSHTAVAIDHAERPLGELRVRASAGQAQRLVAWAADWPDRVWAVEGARGTGLLLAQQLLAAGERVLDVQPKLGARVRLLATGATGKNDPNDARSVAVAALRSPLVRQAGAEDHAAVLKVWAKRYRDLGRSRTQVACRLHAVLCALVPGGVSMEITAACAATVLASIAPADAAALARCELAVQFLDDLRRLDRQRPETRKRLAAEVRASGSSVTEVFGVGPVVAAIVLAEAGDIARFASRDHFAAYNGTAPVEVSSGPRKVFRLSWRGNRRLNHALHMAAVTQVRHRHSAGRAYFDRKLAEGKTGKEALRCLKRRISDAVFARLQADAQHVTAGQGAAGPGGHPGNDSASSAAGSHPARQLFGQATPEPGTTLRPDGKRPPACAKPDQKRPLKGS

SEQ ID NO: 235811 - protein, 408 aa, unidentified
MELLHPRCAGLDVHKDTVVAAVRCVSPPVHQEVRSFSTTTKGLLELSDWLTSHGCTHVAMEATGVYWKPVWHVLEEGFELVLANAQHIRNVPGRKTDVNDATWISELLAHGLIRNSFVPPAHIQELRDLTRTRKQLVREMSQHSLRIQKVLEDANLKVGSVLSDVLGTSGRKMLDALKAGETNPETLADLAVGTARKNRAALIESLRGRVTAHHRSMLKLHLDLVDALQKALDEVDVTLGKALEPIQARTALLKTMPGIGDLVASVIVAEIGTDMSRFPTAGHLISWARLCPRNDESAGKRRTTRISKGAVWLKTTLVTAAWAAARKKDSYLRAQFLRLKSRRGPKKAIIAVAASMLTACYYMLRDEVPYRDLGSAHFDRRDQTKLIGRLTKRIHDLGFDIELKPLGA

SEQ ID NO: 235812 - protein, 342 aa, unidentified
MEDHTTIAVDLSKSVFEIAVSQLPGRVSERKRLSRGQVVKFFANRPPATVLLEACGSAHHWARQIEPLGHRVLLLPPHQTRRYVLRDKTDGADANALLEAHRNEQIFPVPVKILHQQALAALHRIRSGWMGARVARLNAIRGILRELGLFIPLGAKHVLPGLGTFLADSQQPIPGEFHSTLLALVAEIRTLDFNIRDAEKQLAATAANSPDATRYLTIPGIGLITATALVAFVGPLQRFRSGRRFASSLGLVPREFSSGLRRHLGSITKRGDPYLRTLLIHGARSVLLAASRVKRPDRLQAWALSVLHRRGYNRAAVALANKLARILWAVSVHQTDYQSSAA

SEQ ID NO: 235813 - protein, 354 aa, unidentified
MQYIAFDSHKRYTFAVVEDKEKGRVMEQRIAHSNGAVRTFLSQCERGSPVALETIGSWYWIVDEIEAAGMIPRLVNARKAKYMLASSKKTDKLDARGLNTLQRTGTLPTVWIPAGSLRDIRELFRTRMVLMQQATRLKNRILSCFSKYGISFDETSDAFNRKGRTSLEAASSRLPANTRFSVHELLEELDAVNATVKHFEQRMREVQEESEEVRLLQTIPGIGPILSHVIAYEIGDIGRFPSAAHLASYAGTTPSVHASGGKVRYGHTPSEVNQYLHWAFVEAANIIAVNHRTLRFRHVALLYERLRARKGHSVAIGAVARHLAEATYWILTKREPYREPAPKHAHIVVSSREG

SEQ ID NO: 235814 - protein, 347 aa, unidentified
MNQIIRIGMDTSKHFFQLHGVDAAAERPVLRRKLRRNEVLAFFAKQPPTVIGMEACGAGHYWARELRKLGHTVKLMAPQHVKAYVKRNKNDGRDAEGLCEAMSRPTMQFVPVKTEKQQAALMLAGVRQQLMTRRTQLGNAIRGYAAEFGLIAAKGLDRIEPLLADITQDESLPELAREMFAMQGRDYARLQVELKAVEARLMAWHRGNDDSRRLATIPGIGPIGATALVMKAPDPRLFPSGRHFAAWIGLTPKDHSTAGKTRIGKITRAGDEMLRSVLVAGATAVIQQTKKGRGRPSPWLLALLARKSPKLAAVALANKTARIAWKLLTTGESYDGARMPDASALAA

SEQ ID NO: 235815 - protein, 344 aa, unidentified
MSIVTVRVVFVGLDYHQASVQVCVLAPDGRVLMNRKCANDWKAVAAAVRQCCGQEVAVLAAIESCCGAADLADELIGQAGWSVHLAHAGYVARMKQSPDKTDYSDARMLADLERVGYLPRVWLAPEEVRELRRLVHYRQTLTKERKNLKLQMGATLREARQKAPANANPWTKAWLAWLDASAQLSPNARPITSRRLRRLTALQEELRQVDKRLERQTREDPLVQKLLTIKGIGLVTATTLRAEIGRFDRFRTGKQLGRFCGLSPRNASSGQRQADAGLIKAGNNELRALLMETALRLMRCDERWTALAARLSRRGKPKGVIIAAVANRWMRWLFHQMQPSCLAA

SEQ ID NO: 235816 - protein, 418 aa, unidentified
MSAEENTSISRRYIALDIHKHYCVIAGVDREGRVLLPPVRVEHADLEAWLKKKLHSNDQVVIESTTNAWHVYDLLTPLAERVVVANPIKVKQIATAKVKTDIRDTLILARLLAANLVPAVWVPPIHIRQMRQLLSQRRQLVETHTQILNRMHSVAHRHHLKHERGKRFNEKTIGWQKDERLSKMEQFQLSLEMENKDYIEKQIERISQAVRKLCHQKPWADNMTYLMQLPGFGVITAMTVLAAIGEIERFETPKQLASYSGLTPGLEQSGTKHRDKGVTKEGRRELRWALVEAAQMAVKSDPLLKMKFQAFQKRMHRNQAIVAIARHLLELVWYVLTRRQPYHHFSHERIAYKYLTWAWRMDEAARDGLTRQQFARYYLMRLGIGHDLTRIALDPKHPRRLASEAEVLAIHPELNQVE

SEQ ID NO: 235817 - protein, 391 aa, unidentified
MLICGIDIGKNNHEASLIDESGKQLGKSLRFANSTQGGQSLLEYIEGHNIEKKVVVIGLEATGHYWLSLYCFLFDAGFQVNVINPLQSDAIRNLFLRKTKNDAKDSFLIAETIRIGRFSNTALADEDILSLRQLCRHRTDLVDYIADQKRKIIGVLDRVFPEYQKFFSDTFGKTSTELLNKAVTPEELLALPTGELCRILRENSRGRFGEAKAEEIRSAAKTSFGITIGTAAFTMQLRQLLEMIQLLEKQIVELETEMEQYLQKLNTPITTCPGIGNVLGAIIVSEIGDISRFSEPKKLVAFVGIDPSVKQSGDYAGTQNKMSKRGSPHLRRAIWLAANVAAFHDPVLSAFYQKKRSEGKHHNTAVGAVARKLTFIIFAVLRDNKPYVPLC

SEQ ID NO: 235818 - protein, 464 aa, unidentified
MSKRSMRKRVPKPGSKSEAFPLLNPNAAGIDLGSQSHFVSVPEDRDQRPVQQFGCYTTALHEMAAWLKGCGIETIAMEATGVYWVPVFEVLEDHGFEVLLVDARQVKNLSGRKTDIVDAQWIRHLHSYGLLRAAFRPKAETCEMRAYWRQRSSLVESASRQIQLMQKALEQMNVQLHKAVSDITGKTGIGIIRAIVQGERDPQILARMRDGRLKSSREELVQALTGHYREEHVFALTQALEGYDFMHRQIEGCDRVLQTCMKRLGGNRSSTATTKKSRRKNQPYFDLHAEQVRIAGVDLTRVPGIETLTAQAVLTEVGVDVSSFPTEGQFASWATICPNNRITGGKVRSRRTRHSTHRLAAALRVAAQSLSRSKSALGIYYRRKRARLGPQKAITATAHKLARIIYRMLKYGEEYVEQGLRTWEEQTRQHSIKTLTRLAKDLGYELVSQQTGEILPALPSPQQC

SEQ ID NO: 235819 - protein, 385 aa, unidentified
MHVGIDAHKRTCTVCVIEDGAVRESFAFPTTREGIYEFMERIPSPATVVIEASTTGKVISRMLADKHEIHMVAPPERKRPIKTDRRDAERIVREDMLQYLRRCYIPSAAIEEIRFLVFQQIQVGRKIGRVKNQVHALLERNMIHDLDGFSDIFGVQGLRRMVMVQLPAQEKAALARYLEELKLHAAHHRQLETELARLAESDRDALLLMSIPGIDFFTALAIKGRIGDIMRFPTKKHLCSYGAVVPGASNSGEYISRHNRVKHGDMILKSALTCAVRGAVSAEKNSAVKRFYLKHSKRMGAQKAEVAAARKMACIVWKVLRTQQPYMEEDKRLTARKRMRLSWKAKRQDSAPSDIRRLAEDLVGNVTVLERYPVGFNQEFGGRPT

SEQ ID NO: 235820 - protein, 348 aa, unidentified
MTVYIGVDFHARQQTISYLTTEDGEIKRLQLDHGQPKEVRRFYEQFAGQQVVVGFESSGYAAWFEEMLEELGSEIWIGHATAIRSFARRRQKNDRRDADLILDLLLRGDFPRIYRYSRASRQVLQQLRYRQRLVKMRTMVVNSLVFMAASRGVSLRTQLKSRRGLERLQQLALPEPLTAQRAELCQLLLELKAKIETVESWLEAKAESDVRVQRLRTHYGIGPLTGLCLVYTLESVERFANPRKVTAYVGFDPVEDSSGDRRRIGSISKQGSRLLRFLLVEAGQIAIRKDQDLARVYQRVLVRRGHAKAKVAVARRLLVRAFIMLRDEIDYAEFQRRGVAARSSRRTT

SEQ ID NO: 235821 - protein, 496 aa, unidentified
MVHETVFTRKMLPENVKQKPSTMKLYLGGDVSKGYTDWVILSEKKQRVLENFQLDDTYAGHCKLYSALEAYFDKHAGLEMYAALESTGGYENNWYNTLKSYQKVFNLKVARINPLGVNYNRRAGMKRNVTDAISAISIAEYMINHPENIAYDQDEKWKTLCRHWNFVEMQKAQKTQTINQLETILYCSNPALLRFKKDNLPNWLLELIIKCPTADKLAKARPENLAKIPYLTLKRSKELVAEAKQNIASATDRNAELLVSQIALQIKAFDQNIKSQMRLIEQEMSCQEIEVLKSFKGIDTTSAIGLLLEIKAVERFPAVKGISCYFGLHPKFKQSGDKVIGVRMSKQGSKNMRKILFNIAKGAITYNPLITEIYEKKLSEGMSKMAAIGVCMHKILRIIYGMLKNHQQYNPAIDKQNCERSKSKQQEKLMQENANIQKSRRYQEFDATAPISKKQTKKRKEHDLSQCEITSQSTGSTCSSNTKLQNVDNNKLRMTS

SEQ ID NO: 235822 - protein, 339 aa, unidentified
MKLYAGIDLHSSSSYLAIIDDKGVRKYKKKLPNNLEGILQQMTLYKKRIAGVVVESTYNWYWLVDGLEAEGYAVHLANPSAIQKYNGLKHADDKHDAFWLAEMLRLGILPEGYIYPKEERPLRDLLRKRGHLVRLRTSLIISLQNIISRNCGIKLPGDEAKRLKEDRVTTLLAQNEDLRFAGAVSKESIDFLTRQIKSIEKFIEPKIELKEPYGHLLSMPGIGKILALTIMLETGPICRFEHVGNYVSYCRKVGSQWISNGKAKGKGNKKNGNKYLAWAFSEAAEIARRYDAQVRAYYNRKLQKSNLMVAHSALAHKLARAAYYIMRDEVSFMPEKLFS

SEQ ID NO: 235823 - protein, 366 aa, unidentified
MSNATTFVGLDVHARSIKAVSVNVMTGEVASATFGYDAPSVAEWVRSRDPAAKCVYESGPTGFDLQKKLAALGIDCVVGAVSKMIKPPADRGRKNDRNDAEFLARTLAVGNVVEVWVPDGECEAARDLTRALEDARDECTRSKQMLLKFLLRHGLVFDETTPSGRRKGNWTAAHWAWIRGVSFEEKADNDVLSYYVDRVRQACEEKKRLERLVAAEAAKPRWKRRVDSVRCLKGIDTQIAADLVFEAGDFSRFKSARSFAAWVGLTPSEHSSGESVARGGITKAGNRHLRRDLAEAAWHYLSCSPHSKDLAAGQAPDPRARRHAAKGVRRLVERRGALLARGVQKNKVSAQSDTRKQTVDSLVTPL

SEQ ID NO: 235824 - protein, 265 aa, unidentified
MSTEWFVGLDIAQGAVDVAVRPTGETWHQSTDAAGLVSLTERLSTLRPALVVLERTGGYEHGVVAALVAARLPVVVVNPRQVRDFARATGRLAKTDALDALVLATFAEAVRPPVRALPDATTQEVQALLSRRRQLLEMHVAEHNRLEHAPPRVAHQIQAHLDWLRRQITDLEHELADCLQASPVWQARDALQRSAKGVGPVLSLTLLLDLPELGILSGKQIAALVGVAPFNRDSGTRRGGRTIWGGRAAVESRRKWPWSPACVSL

SEQ ID NO: 235825 - protein, 340 aa, unidentified
MTITTIGIDLAKNVFAVHGVDQNGKTVLVKSRVIRAALPGLIAGLPLCVIGMEACSGAHYWARLFRQYGNEPRLMAAKFVSPYRMAGKSGKNDAADAQAICEAVRRPHMRFVPVKDESRQAMQCLHRPRQGFIEEKIATYNRLRGLISEFGVIAPQGTDALRHIVSAQKNSLPLQVQQCVDDLLEHVDRIEANITEYDQILPRIAKTDHRSQRLMKLKGVGPTTTCALVACIGNAHDFKNGRQLAAWLGLIPSQYSSGRKSKPGRITKAGDSYLRTLLVQGARSVLIGAEKRTDSFSRWVCSLVERRGYWRAVVAIAAKSARLCWASLHYGDDFRLYSAS

SEQ ID NO: 235826 - protein, 346 aa, unidentified
MEIETIGIDLGKTGFHLVGLSAAGEMVVRKKCSRKQLLQFTATLQVRLIGMEACCGSHFLGRALREQGHEVRLMAARYVKPYVKTNKNDYIDAEAIAEAVGRPRMRFVPIKTDDQLDMPSLHRVRESWVGRRTAVINQIRGLLLERGITIRKGRHHAEVALPQILEDADTNLSGRLRILLAHLQQELRQLQSQIDEIDVGIVQTAGEHEACQRLMAIPGIGPVTATAIVSAIGNGAEFKRGRGFSAWLGLVPGQYSTGGKQTLVGISKRGNCYLRRLLVNGARAVLQCKEKQSPGLHAWLSKLASRAHSNVVAVALANKLARMAWAPLTKGELYRPPLLAAEAVPV

SEQ ID NO: 235827 - protein, 330 aa, unidentified
MKNYKEVVGIDVSKKTIDAYCYQAQVHKEFKNDIVGYKSLLNWVLKVSKGVLVFYCFENTGYYSLKLALYLNSQKVVYVEESPLKIKRSSGIVKEKTDRLDASLIARYGWIYREELSPSTVKSTAHLELGRLLALRDQLVRNNAGLKGTLKEMKVFLTSSTTDAGCISLKRSIDYLSKQVKAIEIRIEALIFDDVLMQKNYELLSSLKGVGFVVACQLIYHTGNFTRFDTWRSFSSYCGTAPFAHESGTSIKRRKQCHYLGDRKMKSLLSMASISAIQHDSELRIYYNRKLAEGKDKMLAINNVRNKLIARAFAVVKRGTPYVVLQNYAA

SEQ ID NO: 235828 - protein, 343 aa, unidentified
MGEVSTIGLDIAKSVFQVHGVDGTGAMVMRKRVGRSKVLEFFAGLSPCLVGIEACPSAHYWSRELQALGHTVKLMPPSYVKAYLKRGKNDANDAAAICEAVTRPSMRFVPIKTQDQQTGLMLHRIRQLLVRQRTMLSNAIRGHMAELGIISAKGRNGTAELLQIIGDMADDRIPPVARFCLDLLARQYLSLSAEVSSIDKRIHAWHRACEESRRLEEIPGIGPIVATALVAEIGDWGAFRSGRNLAAWIGLVPKQHSTGGKERLGSITKQGNRYLRWLLVTGAMAVIRYARAHGTKRPWLTRIMDRRPAKVAAVALANKIARMAWAIMVRAERYKEPKLLQAA

SEQ ID NO: 235829 - protein, 407 aa, unidentified
MELLHPVCCGLDVHQQTVVACLRRAEAGAVTQEVRSFGTTMADLRKLAGWLQQAACPIAAMESTGVYWKPVYHLLAPTLEVLVANPRDVKPRKGDKTDPKDARWISELLAHGLIQPSFIPSPHLAALRDLTRLRVSLVNSRTAAKNRVHKLLEDSNLKFGSVLSDLFGTTGRHILDLLAAGERQPQVLVQEARGRARKRMAELEAALEGCFTEHHAFLLKLHLTQIDLFNEQIQAVDREIQVLCEALQPEIEQLDSIPGIETVAAQAILAEIGPDMSVFGSDKRLAKWAKLCPGNNESAGKRRSGATGKGSRYLARILVQAAWAARKTDSFLGKTFRRLEYRLGGKKAAVAVAHKILRIIYHLLVEGTFYDEQRYAQDYERAEQKHLRRAMQLVTQAGYQVVLPQTA

SEQ ID NO: 235830 - protein, 369 aa, unidentified
MGEDSTVFVGLDVAKDRHAVAVAEAGREGEVRYLGEIGADTVSVRRLVARLAKRHGKLHFCYEAGPTGYGLYRMLTAMGHGCSVIAPSLMPRKPGDRIKTNRRDAVQLARLLRAGELTEVWVPDGAHEAMRDLLRLRDAAVNDVRRKRQGISSMMLRTGRVFEGKTSWTRKHRQWLQRQRFDYPAQDLVLQDMLVALQQAEARLEQVEDKVREFVPQWSLAPVVAALQALRGIRLVAAASIMAEVGDLGRFATARQFMGYLGLVPGEHSTGDKVRRQGITKAGNTRARRTLIESAWSYRHLPRTSPRQRRAQEGVSPAIKAIALKAQSRLCGRFRKLAAKGKPLTVANTAVARELAGFVWAIGRAALAV

SEQ ID NO: 235831 - protein, 412 aa, unidentified
MILIENMYVGIDVSKDSLMAHAMDQDGKDIFHSFKVRNNKPGCNKLIDFIYKHAKQSDFELIKVGMEATNVYWEHSHRLINNSEKLNSNFKLITYILNPKVVKKFKDAYNSLPKTDSIDAWVIADKTRFRVPKPTIPKEVYRPLRELTRFRYKLVKNIRSEKNRALSLVFLKFSDLKEDVPIDIFSEASMTILESFTLEEIADKDLEELAAFLHENSNNRLGGSTPLNKIITDLKKAARNSYRLKPKMNQAITQTLSMTFDNIRFLQSQLNRSKKVLARELKAIPQTLDTVDGIGVILTSGIIAEIGDIDRFHNQAALASYAGLTWTKHQSGSFVAEETSMTKTGNKYLRYYLVEAANSLRVHNDEYRSYYYKKYHESQKHKHKRALVLTARKFVRLVFALLSKGEIYQPRR

SEQ ID NO: 235832 - protein, 354 aa, unidentified
MPRKTTSLEAVATIGIDIGKNTFHLIGLDKKGAIVLRQKLSRGQVDNRLANMPLCLIGMEACVGAHHLSRQLKALGHDARLMPARYVRPYSKGQKNDFRDAEAIAEAVLRPTMKFVAIKAVEQLDLQGLHRVRERLVCQRTSVINQIRAFLLERGIAVRQGLRALRTEIPIVLAMTDKLSPRMIHMIEDLCTDWRYLDGRIATVSNEIEMLSEQDDGAKRLMTVPGIGPIISTATVAAIGSGDVFSKGRDFGAWLGLVPRQMSTGGRTILGPISKRGNRYLRMLFVQAARAVLLRPQSWEKHGLKSWIEAAARRLNRFKLAIALANKLARIAWGVLHGGRNFEVRPLRPAPQAS

SEQ ID NO: 235833 - protein, 418 aa, unidentified
MQTELSQFTAIIGIDWADKKHDVCIQSTESGQRQTYQVPHKADKIDEWAQSLVRRHGGPMAVALELSKGPIVAALQKYDFFVIFPINPTTLASYRKTFKPSGAKDDPTDAELALDLLLHHPDHFQALNPQSVEMRTLMTLVEQRRRLMNDRVRITNRLRNALKQYYPQALEWFDRIDTLLFCDFIKRWPSLTQVKRARHATFQKFFHEHNMFRTALLEQRVTAIKSATPLTMDEAVIVPYRLQALTLVAQLELALESIRTYDEEIAALAPQHPDYGLFSTLPGAGPSLAPRLLVAFGEQRDRFASAAEVQKYAGIAPVTERSGQKTWIHWRWQCSTFLRQTFVEWAAQTINKSYWAGLYYYQQRAKGCSYQAAVRALAFKWIRILYRCWITRTPYDEARYLKALKDRGSPLLTAAETA

SEQ ID NO: 235834 - protein, 310 aa, unidentified
MEVIIDKGCGLDVHKDTVASCVMGSGIKKEIRTFRTMTGDLYKLKEWLEEKGITHVAMESTGPYWKPVFNVLENSFEVVLVNARHIKNVPGRKTDVKDCEWICRLLRSGLLTASFVPPRPIRELRDLTRYRRKLTQAISSEKNRIQKVLEDANVKLSSVVSDTFGVSGSRMIEAIMTGDFDLDSIANLAVGRLKSKKDDLKKALEGHFRDHHRFMIQASLDHIESLEKIIAQLDQEISEKLKDYHREVELLQSIPGVKEQGAALIIAEIGADMDVFPTEGHLSSWAGMSPGNNESAGKKKAARRPTAIKI

SEQ ID NO: 235835 - protein, 347 aa, unidentified
MRFYTKQHKFYCGIDLHARTMYVCVLNQDGEVLLHRDMKAAPEPFLKAIASYREDLVVCVECIFTWYWLADLCAQEGIPFVLGHALYMKAIHGGKAKNDRIDAHKIAVLLRGGMLPQAYVYPAGMRATRDLLRRRMHLTRKRAELLAHIQNTNSQYNLPEIGKKLAYKANRDGVAERFPESAVQKSIDLDLTLIDAYDRLLTDLELDLVRTAKEHDAQTFYRLRSIPGVGKILALVLLYEIHDIQRFPRVQEFVSYCRLVKCAKESAGKRYGTSGKKIGNAYLKWAFSEAAVLFLRNNPAGQKYRARLVKKHGKGKALTVLAHKLARAVYYLLKRDTAFDMDKFFNE

SEQ ID NO: 235836 - protein, 482 aa, unidentified
MKPKPQEKSKRAINHPTQHHWHEMNRKQRRETMRKIQSEDLSLEVIHPDAAGIDIGNESHYVAVPPTRDSHPVRRFGCTTGELKAMADWLKQCGIRTVAMQSTGVYWIAVYDILEQAGLEVYLVNARDTKNLPGRKSDVQESQWLMKLHTYGLLRNSFRPSQEIRIMRTYWRQRNDLVQSAGRHILRMQKALTQMNLQLANVLSDVSGVTGQAIIKAILAGERDPHKLAAFRDCRVKANEEQIARSLEGNWQEDLLFVLQQEQEGYQFCQKQMAECDRQLAQYLQQREDRSQGAPLPEEKRKGRLKKKKGNAPQFDLREGLFHLSGTDLTRIDSIDVMTATTVISEAGYDMSKWETEDHFVSWLRLCPDNRISGNKVIGKGRLPTNNPISITLKIAASTLRLSKTYLGAQFRRFRPRLGAPIAIKAMAAKLARLVYRMLRFGMKYVDQGAAFYEAQHRQLQIKYLKSKAANLGFQIVQAPAA

SEQ ID NO: 235837 - protein, 441 aa, unidentified
MADRGSTTRGMAIVPRGGHQVKKKVRIVGFDCAEDEHAAVLLDVSGEFERRVDVINERGQIQESLAELMLAVGPNAQLVVVVESKRSHGRIVADVASELGCEVWQVNTVALNHYRDLEGQPRKDDEWDAYLAARMVYLRMGGCRVAIETTEEERVLSRLTRTYSRLIEDRKRQVARLRAVFLELAPEMLHASWAGPQPGSKAMLYLLERWPGFEGLERAQMRSIEKILRRCRYGSRATQVAKLIRKMARGISVPAEERSAITMELNFLVRQIRFCNESADQVYIEITHRVERHPVGQKLLEMHGNGPVITGVLVSELFPVARTSTEPKCATYAGVTPLSRKSGKSLDKDRLTQGVNKRVLHGLYTASVVAIKNSAVDRAYYQKKLRDYAGHPKPHVAAFIALSRQRHKLVYKLMTTDARYDKEILIATHLARLEQERTAAA

SEQ ID NO: 235838 - protein, 349 aa, unidentified
MQDITTVGVDLAKEVFAVCVLDQTGAVVYSKVLKRDAFISWAEQLSPCAVAMEACGSAHYWGRWFAARGHTARLIAAEFVQPFRKSVAAKNDRNDAEAIAIASRQPTMRYVAIKSVEQQSILAWHRMREGWKEERTALLNRLRGLLGEFGVWPDRSSDKLIRALPGLSEDERLPLGVRAMVIETREHLTALHTRLAQCDQEIGRHAHTHPGAKRMKEIVGIGTLTASAAAATVVDAKSFRCGRQFAAWLGLVPRQMSSGGKARLGRISRRGDAYLRSLLVQGAKSALQAALRQTPEKANRLQRWIVDVYGRVGYHKTLVAIANKHARMIWAMLAKDERYDPSAWQRSSM

SEQ ID NO: 235839 - protein, 394 aa, unidentified
MIYVGIDVASRKHDIVITDNQGVVFKKPFKILNNLDGYKKLLSEICLASEFFNDKNSRIGLESTGHYSRNILHYLILAGCDVMFINPLLTNMDRKASSVRKTKTDAIDAKAICMFLIRNQNNFKPYTLSSYHIDELKTLVRLRKSLKKQINKDMNLLHAYLIQAIPEYYNVFRKIDSKASLEVLVRYASLSELKKVRLNTLSELIRKTSRGHHGLLQAKALKSLPLTSIGIDSQALSFAIKQTLVRINMLNSQIKSIEMEVKLHVDKADTTLLSIPGISYTTGGIILAEIGDIHRFNSTDALLAFAGLDPSVYQSGNYEGNFKISKRGSSILRWAIYQSAQAIVKFDPVFKEYYLKKKAQGKKHRNVLGHVTKKLTRVIYSILKNNSTYIIQAH

SEQ ID NO: 235840 - protein, 409 aa, unidentified
MAAVMIGVDPHKGSHTAVVIDQAEMALGQVKVRACAAQVQRLLAWAAAWPERTWAIEGAGGLGHLLAQQLAAAGERVLDVQPKLAARVRLLAAGDVNKNDPDDARSVAVAALRSAACPPVRADDHAAVLKVWAKRHRDLSRARNQVVCRLHAVLCELVPGGVSKQIYAAAAARILDQIQPAGAVQAARRELAGEFRADLRRIDAQRRDTRNKLAAAVRASGTTVTEVFGVGPAVAATVIGDVRGISRFPSRDCFAACNGTAPAEVSSGNRKVYRLSLRGNRRLNHAIHMAAVTQIRCKHSKGRACYDRKLAEGKTAKEALRALKRQVSNAIYQRMKAGARRAATTAGPGGHLGNGSVASAAGSHPGHRLFGQATPGPEPTLRLRPGRSKATRPPSSRPARRPVPAHTST

SEQ ID NO: 235841 - protein, 357 aa, unidentified
MTKVNQKVDFAGQTIFVGIDVHLKSWNISVYYGTQYLTSFNQPPTPQALVAYLQNSYPNAIYKCVYESGFCGYWIQRELVEKGINCIVVNAADVPQTDKAAKNKTDTNDSKRLAQALQAGLLQAIYIPDGEIEADRQLVRCNERFNNDLIRAKNRIKGLLYQLGIKLPDQFANTNWSNLFIQWLKELELKNVSAKIALQHQLKMVELIREEKLAVLKDIRCLLKKERYAATANCLMSVPGIGPITAAALVTEIDDMKRFSNFEQLNSFIGYYPSQFSSGENIHQGNIIGRKHKRLRSLLIESAWVAIRTDPAMTKAYNDFKIKVGGKRAIIKVARKLLSRIRYVWLNQTTYEKGIVQ

SEQ ID NO: 235842 - protein, 370 aa, unidentified
MTQYATSIGLDVHARSIAACAFDPMTGEVTRASFGYDPAAVAEWALSFDAPRAVYESGVTGFHLCRALRALGLDCVVGAVSRMQKPSADRRRKTDRRDAEFLARLLATRNVVEVDVPDEECEAGRDLSRALEDAREDLHRARQRLSKFLLRHGLVFDERTPTGARKGNWTRAWWAWCRSVSFAEPDAQAAFEHYKDEVRRLEDAKRSLARKVADAAARPRWKPRVDALRCLKGVDVVTAHALVVEAGDFSRFRGAPAFAAWCGLVPSEHSSGEGQSRGGVTKAGNGHVRRLLVEAAWHVPMSGRDPKELAAGQEVAPAVRRHATKGVRRLIDRREAMAEAGKRPAVANCATARELACWVWAIGSMVEAGA

SEQ ID NO: 235843 - protein, 453 aa, unidentified
MEEKDHKKVTLKKKKRFTRGLPVFNYYAAGIDIGDTIHDVAINDGTEGHLVREFPCFTEDLEELVSWLVSEGITTAAMESTGVYWLNLYLLLEASGIEPYLVNAKHVKNVTGRKKDDTDAIWIQKLHTCGLLQKSFQPEEEIRVLRTYVRQRRNLLLASSDNVRRMQKALELMNIKLHTVISDILGKTGLLMVESILKGEHDPQELIKLKDSRIKASDEDIKKSLKGIWREENLFMLQQAYDGYIFYQKQVKACENKIRKILLDQAAKVLEGDITSIELTRTRKPVKNQFNFNARPLLSAIVGVDLCNIEGISEAGAVELISEIGVDMGKWKSHKHFAAWLNLAPNTKITGGKIISSKMQKKKNHAGQTLRMGASTLYNSKAPIGEYSRKMRSRLGKKGGVVATAHKLARIIYVMMKQKKEYNNEILIAEKENWKQKRILYLERQLQQLKEVA

SEQ ID NO: 235844 - protein, 391 aa, unidentified
MVCVGIDVAKDKHDCCILDSEGTTLVDCFTIPNNMDGFKSLLQTIQDCSQKSDKIKVGLEATGHYSYNILGFLLDNDLPVYVMNPLHTNLYRKSLSLRKTKTDRVDAKTIATMLLSDVDLKSYTDTAYHNEELKSLTRYRFDKVQERAKLKQSVSRLVTILFPELEQLVSSIHGTSIYALLREYPGAKQISEAHLTRLANILVKTSRGHYRKDKATHIRDAARTSIGSVMPAKSLELKHTIKLIQELTSEINEIEDAIRKIMDELKPPILSIPGMGFHSAAMILAEVGDFSNFNSPDKVLAYAGCSPSTYQSGKLTNCYAHMEKRGSRYLRYALYTATKYVCYWNPVFTEYLTKKQAEGKHYNVALSHATKKLVRLIYALQKSGKVYLAVT

SEQ ID NO: 235845 - protein, 343 aa, unidentified
MQSITTIGLDIAKSVFQVHGVDAAGQVVMRRQLKRRRVLAFFEKLPPCLVGIEACASSHHWSRELQALGHNVRLMPPAYVKPYVKRQKNDMADAEAICEAVTRTNMRFVPIKTTEQQSVLMLHRTRHLFIRQQTSVINAIRAHLAEFGIVAPVGRRGVEELLNVVADPSDKRVPDVVRTCVAALGSQLLSLKKQILDFDRLIMVWHRSNATSKRLNCIPGVGPLLATALVANVADPKTFRSGRNFSAWIGLVPKQHSSGGRDRLGSISKQGDRYLRSLFVAGALAVIRYAKIHGTKYRPWVAALLARRPTKVAAIALANKLARMAWAMMSTGQRYNYPASLRV

SEQ ID NO: 235846 - protein, 459 aa, unidentified
MSRAQKKPKRLPTDATEGLPVLNLHAAGIDVGNREHYVAVPPGRDPQPVQRFGSFTADLHRLAKWLVACRIETVVMQATGVYWVGLFQVLQDYGLEVQVVNAQHTKTLPGRKTDVQESQWLQKLHTFGLLNHSFRPAEDTRVLRSYLRQRENLVTSASICLQHMQKALTEMNVQLANVISDISGVTGMAILRALVEGERNLQKLAQLKHKQIHASRAEIVQSLEGNWREELIFVLRQSLDLYDFHLAKIEECDRQIETHLKTMESKVDVSIHPMPPSRQGQKRRKHGPRFDLRQQLYRCTGVDLTKIDGLDVQTVQTVISEVGVDMSHWPTESHFASWLGLCPDNRISGGKVLKRGTRRVVNRAATALRIGAWNLIRSQSALGAKFRRLRARLGAPKAITAMAHQLARLLYRMLKFGAAYVDKGMEHYEAKYRLQQMKWLQKQAAAFNLQLIPVQGVPE

SEQ ID NO: 235847 - protein, 347 aa, unidentified
MRFYTKQHKFYCGIDLHARTMYLCILDQEGEIKLQRDIKTDPEIFLRTIARYREDIVVGVECIFTWYWLADLCARENITFVLGHALYMKAIHGGKAKNDKIDAHKIAALLRGGMMPIAYVYPPEMRSTRDLLRRRMHLVNKRAELLAHVQNTNHQYNLPEIGKNLGKKGNREGVADRFPDVSVQKSIELDLSLIDHYDQLLHRVEHEISLIAKKHDADSYFRLRSVPGIGRILGLVILYEIHDISRFERVQDFVSYCRLVKPARESGGKRLGSSGKKIGNVHLKWAFSEAAVLFLRRNPEAMKYREKLAKKHGKAKSMTIIAHKLARAAYYILKRKEVFHIETFFAR

SEQ ID NO: 235848 - protein, 358 aa, unidentified
MTQVKQIDFTGQNIYVGLDAHKKNWRVTVMAEDILYKTFSQPAEPEVLNKYLKKNFPGANYHSAYEAGFCGYWIHDKLLSFGIRSIVVNPADIPTTDKERVQKEDSRDSRKIARSLSNGTLTPIYIPSLKTQRDRSLMRTRGMLVRDMTRYKNRIKSYLYFYGITIDGSFDSPQTHWSNRFITWLESIDTGDASGKETLKVLISEVKHLRATILEVTRQIRQLSQEEEYRERVTLLKSVPGIGIITAMTILTELETINRFSNLDKMCGYIGLVPSTKSSGEKEKTGDITPRGHSVLRTAIIESSWMAIRNDPALMKCYVSYLKRMEANKAIIKIARKLMSRIRFVLNNNKPYECLIEK

SEQ ID NO: 235849 - protein, 428 aa, unidentified
MEAIIERCCGLDVHQAKVVACVLIGKAHEKPKKEIRTFGTFRRDLEALAEWMRTHGVTHVAMESTGVYWEPVYAVLEGAFEIIVGNPRRIKNVPGRKTDVCDAQWIADLARHGLIAKSFVPPKPLRELRALLRYRTKLVQSRTAERNRLQALLERANIKIASVITDIFGVSGMLMLKALVDGSMKPTEISRLARGKLRKKIPTLEPALDGRLQEHHRFMLRLQLKRLQAVDDDIAELEQDIDQKLTPYKAAMELLAQIPGVDWVVAAVLVAEIGTDMTAFGSPTRLASWAGVCPGNNESAGKKKSSRATKGNAHLRAILVQGAVAASRKRGSYFRDKYYRLKARRGANRAALAIAHKILVAVYHMLSSGQPYKDLGDAYLDSLSKHRTTNSLVERLKRLGYDVTLQPRAAPGSPPSEPATAIPLQAIT

SEQ ID NO: 235850 - protein, 323 aa, unidentified
MSNKGTKKRRSFIGIDVSKKLLEVGVHQSDYHFRCPNDPKNFPALITELISLRPARILLEATGGLERALLQALHAVGLPVVVVNPRQVRDFAKALGLLAKTDRLDARVLAHFAASIQPSIRPVKAQQETELDALMGRRTQLSDMLTQEKNRRGSAATKATRNDIEEHIEWLEDRIKELDEKLKEQLECSAVWQQKDRILQSVKGIGFVTSLSLLADCPELGQLNRHQIAKLVGVAPLNRDSGQQRGSRHIWGGRAQVRSKLYMATLAAIRFNPVIKAFYQRLIDRNKLKKVAIVACMRKLLTIINVMVRENKCWNVKAQPLSA

SEQ ID NO: 235851 - protein, 370 aa, unidentified
MNNATTFVGLDVHARSIKACAFVPETGEVERRSFGYEPGELASWMKSLPQPAKCVYESGVTGFHLCRELRAMGVDCVIGAVSKMHRPAADRGRKTDRRDARFLAVQLALGVVAEVHVPDPECEGARDLTRALADARDDAVRAKQRLSKFLLRHGHVYDERNAAGQRKGRWTRDFWAWVGRIDLGDASAMATLDHYCECVHRADAEKAALEAKVKSLAQAPRWKPTCDALRCLKGIDAVTAASIACEADGFSRFGRASGFAAWIGLVPSEHSSGESQCRGGITKAGNRHLRKLLVEAAWHYKSASRAPKGLAKGQSVPPDARRHANAGVRRLVDRRRAMDAAGKQSSVANVAIARELACWCWAVGRMAEGA

SEQ ID NO: 235852 - protein, 343 aa, unidentified
MKKPDFFIGVDTSSDTFVVSVGTGEPWRMLSTSPIYENSTSGFEDFLKWLGQNGYTPDRSIICMEATGVYGQALAYFLVAHNYRVAVEPPLKVKRAFPTHGHKNDITDSQHLTEYAYRFFDELHMWQPPDNVLKQVRTLIKTREQLTKNLSSYQSTLKILRREVVRTPLAERMYEDLMKELKSLIKEIDEQIKSLMEQHPFFKHKFELLLSIPGVGLQLASYILVITGNREPRANDIAAYVGICPYEHTSGTSVRRRPRCRRNGPGSIRKLLYLSALSLRTHQDHFNRYFMRKVAQGKPKKLVINNISNKLLRIMCAVMKSGKPYIPGYVSIRPEFPRVTKCA

SEQ ID NO: 235853 - protein, 384 aa, unidentified
MSIPSHAAVSTQLNAIFVSLELSRSTWLVTSLSPGRGERISRHQVKGSDMPALLERFAQLQAKARERTGEQYPLVVIQEAGLDGFWIHRCLVREGIESHVVDAASIAASRRSRRAKTDKLDGEALVRTLLAYKRGEPRVCAMVTVPSAEDEDRRRVCRERRSLVVERIRHVNRIKGLLFAQGVGGYEPLRMNRRARLEELVTGDGRPLPSHVKREIERELDRLELVMRQIKEVERERDAMLEAATDEAPKPASARLLQLRGIGPEFAGVLHAEAFFRSFSNRRQVACYAGLAPSPWQSGNMDREQGVSKAGNKRLRTTMIQVAWLWLRHQPESELTRWYAERVQANGGRIRRVMIVALARKLLIALWQFSSAGVVPKGALLKAA

SEQ ID NO: 235854 - protein, 456 aa, unidentified
MPSSSTNEPDFAAFIAIDWADREHAWALQVPGGARRETGKLTHTPEAIDAWAMQWATRFSGRPVAVALEQSRGALIHALQKYPHLVLYPIHTSTSYDYRKAMRPSGSKSDPGDADLLLDLLTLHRDRFRVLRPDTEQTRKLQVLVEKRRQLVDERKAQTNRITDQLKLYFPQVLDWFDELYTPMVVAFLRRWPTLPQLQQEDPAVVRDFFHQHGSRSQQRIDQRLVQIRQARAALEDPAVVEPAVLMVRILLGIVEALNDGIRAMEQSIQEVASAHPDYEIFSSFPGAGPAMAPRLLTAFGSQRDRYRSAGEVQVYSGIAPVQEASGKQLWIHFRWGCPKFLRQTFHEYAALSIQFGGWARAFYDKQKAKGKSHHAAVRSLAFKWIRILFRCWQSRQRYDDKLYEAARSGRAVPIVSQNPQDSAVSGRQAQSKSGKHQDFKLKSAGEILKSLMAEA

SEQ ID NO: 235855 - protein, 401 aa, unidentified
MAMQVSRERSKTVHHIGIDLAKRKHSAAVVGGDGERILRGFEFANDAEGFASLLEKLASVGAGCDDSGVCLEATGHYGRNLIAFLEGHGYEVFEVNPLLTSNWRKATSVRKVKNDAIDAEALALWLLAGNPTRRRRSKSESDDLRSLARSRTSLSHIVGDCKRRAHAILDVVFPEFHGFFADDFGKSASAVLRRWGSAEALAKARVDSVEKAIRSGGGRRFTRADAERLKELARSSVGQPSAPLSFQLRQLLDQIEFTRSQMKELDAELEKLVGDSPITTVPGVGIVCAAGILGEIGDVSRFEDASKMLAFAGCDPSVFESGEFVGAQARMSKRGSPFLRWYLWLAADRARMYDPALRAYYEKKRAEGKCHKVAVSAVVRKLCNIIFAVLRDDRPYACPVN

SEQ ID NO: 235856 - protein, 353 aa, unidentified
MVVVKDHQQREPSMGDITTIGLDLAKSVFQVHAIDEAGKVMLRKRLRRSQVLAFFAKVPPCLVGLEACATAHHWARELIALGHEARLMPPNYVKAYVKRNKHDVADAEAICEAVRRPSMRFVPVKTAEQQSALMMHRARDLLIRQRTMLVNALRGHLAEFGLIEAQGLHKVARLIAIVMDETDGRVPDIARQVLKVIVNQIEDIQTRITGLEMQVLAWHKSNPVSQRLATIPGIGPIIATAIAATVADPNIFRSGREFAAWLGLVPRQNSTGGKARLGGISKRGDSYLRRLLVKSAHTVLLCSKQAKTDPWLTSLLSRKPRLVVAVALANKTARMAWAVMSRQDIYRHAAVAA

SEQ ID NO: 235857 - protein, 359 aa, unidentified
MRIIGCDLHARQQALAMLDTETGELVNLMLWHEGNEVREFYSQLPRPVLVGIEATGSMHWFLNLMEELGIECRVGHPAMIRAAAPRKQKTDRRDAELILQMLVEKRFPAIWLPTKELLDLRALVLHRHQWVRIRTRIQNALQAIALANGLRRGPSLWSYDGQAKIAFLSLLPHASYRRSMLQEMYRKMEEEIENLTQRVAEQAGQRCGARLLMTHPGVGPVTALATEVFLGDARRFVDGKALASYVGLIPREYSSGARQRLGGVTKQGSPLLRFLWCEAGAHAVRRDPELKRFYRRKLVQKGLGKARVAVARKLGIRLWIMLRDEIDYQEFCRRGQKQQSGAACAGKPEVAYGAKSPAD

SEQ ID NO: 235858 - protein, 399 aa, unidentified
MGKLIERCAGIDIGKRFLVCCVMTGAAHEEPRSETRRFDTTVPDLKRLRNWLNEERVTDVVMESTGSYWIPVFNLLEGHVTVVLANPEEVKNRKGHKTDRKDAGHLADLLRHNHLKSSYIPAEPVRQLRDLTRRRVQLTQDATRERKRVQKLLEQVNVKIGSVLTDVFGVSGLHMLLALLDGWAAPEEIAGLARGSAKRKTPQLIEAIEGNRMSDHVRFLIRGCLRHLACLEEEVEELDAEILRRMQLSTFQKAFTLLQTIPGVGQLSAATILAETGPDLDSFPTIEQMASWAGLCPGNRESAGIQKGPQTTHGNPYLCTALVQCAWAATRKRDSVFRSRFQRLAPMKQGGRFVAPKNAPKQRRRERRAHHHLRCLRRLGLSVETRLTPESTPLDSISR

SEQ ID NO: 235859 - protein, 362 aa, unidentified
MPMLAELIDAVVGVDTHRDTHEVELALPTGTPIGTRKISNDNSGFAELLAWILDHAPGPRVVVSIEGTRSFGVGLARAVAAAGLTVIECEQPNRKARRGKGKSDPIDAHLAVLAALRLDADRLPIPRADGDREALRILLGTRHELTVVTTAQTNRLRALLLGGGDTERDLARATLTDPVLLAMVRRREPPHASREQAVRHSEIRRLAHALRAGRHTLAANRAQLQTIVDQIAPGLTQRRGIGAVTAAQAIVSFSHPGRCRSDAAFAALSGTSPLQASSGKTVRHRLNRGGDRALNSAIHTIAITRMRCCPTTKNYVARRTAEGKSSREIQRCLKRYIARQLYRALNASTTLTAQISAPPAAA

SEQ ID NO: 235860 - protein, 349 aa, unidentified
MTTACSVTLGVDTHKDLHVAVTLDQLGRRLGVATFGTDDAHHASLWAWASDFGPIGQAGVEGTGSFGYRLAQFLTSSGVQVFEVNRPNRVTRRRRGKSDPLDAEAAARAVLAGDATATPKHRTGPAGQLRALLVARRSAIKARTQTEQQLRSLILELHDDKRAQVDRRRIVDLTSACAALTGTDGTSLALRALARRWQHLDQEVGDNDQHVTAIIRRVTPGLVARPGIGPVCAAQLLVTAGDNPDRLHSQAAFAALCGASPVEHSSGKTQRHRLNRGGDRAANSALWIIANNRLMHDPQTRAYAARRTATGASRKEILRLLKRYIARQVFPEIRHALSPPDALPDNSLT

SEQ ID NO: 235861 - protein, 349 aa, unidentified
MKVLIGVDPHKASVAVAAVDEVAGELVEGASFLQDRAGLRSLERWAKRFPERRWALENASGLGRHLAGRLAAAGESVVDVPPKLSARVRVLSSFAGNARKNDGVDALAIALAARHNERLVTVDPEAASEVLRLLSERREDLVAERTRALNRLHGLLRDLVPGGVAGTLSAHRAARILRGIRPKGGDSAHLRRRLASEILRDVRTLDRKIADLNGRIEAEVEASGTTLTEIFGIGPILAAKIIGTVGNVGRFPTKAHFASYSGTAPVEASSGEVVRHRLSLAGNRNLNYALHMVATCQARSDARGGAYYRKKIAEGKSRKEALRCLKRRVSDAVFRSLVADSQAPSRGVA

SEQ ID NO: 235862 - protein, 428 aa, unidentified
MESVKAEETWVGLDWGDKEHAVALLTPATGALVRFTVPHTPAGMGQLRERLAAAGVVRGVAIERSRHLVVDELLTAGYTVYPINPKVAKTWRDASGVQASKTDARDAETLARGLFQYGGQLRALKPDDPQTAELHGLCHGEMALIAQRTALVQQLQAALKAYYPEALDWFADWTTPTSWDFVVAFPEAAALRVASRKKLCGFFAKRGLGPRPCWLAKIDARAAAPAWCADPVTVAVQSQWAAALVKLLHAVDAALAVYAKRIAAVFAAHPDAAIFASLPGAGKKLAPRMLIIFGADRARYEDAGGPQKLSGTVPVTVRSGGQRPKEKFRWACRPAARQTMHLFADCSRHRCDWAQAFYAHARAAGDGHAEALRKLGVKWLKIIFRMWQERQPYDEARYLNALIRHGSPLIARMRETATEKPAACEQRA

SEQ ID NO: 235863 - protein, 320 aa, unidentified
MEQYIGIDVAKEELSVFDGTNERIFQNRQGLSTFRAYLRKAFPDLCKVVLIFEATGPYSQYLIELCASHGIKAWVVNPKKSSHFAKALGNRSKTDPIDAKTLYTFSKVVDPKNILVPQIDHVREELSLYLSSYDFVIKTQTAIVNRIEALSHHPHTPKELLVLLRHDLARAERTEARLLARMEELIKADDDLSRDCENLLTIPGIGKICAITLLAFFRTYGETKRSEITALVGLDPTRKESGTAVNGRRKISKGGNKRVRKVLYFPTLSAIQHNSKIRTFYERLVANHKPKKLAVIASMRKLVLIAHAVYKNKTPYQEAA

SEQ ID NO: 235864 - protein, 344 aa, unidentified
MVYAGIDLHKHFSVITLVNDSGVLINQSKIRNSAIDILNCFAPYRPNVSAVVETTTGWYWLDKTLTEMNIPLTLAHAKFLKAIAYAKVKTDKVDSMTMAQLLRMDYIPQAYKLDESLRQLRDLMRARLRLVSKKAACLNSMHRLLEKFNLTPDLHKELDPLYLLQYQQMQDQRAFIAGQIKTLENTLIPTFKKNIYIQRLMAAPGIGKINATSITLEIGDINRFPTVKHFFSYCRLVPGADNSGYKVKHKSGNKDGNRYLKLAFSDAAVHAVQYFPVIKKFHRTKLRKKHKRVAYAIVAKELARIVYHILKDNQDFNGKFKGVMLERQKKMLWPRQASPNSLTG

SEQ ID NO: 235865 - protein, 341 aa, unidentified
MVMIGIDPHRGSHTAVVIDRDERVVDEVRVRTSKGQTGELCGWASGYPDRVWAVESARGLGYLVSQQLVAAGERVIDVPAMMASRVRLLGSGKSQKTDPNDARSVAIAALRHSGLAMVQADNHVRVLGLLAKRHRDIARMKNKVACRLHALLMELTPGGLTTEMTVNKATSLLEQLDVTDQVNHQRVAIATELLDDIARLESQMKASKKRIRIAVAASGTTLCDIRGIGPIGAAIILGTVGDIARFPTAGHFASYNATAPIEASSGDRRRHRLNPRGNRKLNHVLHTAAVTQLRYPSSGRVYYQKKLAEGKTSKEAIRALKRRISDVVYRRLLADARRRNT

SEQ ID NO: 235866 - protein, 361 aa, unidentified
MRIIGCDLHARQQVLAMLDTTTGEIVAMTLKHEGNNVREFYSKLPRPVLVGIEATGSMQWFVNLMEELGIECQVGHPANIRAAEPRKQKHDRRDADLILKLLVENRYPKIWLPSKEQQDLRALLRHRHQWVRIRTRIQNALQAMALANGLRRGPALWSQDGQRTIASLPLAPHAAYRRSELQAMYAKFAKEIEKLNQRVEEQACERPGARLLMTHPGVGPITALATEVFLGDTARFADSKALASDVGIIPSEYSSGERQRFGGLRKQGNPLLRFLWGEAAMHAVRRDPELQRFYRRKLVQKGLGKTRVAVARKLGIRLWIMLRDEIDYNEFCRRGQKQQKSSEACAGMPDTGHGAKQSPAD

SEQ ID NO: 235867 - protein, 480 aa, unidentified
MVQVHQESKLKSTYPLSGCSPAASEAPAKGKGRAKRKTRRTRKPKDPTEGLEVANPNAAAIDVGSAEHWVAVPAGRAPERVRRFGCCTEDLEALAKWLKACRVDTVVMEATGHYWMVLYDLLEAHRLRPVVVNPRYAKNMSGKKGDIPDCQWMQKLHTYGLFSNSFRPVEQIRALRTFMRQRERLVHAASQSVQHMQKALTEMNVQLSNVISDVSGETGLRIIDAILAGERDPDQLARLKDHRIKATLRELARALRGHWKAEQLFVLQQARRTYAHYQEQIQQCGQRIEELMGSLESRHPQKEGPKASPEAKPSAFNLGEELTRILGVDLTKIPGVGPITAQVILSEIGPSVSAWPTENHFASWLGVCPDHRITGGKIFGRSTRPVINRVRNALRMAAYTLDHSHSALGAKYRRLKRRLGAPKAIIALANHLAKVIYRMVKFGHQYVEQGMKAYEEKFRAQHRRWLEKKAKELGLKLVEA

SEQ ID NO: 235868 - protein, 329 aa, unidentified
MSALVCGLDVHKDSTYATILDSEGKIVSQRRMSNETVLSYLSSYSVDRIGMESSNQVAPLYRTLTKNGYAVSVSHPKKTRYIAEAKIKSDRVDSKAIAELVRLNALPPAYMPDEETAILREKIRRRAFLVRERVRLRVKIKSILTYEGIKPQIDHGLFTELGVEWLHSLALEPVESYLRIIKTLDNEIKQLSKHLKELAENDDDIRLLMTIPGVGYYTALLVKSEIGDINRFSDGDRLCSYGGLVPSTHASGGIIRHGSITKEGSRWLRWVMVEAAMTHVHKYDTAITKAYHRIAERRGKQVATVAAARKLLLCCYAVLRNRHPYYDQA

SEQ ID NO: 235869 - protein, 343 aa, unidentified
MKLTRVGVDLAKNVFQVHGVDRAERSVWNKRLKRNRWIEEIEHNVESGAEIGMEACGGAHHWARLLQSKGYRVRLIAPQFVKPYVKSNKTDANDAQAVCEAMSRPSMRYVAVKSIEQQDIQAVHRVRASLISERGAKANQLRGLAYEYGLVAPREIAALRQAVPAWLEDACNGLTVRLRTLLSGLYADLRALDERVRELDKEIRAIGRENEAVGRVQQLRGIGPLIASALVAMIGDARQFKNGRHVAVALGLTPRQHSSGSKERILGISKRGDSYVRTLLIHGARSALRTAPGKDDRLSRWALALAKRSHVNVAVTALANKMARVAWAMLKHGTAYEPNGLAA

SEQ ID NO: 235870 - protein, 419 aa, unidentified
MDLVLERCAGIDVGKDELVACVRTPGPSGGRRKETRTFRTFTGDLEVMADWFTASGVTAVVMEATGSYWKPIWYLLEDRSFELMLVNARSVKMLPGRKTDVLDAEWLAELLEHGLLRGSFVPPPVIRELRDLTRYRKRLTQTHTSECQRIHKTLEDAGIKLDSVASDVLGVSGRAMLAALVAGERDPEVLAELAKAKLRKKIPELRQALRGRFREHHALLIGMSLEHTAHLEALIDKLDARVDALFAVNTSEAGVPFERARDRLDTITGVGKRAAETIIAEIGLDMTRFPTAAHLASWAGMAPGNNITGGKRHSGKTTKGDVWLRDILTQCAWAAARSRDTYLSAQFWRLSRRIGKKKAAIAVGHSILVIAWHLLANDCDYDDLGGDYFTRRTNPDRRRDQLIGQLHDLGYQVTLKPVA

SEQ ID NO: 235871 - protein, 351 aa, unidentified
MTSIALGYADVIVGVDTHKDQHVAVAIDGVGGLLDDPLEVPANNDGYRQLVEWASSLGKIHGFGVKGCGSYGQGLARFLRRHELLVREVARPPRKGERRLSGKSDAIDAEHAARQMLTGTGMATPKAADCDIEAIRRLKITRDTAVKAQTTTMITIKAVVVTVDHDLRDQLAELTNYKLIVACSQLDTTGRIGDPDVAARHSLAALATRWLSLHEEIKTHTGQLEALTKRLAPQMIDRFGVGFDTAAELLVAAGDNTDRVHSEAAFAKLCGACPVPAGSGKTSGRHRLNRGGNRQANAALYRVVIVRMRWHPPTIAYVNRRTEQGLSKKDIIRCLKRFVARELYHLLPEPT

SEQ ID NO: 235872 - protein, 454 aa, unidentified
MTLIYRRCAGMDVHKKSISVCARIRSAKDTFTTETAVFGTFTRDLENMAQWLRERRIQHVAMESTGVYWKPVWNVLEASKRGFALVLVNPQHIKALPGRKTDQQDAERIATYLQEGLLRGSFVPPQPIRELRELTRRRAHLQGDRNRVINRIGRLLETANLKLGSVLSNIVGQSGRAILNAIVAGETAAEDLATYTSSRVKHSREEFQLALEGRYSDHLRWLLGQLLEELDHADRRVALLDLRIGRLTKPHTDLIARLCTLPGVDIITAHIILAEIGADMSCFPDARHLASWAGLCPGNSESAGKRFSGRTRKGDRYLRRVLVQNAWAVAHMKDCALTAFFHRIAARAGVKKAAVAVAHRILMLAYYIIRDGSVYQEAGGDIYDRRNPERTAKRLARRLQRIGFEVTITPVPRSPRPPHSSPIPGQTCAKCNAWGIACIHVRPRKSKTRGESSR

SEQ ID NO: 235873 - protein, 338 aa, unidentified
MKITTIGLDIAKSVFHLYAVNRMGRLVKKKQLTRKHVLAYMAKLEPCLIAMEACGGANYWAREFIALGHQVKLIAPQYVKAYVKGNKNDYNDAEAIAEAAQRPNMRFVPIKSVEQQDMQNFHRQRERIKKERNALVNQARGLLAEYGIVLNKGVAAVRKGLPEILEDAENGLTSLARELFAELLDELRDIDQRFAQCEQRIKSLNQNNEVCQRLDEILGIGPIIASATYAAVGEGKDFVNGRHFSAWLGLVPGQHSTGGKTVLLGISKRGNGYLRTLFIHGARAVLRHSANKTDSFSRWAQAVLERRGHNKACVAVANKMARMAWVIMAKGETYRVAV

SEQ ID NO: 235874 - protein, 443 aa, unidentified
MHVVFPVRWPGQWFPSGLSKRREVMYYGLDAHKAFIQVCELSDDGRRRKDYPIGATAEALEAFAERLGPTDHVVLEATFHTWAIHSILTRRAGSVTVANPYEVRCIAKARVKTDKIDAYILAQLLRTGFLPAVQMPSEETWARRQLISHRRLLVKQRTAAKNSIRAVLNRRLIEHPYGPTLFSETNRAWMASLELPVTERFILDNALALLRQLEERLEVVDERLLRLASVDQDVKLLVTIPGIQVTVAIGFLAAIGDIHRFPSPDRLASYFGLVPKVRQSADHCRHGHITKAGSASARWLAIEAAQILSKGGSPLIASYHRLRRKKGHNVAVTALARKLVVVVWHVLTRREPYRYAPTTQTRKKLRRLALGAPRTAKGMVPESLEAIYTEAGLPELSPPSPGERRAARSNRIALSRTRAAGDLQSRREKRMQEEKLRKELTNS

SEQ ID NO: 235875 - protein, 340 aa, unidentified
MFYVGLDIHTKRISICALDEKGQLVHRSQVRNIADMVRILKELPDRFEVCYEASCGYGHFYDLLDPLAARVLVAHPGQLRLIFRSKNKNDRNDAERLAKLLYLGETPTVHVPSLEVRAWRELINCRGQVIAKRTRAKNTVRALLRSAGVVPPERPGLWTKKGLAWLRQLTLPTVSQQLRRDLLLEEIETLIRQVRRIEQQLNHYARQMSAVAQLRSIPGVGIRTAEAVTAFIDDPHRFRNAKAVGCYFGLVPCQDQSGDKNRLGHITRQGAAIVRQLVAEAAWQAQRRSPAVRAYFERAQRGDPQRKKTALVATAHYLVRVMWAMLKRGTLWQEKMALAS

SEQ ID NO: 235876 - protein, 338 aa, unidentified
MKLYAGIDLHSNNSVIAVIDEQDRVVFQKRLPNELERILVALASFKQWLIGVVVESTYNWYWLVDGLMQAGYVVHLANPAAIVQYQGLKYSGDKHDARWLAHLLRLKILRVGYIYPREARAVRDLMRRRMQLVQTRSAQLACMHTQFTRSTASSPSSEALKRMLPEELATLLEEPNVASGVRANLEVVGTLNREIARLEREIIGQVRLAAQFTPLLSIPGIGRILALAIMLETGAIERFAKVGNFSSYARCVQSKRLSNDKKKGEGNSKCGNKYLAWAFVEAAHFAVRYNARIKRFYERKAAKTNKIVATKAVAHKLARAAYHVMRERVPFDETRAFT

SEQ ID NO: 235877 - protein, 351 aa, unidentified
MRTSQKITGIVTTIGIDIGKNTFHLVGFDQRGAIILQQKLSGSQLERRVANIPRCLIGMEACSGSHHIGRQLAAIGHDVRLIPAQYVKPFLKGHKNDYRDAEAIAEAVQRPTMHFVTIKTPEQMDLLALHRVRSRLVGRRTGVINQIRGFLIERGITVRQGPMPLRKALSEILSSDTGALSPRMVGLIADLAQDWRRLDERIAAVSAEIEALAEQDHSCQRLMTVPGVGPIISSAVVAAIGNGTGFKQGRDFGAWLGLVPKQESTGDRTILGKISKRGNKYLRTLFVQAAHVVLERRPSAAMRGLWPWVEQASKRLHRNMLAIALANKLARIAWAVLARGGTYQPRITHAA

SEQ ID NO: 235878 - protein, 392 aa, unidentified
MIAQALGWDNHRKFSKVSLMELMPDGQILAVERARLEHDDKDAMRAWLSRLDPEIPVALEATFGWPWVADLLEELGHPVHLGHPPIIRALAKHEAKTDRCDSDRLGKFQLRGILPESYLAPPDVRQRRERIRYRMALSTLRTSVKNRAQAILHRHGILHDFSDLFGKAGRRFLDNLELPDGSRQALQGCLELLDRLSLLIGEVEQWMTDNLDEDETVRLLMTIPGVGLILAHVIYAEIGEIRRFPTVRHLASYAGLAPISNDTAGREGPRHCSMACNHVLRWAFVEAVHGVQRTKGIHGLRLRQLYLRLCSRGKRRGCKSSAKVAVAHELSKLVHVVWSKRVPYSDSPPPRPGSREDPRSPKETSTMKTTLRSDQPRPPMVRRRATVGQARL

SEQ ID NO: 235879 - protein, 368 aa, unidentified
MLRFRLMVETRSALSGLKHQKEKRSMDYFAGLDVSVKETSVCIVDDTGRIVREVKVASEPEALLQVLTNPAYRFKRIGLEAGPLSQWLFSVLTEASLPVTCVETRHMKAVLKAQINKTDRNDARGIAQMMRVGLYRPVHVKTLRSQKLRMLLTHRKLLQSKTIAIENDLRGTLRNFGLKVGMVGKVKFETRIKELIENVPDLAVLVEPLLIVRRVLREQIGILHRRLLAIVRDDDVCRRLMTTPGVGPVVALTYRATVDVPARFRNSKAVGAVFGLTPSQHQSGEIDRIGSISKCGDAMMRTMLFEAAQAMLMRSAKWSWLKAWAMKIARHRGMKKAIVALARRLAVIMHRIWVDGTEFRWTREVAAA

SEQ ID NO: 235880 - protein, 393 aa, unidentified
MNKIVHHIGLDVHKETIAVSIAPANTTEVRRYGIIGGTLEALDKLIKKLSAHGADLHFVYEAGPCGYVIYRHLKSKGISCAVVSPSLIPKKASDRVKTDRRDADQLARLFRAGELTPIHVPDQEDEAIRDLVRARTAALRDQRQARNRLKGFLLRQGFRYTGRTSWNDAHKRYLAGLLMPQPAQQIVFQEYIHAIDDASQRLARLDNAMVGALPGWKWEPVVAALMSLRGVQVLTAMTLVAEAGDMTRFKNPRQLMNYFGLTSSEHSSGGNRVQGGITKCGNTHCRRVLTEAAWHYRVRPLVSEAMQKRQEKQSKEVRLIAWKAQQRLHKRFKQLSARKKSVVAATAIARELTGFVWAIACAVKPAAQEAKPEILRTCKGRVYQLNNPKKDQK

SEQ ID NO: 235881 - protein, 438 aa, unidentified
MEGAPMLDTTTFIGLDVHARSIKAVSLDVMTGEVRAATFGYDAGAVAEWVRSVDPRARCVYESGVTGFDLQKRLSGLGVGCAVGAVSKMIKPSADRRRKNDRNDAEFLARMLSVGNVVEVWVPDDECEAARDLTRALEDARDDLSRSKQRLSKFLLRHGLVFDERTPTGRRKGNWTRAHWSWIESIRFAEGADNDVLAYYVDAVRRAAEEKARLEGLVEAEARKPRWRKRVDSLRCLKGVDTASAADLVFEAGEFSRFRNARSFAAWVGLTPSEHSSGESDRRGAITKAGNKHLRKTLVEAAWHYLTCSGRPKDLAKGQAPDRVARRHAAKGVRRLVERREALLARGVHGNKANVATARELACWVWAGGPVGRGGVGGSGPLGMGGRPHGRGGVGGRSPAHKPVTPEAVRSEAVEANLRSLFCERPGRHTRAQTVGST

SEQ ID NO: 235882 - protein, 370 aa, unidentified
MGEYSQAFVAFDTSKAKHAVAIAESGRGGEVRFLGDVASSPARVERLIGKLAERYDKLHFCYEAGPTGYGLYRQIRELGHDCTVVAPSLIPRKPGERIKTNRRDAVSLARLLRAGELTAVWVPDATHEAVRDLVRARAAAAQDLRRKRQQLLSFLLRHGRLYDGRQHWTLAHRRWLARQSFAHPAQQIVFQDAIEAIEQALRRLRGLEEQLVAIVPGWSMAPVVAAYQAMRGASFLVAVTVAAEIGDLRRFDNPRQLMGFLGLVPRERSTGDTVRRAGLTLAGNRQARRVLIEAAWSYRYPARVTDTLRPRLDGLPKPVRDIAWKAQVRLCARYRRLSGSGKKLPVVIAAIAREIAAFLWAIAGQVPLAA

SEQ ID NO: 235883 - protein, 333 aa, unidentified
MVEGTEGSHHKEGTTKMAKHSMICAGIDTGKHKLDLALDQGPEQLQVDNSPDGHKSLAAWLRQRRVRRIGIEASGGYEQAVVAALRRDGFSVILFQPAQVRAYAKFVLQLAKNDKIDAALIAACTAATKTIREPPDPRLAALAGHLTMIEQITEDIARLKTRRESCRDERIRQCWKEQITRLRALARSEFRQLLAAIREHRDLAERLDLMASVEGVGVKTAVDVLIRMPEIGSLSREQAAALAGLAPYDDDSGTRTGQRHISGGRERLRTSLYAAALPAAFKWNPQLIALYRRLIAKGKSHKKALVACARKLLIFLNTVVARGTPWTSNAAEI

SEQ ID NO: 235884 - protein, 425 aa, unidentified
MKKIDYLSTLFVGIDIASRTNVVSAIDFDQNYLIKWKPFPNTQTGTEDLANTIASVLSKHHELKAVIIAMESTSFYGVHTANYLSTCDLLLPFSVRVYCLNPKTVKNYKKSFTDLPKNDSIDSFVIADFARVGKIKIQPWRGSQYLALQRLTRHRMHITECIAREKTYALNNIFLKFSEFALLRNDEHPFSDKYGATAEGILTEFMTNDDLINTPLEELVDFIYSKSRGRIAEPAQVADIIQTAARNSYRLDKCLYEPLTVSIASSFNCISAFERELKAIDKAIEKTVKGLNPTEYQILCSVPGIGPVYAAGILAEIGTIKCFPNHSKLAKYAGIVWNENDSGDFHSEDNRMSKAGNRYLRYYIIEAAGSVVRHEPSFASFYRKKFEEVRSHQHKRALALTSRKLIRLLFGLLDKGTLYSPEKSR

SEQ ID NO: 235885 - protein, 348 aa, unidentified
MNSLHYIGFDVHKKSISFCVKTAAGEIVEEGVIPAERGALRQWASARPQPWRGAMEATLFSGWIYDTLKPYAEQLEMAHPAKMKAISAGKKKSDTLDARTIADLLRCNLLPACYVAPPRIRELRRLLRYRTLVVSEGVRMKNKMAGLLMETGALYVKEKLHRKKYFASLLEELEEVPESVIDLLRLSRGALEMFESTQKRLVRELLADPELAQRVERLMTIPAVGEITALTWALEVGDPQRFPSCSDAMSYCGLTAALKSSAGKQQRGPISKQRNHWLQTTLIEAAKLAPRWNPQLAALHARELERGHRNRATLAVARKLVVYLLAVDKSGQAFQLRVPSEGPTQKAA

SEQ ID NO: 235886 - protein, 354 aa, unidentified
MDNIKYIGLDVHRDTISAAVLNGSGRLIQQSVLMTRAAAILDFIGGVRGTLHVTFEEGTHSAWLYDLLSRRVEKLVVCNPRRNALLKSGNKGDAIDARRLAELLRAGLLSAVYHGETSALEVQQLARSYTMLTEDTTRVMGRLKAVFRGQAIACIGRKLYGHHRNEYLAALGVCALRRRAERLYLQLDALQLLRRQARHDLVVECRKHTAAKWLQTVPFLGPLRAAVLIARVQTPHRFRTKRQFWNYCGLALETRDSAEYRVIDGQLERKKRPALIRGLNWNYNHELKNVFKGAANAASVGQGEFRKFYLGLLKKGMRPEMARLTLARKIAAIALKIWKKGESFDAEHLKSQAA

SEQ ID NO: 235887 - protein, 351 aa, unidentified
MIIIGVDYHPSDQYIAFVDTETGECGERRLTHSDGEAEKFYRELAARGVSVRVGMEATGYSRWFERLLTELGMELWIGDAAKIKSKRVRKQKTDREDARLLLRLLLQKNFPRIWVPSPENRDLRQLLWHRHRLVQMRTRIMNQLQALAMNEGQRRKKKLWSEAGRAQLEKLPLATWASRRRKDLLELLDRMNPTIAELTAAVEQKAKTWPEVQRLMSHPGVGPLTALAFVLIIGTAERFQCGKQIGSYVGLIPEEDSSAGQQRLGRITKQGSSLLRFLLVEAAQAAARCDADWRRRYMHLAMRRQKNIAKVAMARRLAVRLYWMWRNGWVYAQWVAFGSHAGQLGTGHGVQ

SEQ ID NO: 235888 - protein, 359 aa, unidentified
MRKIQKHVVKDKEIFVGLEDSKKTWKLCVRSKGVIVHETSMPAKYKVLRNYFRNKFPECTIRVMYEAGFRGFGLHDQLESDGWDCIVTPPHTVVEEKCQRKKNDRIDCRRLAKNLENGDYKSCHVPDKELREDRQISRIFGQVQRDIVRVSNRIRRTLEFHGLDDHFPSGRWITKEYRELMPKLEKMELSASLKYSFIILMRELDHLRRLKKDLFRELRKLAKTDRYKEGVRLLRSAPGIGPLTAIRLVLEWGDLSRFKRKEEFANFLGLVPSEHSSGEQDHKGHITKQGNRAVRAWLIECSWVSIRYDPVLLDKYQRVLKNCGSKKKAIVAVSRKLALRLRALLLTRDEYVKGVIEQF

SEQ ID NO: 235889 - protein, 400 aa, unidentified
MVSDFIKGYNLMKIFVGIDIAKLNHFAAAISSDGEILIEPFKFTNDADGFQLLVSKLESFDKNSIIIGLESTAHYGDNLVRYLVAEFYQVCVLNPIKTCQMRKNNVRKTKTDKVDTFVIAKTLMMQDDLRFITFFDLDMMDLKALGRFRQKTIKQRTRLKIQLTTYVDQVFPEIQYFFKSGLHQHAVYALLKEAPSPKEIASMHMTHLANLLKVNSHGHFTKELAKELRVLAQKSVGANDSAISIQITQTIQQIELLDSQLEKTEAEMTDIMKFNDSVIMTIPGIGYINGGMILGEIGDIHRFSNPNKLLAFAGLDPSVYQSGNFQAKTTRMSKRGSRVLRYALVNAAWNVVRNNATFKAYYDAKRAEGRSHYNALGHCAGKLVRVIWKMLTDEVEFNLE

SEQ ID NO: 235890 - protein, 413 aa, unidentified
MSQKAYLGIDLAKGPSKVAAIDEDGDEIVSPFSISNSREGVEKLMSKLHSYKKSDIICAMEVSSNYWENMYSYLNQKDISCILLNPYQVKKYRQALGSKIKTDSIDAAAIASLVRAKKYDSLCVSDEAVLELRELVRMKHSFGRRVKDLKRSVLALLYLTFPEYTKIISYPFSKVSMQILSKYPTSFHMAKDGTVGRLVKIFRRYQGCNFGADKAKELIAVAKDSFYSGKASKSRGMSICMQIEEIASLSLKISEIESEIKSILNPDDPKDGYRQDFDILNSIKGVGIGTIAAFIAAVGDVSRFSSSDKLVSFIGFYPKIFESGKYKKKNPTIVKAGPKDLRYMLYMSSVAAVKHNSHLKKYYYDMVSAGMPVKKALIKVAVKIARMMYSMLKYKQYYDPFRVFLQQAPAVAA

SEQ ID NO: 235891 - protein, 335 aa, unidentified
MQIYGIDLAKEKFDVSFFDLTSKKVSNKPSHKVVKNNFKSIGRFLETLPSDAVLVAEHTGVYGDTLLKCCMDSNVKIAFVGGYVIHRYRATPDRAKTDVLDCALLREFGERYPDKLKYRKFPEEALYELRQLARHREMLVEQRKQLMTADKSEDCRPIRSLAVKRSMDRIKEMLDTEIAETEKEMLKVINGHDSIHHNYEIVKSVNGVGLVTAVELLVKTDNFTKITTARQYSAYAGTAPYEKSSGKMDKGAHISKIGNRRSKTLLYICAESARLHNKEIKLYYERRTLIDKKPRHYVLNAIANKLLRIIFTLVEKGEVYDVNYIRQDPRLVKHN

SEQ ID NO: 235892 - protein, 417 aa, unidentified
MNVNRNEYLNLRICGIDPHKSFCKAVVVDERTLNTVDEFDFKNNRNGVLSLIERLRALDCNNVVIENTNNFSAALYITLKRHGFKVASVNPALVPKKRKKSDRIDAKWLAISYLYELVEEDYIPPAEIQYLRDLTRLRTKLVGMRSMLKNKVHALLTRADIHLSDVFSDIFGRQSIAILNSLAEGLTDAIQNLKVKRNVAMQVKDAIENSFLELLNCSVLRILLSLIQVFNEEIKRLDQMIAAHIDEHKRLKKLVKLIMSVPGVGFITAAIIVAEVGDFTRFSDAKKLVSWAGLAPQVSESAGKQRNGKITKRGSPYLRRALHEVANVITRSKSPRELYEFYKRISGRSGRYKAKTALARKILTIIYHLVVQDEHFESRHEGYKRLHERKVKQFVSLSRAGRDRLAEWSESSRQLAG

SEQ ID NO: 235893 - protein, 372 aa, unidentified
MNYNTVYVGMDVHKESFSLCAYTIEAEKASHYQRTEADYKKVLNYLEFLRTIYGDDANFICGYEAGCLGYTLYHQLTANNVKCIILAPTTMLEQRSKKRIKTDKRDAEIIAKCLAQHNYSPVHIPTAKDEETKEFLRMRDDHKLALKKVKQQILAFCLRHNYRYDGNSHWTAAHLKWLKALTPEALYKEILDEYLLTYQTLSDKLERLDKRIEELATQDEYKETVKKLCCFIGVKTHTALSVLVEVGDFKRFASAQHFASYLGLVPGEDSSGDDQNRLGITKAGNRHVRLLLTEASQCYARGQTGFKSKELKARQSGNTPAVIAYADKANERLRRRYYKMVLNKCKKHNVAKTAIARELACFMWGMMTDNIA

SEQ ID NO: 235894 - protein, 465 aa, unidentified
MAHPTRIQLSSPARPAAPVPTSERTKAYEAPGIRSTHDGATVHNRKANRMKNWKDLTHYVGFDWAKDHHAVVIVNSEGNLVADFEFDHSLEGWKSFAKQTSAWPNLAVAIETSQGAAVDQLLQREYTVFPVHPVAAQSYRERKAPSGTKTDHLDAWGLADALRVDGHGWKPLQAMDPMTQQLRLLCRDEVSLIEQRTALVNQLQQALAEYYPAALEAFDDWTDAFTWEFVLAFPTPQALVTAAKRRWEKFLHTHKLWRPETIEKRLKLFAQADQFKASEPIVRAKSQLAVSLCKLLCTLGQQLKLYRKQIEALFREHPDHDLFGSLPGAKQVLAPRLLGAVGNDPDRYGSHEVLQCIAGTAPVSYQSGKISKVRIRWSCDKFLRHTVHLWADCFHKRSAWGQAYYRKKREEGMSHACALRCLGQRLLKILFRMLVDRKPYNAELHAHNQQKHGSWVLKLVDAPAA

SEQ ID NO: 235895 - protein, 345 aa, unidentified
MEPMYYIGLDVHKLKISYCVKDVIGKIRAEGWIPATRFDLDRWRKTLPQPWSAAMEATMFSGWIYDHLKPHAAELKVAHPLMLRAIAAAKKKNDRIDANKICDRLRCDFLPECYMMPTAIRERRRTLRYRNLLVRQMVQMKIKTSTLLMEAGVSYNKQKLHKAGYFRELLATNPDIDEGLCSLLRQCREMVVRLGKTESALIHSLQHDRLLVERVERLMSIPGIGPITALTWVLEIGEVQRFSSIKKVISYCGLCGDEQRLANSVQRTPLSKQRNKHLQTTLIEAAKMAPRYSPTLAMPYDREKQKGNANRATLAVARKLVAYLVAVDRGQTHFLVLDQETRTAA

SEQ ID NO: 235896 - protein, 392 aa, unidentified
MVVSVGIDVAKDKHDCFIQSSEGEVLADVFTISNNMDGFHTLLEKIQACTAPQDKIRVGLEATGHYSYNLLGFLLDNGLATYVLNPLRTNLYRKSLSLRKTKTDRVDARTIAAMLLSDAGLKPYTDTAYHNEELKSLTRYRFDKVKERAKLKTSVSRLVCILFPELEKLVPTLHMASVYALLEEFPGAKQVAGAHLTSLKSLLEKASKGRYKRDVALSIRDAARMSIGSRMPAKSLELQHTIRLIRELDAEIHEIEAEIETMMDEIRSPIMTIPGIGCRMGAMILAEAGDLSRFDSPDKLLAYAGMSPSTYQSGQLNNCYPHMEKRGSRYLRYALFNATKYVCLWDPAFAAYLAKKRAEGKHYNVAISHAAKKLVRLIFAMEKSRQPYRSAA

SEQ ID NO: 235897 - protein, 402 aa, unidentified
MNCVGIDVSKGKSMIAVMRPFGEVVISPFEVLHTDSELSKLAGLLKSLDGETRVVIESTGNYHAPVAWLLHDAGLYVSVVNAMLVHDYGNNSLRRAKTDKKDAVKLANYGLDHWLILPRYVPEEDTRLMLKTCYRQYQQYSKVQTMLKNNLISLLDTAFPDANRLFTSPPRADGSEKWVDFVAAFWHCECVCGLSEKAFTAKYQKWCKKHGYNFSKDKALDIYASSCGHFGVMPKTDTAKLLVEQAVSQLRATSAALAALKQEMQSLAASLPEYPVVMEMFGVGPTLGPQLMAEIGDVRRFHSKKALVAFAGIDAPPYQSGQMDVRSRSISKRGSASLRRTLFLVMSVILQHAPMNEPVYQFMNKKRSEGKPYRVYMMASANKFLRIYYASVKSYLDSLEHD

SEQ ID NO: 235898 - protein, 370 aa, unidentified
MKMSIGVDLHKTQFTVCCLSEDRRVQESGIYPTTERGYRTLIKKVSGWKEGGYEVTAAVESTGNTRYFRNQILKAGIDIKIVNTLKFKVVNESVKKTDKHDARTLAEFLEKDMLPESVLCSQKSEDIRRLLKSRSVLVRALVSLKNQVHGLLLGYGIESRRGQLQSKKERQRILTGLADHRSYGNAARAVEPLLGTIDQIASEVKEIERVLSDLVFEDEDVALLQTIPGVGLITAATIRAYTDDINRYESDKKYAAHAGLVPWVQNSNKTIRHGHITKRGPVELRTAFVQMVMGMLRLKNKTDGYRLMRKYRTMKKNKGTGKSIIATARKMSAIVYVILKERQPFDPSKMLSGPQYVEMSKVARLYALAV

SEQ ID NO: 235899 - protein, 408 aa, unidentified
MKRYYMGVDWGDRLHQVYVGDEDGKKVREMKLQESPEGLAEIGRWLDEKRAEGFELWAAIEKPQGRIVDFLLDHGVEVYPVNPKAVDRVRDRYRMSGSKSDAFDAYVLAEFLRTDQAHLRALRPSSEKAQELKMLSRDQRRVVRHKTRFLNQLTTTLKEYYARPLEVFEDLETEIALDFLKQYPTPAHLSALTRKQFNRFATKQHHLSKQRCEELWEKLNKPQLAVPEHVVRAKAQLVEVLIEQLRAAIKAVKIYNHRVESFFASSPAAQFAKTLPGGKSGTLVAAVWAELGDAQGRWESSRHLQAEAGAVPVTKASGKSRVVHFRFACNKHLRYTMYWFSFVSLNHSEWAKLYYRGQRDNGHSHHQALRALGAKWLKIIFVMWRDHKPYDENYHLANIARQKMRQAA

SEQ ID NO: 235900 - protein, 475 aa, unidentified
MNAKAKTTKNQVQSVVDIQKQREMVEKADDILKNLNARTWHDLETNGRFEKNAKLTFISDDMLIVGCDIGSETHYVRAIDTRGRELSKKAFQFGNDAEGFQKAKDWMVMLAAKYGKRQIVLGLEPTGHYWFCLAAWMVGNGISVVQVNPYAVKQTKEIEDNSQLKDDRKDPKLIANLVKDGNYGMPYLPEGVYADLRRLSMFRDQLTEDRIRNINRLHREMKIYFPEYKDALGKFDGAFCMELLKVAPFPEDIIKIGAGGIKEVWHSAKLRGRGYNRAGEIVEYAEGSVGLKDGTAAGREAVKWFAGKITELDAELEKIEAQLRDKCRELPYAENILEIPGIGWNILGGILAEMGDVGRFDDVKEIQKLSGLGLVACSSGKHKGETKISHRGRKRLRYWLFQGAKSAVAHADEFKQLHEYYTTREDNPLKKMQSLIVIACKLLRVIYAMLRTGTKYDPEKLLRDIKRPQRPQTAA

SEQ ID NO: 235901 - protein, 432 aa, unidentified
MDVVFPRCAGLDVHKKRITACRIVPDPTGQKAEGITELQPFGTMTRDLLALADWLTEASITHVAMESTGEYWKPVYNLLEDTFTVFLVNAAHVKNVPGRKTDKADARWLAKLMRFGLLQASFIPPKGQRDLRDLTRYRTKLVQERVREVNRVQGVLERANIKLASVIADIMGVSGRAMLEALIAGRADPATMAALAKRRMRSKIPVLEQALTGIVHDHHRQLLAMQLAHIDFLDEQIEALNAAIETSLKALSTAEPSREAQPLPLTFSRAVELLDTIPGIDQRGAEVIVAEIGIDMSRFETAPRLAAWAGVAPGNDESAGKQRSGKTRKGNRPLRAILTQLAHAAVRTKDTYLSALYQRLAVRRGKKRAIIAVAHSIMCSVFHMLSRNEVYRELGANYFDERRRQFTVDRLTRRIERLGYRVHLEPVAASAA

SEQ ID NO: 235902 - protein, 371 aa, unidentified
MKSILSVGMDVHKNSFSLCAYDGYTGEIVSESTFASDVKLVIKFIETLKSRYENDVEIKCGYEAGCLGYSLYKLLTARGVDCVILAPTTMQVSAKNKMVKNDRMDALNIAKNLASGSYKSVYVPDEEDVEIKEYIRMIHDFKKELKRVKQEICAFVLRHGYQYDGKSKWTIRYMNWIRELEMSEIQRETLNEYIAEMENLNDKIDRFKNRIDEMYQSDRYNEKVSKLRCFKGIDTFAAMTIQVETADFERFPSAKAYASYTGLTTGEHSSGDKNNRIGITKQGNTVIRKTLVECAQSLVKGNVYAKKSQGLKSRQKGMDVNIIEYADKATERLKKKYQKLIERNVPRNKAIVAVARELACFIWGMETGNIH

SEQ ID NO: 235903 - protein, 337 aa, unidentified
MEREYVGIDFHRRRSVVVRLDAGGAVLEVVRVDNDPVLLAAAVAKAGLGPEVVIEATYGWYWAVDLLQSMGARVHLANPKALNWGERRVKNDVVDATDLADMLRLGRLPEAWIAPPAIRELRELVRYRAKLVRLRSGLKAQVHAVMAKEGVLPTVGDMFSRAGNVQLDTMGLGDVYTDRVESLRDLIGVYDREIVGLGRRIHQHLRHDSGYRAVQKINGVGPTIAAIIVAEIGDVSRFGSPEQLCSWAGLTPRHHESDTKARRGRISKQGSRLLRWALIEAISRYHGGPLLAGQFRRIARRRGVNKARVAVARKVLTLAYYGLRDGEIRCLASPEAA

SEQ ID NO: 235904 - protein, 475 aa, unidentified
MGKGSGTTRGDRRRNARRERLRAILPRDGAVIGIDLAEDKQAIAVADHDVRVLARKTVKVKAFRLGEALDWAVAQARVKGFSHVAVACEPTGPRWLQVQRLCAERGLPLVCIQPLVSHIAREQQDFTRHKTDEADCVMIARLATELHCYIPEELDETWAHLRHLGRRRVQLITAATASVQRVRDFLSVAWPTVTETCARPLESVTWLAALQAVTSRCGGDPGRLAGMGEEAFTALVRSAMPGWGARRACARICVRVFAALTDTEGVVASCRRGLLRRVADELGDLQRTRAQLRAAEADMVSALDELGLSRLGDIPGLTATGAAAILAETGDPRRYDSSSSLVKHAGLAPADNASGALPGQAHIPRRGRPALRLAVWRAVWPMLRFNPVMAAKYQALTRAADAAARAAGVHHGARTRPATAAAAAARARHATARVACAASLLRWIYSMIVHGTSWDPAVAASTACQHPPASQPEAA

SEQ ID NO: 235905 - protein, 347 aa, unidentified
MTLVADGLVVGVDTHKDVHVAVVLDRLGRRLAVWEFPATDAGNTQLTGWLAGLGQVSDAGVEGTGSYGYRLARLLADAGLQVWEINCPDRSRRRRKGKSDPVDAENAARTVLAGEATAVPKDRRGFVGELRLLLLTRRSAVKARTQASNQIKAFLIDADDQLRAQLHGLRKRRFGRACAALEPADGLRRALAALGRRWLALDTEARELEAQIAALLTAHAPALLARHGVGAVTAAQLLITAGANPERLRGDAALAALCGASPVEASSGKTSRHRLNRGGDRAANNALWVIAHVRTISDPRTRAFVAKRTATGNSRKEIMRMLQRYIARELYPLIIDALRTAEIVELT

SEQ ID NO: 235906 - protein, 340 aa, unidentified
MTVIIGIDPHKASHTAVAIGRDEQQLAEIRVRATSQQIQQLLAWAEPLGKRTWAVESAGGMGYLLSQQLVGAGEQVLDVPATLASRVRVLGTGRSDKNDPNDALSVAIAALRSPGLRSVEPADHREVLRLLAKRNHEIGRLRNIVVSRLHAALLNLSPGGIAKELNASDAVRLLNDFEPTTAVEQTRYDLAHELLDDVERLDVQLKESHRRIKAAVKASGTSLTELYGVGPILACELIGYTGDVRRFTTRDQFASYAGVAPVERSSGGRIFFRLSRRGNRQLNHAIHMVAICQIRQTNSEGRIYFEKKVAEGKTKREAIRSLKRHISNAVYRQLLIDAQK

SEQ ID NO: 235907 - protein, 381 aa, unidentified
MTADLQTQGYENTAVLYLALELSNAKWRLAFGDGTRQRQVVIAGGDIGSLREQIAQVKAKWGLSPETGVVSCYEAGRDGFWLHRQLAELGIANQVVDAASIEVSRRARRAKTDRLDAQALLDKLIRYERGERRVWRVVRVPEPEWEDLRQLHRERGDLLTKRTRHRNRLGSKLVAQGIRLPIGNDCVARLEEVKLFAGSGLPAHLKAGLLREWERLQGVQVQFRTVEREIGALIESAERTQAVRSLMVLTGVGWVGAGTLVMELFGWRELANRRQLASLAGLVPSPYASGNLAHDQGISKAGNRRVRALMIQLAWRWLRYQPDSKHSRWFQERFGGGGKRQRRIGIVALARRLLIDRWRFVESGVVPTGARVKPAQVTSAP

SEQ ID NO: 235908 - protein, 427 aa, unidentified
MQSTVRFVGLDVHKDTIVMAVAEAGVQPAEVYATGANDPPAVLSRLRKLGPLWSLLVCYEAGPTGYELYRFLNAAGVLCHVVAPSLVPTQNGNRVKTDRRDARRLAHFLRSGDLTAVWVPDEDTEALRDLSRSRDDAKRAERTARHQLSKFLLRKGCRFEGKSHWTLTHWRWIKQQTFSQEAAGRVLTDYIRATEQATERVRHLTADIATLVTDWALAPLVKNLQAFRGVQLVTAAGLAAEVGDFHRFATAGQFMSFMGLVPSEQSSGSKRRQGGITKSGNQHARRLLIEAGWHYYRTPLRVSATLQARREGVPQAVIDIADKALQRLGDKSYHMKQGTKAPNKIVTALARELAGFLWAAARLSTIPPGVRFPPGSRPASPPDKRAQTSSASPVRAVRDPRVREPDGKQPSLESARKRPRRSRPVKS

SEQ ID NO: 235909 - protein, 374 aa, unidentified
MADYSEVFVGIDTSKLRNAVAIAEGGRNGEVRYLGEIANTEAATSKLVKKLAAQHRRLTFCYEAGPTRYGLHRLIKTLGHECVVVAPSLIPKKPGDRVKTNRRDALNLAKLLRAGELTAVWVPDARHEAMRDLVRAREAAVDDLKSKRQQVLSLLLRLGRHFTGKRTWTRAHMNWLVSQKLAHREQRIAFEEMLLAVRQADERVIRLERAIAAAVPDWSLAGVVTALMAVRGLDLISATIFLAEIGDLSRFASPRQLMAYLGLVPGEESTGDRVWRGGITKAGNHRARRILVECSWSYRHPPRVGKKKLAKVEAAPPAVQEIAWKAQARLTARYRALARRGKRPTLVVTAIARELSGFIWAVSRAVSTPAAPTM

SEQ ID NO: 235910 - protein, 347 aa, unidentified
MEIRTLGIDLGKSVFHLVGVNSVGEVVVRKKCSREKLLHFTANLRVERIGMEACAGAHFLGRALRAQGHDVRLMPAQYVKPYVMTNKNDYIDAEAIAEAVWRPKTRFVPIKTDDQLDMQSLHRVREGWVHRRTSLVNQIRGLLLERGITIRKGRRHAEEALSEILEDPDTNLSWPLRTLLAQLQDELSQLQREIEEADAVILRTASEHEACRRLMAIPGIGPVVATATIAAVGNGADFEKGRGFAAWLGLVPRQYSTGGKQKLLSISKRGNRYLRHLFVHGARAVLRYREKQSSGLSAWLGKLISRVHHNVAAVALANKLARMAWAVLAKGETYRPPLLIAVDQVAA

SEQ ID NO: 235911 - protein, 338 aa, unidentified
MNTNVVGLDIAKNIFHLYSLGAEGKAIKKKLKRAELLRFFANYPASLIGIEACGGAHYWARELTKLGHEVVLLNARYVKGFVVGNKNDFNDAQAIHEAVLRPNKRVVRVKTEEQQDMQLLHTIRQDLVDKRTALVNQLRGLLMERGIVIPKGINYVRKELPFILEDAENGLTHLSRELFFEHYEKLKELDKAIKSHEQRIGRLCHQNQRSKRFLDVPGVGVIIASIIAADIGDGKAYASGRDYAASLGVVPKQHSSGDKQVYLGVSKRGNRYIRKMLIHGARSVLKNCHDKTDKLSRWLQALIERRGFNKATVALANKNARILWAMASKDQGYEVRAA

SEQ ID NO: 235912 - protein, 406 aa, unidentified
MKQIVSVGIDVSKGKSTVCAMIHPNTIIKESFEVLHTVEEMSMLADYIGSLDGEIRIVMESTGHYHLPVAQFLYQKGFFVCVENAYIIRQFSRIMLHGAKTDPLDAKKLAKYGLAYWSELKPYKFHPSCYTELSLLSKQYQTYIKLLIAAKQNVIHLMDEMLPGFKEALDTASSVQFSKVKYVDFAKEFYHVDMIKTMGKEIFRENYKQWCKEKGYRFQSEKADELFHLAEDGIPTLPTEFPSTRLCMEVATEQVSQLGYALEQILSQMQNLAKTLPEYQTIRQMGGMGEKLCVRFIADIGDVRRFHNGKALVAYAGIDAPPYQSGQYTGTKRRISKRGNSALRKTGYEVMKSLKSHPPKTDTRVYDFIIKKENEGKSRKQAKIAGLNKFLQIYYARVMEIYKNIA

SEQ ID NO: 235913 - protein, 368 aa, unidentified
MKMNAIKAAPAASAIALKNEKSAKAKRILIGTDVHLRGYQTARKIDNGVIGVVENLRSEEALLLHVEKQCERADQVVVVYEAGPLGYTLYRKLTARGVLCYVCAPDSSEQKRKRRKNNKIDARNLTSKLFNYLNGDQGALQLARVPTEAQEQLRLASREHDQMVEERKRLGAKGNALLLSQGFGSWSNWWRPKAWAQLSCIVPQWLLERLKIWVDVLKMLDEKICQAKVALARTCSGPRPKGVGALSQMQLQSEVLDWSLYTNRRKIACLAGMVPSEWSTGDTERRGSITKVGVPAIRRIIVEMVWRMILFQPQYKPVQKWQKVLQGTNPALKKKAVVAIGRQLIVDLWRLQTGRVTAQELNLVMVGA

SEQ ID NO: 235914 - protein, 406 aa, unidentified
MRVVHERCAGLDVHKSSVVACALLPEGKQLRTFGTLTWQLEQLAEWLRGLRVGVVAMESSGVYWKPVFNILEVAGLELLVVNARHIKAVPGRKTDVKDAEWIADLLRHGLLRPSFIPSREERELRELTRYRRTLIEERAHEVQRLQKVLEGANIKLEEVISNVVGLNGRRFLSALIAGDYDPETVAATANYGLQRKRELLAQALQGTLGTHQRFLLDQLLSHIDFLEQRVAALDQEVKQRSRPFEAAIARLDQIPGVGIRAAEEILAEIGTDMSRFPSARHLASWAKVCPGNNESAGKRRSGYAGKGNRWLRSILVESAWCATRKKDSYFKVQYHRLAARRGRKRALLAVGHSLLTVIYHLLNDGVIYQDLGPNYFDQRDRLHITRQAVRRLERLGYHVSLTEGAA

SEQ ID NO: 235915 - protein, 408 aa, unidentified
MYNAVGIDASKLKSTITIIQPAGVVIRKPFDVLHTSDELNTLVTYLKSLVGETRAVIECTGRYHEPVVKSLSEAGIFISAVNPKLIKGQKQNTLRNVKSDPADARKIAKYALDNWAELREYSSMDTTREQLKTLNSQFTFFMKQKVAAKTNLISLLDNTYPGVNKLFDSPTRDDGSEKWVDYAYSFWHVDCVRKIGLKAFTERYEAFCKKHHYNYQKNKPALLFEESKQLVAVFPKEKSYKLLIQQSIQQLRLASEHIEIIRKEMNELASTLPEYETVMSMYGVGETYGPQLIAEIGDVSRFTHREAITAFAGVDPGVNESGQFKQRSNRASKNGSTRLRKTLFQVMSTYLQNKSVNEPVYQFLDRKRAERKPYLVYMTAGTNKFLRIYYGKVKECLRNLEQSQIEES

SEQ ID NO: 235916 - protein, 342 aa, unidentified
MEHYAGIDVSLECSSVCVVEANGKILREARVASEPEVLIAWFRSSGFELERIGLEAGPLSQWLFAAMREAGLAVELLETRHVRKAFEAMPVKSDRNDARGIAQLMRLGWFRPVHCKSMSAQETRTLLTARKLVQSKLRDVENSLRGILRGFGLKVGKTTELRFAGRIEELVVGHPHLQAIAKALLAVRTVLRKEFAAFEKQARKMARSDARARLLMSTPAVGPIVSLTYVSAIDDPGRFKSSKQAGAHFGLTPKKHQSGETDYTGRISKIGDSSVRTALYEAAHVMLTKPLKGCSQLKSWAMRIARRAGMSKAKVALARRLAVIMHRMLADGTPFNTAASAA

SEQ ID NO: 235917 - protein, 307 aa, unidentified
MYVGIDVAKDRLDVHFRPSGEAFAVARDGEGLAELTARLVAAAPRLIVMEATGGFEVTVAAAIGAVKLPLAVVNPRQIRDFARATGKLAKTDALDAAAIAHFAEAIRPEPRAIPDEQARALGELVSRRRQVIEMMVAENHRRRQLTHRRLLKRIERHLAVLQDELSAIERDLDETIRGTPAWRENEDLLKTVPGVGNATARTLLAELPELGRLDRKQIAALVGVAPINRDSGKMRGKRAVWGGRASVRASLYMAALVASRHNPVIAAMYTRLRAAGKPAKLALTACMRKLLTILNAILRDKTPWQNA

SEQ ID NO: 235918 - protein, 340 aa, unidentified
MAIETKVVGLDVAKNVFQVHGVDRRGETVLRKRLRRSQVAEFFRHQTPCLIGIEATQGAHYWARVLRALGHEVRLVAPQFVKPYLKSQKNDANDAEAICEAVSRPNMRFVPNKSIEQQDLQALHRIRRRMIGSRTQLGNQIRGLLAEYGIVLPLHLSQVRAALPRLIEDDNPLLSGFGRQLLAALYEELCALEQRIGKIEEQVQQIHRGNPLCQKIAAVEGVGPVTATAVVAAIADGRSFHNGRQFAAWIGLVPRQHSSGDKQRHFGITKRGDPYLRMLLVHGARSVVYRAPNKNDSRSQWIAEKQRKLGTAKTCVAVANKNARVIWALLARDEPYRSAA

SEQ ID NO: 235919 - protein, 419 aa, unidentified
MSFKILKNNCCGLDVHKTWIYACIGITDSLKRTEYKEARFSSFTKGLNELCDWLSKYNCTDVCMESTGKYWIPVFNVLEKNNIWVTLSHPKYTKPQKGNKTDRKDAKWICDLYMCGMVKPSFIPPADIRELRDLVRYRFKLTCMITGEKNRAHNCLTVSNLKLDDVFSDIFGKSSRSITEQILQHPGETFDVAPFVDGRCKTPVEEIQAAVDGAISKEQAVKLRQCLNHIDELEMHKAEIEREIFRLSDKYESVLSLIRTVPGFDKTPMTAIQVLSEIGGDMSVFPTAKNLVSWAGCCPRNDQSNHKIKSTRISRAGSYFKPVLVQVANALIKSKKHPEFTTRYRRIKARRGHKKAIIAICRMILTAIWHILTDLKPYTPEGFLESRPVNESKILTTSQALNLMKQRGYIIKDDVVPVT

SEQ ID NO: 235920 - protein, 421 aa, unidentified
MTPPSHDTFAAFIGIDWADATHDGCLQAAGTAKRECFQLEHTPEAIDAWVTTLRTRFHGHPVAVCLELDKGPLVSALRKYDFLILFPLNPLTLARYREAFTPSRAKDDPTDAELQLELLLTHRDKLHPLRPQSATMRALTQLVEHRRRVVGDKVRMTNRLTRTLKNYFPHVLQWFQDKDTPIFCAFLSRWPTLKAVQLARRSTLESFFRDHHVRSPEVIARRIQAIRAALPLTTDEGVITPNALLVHALVAQLRVTLQAITDFDTAIAQRAQSHPDFPLFQVLPGAGPVFASRLLVAFGEQRERYPSATALQTYAGIAPVTERSGKKAWVHWRLQCPKCLRQSFVEWAAESIRHSFWAQVYYQQQRDKGKAHQAAVRALAFKWIRILYRCWQERTPYDEATYLQALTRRGSSLIHNLAKAS

SEQ ID NO: 235921 - protein, 338 aa, unidentified
MTIVMGLDQHRAQITADWVDTSTGEVSRARVAPADRAGVRRFLERFGDQELEVALEATTGWRFVVEELRRVAAVVHLAEPAETAARRGTKKRAKSDRADARHLRELLMVSRLPESWIPPDHILDLRARVRLRHTLSEQRGEWQQRIQAVLYHHGCPQRRNLMTGEGQRWLAAQPLAACAREQITVALAMIDALDLQLAPLNKQLRAYARRQPGCRALMAHFGIGELTAVTILAELGDAGRFSSSREAVRYAGMDITVHQSDARRAPGHLSRQGPPALRWALFEAAQSAARAGSPDRDYYRQAAERLGANRACLSVARKLLKRSYHTLRELGEEALQPA

SEQ ID NO: 235922 - protein, 343 aa, unidentified
MCTENISTKSVKINNDKYDYYIAIDYSQRNMAIATLRNDGNKPRVIDVDSDIDHLKTYLISLKGRKIVTIEETTSTHYLYVELFEYAEKILVCDPYRNSLLSDGPKTDKLDAANLCKLLRSGLLKEVYHSLNKKYELRQLVSEYEQLVKFGVRVKNEKSAIYRSMGKSYQKKEDIGDDTLAWIITQKDLRIDLYEKQKKEYDKMFSKMISQDTELKHLKDVTGIGTIGAVKILATVIDAKRFKSEGNYLSYSGLVKYQKMSGGRNYGQKKTRYSRRLKSVYKTAAMSVISGNSPLREYYDSLLKRDLSEENARNQLSRRIAIITYGILKTGTKYNPYKWRESK

SEQ ID NO: 235923 - protein, 358 aa, unidentified
MSEITRVGVDLAKNVIQVHAVDTAEKVVTNKALQRDKFILWCAMLPAGCLIAMEASSSAHHWARKLVALGLDARIIAAHLVEPYRLQGKSGKNDANDAAAICEAASRPTMRFVAIKTVAQQGMLSVHRLREGLKEERTACTNRIRGILAEFGLVFAQSSKALRENLSAVIEDANNELAGIARLVIERAQTQWSELDAHIEWCDERIAAHIKQDEHAKQATQLLGVGPVTASAVVATVGDFKQFKNGAQFGAWLGLVPKQNSSGGKNNLGSITKRGDMYVRMLLIQGARAAVLTAHRRDDPISKWAYQLREKSGWQKAVVALANKNARILWAMFARGKPFDVHHASVKPGTAQAAMSAA

SEQ ID NO: 235924 - protein, 427 aa, unidentified
MLGVGIDWAEQFHLVALGSPDDGVSEVVRIEHTAPAMAALITRLGRLEPDPAEVRVVIETSHGMLVEALVDAGYAVLPVNPDLIARRRGPARKKDDTEDARIACLLALDRFTTLRPLIPHGPVAAELRAIARDDERASRDERRLLNRLRADLIATFPAALTIAGEDLGAPTFLRLLQSWPTAAELRAATREEITALARAGRHGWPDHFADRIEHALNSTDVFTARDYLVRAKADTIRLTAVQLLAIGAQRRTWEKRMGALLLGAPRRGRARQPSPTQNGGPHPNGFPGGEIYLSFAGLGDRLAARVAGEIGDHIDYFTSPNALQCYAGKAPVTRRSGKSEYTVAHRLACNRHLRDAVQTWAFCSLNTSGWAREFYDTHRARGHTHHATLRALGNRWLEVLWHCLTKDVLYDEAIHTANRNRARKEAA

SEQ ID NO: 235925 - protein, 343 aa, unidentified
MRKYAALDVSMEQTAICVVDESGKKIIEGKVQTDPDTVTTWLAEKAGSLEKVGMETGPLAVWLWNELRARGLSIVCLDARHASAALAMMPNKTDRHDAAGLAQIVRTGWYKEVRIKSHAAYVVRALLSARDALVGIRGKIENEIRGLLKTFGVMFGRKVGGFTRRAEEIVAGELAASPEIKRIIEALLEARRAILDRIKVLDSRVRSVAKANATARLFMTAPGVGAVTALSVASAYDDPARFSRSSSAGAYLGLTPRRYESGEISRNGRISKRGSKLTRKHLFEAANALLTRVGKFSSLKAWGLRLAKIAGFKKAKVAVARKLAVILHAMWKARTPFRWSVAV

SEQ ID NO: 235926 - protein, 423 aa, unidentified
MNTVWRDISHFAALDWAQDHHDVCVVDQHGAIAAQFRFSHSAQGWNEFREKMKAFPERTPITLETSSGPAVDQLLNGPWPIFPLAPTAAALYRQRKAPSGNKGDNLDTWSMADALRTDGHAWRPLLPQDEATATLRALCRDEISLIEQRTALVNQLRATLRDYYPAALEAFDDWTQPYTWEFLLQFPTPERLQSAGKRKWEKFLHTHRLWRPSTVEERLKIFRQANAWTARPSTVAAKQLLAESLAKVLRTLQQQINEYRRRIGEAFRGHPDHDIFGSLPGAKEILAPRLLAELGSVREEYPDFEALQCMAGASPVSYQSGQIHQCRLRRACNKVLRATVHLWANASRARCQWAQAYYERKRKEGQSHAAALRCLGKRWLKILWTLWQHGQKYDETVHLENLRRRGSLTAAALCAKETPNPIT

SEQ ID NO: 235927 - protein, 357 aa, unidentified
MTKIQQIADFTGQTIYVGMDVHLKKWNITLYHEQQYLRKFQQESNPQTLIRHLTNHFPNAHFKLADEAGFCGFWIQREFAQAGMECMVVNAADVPQTDKGMKTKTDTTDSRRIGQALSGGMLKPIHVPSEETESDRALVRYRHKLKSDLLRSKTRIKSFLHKFGIKLPEEFNNSKYTLAFLKWLKELEIPHVFSRLTLSRMIQQVEYLQSQILQLTRDLRVLVRTDRYANHAKILMSVPGIGALTALSLLTEIEDIRRFKTFYHFNSFIGLCPTEFSSGETEHKGGITPRHHSVLRSLIVEMSWTAIRLDPAMTIAYNDYTKRMTGKRAITRIARKMLSRIYYLLIKQQSYEKGVIK

SEQ ID NO: 235928 - protein, 397 aa, unidentified
MKGFCISLDVSKGSSFYQGFKGLDEPITKPKKIEHNLEGFKELLKLKEIIRKEYDSDCNVIFESTGVYHKALQTYLDEHDFKYTIISPLLSAKVRKSDIRGTKTDAKDCSSIAKVFYLKESRIYSKMDEIYGDLKEKCRYYDFLVDEMKRWKIEFRRLLDIIYPGFDKIFDDVYTDYVQALLLEYPHPEIIRKKRLDTIAKFIEKHTCHKESFSLKQAQVLKEYAENCASGCSYKSYLVSQFDTVIHTLNSQIKHLEIELDEIVELAKNLPNYEIIKSIPGIAENLASRILAEIGDIDRFDNSSQLVAYAGIDPQIYQSGQTSGLHFKISKKGNKKLRCLLYLAVTSMIKTNRDTKIVEFYKRKKADGLPARSALVASMNKLLRIIHSLCKNGCLFK

SEQ ID NO: 235929 - protein, 406 aa, unidentified
MEVVHERCCGLDVHKASVTACVLSSQRRETRTFGTMTDELLRLAAWLQEEQVTHVAMESTGVYWKPIHNILEGGQLELLVVNARHVKAVPGRKTDVKDAEWLADLLRHGLLRASFVPDRQHRELRELVRYRRVVIEQRGDVARRIQKVLEGANIKLGDVASDVLGVSGMAMLKALVAGQADPVALADLAKKGLKRKRPQLERALLGSVGEHQRYLLGRQLRQIEFLDNEIADLSQEIETRMRPFDAAIAQLDAIWGLGRRSAETILAEIGTDMSRFPSEKHISSWARICPGQDESAGKRRSGWTGKGNRWVKSALVEAAWSAVRNKNTYYAALYQRLGQRRGKKRAMVAVAHSLLVTIYFMLRDGTVFQDLGVNYFNQRDREHITRRSVRRLESLGYHVTLTEDVA

SEQ ID NO: 235930 - protein, 403 aa, unidentified
MNSVGIDISKGRSTVAVMRPFGEVVISPFEVRHTDSELSELARQLKSLNGETRVVMEATGNYHAPVAKLLHDAGLYVSVINAKLVHGYGNNDLRRVKTDRKDAVKLANYGLDRWLTLPRYVPEEDTRLLLKNCYRQYRQYSKVQTVLKNNLISLLDTVFPNVNRLFSSPARADGSEKWVDFVAEFWHCGCICERSEKAFVSKYQKWCKKYGYNFGEEKACAIYAEASGHIGVMPKSETTKLLVEQAVSQLRATSAALAALKHEMQSLASMLPEYPAVMDMFGVGLTLGPQLIAEIGDVRRFYSKKALVAYAGLDAPPNDSGDVTGRHKSMSKVGASSLRRTLFLVMSAYLQNAPLDEPVYQFMDRKRAEGKPYRVYMMASANKFLRIYYATVKAYLKSLEHTA

SEQ ID NO: 235931 - protein, 323 aa, unidentified
MLIRYIDIAKRNFVIAVSSLSKTKTETNNPKGIAHTIEYLKKHKVALVVTESTGGLEIPAAKAIRRAGIAVIIANPRQTHQFAQSQPLTKTDAKDAKMPAFFTQMMTQKEDWQTMPYQPPTEAEEVLEALVNRRNQSADMRTAEKNRLHQVHETQVESVKQLIARFDRLIDESDKQIDDHTRTHFDGKAQVAEQIKGIGSITTATLMAMLPELGRLSHKRIASLVGIAPHPRESGETKFKSRCFGGRSAVLKALYMATVAATRFEPLIRDFYQRLLSEGKPYKVAVTVCMRKLLTISNARMRDYFAENDTAENDTAENGIRTA

SEQ ID NO: 235932 - protein, 423 aa, unidentified
MTSMTLDPPLTNLLSPAAELVAGVDTHKNTHHVAILDLVGRPVADREFRADGRGYAQVIRFLHEHGDVTRVGVEGTGSYGAGLSRALNAAGLTVVEVARQDRQARRRRGKSAPLDAHQAAVAVLAGTDTAIPKSGDGAVESMRILLAERRSAAKARAQVMNQIHALLITAPELVRQAFRALSGQRLVNTLARTRPGSEASADPAVVARQTLRRFAVRQLTMQAEIDLIEQQLDLLVRQVNPTLLSLSGVGPVTAATLLVAAGDNPDRLGSRASFAALAGVAPIPASSGQRTRHRLSRGGNRHANAALHRIVLLRIRHREPRTMAYFERRRAEQLTDRDIMRCLKRHVANEVYAALLNPAADNPAGRELRAHRQAIGIPISVLAASLGVPYQRLRRLEIGTRADPELERRATIALDAISPPQTA

SEQ ID NO: 235933 - protein, 346 aa, unidentified
MGIDAHKRTHTAVAIDEAGRKLGEKTTRMTTTEANLELVRWADGFGPNRRFAVEDCRHLSRRLEADLLAAGEELVRVPPKLMAHARDAARTYGKSDPIDALAVARAAHREPTLPVARLDGASRELRLLVDHREDLVRDRVAQINRLRWHLHELDPSWDPAPRSLVRFKHLDALAARLELMEGTVAWVACDLVGRIRELTVAANDLERRIVLAVSGLAPALLELAGVGALTAAKLVAEVADVRRFRSKDAFARHNGTAPLPVWSGNKIRHRLSRTGNRQLNAAIHRIAVTQMRIHQPAKDYLERRIGMGNTKTEALRSLKRRLSDVVFRALLVDADTAAEGSFSEAA

SEQ ID NO: 235934 - protein, 370 aa, unidentified
MGEVTTFIGLDVHKATVSVGIAEAGRTGEVRFLGEIPNRPATVARFVQKLAQRHAGPLSFCYEAGPCGYALYRQLRQAGHDCVVVAPSLVPTRPGEHVKTDRRDALTLARLHRAGELIGVWVPDPAHEAMRDLVRARLDAVEQLRKARQQLQGFLLRQGRIYSGRGTWTAAHRRWLAMVRFDHAAHQVILQEYSDSIADAEQRRDRLTVQIERLLPGWSLAPVVAALQAMRGVAFVTAVSLAAEVGDFNRFANPRQLMAYLGLVPSEHTSGPKTRRGGITKAGSQHARHVLIEGAWTYRLSARVSPKLQARLERLPKAVREIAWKAQLRLCGRYRAMIARGKPWNVVTTAITREMVGFIWAIAQQVRPAE

SEQ ID NO: 235935 - protein, 344 aa, unidentified
MQITTVGLDLAKNVFQVHGVDSTGQVVLRKSLRRSQMLPFFAKLPPCLVGIEACGTSHHWARELINLGHEVRLMPPAYVKPYVKRGKNDAADAEAVCEAVTRPTMRFVPVKSPEQQAALSMHRTRDLLVKQRTQLINMIRGLLAEFGVDIPKGLERALLMARQIADGRGPEVPIEAAKMVTTLSQQALDIHVRLREIDRDLAVCLRGNDVARRLMTIPGIGPVGATALAASVTDPHQFRSGRQFAAWLGLTPLQKSSGGKERLGRISKMGDKYLRKLLIIGMTSLVRRAKYNPGKIDPRLADLLARKPTRVATVAMANKTARVIWAIMARGETYRAGHRPALEA

SEQ ID NO: 235936 - protein, 393 aa, unidentified
MYFVGIDISKYKHDCFIVTEAGEVIKDTFTFDNTRTGFDQFFSILDGLGPKNEIKIGLEATGHYMNNLMKHLSVKGYSFVLLNPIIVSRFRHSETLRRTKTDKVDAKLIAQVIASKDFSSYPLQAYHFPDLKTLTRLRDRLIKQRSLYLVMLTNQLDLSFPEFKEFFDGRLKSKTAQFILTKYGISSRIANMNSQSFELLRKVSHGKFSYAKFAKLKELAKNTIGCSSEIDEMLFSLTINLYQSIDEAITNAESKIIEIMEKLDSPTASIPGIGIMSAATIIAEYGDISRFANDGQMLAYAGLDCGRYQSGTSDFPGKMVKHGSGYLRQVLMNVAETCMIHMSSFYDYYLKKRNEGKSHRVALSHIARKLVRLIYKLETSHTHFDLSVFNSQH

SEQ ID NO: 235937 - protein, 427 aa, unidentified
MSYRIAAVDVHKKMLAVVVADIAGEGEYQFERRKFGATPSELKELAEWLVQQEVEEVVMESTAQYWRPVWGALERYWQPARQQREGASKMSGTLHLCQAKSNHGPRGRKNDFADGERMIKRLVAEELVLSFVPDPEQRLLRTVTRRKHQLTRAKVGFKNQLESLLEQAHIKLSSLVSDLLGVSARRMLKALAEGETDPSALAALADRGLRATPEQLRDALGASTQLNGVYRRLLKLALEELQVIETHIEQLDREAMGLLKEHQDVVRRLAEVPGFGPDSAVQMIAEVGPKAANFRTEKKLSSWVGVCPGNEESAGESQSTRSPKGNRHMRRLLNQAAQSAVKVKGSIFEVTFHHLLPGLGYKQAIWAIAHRLCRLLWLILHKGVHYEERGPAVSAKSKRTRAARMIRELKKLGYRIEGGPLPAVAGA

SEQ ID NO: 235938 - protein, 349 aa, unidentified
MNERTILCVDYHDENCVVRHYDGITGQETVQQMPTEAGALINLVTQAKRRRPNAKIEWIQESTTGWVRVKTLLGQQVDGFLLANTLSMPKRPKDHRRKTDKIDTARILHEYLIGRLGLADQPSPKLREARRLVSYRENLVSRKTSIKNWISRYLAHETWEERTGLWTVRGRKRFDQFIAQRCASDQLVLRGKLDEMDAIDAQLAKVIMALQELYQLWPAAQRLDAIKGISVVAAVSIVARIGSIERFPTAEHLIGYAGLNPGVQQSDSKRRDGHLGGGGTDRHLRHYLVEASMWARQLPRYRPVYERVLKRRGKRIARLQVCRMMLRSIDKILRDGIDFKPSLDVPKPV

SEQ ID NO: 235939 - protein, 331 aa, unidentified
MSHFVGLDVSVKDASVCEEDDAGKVVCERKVPTEPDDIAVLLTSIGGDYVRVGIEAGPLSQWLVNGLSEAGLPVICIETRHMKALLQAQQINKSDRNDARGIAQMMRVGLFKPVHVKTLAAQEQRMLLTSRKLVQRKLIDIESDMRGTLRNFGLKVGVVSTINYEACIHHLVEGFPRLAATIEPLLTMQRVMRQQLATLHKMLLDTVRHDPVCRRLMTAPGVGPVVALTYRASIDQPQRFIHSRAVGAHVGLTPRRHQSGEIDYDGGISKSGDTMLRTMLYEAAQILMTQSRHWSWLKAWGDQGRTAPGHAARHRRRRAPPGRRPSPHVDG

SEQ ID NO: 235940 - protein, 388 aa, unidentified
MTLHKTPQPGRQGNSRIYVLQRPTALADAAAAPVSLPPRQPLPRAVLDPTRPLLKLGLDVHLEFIMAVAQKDHAQPQAPRKFTNDQLVAQMQRWLAEGFQVFCVAESCGFGFVLHRRLVAAGAQSFLITPIALNGQRKTDKLDARALCLRLSRWLDGNRDELSPIRIPSVAEQRARETTRRRQFLAREIRALANRAHGQVAEYCHEPLPHRWWGPRLWQKLQELDPWVLSLLTDLRTLILALEEQVRALEAQIKARVKDQPRPKALGALTLVTLDGEVCDWHRFSNRKQIGSYTGCCPGEHSSGRHRRVGSIDRMGNGRVRALLVEAVWRFLRWQPEWKAAQRLKLKLADGTAMRKKAVVALARQLAIDLWRWRTGRATLAELGWIAA

SEQ ID NO: 235941 - protein, 440 aa, unidentified
MAMRKREEQVFPNAAGVDVGASSHWVAVPSISTDAPVREFGAMTDDLNAMADWLLGCGVDVVALESTGVYWIAVYEVLEQRGLKVWLVDARQVKYVPGRKSDVQDCQWLQKLMSHGLLRAAFRPSADVCVIRAVARQREVLLTEQASWVQRMQKALVQMNIQLTEVISDVMGLTGQAIIRDIVAGERDAKSLARHRHRRIKASEEDIVRSLTGNWREEHLFVLKQALGMYDDIARHLRECDEKFRELLAERSAASVDIGKTPRTGSKARAAFDVRQQLANWAGADLTRINGLGLDTVMKILSEIGTDLSHFANVKHFCSWLGLCPATKISGGKVLSARTKRSANRVRQALKMAAMSLSHSDSALGAFYRRLCGRMDKPRANTATAHKLARMVYFMLTRGEAFVDQGQQRYEEQQRQRNIAALKRRAAALGFQINPLQAAA

SEQ ID NO: 235942 - protein, 337 aa, unidentified
MERQYVAVDLHSRRSMIVRENEAADERQVTRIDNDPMALAEALAEAGPDPEVAIEATYGWYWAVDVLQAAGATVHLVNPSGLVWEERRVKNDYRDCCELIDRMRLHKLPEAWIAPPELRESRELVRYRAKLVTLRTSLKAQLKSVLAKHCLHPPVDDLWGVAGPQWLDTLELPDAYTTRVESLRDLVATIDREVAMLERTIHQRLRHDRGYQAIQSLAGVGRVLSAIFVVEIGDVSRFSSPEALCSWAGLTPKHRESDRKTRRGKVTKKGSKLVRWAAIEAVSHVRSGPKLKVDYHRIAQRRGVNIARAAVARKLLTLVYYGMRDGEIRNLALVKAG

SEQ ID NO: 235943 - protein, 358 aa, unidentified
MEQITRGERGRVVVRVGVDLAKRVIQVHAVDAAGRLVTGRALARDRFIAWCAQLPGGCVVAMEASSSAHHWARKLSSLGLDARIIAAHLVKPYRKQGSSGKNDANDAAAICEAASRPSMHFVPIKSVEQQSMLCVHRLREGIKEERTACINRIRGLLAEFGLVFAQSPKVLRLALADTIEDASNEMGTLARLTLQRAYAQWCELDEHMAWCDERIAEHACTNEQVKTATALLGVGPVTASAVVATVGDFRQFRNGAQFGAWVGLTPKQHSSGGKARFGRITKRGDTYLRTLLIQAAKSAVLTAHRRSDRISNWLCMLRERSGWQIAAVALANKNARILWALMTKGAAFNANHLSAKPA

SEQ ID NO: 235944 - protein, 380 aa, unidentified
MIVIGVDAHKRTHTLVALDAVTGIIRSEATVQASDDGALSVLRFAAAVDGERVWALEDCRHVTARFERALLGAGERVVRVPPSLTGESRKATRTPGKSDPIDARAVALAAIREGLDRLPVAFLDEQAHEIRLLCDYRDQLMHERVRLINRLRWHLVRIAPHLEAQIGPQALKGPRIRARLARQLGQLPASTELRVAKAQLRRINEITKEQKELFAELTTLIQAHAPQLLEQRSIGTVTAAVIIGRTAGAQRFRSEACFARHAGTAPIPASSGKTSRHRLHRGGDRQLNRAIHIIALGRVAWDPATRAYIQRRVSDGKTKREAIRCLKRHIARQIWHLLYNTHQPQPAPAHATKTPRHSRRPHPQIMHSLKAANTETALMS

SEQ ID NO: 235945 - protein, 423 aa, unidentified
MKKHIYRAVDVKALNLDELREVVKNQKIVLGVDVAKEDFVAVLMNEKREVLSTIKWKHPMETEILLDVVLHKLLWSSLDVAMEPSGTYGDALRALFLGNGIKVYRVSPKRCHDAAEVYDGVPSLHDSKAAAIIGRLHLDGASVEWSLPEKAQRELRAAIKTMEIYDDAYYRNINRLESLLVRHWPEVTQHLKLTSATLLELLITFGGPDRVAAEPEKAVELMRRVGRSNLLVEKIDKVVESAQQSMGVPCIEEERRHLMELCREARRLQQKARTAQDRVERLTQDTESVNAMVDVIGKKTAAVLHSELGDVSRYDNAGSYVKSMGLNLKEHSSGKHKGKLKITKRGSGTVRMYLFMAVLRLIQNNFIVQAWYQCKIERDGGIKKKAVVAVMRKLARALWHVGQGKRFDAAKLFDVSRLNLAPV

SEQ ID NO: 235946 - protein, 342 aa, unidentified
MTPSSYTLFVGVDIAAASASVSWQTLDNAPCPPFEITQTKTGWRELQTKLRATGHLPEHTLVVVEATGSYWMHLALYLHEAGFHMSVINPLQAHGFARALLKRGKTDAIDAQTLTQLAAVLQPTPWTPPPPIYEELRQRLIQRDAFLDMRVQESNRLHALGHRSMVIETVRQRTKDLIAYLDAQIRELEREIATALRQDHDWAEAAQRLLSIPGIGAVTTAWLLVSTLNFTLCENAKQLSAYAGLAPYPHQSGSSVRKRSRIGHSGQGHLRRKLYMAAISAIRVDPVFKDFYQRLKAAGKKTKVALCAVARKLLCLAWTLVTKKRMFDPNFGRCLSPEPAAA

SEQ ID NO: 235947 - protein, 350 aa, unidentified
MDKELYIGVDVSKQTLDLAYYDGESIDWKKAHIKVSNNNAGFKKIGSWVAKVSKGVDIVLFCMEYTGLYTQNFRLWLEEKHYIYRMVEPRKMHRFEPDLDDGLRSLDRIKTDELDSFRIAIYCEQNHRKILRNPSKLPPPVYFKLKRLLAERKQTVKQSVLYKQQLHDICAYDTDLSVERKNGQLKTLNDALKGIDNEIDMYIKEDADISKNFSLLTSIPGIGRIVALETIVLTENFMAIDNPRKYACYIGVAPFKKESGTSVRKGSSVSKKGFKQAKADLSIACLVCMQHIPNIRDYWERKRKEKCSGIVFNAIKFKIILRMFAVIKRGTPYVETDNYRNGKNKQPGVN

SEQ ID NO: 235948 - protein, 395 aa, unidentified
MACFKCGKKQEVREFGATTRELLKLADWLGSGGCEMAAMESTASYWKPLYNILESSGLNAMVVNARHMKAVPGRKTDVKDAEWIADLLQHGLLQASYIPDKDQRELRELVRYRKSLVGERTRELNRLQKMLEGANIKLSGTVSDINGKSARSILEYILTGESFDDAKYDEMYGNKTIAHNLKATKEQIIDDLNGIMSPLQRKMMRTLLKHLDELNSHIHELDDDIDSFMKPEEKQASAAIQDVTGIGNTSAQAVISVIGTDMGRFPDDAHIASWAGLCPGDNESAGKRKSGKTRKGNALLRETLVNCAHAAVKNKKSYFYAQFMRISAHRGKKRAYVAVAHSMLVAIYHILKDGVVFKDLGADYYNQFNKERKIKAYLKKLKALGWEDSAAGQPA

SEQ ID NO: 235949 - protein, 404 aa, unidentified
MNNLAGIDVSKGKSMVSVLRPFGEVVALPFTVQHTPSELRELANYLKSLEGETRVVMEHTGRYYEPIAQALHDAGIYVCAVNPKLIKDYGNNSLRKVKTDKADSRKIARYGLDNWADLRPYSSMDTIRYQLKTMNRQYGLFSKNRTTLKNNLISLLDQTYPGANALFDSPVRDDGSQKWVDFVASFWHVDCVCSISLIAFTEKYQKWCKRHGYNSSNKTATAIYEGAKKILVTVPKNPTSKFLIQQAVEQLNACSKSVEMLRIEMNHLASQLPEYPVVMSMYGVGERLGPQLIAEIGDVTRFAHKGSLSAFAGVDPGANQSGNMELKSVRSSKCGSPALRKALFNVMDCLIKKQPMDDPVYLFMDKKRAEGKPYFVYMTAGANKFLRVYYGRVTEYLKSLDTTQ

SEQ ID NO: 235950 - protein, 335 aa, unidentified
MHEITTIGVDLAKQTFQLHGVDRHGKAVLRKTVSRAKLLESFVNLPPCLVGLEACGGAHHWAREIGKLGHEVRIIAPQFVAPYRKSGKNDANDAEAICEAVGRPNMRFVAIKTPEQQAALTVHRVREAIKTERTALINQIRGLLQEFGIVLPQGAATFCKRLLEVLQTTELPGETTSVLAELRGHLLRLKERLAEYDRKIARLAKDETAQRLAEIPGVGPVIATAVVATVGDATLFRNGRELAAWVGLVPRQSSSGGHCRLGRITKHGDSYLRTLFVQGAMTVIRHLGEKTDPRSQWIRSLIARCGIQKAAVALAAKMVRTSWVLMARGEHYRMA

SEQ ID NO: 235951 - protein, 424 aa, unidentified
MDKTAKIQLVRSNTLIAGVDVAKKKHFARIIDSYGIDVEKPFGFQNNIDGFIRLEGKLLQIQKKAGVERVIVGMEPTGHYWKPLAWWLRERGYTVVIVNPMLVKRHKEDLDNSPSKSDRKDTGIIADLVLQGKFMHCMLPKGIYAELRELAVTRRQQKGKLNAALNNLRAVLDEFFPEFDTVFKNLLGKAASWVLENIPFPKDIVSHSLEWLGERLKEASNHRVGLKRAESLMSAAESSVGVPDGLDAARIRLKSCLREVRFYEGELEITEAKMAEALEDAGLSRYLLSIPGVGVVTAAGFLGEIGDPTKYKNWRQVRNLAGLSLMENSSGKRQGNTIITKRGRSGLRCLLYQAALVLVAKNSAFRALYHYFLTRRQNPLKKKEALIAVGLKLLRVMFKLATAKELYDPSKVLGHYREAQLKAA

SEQ ID NO: 235952 - protein, 395 aa, unidentified
MFIVGIDIAKRSHEAIIITEDGQVVRKAFSFRNNCTGYNLLLEQVRRLTLVKSQIVFAMESTAHYWLALYARLLKDGYTVMVLNPIQSHSLRELYIRKAKTDARDSLIIADLVRFDRCKASNVPQDKILALRELCRSRAYLVDMAADLKRKLIALLDRIFPEYESLFDSVFSKASIAVLRKYSTPQKVKNANLRKLTDILMESSNGHFGEWKAHQLKEAACSSFGIDDSDGVYSTLLGMFLEQILSLTAQADSLEKQISVFFQEFNNPLTSIPGVGTVLAATILSEIGDITRFSSADKLLAYAGLDPSVKQSGEFKSNQNRMSKRGSPYLRRAIWLASTVAVHRDPMFQTYNEKKLSEGLHYMNVIGHVSRKMTAVIFAVLRDGQPYQPILQSAG

SEQ ID NO: 235953 - protein, 344 aa, unidentified
MPCFAALDVSQETTAICVVDDNGTIIAETTIATCPDVITSYLRDRAPNLSRVGLETGPLAVWLWNELAARQLPVLCIDARHANAALKMRPVKTDRNDAAGLAQIMRVGWFKQVRIKSHDCYQVRSLLTARETLVRIRVKMENELRGLLRTFGVLFGKRVGGFTGRAHEIICGELEASPEMRIIAETLMKARASVSDQIKVLDTRLAAIARANPTVKLFMTAPGVGIITALSVVSAFDDASRFKRSSSAGAYLGLTPRRYESGETSRNGRISKQGDKMVRKHLYEAATTLLTRNLRSSSLKTWGMKLAKVSGFKKARIAVARKLAVALHAMWKTNTPFRWTQSAA

SEQ ID NO: 235954 - protein, 348 aa, unidentified
MVILGVDSHKRTHTVVAVDANGRKLAEKTVAAISAGHLELVRWAGRFPERRFALEDCRHLSRRLSSDLLVAGEAVVRVPPKLMAGARRSSREPGKSDPIDALAVARAALREDLPVATLDGPEREVRLLVDHREDLVAERTRAQNRLRWHLHELDPGTEPPARALDRAVVLTALEARLAGQPGTVARIARELVGRIRELTTTINALEREIGRLVADLAPSLLALTGCGPLTAAKLVGETAGIGRFRSAAAFARHNGSAPLPVWSGNTERHRLSRTGNRQLNVALHRIAITQLQREGPGKTYLEHRRALGNTKTEAIRALRRRISDEVFRRMRHDEAARVAESSRLAAAA

SEQ ID NO: 235955 - protein, 403 aa, unidentified
MTEPEPGIYGGVDTHKDLHVAAVVDQTGRIHDVASFQATTTGYRQLLGWMRRHGELVRVGVEGTGSYGAGLARHLAGEGVEVVDVNRPNRQTRRRRGKSDTVDAEAAARAALNGEATAAPKSHDGVVESIRALRIAFCSTRNTRTRIANQLRDLVICAPDQLRCDLETLDTPARVKRAARFRPGELTDPTEGTKAAMRALARQYQSLTVDLDELRGQLDALTAHANPALRDARGVGIDVASILLIAAGDNPERLTSEAAFAALAGAAPVEASSGKTTRHRLNQGGNRQANHALWRIAMVRLTCDPATRAYAERRRAEGKSTREIIRCLKRYIAREIYRLLTHPPAMADRSQLRAARTAAGHTLTVVADALHTWPARISELERGTGRNDELEHRYRLWLGLAVA

SEQ ID NO: 235956 - protein, 432 aa, unidentified
MEVMHPDAAGIDVGGSMHYVAVPNHAADETVRQFGCYTVELNALADWLSECGVKIVAMESTGVYWIPLYELLERRGFEVMLVDARHVKGVHGRKSDVLDCQWLQQLLSYGLLRAAFRPHDQFCALRELNRIRGRTLRDQGRSVQHMQKAMTLMNIQLGQAISDVAGVTGQKIVRAIVAGERDPQELAAYRDRRIKASEEEIAASLEGTWRAEHLFALKQALATFDFCAAQLQDCEGEIEQVMQQLHKYSGEPAKGKRRGRAKNAPKFDVREQLFKMCGVDVTQVDGIDVSTALSIISETGTDMSRFASDKHFTSWLGLCPGTRISGGKVLGSGTKHSVNRATQAFKQAAAALRTSQSALGAYFRRLCARMDKAKAVTAAAHKLARLFYALLTKGQEYVDQGQLYYEERYRQRVIHNLQRKASKLGMSLVPSA

SEQ ID NO: 235957 - protein, 404 aa, unidentified
MIDIEIIFGIDVSKHSSNVAILADDSVIKEFKITNDRIGYETLDDALNSFKSPKVIFESSGIYSRSIRAFLQRKNWIYTEINPLAAKKDMDGFRHNKNDQLDAVALATAMAHYHYQSTFREAGVYEELHDLERTYQEFNEDLVRAKNRLHKNLQLTFPEVEQFISTTDGTLYWHVVQQFPHPTFVLETKLSELAQLILKATLKNMSEKRALGLAEHLKELANKSAPAVSSDACAVSSVVYLAGEVERLNDKKDEIIREMSQISVSLNEIPILQSIPGFGIKTAVCLLAELGDISRFHSSNAINAYIGIDLIQYQSGDYKMGQHIRKRGNSYARKILFKAVLNMVCAAKYHPSNVSILYQRKKQSSSETHTKKIAIAAMGRLIRTIYHLIKNNELYDSRKCLPQH

SEQ ID NO: 235958 - protein, 337 aa, unidentified
MSTKTTLKQCLGIDVSMKKIDCCLSFYTVDLKIKVVSTVGFENHDKGFLKLQEWIDKKKDDSINLMVNMEATGTYHEEAAYFLYDQGYNVSVIQPTKGKQYARSLDEKNKTDKIDAKMLSRMGLERELFPWNRPNEKLRILKRLSRERIGLIRDRNAMTNQLHALKHSHDAFQDTVDRLKDRIELASKQLVQIEEQMHQEIESEVFLLEKIKHVITIPGINFITAVAVISETDGFANITNRRQLVSYVGLDVVIKESGTLSWRPHISKRGNAYIRAALYMSAVCSIIHNKVLKKYFNRLKDNGKPGKTGIVALERKLLVLIYTLFKNDKDYLLNYSN

SEQ ID NO: 235959 - protein, 385 aa, unidentified
MLDHACEGLTAIRTQIGAIFVSLELSRSSWLITSLSPGGGEKMSKHSVRAGDVAGLLALFAELRRKAALRTGRSYPIITVQEAGLDGFWLHRVLIREGVESHVVDPASIAAPRRRRRAKTDRLDGEALLRALLAYKRGEPRVCAMVVAPSPEEEDRRRLCRERQALICERTMHVNRIKGLLFAQGITDYAPLRRDRRGRLAALRTADGRSLPPHLTAQIGRELDRLELLVDQIKRVEAEQEAVLAAAETGGTAASEPVAMLSAVRGIGATFAAVLWSEGFYRSFANRRQLAAYAGLAATPWRSGSIAREQGVSKAGNPRLRTVMIQLAWLWLRHQPQSALARWFQARGQRDRKRAIVALARKLLVALWKYVTAGVVIEGAVLKSA

SEQ ID NO: 235960 - protein, 430 aa, unidentified
MKSNTQNAKIEAITEKTLVLGIDVGSETHYARAFDHRGIEYSKKPFKFSNTEAGFVRFKEWIQDLKEKHEKDKVVPGMEPTGHYWFNLGKFLQDNEMKPVLVNPHHVKKSKELDDNNPTKNDRKDPKVIAGLVREGRYMIPYLPDGVYADLRTASNIRFQLQAELTRIQNRISRWFNIYFPEYKTVYGKPDAKSGMLILKKAPLPEDILTLGIDGVNQIWRDAKMRAVGKARAKTLIEAAEHSVGNKEGAVSARMEIRMLLEDYESRNIRLQEVMTLIEELVKQIPMAEKLLAIKGVGIRTVSGFLAEVGDISRFNNPKELQKLAGLALVENSSGKHKGKTTISRRGRKRLRYLLFEVAMSLVAKNPEFRELHNYYTTRRQNPLKKMQSLMAIAAKLIRVFYAMLTKGVDYDPKKMVGDIRRPVAYIQAA

SEQ ID NO: 235961 - protein, 359 aa, unidentified
MSKITITVPEITIGIDLGNKKHDLCVLNSMGEVVEQIQIDNHIEALHEYFEQYKNRSSIRIALEVGACSMWVSSILKEMGFKVIVANARKLRMIWGDTNKCDEKDAEKIARVARMDPKLLHGIEHRSLSAQKMLSVIRVREHFIGARTRCINCVRGILKSFGVTDLPSCASNRFGERMLAHIPDDLISTLGELLEESKDLTNRIEGLDDRIYMLSEESCPEAIKLQELPGVGPVTALTYVLTIDDPKRFQKSRDIGAFLGLTPKRDQSGEIDKQLSITKQGDRYLRALLVGSAQFILSDRSPASDLKNYGRRIASSGGRIAKKKAVVAIARKLAILMHHLWVSGGDYIPLHKQALRKAS

SEQ ID NO: 235962 - protein, 338 aa, unidentified
MKLKRIGVDLAKQVFQVHGVDSHEQVKRRKQLKRHQMLDFFRQLEPCVVAMEACGSAHYWARELGKLGHEVRLIAPQFVKPYVKGGKNDANDAQAICEAASRPTMRYVEVKTVEQQASQSVHRIRGRLIKARTALVNEVRGLLAEFGLIESRKGVAATRELLCRAIDDSDSSMPGSMRELLRGLSEELQGYDERLKKLEQLIQREAREDERVRRLMKIEGLGPISATAIVSAVGDARQFASGRQFAAWLGLVPSQYSTGGKERLGGISKRGDKYLRTLLIHGSRSVLKHCQSKTDKRSDWLSQLMCRRNKNIATVALANKNARIIWAILSKGEQYQPC

SEQ ID NO: 235963 - protein, 413 aa, unidentified
MEVMYPRCAGLDVHKETVVACVRLAAGSDTSHVVRTFATTTADLIELSEWLEENGCTHVAMEATGVYWKPVWQVLADSSCFELILANAAQVKNVPGRKTDVNDATWLAELLAHGLVRASFVPEPAIQELRGLLRTRKQLVREKASHVQRVQKTLEEANIKLESVLSDVMGRSGRAIIQALIDGETDPAKLAALAHWKVRASTETLSEALRGRIKRNHRFLLRLHLQQIQALDAGIAEIDREVDDGLACFRDAVDRLSTIPGISQLSAQVIVAEIGTDMSRFATDAHLRSWAGLCPRNDESAGKRRSTRLRKGAPWLKSMLVQCAWAAIRSKGTYLHAQYVRLRGRRGPKKAICAVAASILTAAYHMLKDGTFYNDLGPTHFDRRRPETQARRLIKRLAELGFSVELKSMATAS

SEQ ID NO: 235964 - protein, 338 aa, unidentified
MKVYAGIDLHSSNNYIGIIDEQDHRLYQKRLPNQLTHIKQALEPFKESLEGVVVESTYNWYWMVDGLQEDGYKVHLANPSAIKQYEGLKHTDDKWDSFWLAHMKRLNILPEGYIYPKEERPVRDALRRRLLYVRHRTSHILSLQSAITRNLGYKMSGQDIKKLNESDADKLFNEPFLILSATNSISTIHFLGKKIKEIEKAVKTHVKLKPEFEYLLTMPGIGDILGLTIMLEAGDISRFPTVGKYSSYCRCVKSERLSNKKKKGEGNRKNGNKYLSWAYVEAANFAIRSYPEFQSFYNRKKAKTNGIVAIKALSNKLARASYYVIRDQVPYDASKLFR

SEQ ID NO: 235965 - protein, 355 aa, unidentified
MASQDTITIGMDLGDKSSCYCVLNGAGQKIREGKLPTTRKGLAQLFGSIGRCRIAIEVGAHSPWVSRLLGQLGHEVIVANARQVYLITQSNRKDDRLDAETLARLARLDPQLLRPIRHRSEQAQMHLMTIRVRAGLVEARTALINQARGLAKAVGERMASCGSSQVSVERMEELPELVRETLQPLLRQVEALTAEIDGCDIKLEQIAREHYPETTVLKQISGVGTLIALTFVLTLEDRTRFQKSRDVGCYVGLRPRRRDSGERQPQLRITKEGDVYLRKLLVQGAHYILGWRGPDTDLRRWGLRLASRGGTNAHKRAIVAVARKLGILLHRLWVTGEVYEPLRPSAERRRDPAAA

SEQ ID NO: 235966 - protein, 338 aa, unidentified
MNATTIGLDIAKSVFQLHGEDAEGRLVVQKRLSRRGMAEFFAKLAPCVVALEACGTSHYWGRTLRAMGHEVRLIPAAYVKPFVRRNKTDARDAAAICVAARRPDMRPVAIKSEEQQASRARERSRELLIKQRTQLMNSLRAMLAEFGIVAAQGARGFAELRARLASGDGLPKTLVTALRLVAAQLDGLTPAIESMEDKIKTIARADPTMRRLSRIPGVGFITAHAVVAAIGDGRQFVSSRCFAAWGGMTPRETSSAGKRRTKGLSRQGESRLRKLFALGAATLMRNARSRDDRASTWQRGILARRPMKVAVMAQAAKTARIAWAVLTSGKDYAPPAAA

SEQ ID NO: 235967 - protein, 341 aa, unidentified
MNTAGVLYGGLDLHGDNVFCSLLNEARQVVFERRLPNDLAAICGALEPFRDRIKALAVESTYNWYWLVDGLRRLQYDTRLANPARMEENIGLKAANDKTDARFLARQLITGSLPEGYIYPSETRGIRDFLRRRMRLVNVCTSEWISLEGLVARHTGQDLGVRELKNAEIEKLFEGHPEAILMAQASFRHIAFLEKEIKELEKSVMAALPDKAAYRRLMTIPGVGEVLARIILLETGPIERFQHAGNYASYCRAVRSEHTSNNKKKGKGNSKCGNKYLAWAYVEAANFAVRYSPELRAWFQRKQVRSGKRVIALKALACKLAKACYFMLRDETEFDVKKLVG

SEQ ID NO: 235968 - protein, 354 aa, unidentified
MIIIGADYHPGFQQIAVVDTETGELNELRLEHREEAEQFYRALAAQGMKERVGMEASGQARWFERLLAELHFELWIGDAAEIRTKRVRKQKTDRQDAQLLLRLLLEDRFPRVWVASYENRDLRQLLWHRHRMVQTRTRIMNQLQAVALNEGLRRKKGLWREAGRKQLESFRLAPWASRRRRDLLELLDRLNPTIAELTQAVEQEVEKCPEAKRLMTHPGVGPLTALALVLIIGTPERFGSGKSIASYLGLVPSEESSGDRRRLGHITKQGNSLLRFLLVEAAQVTVRSDPEWRGKFFHLAMRRGRKIAKVAMARRLAVRLYWMWRKGWDYEQLKKIGSHTGQPGHRQGVQLNTE

SEQ ID NO: 235969 - protein, 343 aa, unidentified
MELYVGIDVSLKETSICVVDDDGVIQCEGTVISEPAAIAEFIKTKAPGAKRIGLETGPTTTWLWHELRALGLPVICIDARHAKAALSMQINKSDRNDAIGLARIMQCGWYKEVQVKSVMCHEIRAVLNSRAQLVKIKRDLENEIRGLLKNHGLVIGKAGGKVFHRRAEELLGPQGHLRDAVRPLLEIREKVSREIAALYRKLLDLARNDEDVRRSMTVPGIGLINAMAFHSMIDEPSRFKRSRNVGAYIGLTSRRFASGEIDWSGRISKCGDAMVRTYLFEAAGVLLTRVAQWSKLKAWGHRLWKRIGFKKAKIAVARKLAVILHRMWCDGTDFIWSNKEGAA

SEQ ID NO: 235970 - protein, 429 aa, unidentified
MRTESTPGARGPVFCGVDTHADSHWLCVLDWRGRRVLSRRFPADAAGYEALAGAIAAAGEPACVAMEGTSSYGAGLTRHLASLGMPVREALSPARTQRRRPGQGKCDEADAERAARAAMSGSRLGTPKSQDGWVDGVRCMLAARSGAVKARTSAINTARSLLTTAPEGLRSRFRGMGGPRLMEELPSVRAEGALGAALGALADLWAAARDAALDMERAIEASLEENCPALLAMYGCGPVSAAKLAVAAGDNPGRLRSEASFAAICGACPIPASSGKTVRHRLNRGGDRQANSALHEIARQRVMRDPETAEYAERARARGKSDREVMRCLKRYVAREAYRALMRPHEIRRPEDASGLVAARRAAKVSQVRAASILGTSEKYISMLERGQRELKPIRRAYEAWVEAGLPLDWDRQAFEAERKMDSKKHLAK

SEQ ID NO: 235971 - protein, 355 aa, unidentified
MGIFLGVDLHTRNQSICWIDTAQGEIHEARLDHQRDDRRGFYEGLPAPAVIGVESTGYALWFHKLVEELGHTLLVGDALAIRQLARRRQKNDRRDASLVLDLLIRGDFPAVHVPSAASRQVITLLRYRRRLVRIRTTLKNGLQAVALNHQLRLGARLFSAQGKLQLSSLPLTGASAIEREHSLQLIMVLDQRLGKVDQELEACAQKDARVQRLRTHPGVGVQTALAVVHFLEPVSRFRRARQLSSYSGLDPVEHSSGDHQRYGHISKQGNRLLRFLLIEAAHQLVRRGQDPDLRRFYYRLWARKNSSVAIVAVARKLLLRLYRMLCEQIDYEEFRRRGSRCGKCPLCTESRLCGD

SEQ ID NO: 235972 - protein, 337 aa, unidentified
MTLYCGIDLHSNNSVVAVLDEQDRTIYEKRLPNDLETITEALCIYQSELAACVVESTYNWYWLVDGLMATGFPVRLAHTSALPEYSGLKYSNDFTDARQLAHLLRLGLLPTGYIYPREERALRDLLRRRLLLVRQRSLQHVSLQSLIARHSGQRLNTLQIKQLTKGRLADYLQGHALLGGEITHQARCWLDGAVRRIEQELQQHIKPREDYQLLQSIPGVGSVLGTTIALETGSIERFASPGNYASYARCVKSEKISNNKYKGQGNKKNGNKYLAWAFMEAAHYGAIWNPGIKRYYQRKQAKAHILVAKKAVANKLARACYHMLKRGEVFDVTRAFS

SEQ ID NO: 235973 - protein, 394 aa, unidentified
MIYVGIDVAKDKHDCIILNSNGKVVFDVFTIQNNIDGFEDLLFKIKATEKYPDKVKVGLEATGHYSCNILGFLKNKGLSTIVINPLYTSLSRKSISLRKTKTDKVDARTIACMIMSDVNLKPYSDTLYLNEDLKSLTRYRFNKVAQRAKLKISVSRLVNILFPELEKLVSTLHGKAVYELLSEFPSAQHIASANLKHLTNLLHTASKGRFQRASADQIRQAARKSIGSYLPAKSLELKHTIKLIRELNSEITEIEAEIKKIMDVIDSPIISIPGIGQNLGAVILAEIGDFSRFESPDKILAFAGCSPSTYQSGQLYSSHAKMEKRGSRYLRWALLNAAAYVCKWEPTFATYLAKKLAEGKHYYVALSHAAKKLVRVLYHLETTGKTYQPTSILS

SEQ ID NO: 235974 - protein, 425 aa, unidentified
MKLTRIQQTNQRIENITMNHAVVGIDIAKDTHVAQVVDYRNRVLMPRALAFANTEAGFEIFWEWLQAVQSKHGLSTVLVGMEPTGHYWFNFAAWLRRQQIDVVLVNPVLTHRNKENRDNTPSKNDAKDALTIADLVNRGLYTEYNPPAVEFERLKTIMSDREFWVKQSTSLGNRIVRWIDLYFPEFRQLFPDWTVVRSLASLQAFPLPCDLQGLTVDDVIEGWRHEGMKRCAGISGKAKAEELLRLASCSIGNRSATDEAKRDLQRLLKAYQNTLSELEEMQRQIEALLAEIPQAEQLRSIHGLGSITLAAILGFAGDLRHYAHGQQLLRRAGLNLAECTSGKFKGQIKLSKRGDSALRKYLYFGMLSLVSHHPDFKRRHEENQKRGMKKNASIFKLIGKFARILIGMVQRGETYRSITADSQAA

SEQ ID NO: 235975 - protein, 344 aa, unidentified
MSKVTTVGIDLAKNTFVLFGLGPKGHSGWKRKVRRKQLLEQLVRLEPCTVALEACGSSHYWARQIRALGHQVELLPPQHVKGYLRGQKNDYNDAQAIAEASEHGRIRPVPIKEVEQQDDQMLHKLRQGVSKDRVRISNQLRGLLAEYGVIMPQGIAALRRELPLALEDADNGLSERARQLLHRQYQRFLEVEQELAWYDQQVKQRSRQDETCRRLQAIPGVGEVVASLLKGWMGDGRQFRRGRDAGAALGLIPRQNSTGGKDVLLGISKRGDPYVRAQLVHGARAVVARADGKMDRLSRWIQRLKAERGFNKATVALANKLVRIAWVIIARGEHYQPSEQRLAV

SEQ ID NO: 235976 - protein, 343 aa, unidentified
MEHFAGLDVSVKDTSVCIVDEIGKIIREVKVASEPDALLQVLRNAGYHFKRIGLEAGPLSQWLFSALGEANLPVICVETRHMRAVLKAQINKTDRNDARGIAQMMRVGLYRPVHVKTLRSQKLRMLLTHRKLLQSKAIAIENDLRSTLRNFGLKVGMVGTAKFETRIKELIENLPDLILLVEPLLVVRRVLREQLDLLHRRLLAVVRDDAICRRLMTVPGVGPVVALTYRATVDMPARFRKSKSVGAVFGLTCSRDQSGERDRPGAISRRGDEMMRAMLYEAAQAMLLRSAKWSWLKAWAMQIARRRGMKRAIVALARRLAVILHRIWVDGTEFRWTREAAAA

SEQ ID NO: 235977 - protein, 324 aa, unidentified
MSTSECTPVFIGIDVSKAHLDVAVRPQGESWQVDNTLEGISQLVEKVRQFSPLLVILEATGGYEAASATALAVAGLPVAVINPRQARDFAKSLGRLAKTDRIDAAVLARFGEAVRPEPRKLSDEQTVQLQALMVRRRQLLEMIVAEKNRVSLSHTTVRPRLVEHIAWLENELSDIDTDLREQLQKSPIWREKDDLLRSVPGVGNVTSTTLLAELPELGQLNRKKIAALVGVAPYNCDSGKMHGKRAIWGGRAAVRTALYMATLSATRYNSVIRAHYKHLKEEGKSSKVALVACMRKLLTILNAIIHSGCAWNDKLALPKSSATA

SEQ ID NO: 235978 - protein, 415 aa, unidentified
MALKIVYKICCGIDVHKTFVVACIASTDKHGVTSYERHRFSTYTKGLKNLLQWLLEHNCKDVCMESTGKYWIPVYNILEKDCSIVLAHPKYVKAIRGKKTDKKDAKWIADLFKHDLVSGSFMPPADIRQLRDLMRYRFKLTCFKSSEKNRLQNCLTVSNIQLGNVVSDTFGKSAQAILDKILENPEDTSFDLEPLVFKSLKKKLPELRDAIDGYITPEQAGKLKIIEAHYESLESRKAELEELILALAAPYQQEFAILQTAPGISSDFTAIGIISEIGTNMEAFPSAKHLCSWAGLTPTNNESAGKKKSVRVSKAGCYIKPLLVQCANAVVKSSKHPEMRNRYLRLKKRRGHKKAIIAIARMLLTALYHMLKNGENYNAELYRKSDLPPVDREITVEQAILIARNQGYKIKSATA

SEQ ID NO: 235979 - protein, 345 aa, unidentified
MSRHSVQGGDIAGLFGCFTSLRDKARAREGRLFPLVVIQEAGLDGFWIDRALKQEDWIESHVVDAASIAVPRKHRRAKTDRIDGEMLVRTLLAFKRGEARVCSMVRPPSREEEDRRRLSRERKVLVGERTRHINRVQGLLLSQGIRGYRPLRRDRRACLDELRTGDGHPLPKHLKAQIGRELDRIELLMEQIKMVESERDELAKVNDNNQCSPVVLLQGLRGIGAEFATVLTQEGLFRHFDNRRQVAAYAGLAPSPWKSGSIDREQGVSKSGNPRLRTAMIQLAWLWLRYQPDTALAQWFHEHVGARSNRSRKTAIVALARKLLVALWKYVTSGVVIDGAHPASR

SEQ ID NO: 235980 - protein, 372 aa, unidentified
MNYNTVYVGMDVHKESFTLCSCKYEDEKASHYQRTPASYKNVLRYLAFLRTIYGEDTRFVCGYEAGCLGYSLYHQLENFNVECVILAPTTMLEQRSKRRIKTDKRDAEIIAKSLAQHNYSPVHIPTKMDNQTKEFIRMRDDHKAELKKIKQQILAFCLRQGYQYDGSGNWTAKHVKWLRSLKTEGLYKEILDEYLLTYTILTDKLNRLDQRIEELASKEEYKESVSKLTCFLGIKIHTALSVIVEVGDFQRFVSARKFAGYLGLVPGQHSSGDDRNGLGITKAGNTHVRRLLVESAQSYTRGKIGYKSRVLRSRQAGNSPQIINYADRANERLRRRYYQMVLKDGKKYNIAKIAVARELACFICGMMTDNIY

SEQ ID NO: 235981 - protein, 323 aa, unidentified
MEHELHYIGIDTAKEKLDVDVLRPDGRHRTKKFANTTKGHDELVSWLKGHKIDHAHICIEATGTYMEPVAECLYDAGYIVSVINPALGKAFAQSEGLRNKTDTVDARMLAEFCRQKRPAAWEAPHPLERALRALVVRHQALTDMHTQELNRTETAREVQRPSIDAHLLWLEAELKRLEKQIKDLTDDDPDMKHRRKLLESIPGIGEKTSAVLLAYIGLKDRFAHARQFAAFAGLTPRRYESGSSVRGASRMSKAGHVSLRRALYMPAMVATSKTEWGRAFRDRLAANGKKGKVILGAMMRKLAQVAYGVLKSGVAFDASRHNR

SEQ ID NO: 235982 - protein, 404 aa, unidentified
MWYVGLDWADTHHDVEVQDEGGLRIGARRFAHSHAGLHELKAFLLGIAASPEELACIVETNHGLLITFLLEAGIPVYPVNPKSANRLRKAAGAKTDRIDAHLLAKLGRFDLAELRRLEPDSPSVAELKTLTRDQDALIQTQTRLVNQLTACLKEYYPAALHLFAKVQQRSTLVFLQAYPTPQAALAASIEEITATLRTGKHTNPRRVAPKIVEELHRPQLVASSVIVRAKSRLMLALVKQLLVVIEEIASYDKAIRPLFLSHPDQELWSSLPRAGKRLAPRLLAEWGDDRSRYADGNSVQTLAGTAPVPYESGNYAKAHKRFACSKPLRNALHQFAWQSTQHEAWARDYYQRKRAQGKTHSMAVRALANVWVRIIYRMWMSETCYQTATFEAAQLAHAPRQHVA

SEQ ID NO: 235983 - protein, 348 aa, unidentified
MIIIGVDFHPEFQQMASVDTETGEVQEKRLAHREEAVAFYRALAGQKVRVGMEASGHARWFERLVAELQFELRIGDAAEIRTRRVRKQKTDRQDAQLILSLLLENRFPQIWVPSWENRDLRQLLWHRHRMVQARTRIMNQLQAVALNEGLHCKKRLWRAHGREQLESFQLAPWASRRRRDLLELLDRLNPTIAELSQAIAQEVEKCSETRRLMTHPGVGPLTALAFVLIIGEADRFQCGKQVASYLGLVPLEDSSGNRRRLGHITKQGSSMLRFLLVEAAQVTVRSLPEWRSKYLHLGMRRGRKIAKVAMARKLAVRLYWMMCNGWDYEQVKKFGSHAGQPGNRDGVQ

SEQ ID NO: 235984 - protein, 321 aa, unidentified
MSSYYKKEVQIMINNEDIIHCGIDVSKKNLDAFVGNKVKRYDNTIKGVKQLIKDVGNVHYIFESTGGYERLAAWYLLDNSHIVSVVNPKRVRDHARSKGLLAKTDSIDARVITSYADQNELRLTQKPSPEQLKLTALVGRRHQLSEIIKQENNRLELTFDKCCIKSIRKIVRTLEKEQEKVEADILTIIKESYEFSEKAKVIQSICGLGYTCAITLLAYFPEIGTVSRREAAALAGLAPYNKDSGNFKGIRKIFGGRSKLRAALYMGAMSAKTYNPILREVYNRLVDENHRPGKVALVAVMRKLVIVANSAVKNSDFMLAN

SEQ ID NO: 235985 - protein, 382 aa, unidentified
MPDVISSAPAAVRMRAALDVHKRTIVCAAQPDDPRAELRLEEIPNTERAVRGLVRRLGGPEGLVVCYEAGPCGYDLFRLLSAMGVACDIVAPALTPVAPGARVKTDRRDAKRLLVLHRAGALKFVAVPTPAQEGLRDLVRCRDDLVCARRAARHRVAKQLLRHGHVFREGKKSWTKTHQAWVRRQRLGDPLAQSALEHMLAHLDSLDAQIAALDHQLDEIAAREPWSDPVRWLCCFRGVTTITALGLLAELGDFRRFGSARELMGFLGLTPSEYSSGEQRHRGHITKAGPRHARRLLIEAAWHYQHPPRVSQRIAAVHPHVPPDVAARAFSAQVRLHHRHRHLTSHGKRSTVANVAVARELAGFLWAAMTRQPLPAQEVTAA

SEQ ID NO: 235986 - protein, 321 aa, unidentified
MNATTIGIDLAKSIFAICEGDSRGHGSRSSILKGGDFLKWLRTLPTGTVVAMEACSSAHSWGRTMQALGLEPRLIAAEFVRPYRKNQRIKNDARDAEAVLTALHAPGMRFVTIKTEEQQQRLAWHRLREGWKAERTALFNRIRGLLSEFGIVVELGAAKIRRKLAELESDTAYPQSIQLMAQSVRAQIDILDQRLIECERQIAQQSMSDPAVARLRSRPGIGPLTADALVATVGDARQFKNGRQFAASLGITPRQHGSGGKTHLGAITRRGDAYLRSLLVQGARCVLQAALRLQKNKPDTLNRLQLWMSSSTTGLAITRRP

SEQ ID NO: 235987 - protein, 404 aa, unidentified
MYNAVGIDVSKGKSTVTVLQPGGTVIRKPFDVSHTSQNLNELAAYLDSLDGDTRIVMECTGRYHEPILKALSEAGLFVSVVNPHLIKNFGSNSLRKVKSDPADARKIARYTLDNWAELHQYSGMDNTRTQLKTLNSQFSFFMKQKVAVKANLIALLDNTYPGVNKLFDSPVREDGSEKWVDYAYSFWHVDCVRGIGLKAFTERYQAFCKRHHYIFQADKPEKLFNASKELAAVFPKEKTYKLLIQQSIQQLNLASGHVERLRREMNELVSTLPEYSTVMGIYGVGRTYGPQLIAEIGDVSRFTHREALTAFAGVDPGVDESGQHKSKSNRASKVGSARLRKTLFQIMTTLLQNAPEDDPVYRFLDKKRSQGKPYYVYMTAGANKFLRIYYGKVKECLRNLEQES

SEQ ID NO: 235988 - protein, 364 aa, unidentified
MIIIGADYHPGFQQIAFVDTDTGEFQEQRLQHREEAEKFYRELAAQGMQVRVGMESSGQARWFERLLSELHFELWIGDAAEIRTKRVRKQKTDRQDAQLILQLMVEDRFPKIWVPSWENRDLRQLLWHRHRMVQARTRIMNQLQAVALNEGLRCKKRLWREHGRQQLEAFRLAPWASRRRRDLLELIDRLNPTITELSQAIEQEVEKCPEARRLMTHPGVGALTALAFVLIIGQAERFDCGKQVASYLGLVPLEDSSGNRRRLGHITKQGSSMMRFLLVEAAQVTVRSVPEWRSKYLHLMMRRGRKTAKVAMARKLAVRLYWMMRQGWDYQQWSKFGSHAGQPGNRDGVQSNTEKLIGRPAPLH

SEQ ID NO: 235989 - protein, 449 aa, unidentified
MSRPQVIDDEEHERIHDKVAAIDVAKDAGVVCTRTPHPSRPGARRSRIWTVKARMNTIRALGRQLHKDGIEIVTLESTSDYWRIWFFVLEAAGLAVQLDGAAQAKNLPGRPKTDKLDAQWLARLTEMGLLRASFVPPKAIRDLRDYTRARTRLVQERTRCWQRLEKLLEGAQVKLSSVASKLTTVSAQDMIRAMIAGQRDPRVLAALARTGMKAKHDELVQALDGMSGDHHGELAQLLLDQIAGLDGKITQLGTRIEQAVTALPDAWGINADGTTGPQAGTGPDAAVIPAVTRLAEIPGISENLARAVIAETGLDMRRFPTAGHLVSRAGLCPTARQSGPRTRAGKKGQGNTWLRGHLGQAAAGAARTATFLGERYHRIARRRGKAKAQVAVARSILVIIWHLLADPSARYTDLGYGYYQDRTDKDRKLRNHMRQIEALGFTVTLNKTA

SEQ ID NO: 235990 - protein, 353 aa, unidentified
MITIGVDAHKRMHVALALDDAGQELGQWRGLNSAAGWQSLAQWAGELGCPRQWAIEGAWNYGRGLAQQLVVGGETVYEVNARWTALGRRRARRPGKTDRLDAQAVALLARREASTLPRVSPEDDTAILALLTTEREAALGEATRLGNQIHALLMQLDPEYHGRLPSLRSRAGLDALETYPSPGGCLLQDERAAAVGRLAKRLRLTLVQAEELARQIAGYAEVGYSPLTRLCGVNLLTAGMLAGILGPGRRFATDAELAAYAGVAPLEASSAGLTRHRLNRGGNRRLNAILYRIALTQAHYSPEARAYLDRRVSEGKSRREAIRALKRFIVRAIWRLWQDCEASSIKPLVENVA

SEQ ID NO: 235991 - protein, 350 aa, unidentified
MEYLGIDWSYRRAAWCSLSDAGVIVGEGAVPADADGLARLVIERGTDVRAVVEMMSGAIWVRDELTAAGWRVQIAHARKVRDVAPLACKTDKVDARVLAELARRDLVPELWVPPLEDRALRERLRRRTHLVRMRASAMNRIFGLQTQWGLRLSLRRLRSPDAMTLLERQGMPAVWRRSIAEALDVIDLLDARITPIDHELRPLARADARVVLLDTIPGIGDLLGLTLASEIGDVARFGSPRKLIGYAGLAPKISQSGDRSRTGALSKAGSRTLRWAAVEAAQHAWRPSNPWHQLYTDLAERAGKNPAKAAVARKILIAAWHVLSRQQPFKPAAPRRPDPASASSRCFLAA

SEQ ID NO: 235992 - protein, 347 aa, unidentified
MNFYNNMHPYYCGIDLHARLLYVCIIDNTGLILVHKKIKDDPDALLKLLKPYIGDIVVGVECMHCWYWVADFCKEHTIDFILGHALYMKAIHGGKAKNDKIDSYKIAKLIRGGNFPLAYVYDKDMRATRDLLRRRTKIVRHGADLKAHVANTASQYNLPAHNVNLKNVCDREKMRYYFPDPVVQRSINLNMAILDCYHKELKPLEHYIEQMAKQHNPVHLNILQTINGIGRILALTIIYEIGDINRFSSVQKFASYSRLVKCKAESAGKTYGTQGNKIGNAHLKWAFSEAAVLLLRHNHNANKYLEKLQKRMSKAKALSALAHKLGRCVYYMLKKETVFDEAKFLKS

SEQ ID NO: 235993 - protein, 321 aa, unidentified
MSTVTGLVVGIDVAKDALEVATSAGEHWQTPNDPEGHEALRVRLSAVSVGLIVLEATGGYEVALVAVLAHAGLPAVVVNPRQVRQFARSLGRLAKTDAIDAEVLVSFGVHVAPPVRPLPDAQTKLLEALLTRRRQLLGMIQAERNRLPLALGPIRTDLKQHIAFLVRRLKDTDRDLESRLRASPLWREREKLLTAVPGVGRQMLLTVCAALPELGRVPSRQLAALVGVAPYNCDSGTLRGQRHCWGGRAAVRQVLYMATLAATRCNPVIRPFYARLVAAGKPRKVALVACMRRLLVILNAMAREARRGIRSSRRPGDLKIT

SEQ ID NO: 235994 - protein, 353 aa, unidentified
MHLYFVGLDVHKQVIAFCVKTADGVIVMEGSIPATRAALDQWVKTLPGPWHGGMEATMFSHWIYQHLKPHAVKLDMGHAARMKAICAGKKKSDKLDARTIADLLRCNLFPACFVISPELGALRQQMRFRRLLVEETVMFKNKTAGLLMGAGVEYERRRLHGKRYFESLLKDNEWIGQEMRPLLEFNRAQMTTLQAMDRRLKGMLARHPALESRVKALCRIEGVGTVTALSWALEAATPERFPSIKNAMSYCGLTSALRESAGHQKRGPLSKQRNAHLQSALIETAKLAPMYNEKLKEVYRKAIEKGGHRNRATLAVARKLVAYLMAADRAFFASQRESGDAAEYAHQKDPAAA

SEQ ID NO: 235995 - protein, 342 aa, unidentified
MYYIGLDVHKKTISYCVKDVSGQVHQEGKVGATRWELDDWMKTLPQPWTVAMEATIFTGWIYDHLLPHAQQVKVAHPLMLRVIAAAKKKNDRIDAGKIADCLRCDFLPECHMAPTPIRDRRRTLRYRHLLVRQMVQMKNRISGLLMETGVSYNKQRLHKVRYFHELLSTNEEVNESIRPLLRLSRETIMRLQKTEYALVSSLQRDPLLAERIRHLRTVPGVGPITALTWALEMGDVSRFRSVREAISYCGLCGDEKSSADKMTRTPLSKQRNKHIQRVLVEAAKLAPRQDHDLALVYETAKQKGNSNRATLAVARKMVAYLLAVDRGQRDFVPAEAHRGAAA

SEQ ID NO: 235996 - protein, 351 aa, unidentified
MTTMTTADRFVTGGVDTYRDFHVAAALDHLGGVLGTAQFPTSAKGYRSLLSWLAEFGTVEAVGVEGTGSYGAALARHLAESDVRVIEVGRPNRQVRRRHGKTDVVDAIAAARAVQSGDATATPKSHDGPVEALRALKMVQRSARKARTQALNQLHALVLTAPEGLRAKLRGRRNRDLITTCAAFRVRAEDDSLNSILRLSMRELAQRILLLEEQNRTVRDRMHRITTELAPDLVAKTGVGPDTATTLLITAGDNPGRLGHEKSFAALVGASPIPVNSGQIQGRVRLNRGGDRDANSALWRIAIVRLATDQDTRDYVAKRQAEGKTKSEAIRCLKRYIAREVFNALPKQAIA

SEQ ID NO: 235997 - protein, 390 aa, unidentified
MKKLKPNVACAGMDVHYKFSNVTFRDADGKVVSRQRLEHPDRQKLRRRLSQWPSGIPVVMEASFGWGWLSDLLEEKGMNVDLSNCFKVEKMRKARGWAKTNKKDADLISLLPFEMSDWWKVWRAPVDVRNRREQMRFRADLVGMQTAVKSRIHAIFHRHGVFHEFSDLFGAKGRKFLAELCSDNPAGLPYEALTALRGNVMLLDHLRRQLAAVARTLHSQLSRTTLTTRLKTIAGFGLILSHVLTAEIGRIDRFRNHKSLAAYSLLAPRADDTGEDDPSHSPKGRHLGVRGNRTLKWAFIEAAHGAVRSGGKWRDMFDRVTDGGRKDRGRGYIKVARELVKVVYAVWSKGVDYQETPPARPGSHKNKNKNKQSRSGTGQLLHPMVHAVSA

SEQ ID NO: 235998 - protein, 361 aa, unidentified
MGSPVTSRAGELVVLGVDTHADAHVAVALDEFGRRLGSTEAPATQAGYEKLLAWAEGFGSLELVGLEGSGSFGVGLARYLHARGVEVVEVNRPNRQHRRRFGKHDTADAEAAARAVQAGAATGEPKSADGPAEMVRVLHVVRRSAVKARTQATNQLRALLVTAPEELKAELRGLSTAKLVATAARFRPGGFPDEVRTATKLAMRSVARRHQRLSEEIAELEEQIGRLVAEYVPALASLRGVGTDTAASLLVAVGDNPERLKSEAAFARLCGVAPLEASSGKTVRHRLNRGGNRDANRALHVLALGRMSWDERTREYVARRTAEGKSRREILRCLKRYVAREVYRVLTAPPLLAPPPLPALP

SEQ ID NO: 235999 - protein, 457 aa, unidentified
MKPIHHEVTEIDGDETEQVLSVAAAVDVAKASGMVCVRYPHPSIEGRRMSKVWEVDSTTNSILSLGQDLVALGAERVVVESTSDYWRPFFYLLEAAGLSVWLVNARDVKQVTGRPKTDRLDAVWLAKLNERGMVRPSFVPPAQIRALRSYTRLRTELVEERSRHKQRLEKLLEDALIKLSSVVTDLLGVSARAMIEALIAGERDPKVIADLAQGKLKAKRAALIEALTGRFDDHHVEIARVLLDQIDACTDKVDRLTASIEALVAELGDPPPPGDREPDPTLRQVPVEADPEARRLTTVERLDEVPGIAERAAQIIIAEIGLDMSQFPTPRHLVSWAKLSPQTIQSGPKVKVGKTGKGNRYLKGVLGEVATAAAKTDTFLGARYRRLVRRRGKQKALVAVARSILVIVWHLLADPDVRYVDLGADYYIRRLDPDRKTRDLVRQLQALGHQVTLEPAA

SEQ ID NO: 236000 - protein, 353 aa, unidentified
MKTEITQWQDFQLYAGIDLHKNKWVVTVRTDSCHINTFVCPPDESKLLKTLQNKWQAAKIKAVYEAGCFGYHLADYLNSNGIETLIVAPHTIPTPRGSFVKTDKIDSKKLALELSKGSLKSIYLRSTEELYNRSLVRKRIQLVKRKRQIITRLKADMLFYNVKFDFTVKEYLSKKVIKKIRAFNYSNDYLNYHFNQSLDDYELVSSNLIKINLFLEKVVSSATYNKNFELLRSVPGIGKLTASIILLEIGDIERFSSKEKFVSYLGLTPSEFSSGDKIRIGSLSGMGHSYLRSLLIECSWQAVKFDPVLMKKYYSLSEKKGKLKAIVAIAKKLATRIHFVLKVSQPYVVGVVR

SEQ ID NO: 236001 - protein, 309 aa, unidentified
MDAIVVGIDVSKDRLDVCVRPSGEAFAVSRDAGGLDVLLARLRELAPQIVVAEATGGFETVVAASLGAAGLPIVVVNPAQIRAFAKALGKRAKSDPIDAAVIAHFAEATKVEARPLPDAETQRLADLIARRRQIIQMVVAERQRDQRASKRMKKSIARLLRALQAELSEIDTDIDEAVRGSPAWREKEDLLASVPGVGPGTARTLIAELPELGTLDRRQIAALAGLAPWTRQSGKWRGRSFIGGGRASVRTALFMSALSAARHNPALKAFRQRLLAAGKPKMVAIIAVARKLLTILNAILRDKTPWQSA

SEQ ID NO: 236002 - protein, 404 aa, unidentified
MTAEVVEDTADQDVFGGVDSHADTLHVAVISDNGGHLADAEFSTTAAGYAAALAFLNAHGQVRAIGVEGTSSYGAGFTRAARSHGHPVIEVNRPDRAERRRIGKSDPIDAYAAARAALSGRASSAPKDDTVAGIRALHNAARSAVKARTAALNQITHLLFTAPEAIRAKYGQLKGTDRTDALARLRPTGDVVHTAVLTALKSLARRVKELTAEHEALTQALDSEASAYNPGLRAAYGVGPDTAAQLLVTAGGNPERMRTEASFAALCGVAPVPASSGRTNRHRLSRGGDRAANAALYRIALVRLSSDSRTREYAARQTAAGRTKKEIIRLLKRAIAREMFRCLTTTVTVPGIADLRPQRQAKNITLTAVAQHFGVWPTTISRLERGLSRDDDLARAYRDWIQTA

SEQ ID NO: 236003 - protein, 349 aa, unidentified
MITIGVDSHKRTHTVVAVDDNGRRLAEKTLATTPAGHLELVRWSRRWHERRWALEDCRHLTRRLEADLVRAGELVVRVPPKLMAGSRRSVREPGKSDPIDALSVARAALREPDLPIARLDGVEREVRLLVDHREDLITDRTGHQARLRWFLVELGIPEPAARTLSRPAILDSVERELAARSEMSARISRDLVARIRELTSAINALEREIRTRTESLAPALLALAGCGPLMAAKLLGETGGIERFHSRAAFAAHNGTAPIPVWSGNIVRHRLNRGGNRQLNAALHRIAITQLRCPGPGRDYVAKRLACGDTKPEAIRALRRRISDEVFRRLRTDEAARISSKESIALAVA

SEQ ID NO: 236004 - protein, 445 aa, unidentified
MHYKRLLSLIDSVSSYLSVGLDVGADFTWMSIALPNGSFIGKPFKIILSDPRSRDLAVTKIKEAQETYSLKSRCFLESTGIYHIPLLCFLRDKGFDCSVINPIITKNSTNINIRKLHNDKFDSKKAALVGLNVSLKTSIIPDDSVVDLRNLVRDYYYFKDLQSAVALKLTAELKVSFPAYAKVFSKVTTQSSLKLLSSYPLPEDMLAASKEDIVDIIRSTARFGEAYALRKYDTIIAAAQDAAVFGRALPSNAVRIRLYIDTYQEYQKHLDALLKALHETVEKLQDTLIYDQICLLQSLYGIGFLSAVVLVAEMGDFKLFSSPKKLYAYFGLDPAVKQSGKLNGDKVHMSKRGSSLARRVLHMAALNNVKVAKGSGTPVNPVVYDYYTRKCSCKKKPVAMGAVMHKICNIIFAMLRDNKPFEIITPEEHCRRFAAEHPDKIRKAA

SEQ ID NO: 236005 - protein, 343 aa, unidentified
MQTVTVVGLDIAKSVFQVHGVDASGSVVMRRQLRRRYVLAFFKKLPPCLVGIEACATSHHWSRELQALGHTVRLIPPAYVKPYVKRQKNDAADAEAICEAVQRPSMRFVPTKTPEQQSCLMLHRTRHLFIRQQTAVINTIRAHLAEFGIVAPVGRNGVEDLLYTIADQRDDRIPEVARACLEALGALLGRLKAQILEFDRQINAWHRSNEMSRRLDELPGVGPALATALVASVADPKAFRSGRDFSAWIGLVPKQSSSGGRERLGSITKQGDRYLRSLFTAGALALIRYAKIHGLKHRPWLARLLERRPTKVAAIALANKLARMAWAMMAKGESYREPIALAR

SEQ ID NO: 236006 - protein, 347 aa, unidentified
MALATISVLGVDLGKNVCSVVGLDASGAVVMRRKMRRETLIGLAEKLPACVIGIEACCGAHHLGRVFAAHGHDVRLMSPEYVRPYVKAQKNDDRDAEGIAEAATRPTMRFVDLKSQDQLDIQTLHRSRDRLVGERTALINQLRAILLERGMVAPQGKRKLEQFLTVLMDEQGGEGLSPRMILLVADARAQWAELDRRIAAFDTEFIRWAKENDNARRLTTIPGFGAIVASALVAAVGHAESFDHGRDLAAWLGLVPRQFTTGGKPKLLGISKRGNKYLRKQLIHGARAALPYVAERDTPLGRWAKALMARTHHNVAVVAFAHKLARIAWAVLRRGEPFAVTGIPAAG

SEQ ID NO: 236007 - protein, 311 aa, unidentified
MEYFAGLDVSMQETHVCVVDRDGAVVHQAKVPSTPADIEAELAKAPACRRVVFETGRMAPMLYHGLAERGLPIVCVESRQAYQALKSLTTHKTDRNDARGLAHLARTGFFKPVHVKSLAAHAIRSLIIARKKLVGQRVTLENQIRGLAVVFGVRLPRALSARFAVLAAVVAIDADIRKMVRASDACRRLMTIPGVGQLTALAFTAAIDDPARFRRSRDVGAYLGLVPRRYQSGEVDYTGSISKCGDRRVRTLLYEAANVMLTRYKGPLKLKDWAFAIAKRSTMRKARIALARRLAIIMHAMLRNGTEFKPA

SEQ ID NO: 236008 - protein, 354 aa, unidentified
MQGAGLAGELDDKDGRAHRRDPMVTTESVMVILGLDIGKTKFDACLLGDGAKQSAHFPNTETGFAQLAAWLAKHRPPEMALHACMEATGNYGLALAAFLHADGATVSIVNPKQIKAFAEAELARNKTDKLDAALIARFCRTQNPPAWTPPAKHLRELREMVRRCAALKEHRTQEINRHKAGCASPAVRASIERALAHLNAEIDTITRQIHALLASDRQMQTNYNLLRTIPGIGEVSAAVLLAEIPNIAEFSKKGVAAFAGLSPTEASSGARNRTGGISRIGNAALRSTLYLGALSARTHNPRLAEFVARMTKEGRPNKVILIAVARKLLLLAQAIIQTQKPFDARHAEPEAAPA

SEQ ID NO: 236009 - protein, 346 aa, unidentified
MEILYTNCAGLDVHKKTVKVCVLTQASNGQLHKEFRTYFTTTEELLKLGDWLKEQGCTHVAFEATGVYWKPVYNLLEGSFELLVVNAQHMKAFPGRKTDVKDAEWIADLLQHGLLKASFIPSGPQRELRDLTRYRVRLTEEKAREVNRVQKTLEDTNIKLGDVVSDIMGKASLMILQAIADGETDPRQLASLAVGKVRADQQQLEAALNGHVSDHHRFLLSEHLTQIRHLEQAIERVTTEITRRFTPPSPPEDETSTRKEESAMQELSPDSTSQQEPASSPQAALSWSEAVVLLCSIPGIGERAAIGILAEIGTNMQQFPTAAHLASWAGVCPGNHESAGKRLSAS

SEQ ID NO: 236010 - protein, 388 aa, unidentified
MNTIPKTASTSTILAIDLGKYKSVACVHDQATGEIRFTTFDTTRAELQKRIVKDQPGVVIIEACLLAGWVHDLCGELGVRCLVANTASEAWKFKHLKRKTDRDDALRLAQLYLLDQLPTVPLPPTAVRQWRSLMAVRQALVGRQIAVQNRIRALFVARGLPAPRGARAWSETGLAGIASFAKPLAECGPDELWRGLLDLALVERRQTLALVTETEKKLNALGKENANVALLQTTPGMGPRTAETVAAYLHDAGRFQTGKQVSAYSGMTPRQHQSGEMDRRGRISKRGPALLRKMLVECAWCMVRYNAWARGFYLRLTGGGQRRKKQAIVALARKILVRSWAMLRDQKPWHDPQTAPKDPLPPSKRRRQAEAQQRRQAKQQSTLATTTT

SEQ ID NO: 236011 - protein, 403 aa, unidentified
MSNYFAGLDWASKTHALCVIDERGGVVERFDIDHDAGGLTELRRRLRRFGSPPVAIERPSGLLVDTLVDADFTVVPIHPNAVKASRPRYRSHGGKSDASDAYVLADLLRTDGHRFKALTPQSDEIRALRALVRGRDDLVATRVHLANQLRTLLESFWPGAAAVFADIDSPIALAFIERYPTPESASRLGPKRMAAFCAQHAYCGRRSPDELLARLQEAPSAVSAETEMEAKGELARCVARTLTRLVEQLRLLSSRIEHLVASLDDGRILMSFPRAGRICAAQILAELGSVRERFATDAQLAAEAGVAPVTYESGKSKAVTFRWACNHRLRAAITCLADNSRHVNAWAAHVYANARARGCDHPHAIRILARAWLRVIWRAWTDRKTYDPMQHRAAQLLLKAAGG

SEQ ID NO: 236012 - protein, 421 aa, unidentified
MIEHETFTWFAAIDWGTDKHQACVVDVRGGIAGERAFSHDGAGLALLCDWILSIAGNATIVAVAVEVPHGPVVDALLDRGLAVYAINPKQLDRLRDRFSVSGAKDDRRDAHVAADGLRTDRHLFRRLQIADPRLIQLREWSRLAEELQQERVRLSNRLYSQLWRYYPQMLGLSDDLAAGWVLDLWTMAPTPAKAMHLRKTSVAQLLKRNRIRRINAETVLRALREPAINVADGVAEAATIHIGSLITRLRVVGRELHDAVRKLDELCACLDEPSPTAAEHGGSGRHDVKILKSMPGIGKIILAILLAEASGPLSRRDYQALRTLSGVAPVTKQSGKSRIVVRRYAAHVRLRDAVYHWARVAIQHDPTSRSRYVALRQRGHSHGRAIRGVADRLLALACTLLQRQTVFDRDFSRAEELTAVP

SEQ ID NO: 236013 - protein, 348 aa, unidentified
MNVNHYIGFDVHKKSVSYCVKTGDGRIVEEGKLPATRQALRRWAQQRTEPWHGAMEATLFSGWIYDALKAYAAELQMGHPAMMKAIGASKKKNDRLDARKTADLVRCNLLPACYVAPVEIRELRRLLRYRNVVVAQAVRMKNKMSGLLMEVGAPYNKQRLHGKQYFSELLDQLEEVPESVKDLLRLSRTTLEAFEAMQQQLLARLRQDPLLTSRVKLLTGIRGVGTVTALTWALEVGEPRRFSSIGHAVSYCGLTAALVSSADKQQRGPISKQRNAHLQTVLIEAAKLAPRWNPQLAAVHTRELARGHRNRATLAVARKLVAYLLAVDKSAQPFEVRAPAAQETERVA

SEQ ID NO: 236014 - protein, 357 aa, unidentified
MRFYTGQHQYYCGIDLHTKNMYVCILDQAGNILIHKNIPASPHALLRILEPFLPDVAVTVECIFTWYWIADLCREENIPFILGHALYMKAIHGAKTKNDKIDSHKIAVLLRGGMIPMAYVYPQEMRSTRDLLRRRMHFMYKRSELLSHIQNTRSQYNLPEFNKCISRKRNRAGISEHFEDKSVRKSIELNLTLLKQYDSLLNDVELYLVRHTKEHRPNELYLLRTIPGVGKILSLVILYEIHDISRFQRVQNFSSYARLIKPKKESAGKVKGASNRKMGNAYLKWAFSEATLLLIREKQEIKDLHMKLKNKHGKARALAIISHKLGRTVYYMLKNKQAFDMRHFLQIKDRAPPEPYV

SEQ ID NO: 236015 - protein, 398 aa, unidentified
MTSDYAVFLGLDVGKEAHHACALAGDGRRLHDRALPQTEDAIRTVLGKLAEHGPVLVIVDQPASIGALPVAVARALEMDVAYLPGLAMRRIADLHPGNAKTDARDAFIIADAARTMPHALRRVDTGDAALADLEVIVGFDDDLAGEVTRVSNRIRGLLTQIHPALERVLGPRIQHPAVRELLTRFGGPQGLSAATRRQLIAATKPRAPRSYQRLVDDLQAALGEQSVTVPGSRAAELVLPELAADLTTLLARRAKAAEQIEAMLDAHPLAKVLTSMPGIGVRTGARILLEVGDGSDFPTSGHLAAYAGLAPVTRRSGTSIRGEHPSRGGNKQLKRAFFLAAFAALHDPTSRAYYDRKRAAGKKHNAALICLARRRIDVLHAMLRHKALYQPHPLTATA

SEQ ID NO: 236016 - protein, 338 aa, unidentified
MEIKVLGIDRGKTVCSLAGLDEAGAVVFRKRLQRHRLLDFLDKLPPCIVAMEACSGANHIWRFCLQNRHEPRLMSPLYVRPYVKVHKNDDRGAEAIAEAATHPTMSFVAIKSEEQFDLQALHRARERLVSDRTRLINQGCGFLMEPGIRVGTRRHVFQKELTRSAAEGADDLSPRMLMLLSDMASELDVTNDRVADIDAETKALAKTDADMQRLMEIPGVGPTIATALVAAVGTGSSFREGSDLAAWFGLVPRQVTTGGKAISKHGNRYLRKLFIHGARTVQQLVRDRTTPITACADGLKERAHVNVTAVAMANKMAGIAWAVLTKGKRYRPNALSGL

SEQ ID NO: 236017 - protein, 399 aa, unidentified
MRHTEQAWAGIDAGKGHHHVVVIDREGTRLLSRRVANTEPDLIELIDTVRSSAEDLTWAIDLTDGPATLVIALLLTRGHRLLHVPGIAVNRAADTYRGEGKTDAKDAAIIADQARMRRDLRLLRLDDPTIAELQMLTTHRADLAGDRTRAINRLRGRLAAACPALEAALDFTNQGPLVLISQFPTATAIRTAGPDELHRWLRSQHVRSAATLAARAHAAAASQHIRIPGEDTAGLLIARLAATVLELNTQLADLDTRIAGRFHTHPDAAVLTSMVGIGELLGAEFLAATGGSLEAFASADHLAGYAGLAPTPRDSGNRVGNLHRPRRYNRQLQRVFYTSALISIQRSPASRSYYQRKRAEGKRHRQAVLGLARRRVNVLWAMLRDQRCYEEPISASTAA

SEQ ID NO: 236018 - protein, 415 aa, unidentified
MALKIVYKICCGIDVHKTFVVACIASTDSKGVTTYEHHRFSTYTKGLKDLLQWLLKHNCKDVCMESTGKYWIPVYNVLENDCTIVLAHPKYVKAIRGKKTDKRDAKWIADLFKHDLVAGSFMPPADIRQLRDLMRYRFKLTCFMSSEKNRLQNCLTVSNIQLGNVVSDTFGKSAQAILDKLLENPADTSFDLEPLVYKSLKKKLPELRDAIDGYITPEQAAKLKVIKAHYENLKSRKAELEELILALAAPYQQELAILQTAPGIRSDFTAIGIISEIGTNMEAFPSAKHLCSWAGLTPTNNESAGKKKSVRVSKAGCYIKPLLVQCANAVITSKKHPEIRNRYLRLKKRRGHKKAIIAIARMLLTALYHMLKNGENYNAELYRKSDLPPVDREITVEQAIIIARNQGYKIKSATA

SEQ ID NO: 236019 - protein, 346 aa, unidentified
MKILLKQTVGIDVAQKELVVSLGRMDEQISIEIYAYKVFPNTKKGFSSLVLWVNKQTLTATEVRYVMEATGVYHESLAYYLCSVQKQVSIVLPNKISNYVRTLDIRTITDKSASQAIARFGLERQLKVWQPPLKIFNDLRQLCREREQLVQERTMLKNQLHAERTSAKSSEKSVKRTNKRIALIDTQEKEIREEIAKLIKGDEVLVEKMKVISSIPGVGNLTAVTIIAETNGFELIKNKRQLVSYAGLDVREKTSGTSVKSKPRISKRGNRNLRKVLHFPALAVIRTNERFRDIFLRLVSRHGIKMKAIVAIQRKILELTFILWKNNSYYNPEYAYQILPSGAIAM

SEQ ID NO: 236020 - protein, 346 aa, unidentified
MVAIGVDTHKASLAACAIDGAGRMVAERSFANSAAGHRAFERWLRALRLPRRIGIEGSGSFGAALSQRLVAVGEDVREVPAILTHRERRRTGRPGKSDPADALAIARVVLREEGLPAVRDPLAHRDLKLLVDYRDQLIAEQTRLRNRVHSDLQVIAPGYGASLGRLGDLRHATSNAAARSLLEPLGDLAAELTELRLARLETLSSEIAETKRRLHAALVDEYPALTSICGVGPVTAARLLGETGDVRRFRSAAAFAMACGVAPIPASSGKTQRVRLNRRGNRQLNRALFIVALTQAREHAPAREYMERKRAEGKTWNEAMRCLKRQLADVVYRAMLEDCRREALTT

SEQ ID NO: 236021 - protein, 345 aa, unidentified
MKEYSAIGLDVSDKTLEVCGLDAQGDVAWQTTLESTPKGVRQVFRSIRRSLVVLETGMHTGWLARLLTELGHEVVVANARKVRAIWGDEHKSDERDAEMLARLARMDRKLLRPVTVRSEETQRAMDLLTTRDALVRSRALLANVVRALVKNRGARLKCCSTEALPKRCRADLAESVRDGLEPVLVAMEAVTEQIRATTKAIETLAQERYAEPMARMAPIAGVGTLTALAFTLVVEHPERFKHRRMVGAYLGLTPRRDQSGETDKQLPITHAGHDMVRRLLVTAAHYVMGPFGPDCELRRFGERLAKRGGRNAKKRAIVAVARKLAVLMLTLWQTGEPYQPLRQAA

SEQ ID NO: 236022 - protein, 323 aa, unidentified
MTCVIGIDIAKHTFDIAKPLERDKYRTKAKVANTPEGFKQFDQWLEKHAEPHCWVLMEATSVYHEALATHLHQQGYQVCVINPARIAKYAQSELRRVKTDKTDAKLIARYAQRHLEELRPWEPEPESIRQLRGLVRRLADLKELAQMERNRLDVSAESAQASIRIHLEHLDGQIALISKAINDHIDNDPGLREQKQLMKSIDGVSDGTSALLLAELGNPLRFDSARQMVAFCGLNPRLQESGRYKGKTIISRTGSGRLRAALYMPALSAMTYNPVIKAMKVRLAERGKTGRLVVCAAMRKLLHLIYGVLKSGQPFDPIRALAH

SEQ ID NO: 236023 - protein, 457 aa, unidentified
MGHARARKVPAQLVEDEDYQLRYERVAGIDVAKAKADVCTRLPPAREGGRRASRVETVGATAREVLALAGRLAADGVQVVVMESTSDYWRIWYYLLESAGLTVQLVNSRHARQLAGRPKTDQKDAQWIARLAEMGLLRPSFVPPPQIRALRDLTRTRLQLLKDRTREWQRLEKLLEGALIKLSSVVYSMARNKTAWAILEAIVAGERDPKALAARAHGNIKGGSAVIEQALEGMLLGEHHPVLIRLHMDHITLLDRLAAELEDQIEAALDAIPAAWGVTADGVPSPDPGPDAVVLPAAQRLAEIPGVSLKLAREIIAETGLDMTRFPTADHLVSWAGLAPVARQSGPRQRKPSKGQGDVYLKTYCAQAANGTGNTETFLGERLRRLTRRLGGTKAMCAVGRSILVIIWHLLADPEARFTDLGPGWHDQQAGRDRKIRSHLRQLKALGVEVNVNTPAA

SEQ ID NO: 236024 - protein, 399 aa, unidentified
MTGAAHEEPRSETRRCDTTVPGLKRVRNWLNEERVTDVVMESTGSYWIPVFNLLEGHVTVVLANPEEVKNRKGHKTDRKDAGHLADLLRHNHVKSSYIPAEPVRQLRDLTRRRVQLTQDATRERNRVQKLLEQVNVKIGSVLTDVFGVSGLHMLLALLDGRAAPEEIAGLARGSAKRKTPQLIEAIEGNRMSDHVRFVIRGCLRHLACLEEEVEELDAEILRRMQLSTFQKAFTLLQTIPGVGQLSAATILAETGPDLDAFPTVEQMASWAGLCPGNRESAGIQKGPQTTHGNPYLCTALVQCAWAATRKRDSVFRSRFQRLAPRRGEKRAIIAVAHHMLIILYCMLKRGVPFLGAEHAPKQRRRERRAHHHLRCLRRLGFSVEIRLSSESTPPDTISP

SEQ ID NO: 236025 - protein, 431 aa, unidentified
MHVPNNNLPLWRFLVNQISENSFTAFVGIDWADTKHDICIQAADSLHREFGRLPHQVDDIEQWAQSLHQRFPGLIAVAIELSKGPIVYALQKYDYFVIFPINPSTLAKYREAFQPSRAKDDPRDAELALELLLTHPEHFEPLQPQSVEIRALTTLVEHRWTLVNERVRITNRLRNTLKQYYPQSLEWFSRIDTLLFCDFIERWPTLTQVKRARRSTLEGFFNSRNARREDLLEMRIKAIKSARPLTLDEAVILPNKLQALVLVEMLRLLLNSIKKYDKEIAELAAAHADFYLFSSLPGAGPSLAPRLLVAFGEQRNRFSSAADLQKYSGVAPVTERSGKKHWVHWRWQCPTFIRQTFVEWAAQTINKSYWAGEYYQQQRGKGCTHQAAVRSLAYKWIRILYRCWQTRTPYNEAVYLKALERRGSTLLKTAA

SEQ ID NO: 236026 - protein, 371 aa, unidentified
MNSIVYVGMDVHKEQYTLCCYSYDTDKVEYKQTIPSDYKLVLKYMEQVRSRYEGEVSFVCGYEAGCLGYSLYHQLKDHAVDCKILAPSTMAVTNTHHVKTDKRDAANIARCLAFHTYSEVYVPDNDDNDVKEYIRMRDDQKLYLKKVKQQILAFVLRQGKRFEGGKTYWTIAHLKWLKTLELSVLQREALDEYLLTYEYLTEKISRFDERIEELASVERYEEKVKHMSCLLGIKTHTALSMIVEVGDFERFEKAPKFASFLGLVPSEDSSDTRVNRYSITKAGNSHLRRLLVEAAQSYTRGNVGHKSVALKQRQKGNPPEVIAYADKANERLRRRFYKMTLNKGVNRNVAATAIARELACFIWGMMTEHVS

SEQ ID NO: 236027 - protein, 356 aa, unidentified
MLYSGVDLHRRSIVICTVNESGSIVTRKTMKTQPDLVTAYFQQWPDQHRAVVECTTGWYWFSDLLRSLGVDVVLAHAKYLKAISYAKVKTDAVDALTLAQLLRMGYIPEAHQLPPEYRAMRDLLRQRLVMEHKRTNIIQRVTSILAQFNITDLPLSPYQSGFADFLNQCSIPEEYRMTLMMYHQQCLQTTEHRKQLEKYFKAQLRPTPAVQLLMSLPGIGDITGSIIAMETGDIHRFADSKHYCSYCRLVPGAKDSGGKHSHRSGSKDGNQYLKYAFTESAIKAMRFYPQIKHFAARLERRATKAIARTVVAKELAKISYYVLTRQQEFKTFKGIEINKLRNWPRARKPVHLTGGI

SEQ ID NO: 236028 - protein, 343 aa, unidentified
MQTITTIGLDIAKSVFQVHGVDAAGQVVVRRQLKRRYVLAFFQKLPPCLIGIEACASSHYWSRELRALGHTVRLMPPAYVKPYVKRQKNDASDAEAICEAVTRANMRFVPTKTPEQQSCLMLHRTRHLFIRQQTAVINAIRAHLAEFGIVAPVGRKGVTELLHVVADPSDGRVPEVARACLAALGTQLLGLKEQIVEFDRLIMAWYRSNETSKRLHYIPGVGPLLATALAASVADPQTFRSGRNFSAWIGLVPKQHSSGGKDRLGSISKQGDRYLRSLFVAGALSVIRYAKIHGTKHRPWLTALLARRPTKVAAIALANKLARMAWAMMARGERYRNPVALAA

SEQ ID NO: 236029 - protein, 347 aa, unidentified
MASSSRSYHLVAGVDIAATSFMATWARAGQAPVPARPFEQTPAGFAAFQKQLAATGVAPEATLVVLEATGSYWVALAVELHTAGYHVAVANPAHVHNYAKSLPRRGKTDGLDAHLLTTFGHERQPESWTPPPAVYHELRQRLVARDGLLTMRQQARNQLHALEQWPVRVAAVQQQMNGVIESLDEQVRALEKAIAEVLADGAWAASAAHLQSIPGLGLVTAAWLLVGTVNFTTCASAEAAANYAGLAPLERQSGTSIRGRPSIGHGGNGRVRTALYMATLSAARYNPVIKRFYTRLREAGKPAKVARCAAARKLMHLAFAVVTKGQDFDPSYQKLPSVTLPETEIAP

SEQ ID NO: 236030 - protein, 426 aa, unidentified
MDKAPRRCIGLDVHRDFAQVAIWRGGQVRQAGTFATTPEGVREFAGGLGPADEVALEATGNTWAIATLLASHAGRVVVSNPAKTRAIAEARVKTDKVDAEILAQLLAADYLPSVWMPDAETSALRRQVLRRAHIVRQRTRLKNQVHAILARNLVPRCPAADLFGIKGRAWLAAQELPPDEQAAAAALLRQLDFHAEELALIDADLGQAALGRPEVLRLMTIPGVDATVALSIVAAVGDFTRFRTPERLVSYLGLNPRVRQSGGQPASHGRITKAGPAHARGMLVEAAWSASKAPGPLRAFYQRVRARRGMHIAVVATARKLAVLCWHLIIKGEDYAFALPSLIAHKQRKLELRAGAPSARGRKGPAAHYSLAAVRAAERDLAAQGEVAYRTMVAAWQPARPPANPARKKVAGAAASKGTRLIKPAG

SEQ ID NO: 236031 - protein, 322 aa, unidentified
MTGENYVGIDVGKKSLDLAVYGSKKTTTFPNTEEGIEKLLLTLQKINPSLIVVEATGGYERLLVVALISQGFPISVANPTRVRALAKASGKLAKTDAIDAHLIAEYACLMKPQPISSFDEAFLRLQALVKRREQVVEMRTAEKNRLDKSPLFVEEYIERHILQLEEEVALLEKEIRTLAASIPRCREGMELLSTIPGVGFITSVTVLALLPELGTLDNKAIASLAGLAPFNRDSGKKQGKRKIFGGRKRVRRVLYLSTLSAIRCNPVIREFHERLIERGKPSKVAITACMRKLLTIMNAMARDNTPWQEFSLPEVEILLPVS

SEQ ID NO: 236032 - protein, 359 aa, unidentified
MREQRNKISFRGQKIYVGIDVHLKSWSVTVLSETSVLKKFSQHPSPEALYGFLTRSYPGAEYHSVYEAGFCGFWIHERLTALGIDNIVVNPADVPTKSSEKLRKTDTVDSGKLARSLRANELKGIYTPDSVSLEMRSLIRLKNSITKDTTRQKNRLKSQLRYLGIEIPQEFLTPFSNWSKRFFAWLKEIETLTPSGRQALDIHIRHLEELRRQKLEMTRALRTLAKTDRFREPLRLIMSVPGFGQATGMAFLSEICDITRFRNAEQLAAYIGMIPMCHSSGEKDGTGDITIRKHAVMRCNLIEAAWVAVRQDPVMNLFYTEQCKRMPKSKAIVKVARKLVNRLFFVLKHQTEYVNSIVS

SEQ ID NO: 236033 - protein, 373 aa, unidentified
MPRYSTAFGMDVHLRSTTVCALDAETGETVTRRFRGNPWGEVAEWMSGFPGPSLAAYESGYLGFAPQRELSGLGVDCVVAAVSKVPRSAADLSSKNDRNDAARMAKAILSHDISPVWVPSPEIEGLRDLAGAHDAATARLAAAKQRLLAFLARRGYAYGGTTPAGNPRRYWTYDFLRWLDKVRPADDGGIRALAALRSEVEAAAETRDDLLAEYRAAVAAGPLSAEVEALQSIKGCGFALAAAFASEVGDFSRFRSGRQVTSYFGLAPKQRSSADSVRLGGISGAGNALVRRLAVEGSWSYVQASHQPKLMPKGSGVPLEVRMHGRKGSERLLRRREEMLARGMPQAKANAATAAELVRWLWALGAMCREATE

SEQ ID NO: 236034 - protein, 342 aa, unidentified
MNVNTIGLDIAKNVFQVHGVDDAGEVVIRKQLRRSRVVAFFEKLPACLIGIEACATSHHWSRELQALGHEVRLMPASYVKAYVKRNKNDAAEAEAICEAVTRPTMRFVATKTKAQQSVLMLHKARQLLVRQRTMLGNAIRGHMAEFGIAARRGRQGLEKLLVIARDQGDEQVPAFARLSLVALADQYQAVQAEIVVLERSLHAWHRSNETSRRLAEVPGIGPLVATALTASVTDPAVFSSGRSMAAWIGLVPKEVSTGGKRRLGPISKQGNRYLRWLLVTGAMAVIRHARKTGFKNRPWLARLVEHRPIKLAAVALANKIARIAWVIMARGERYKEPALTVA

SEQ ID NO: 236035 - protein, 428 aa, unidentified
MASSTDVTPVKTWVAIDVAKFTNVALMEFPDGKRKQFRFRHCAEDYDQLVSSLRSGSAPTRIAFEPTGDYHRSLGYRLVSEGFDVVLVSSVAGARMREAIFNSWDKNDPKDAQVILQLMKQGMTLRYCDPLILKTHDLQELSKTYHSIAIARKRLQHVLLTHYLPLYFPEMETFWTSTRNEWFIQFLIEFPTPASITSMTFAEFREAVWVSMGRRVHKEDKIAEIYRLATHSIGLSVALNSPAIETYRLQLSRYLELCQHRRALEAKADELLSRGVDYQHLRSVPGVGPIVALVILAEAGDLRRFTHHRQFLKYCGLDLAKNQSGVSRSREQLSKRGNARLRGALWQAALSAVRMRENAFRDKFQRYTATAPLDPDLRRKARVAVTAKMARIIYALIKQGQPYRHYLDAFTPSGSIPNKRAVEAFRTS

SEQ ID NO: 236036 - protein, 344 aa, unidentified
MGNITRVGVDIAKSIFHVHAVDRFNETQWKGKYARTKWLAAICKKVPLGAEIAMEACGSANYWGRELERLGYKVKIIHARFVKPYVKSNKNDAVDAEAICEAMSRPNMRFVALKTVRQQDVQSAHRIRENLMKQRTAKANQIRGLTSEYGVVAPVGIEKLRQAIPCWLEDAENGLSVMFRELLDGLAVDLRFLDKRIAKIDDAIKRDVQEDPVAQRLLELRGIGVLCASALSSAIGDGKAYRKGKDFAASLGLTPRQHSTGGKQKLLGISKRGDGYLRKLLVHGARSVIRHAKNKDDHLSNWVNKLTTIKHVNIATVALANKTARVAWALVNNKENYRPELVAA

SEQ ID NO: 236037 - protein, 409 aa, unidentified
MIYCGIDWAERTHDVALVDDSGQLVAKRHITDDAAGYRILLDLLAEYGDTEENPIPVAIETSRGLLVAVLRTGKRKVFAINPMAAARYRDRHSVSRKKSDPGDALVLANILRTDMHAHRSLPNDSDLARAVAVLARAQQDSTWNRQQISNQLRSLLREYYPAALTAFEPWKNGLCRSEAREILKAAPTPTRAARLTHTQFQAALKRAGRKRGIVTEAERLREVFRAGWAHQPPLVEDALGKQMLALLVQLDAACTAADDLAKAVEEAFPQHPDADILLSFPGLGIQLGARVLAEIGDDRNRFADARGLKAYAGSSPITRASGKKSSITRRWVKNDRLNHAGYLWAFSAITASPGAKAHYRRRRDDHGDWHAAAQRHLFNRMLGMLYHCLQQRRLFDEGTAFPTKLAVAA

SEQ ID NO: 236038 - protein, 357 aa, unidentified
MNSSKNISFTGSHFFVGFDAHLKNWKVTIRFNCIELKTFSMNPSPVELFNYLKKNYPGGIYHIVYEAGFCGFWALRKFRELGIDCIVVNPADVPTSNKEKVNKNDPIDSRKLARELENKSLKGIYIPDIFHEELRHMMRLRFRIVQNQTRVKNRIKGLLHTQGITIPLNFTGNSRWSASFIQWLKEINLNTDAGQFTLSNLILQLQQQREHNKNVLRQLRQQAKQKHIAPVINALLSVPGVGFITAMSLYTEIVDMKRFSNQEQLAAFVGLVPSTRSSDETIYNNGISFRRNKFLRPIMVEAAWTAVKTDPAMTLKYRELTKRMKPQDAIIRIARKLLQRIRHVWLNQEDYVYSLVA

SEQ ID NO: 236039 - protein, 368 aa, unidentified
MKTNTTASLVTTSTPAVVSGFTLGLDLGDRAHHVCVLDATGQIVCESSLPNTRPALARLLADFPRATVALEAGTHSPWISRYLTDLGATVLVANPRKLHAISRNERKCDRRDAQMLARLARVDAALLHPIEHGTAQAQHDLLGLKLRDALVRTRVNLINAVRFTLKSLGHPIGNPSSESFHKTVLADVPADRLPVVQPLLSVLSQVTEQIKGMERELVQRSKKDYPATQRLQQITGVGPLTALCFVLKIGDPQRFSRGRDVGAYLGLCPRRDQSGGTDKQLRISKCGDGLLRRLLVSAAHYVLGPFGPPCALREHGQRLAGTGSAREKKRAVVAVARKLAVLLLSLWKHGTDYEPRATASPALVMTPA

SEQ ID NO: 236040 - protein, 353 aa, unidentified
MGRCRCKRALAMTLHIRVCMSNAARCWEKAMPSSIGVDVSKKKFDVALITEQGKYRCKVFDNDWGGFRAFLDWIKVHVPEGQAQACMEATGAYHEALANFLFDNQVTVFVVNPLRVKRFAESEGLRNKTDQGDAKALARFAAKTELQAWEAPSKGVRELQALVVRLEALQTMRQAELNRLGIAHPSVRASIETVVAALDKEIELVRSLIRTTIDDDPDLKQRKDLLETIPGLGDATIPSLLAYIGRPERFKSVKALIAYAGLTPALRQSGTSLDKRKGLHAAGHRDLRKALFYPAMAAGRFNPIVAAFWQRLKAQNKPGKVIVVACMHKLLAVAYGVLKSRRPFDASLAIKGA

SEQ ID NO: 236041 - protein, 343 aa, unidentified
MQRVTTIGLDIAKSVFQVHGVDAIGNVVIRRQLKRRYVLAFFQKLAPCVVGIEACATSHHWSRELKACGHTVRLMPPAYVKPYVKRQKNDAADAEAICEAVTRANMRFVATKTPEQQSCLMLHRTRHLFIRQQTAVINAIRAHLAEFGVVASVGRRGVEELLEVVADSSDERVPEVVRACVAALGVQLRMLKAQILEFDRQIMAWHRSNETSKRLDEIPGVGPVLATALVASVADPKVFRSGRNFSAWIGLVPKQHSSGGKDRLGSISKQGDRYLRSLFTAGALAVIRYAKIHGTKHRPWLTALMARRPTKVAAIALANKIARIAWAMMAKGERYKEPAALAA

SEQ ID NO: 236042 - protein, 255 aa, unidentified
MSQPNLQCMGIDVAKLSLDIATTDTIEPFTVGNDEDGFAVITDKLKHTKINLILMEATGGLEAAIACKLQSEGYDVVVINPRQARDFARSMGYLAKTDKLDAAMLAQLALVIDRHPDRSRYIRHLPDETRAVLAAMVVRRRQLNHMLVAERNRLYPSHPQSRKSIDNIIDALQNELDRINEQMKQHMTAFFQEQARLIGSVKGVGDITVASLIAELPEQGKLNRREISALTGVAPLNRDSGKMRGKRTTFGGRAG

SEQ ID NO: 236043 - protein, 431 aa, unidentified
MLKINPLSTLYVGIDVSSKSNYVCALDFYKNKYINSSFANNQPGAEELALKILECLKEHPDITTIVAALESTSVYSIHIANYLSSCEELMRFKPYVFVLNPKCTANYKKSYIGLGKSDPIDAFVIADYARAGTIESEPWRGSQFLALKRLTRHRLHLVECMTREKTYLVSNLYLKFSELQMLEGDDQPFCDIYGATSSSVLMEYLSPEEILVSSEEDLIAFLAEKSRNRIKDISKTADLLKKAARDSYRLDKALYEPLNVSIASSFNCIETFKREIKVIDNAIEKEIKGLNPNAFIILQSIDGIGPVFAGGIIAEIGDITAFHSSDALAKYAGLTWKSNQSGDFDGEDTPMIKAGNRYLRYYLGEAANSMRKHNVEYGAYYRKKYNEVPKHQHKRALALTSRKFVRLVYGLLARNQLYSGVSLDTSIKDSN

SEQ ID NO: 236044 - protein, 467 aa, unidentified
MLCDINPVPPVAAPLPPPPASPPSGLRVQVGIDAAITANHHVAVRSVDRDGTAVTSRFVLAPTLSGLNTLTRRLGAYPGVVAVAEPTSMTWLPLAVALHDGGGQLALVGSRHAARLRGAISGKNKSDVIDADVLARAGEVFDLRPLVLPSPGQLALRRVVTRRGDAVIDANRYLRRLISLARWAFPDVWNGFGGSLPTAKAVLGRWPHLEQLAAARRSSLTAVVAEHTRSVPDVPARVEQIRAAARDWATFWEGHLDLDAMAFDVSEHLDDLSAAAAGRVQRATTRATHYWERLYGDDPLLTSIPGMGPITAPTVRAFLGDGHGFATAKAAASYVGITPSNWSSGTVSQPSRAITKEGPAVLRLAFYQAANAARRSDPQLACFYHRLMTGRGHCHTQATVAVARKLVEGTWAVLDRGSGYQLHDLDGQPITQRAAKALVAERFTVEPDVRARARAHTAATHRAKLTR

SEQ ID NO: 236045 - protein, 411 aa, unidentified
MDVQYERCCGIDVHKRIIVACLKCGKKQEIRSFGTTSEEIRTLVRWLLDAKCQMAAMESTGSYWKPLYNIFKLSQLEIMVVNARDMRNLPGRKTDVKDAEWIADLLQHGMLRASYIPKREQRELRELSRYRKSLIGERARELNRLQKMLEGGNIKLASIVSDINGKSSRNLLQKMLEKDTRLQREDVEASLHGALRHRVEDIVRAVDGFLTPLQKQLIRQVVAHIDDMTKRIGEMDTLVKQYMGEYEEAMEKLDEIPGIGKQSAETILAETGLDMSRFPSEKHLSSWAGLAPGNNESAGKRHSGKTTKGNPTLKTTLIQCAKAAIKKTDSFLSAQYQRLVVRRGKHRATVAVAHTMLIAIYHMLKDGRLFIDLGAEYYNQFNRERKIKSYLAKLKKLGWTPEEATLSGSTT

SEQ ID NO: 236046 - protein, 351 aa, unidentified
MMIIGVDYHPSFQAIAFFVEETGECGEQELNHSDGQAEKFYRDLKQRGICVRVGMEATGYSRWFERLLAELGFELWIGHPAEIKAKRVKKQKYDREDARLLLRLMRENNFPQVWVPSPENRDLRQLLWHRHRKVQMRTRIMNQLQALAMNEGYRWKKKLFSEQGRAQLEKLALAPWASRRRRELVELLDRMNPTIEELTAAVEREARKRPEVLRLMTHPGVGPLTALAYVLIIGTPARFQRGKQIGTYVGMIPSEDSSGGKQRLGHISKQGNSLLRFLLVEAAQAAARINPDWRRRYMHLAMRRHKSIAKVAMGRRLAIRLYWMWRNGCEYSQSLEFGSYAGQLGTGHGVK

SEQ ID NO: 236047 - protein, 366 aa, unidentified
MKKTSTVRVNGNTIFKGHKLTIGLDLGDRWSNYCVLDEAGEVLLEQKLATTPEAVKQTFERIPRSLIALETGTHSPWLSRLLEELGHEVLVAHAQKVNLITKSNRKDDRHDARTLARLVRIDPELLGPVRHRSAKAQIHLTVIRARAELVSARTALVNGARGLAKSYGERLPKCGTEQVSRELAAKLSAELREVLEPLLNEIESLNERIKEYDARMEKLAKESYPQVALLKQVKGVGTQIALTYILTLDDPHRFAKSREVGCFLGLKPGRRDSGESRPQMHISKEGDRYLRTMLVQGAHYILGPFGEDSDLRRWGLRLAERGGKNAKKRAVVAVARKLAVLLHRLWVCGEVYEPLRNSHKAMRAAA

SEQ ID NO: 236048 - protein, 401 aa, unidentified
MAPTAGIDWASEAHEVCISEEGRVAERFSVVHDEEGIADLARRLLKLGIARVAIERPDGILVERLLDAGLVVLAIHPNQVKAARPRFAVAHGKSDRFDAYVLAELARTDAHRFRALVPDGDETKALKALTRAREDLVGVRVELANQLRAQLQAFWPGALIFADVDSPISLAFLKRCPSPDDAKGLGPKRLAGFLARHRYCGRRSPEELLERMRSAPAGRTGELEAEARRAVVLSLVAALEPIVAEISEFTSQIRGALAAHPDREIFAPLFRDAKTAISPATLIAELGDCRERYPTEAAMAADAGMSPVALESGKLKVATFRRACDKRLRAAVARLADSTRHWHPWAREVYRRARARGQDHPHAIRTLGRAWIRVLWRCWRDRVPYDPARHGNFGRLNTAGG

SEQ ID NO: 236049 - protein, 507 aa, unidentified
MAKQIQSKSVSTGQIKPAKQMPTVHPHAAGIDLGNAAHFVCVPADSVPAGQSPVRQFGVFNPQLDEMVEWLKQCQVQTVATESTGVMWIPVFQKLEAAGLEVILVNTKRLKHVPGRKSDVLDCQWIQQLHSYGMLGGSFRPADIICRLRTLMRQRENVIASAGSETQHMQKAMQEMGVHLHVAVSDVTGDTGLRIIDAILDGQRNPKELVKLRDWRVRKSTVAEMEAALQGDWREELLFVLRQSRQAYTFFQEQLAALDEKIIALLVEIPQGPPPPTDGSQPPNAPSTDAAGKAADGSNCSTAAAGSGCASQSGAAKAQSQDAKKAKRKPSKGGNPLPKDIRPQLAQVFGIDLTRVPGLNMVGVLIILSEIGADMKRWRDGDAFAAWLGLAPGSKITGGKVLSSRTPHVVNRVAVLLRLASLAIGRTDTCLGVFYRRMKARHGAPKAMTATARKLAVLIHHLLTSREEYQEPDPKQYDERVRKNKIIRLLRQAKELGFDLVPLEQVA

SEQ ID NO: 236050 - protein, 455 aa, unidentified
MPKTKRSRMEMSPVHANAAAIDIGATLHVAAVGPDRDPEPVRSFGTFTGDLHRLADWFKQCGVSTVAMESTGVYWIPVFEILEQLGFTVVLVNARDAKHVPGRKTDVTDAQWLQRLHEYGLLRASFRPESRIAALRDYLRQRERLLDYAASHIQHMQKALMQMNLQLHHVVSDITGATGMRIIRAVVAGERNPVTLAALRDQRCKESAETIRQALVGNDREEHIFALAQAVELYDTYLAKVDDCDKRIEAVLTELKATCPPPPAPLPAPRYRTQQPNALSFPAREVLHQILGVDLTQIHGLGPYLALKLVGECGTDLSAWPSAKHFSSWLCLAPSNKISGGKVLSSRTRRSSNRASALLRLAAVTVGRTETALGAFYRRLAGRVGKAKAVTATARKIAVLFYNTLRHGMGYADPGASYYEDRYRQRVLANLKRRAKSLGYALQLTEITAAGTEVS

SEQ ID NO: 236051 - protein, 416 aa, unidentified
MSGKREIACGVDVHNKFIVATILSSDGLKLQDRFETNLEELLKFKDWLKENGCHKVALESTGNYWLPIYHVLEGSVNFILANAYQIKHIPGRKTDTLDSEWIAEICLKNLISPSRIFCRDHRELRSLTRTRESLIKVRTKIKNRVTHELEAACIKLSSVLSDVFGKSGRHIVDGLLNGMDLEEILESIPSRKVKAIKGEIRGTIQANLSLLQIFLIQSHLDMIDAITKQIVEIDSKISDQLSTRNEDMRIALSMPGMGFVSASTILAEIGDFRDFSSPDKLAAYCGLVPSVYQSAGKMINGHITKHGSPHIRSMIIEVAHAIIRTRQDTKLKKFFLRIKARRGTKIGVVALARKVLCILYHLLVHQEIYHDDLLGKPRKIKHIRAYSTTSMSLDEMIKTIIKAGYEVRKNEYFEGG

SEQ ID NO: 236052 - protein, 446 aa, unidentified
MSTPSLPVLDPTAAAIDVGSEQLHVSIAGGPPKVFGTTTGQLYELRDWLLAHGVKSVAMEATGIYWLCPYEVLEKGGLEVVMVNGKYVKNLPGRKSDMKDCQWQATLHAHGLLKPGFVPPEHIRRLQDYLRLRTDHITMAGSHEQHMQKALERMNLKIHDVISDLTGVSGLKMIQAMLGGERNPVALLALCDAQIQKNKAGALRQALEGTWKDEHLFALRQAYELWQSYQKKIAECDQAIGTVLQELAGPEDPKNPAPPATKRGGVNGPQIAGLHGLLWRLCGGKDPTTVPGVADYVLLQLLSEVGTDLRKPWPTEKHFTGWLGLAPGSRQSGKRRGSQKRGRNRAGRLFCVIARSVGRSVDKALGGFYRRLKGRRGGLIANLALARKLAELFWRLMVHGIAYVEQGLKKYEQKVAQTEQRLLQKLASKYNLVLQPKTSGPSAIPT

SEQ ID NO: 236053 - protein, 352 aa, unidentified
MSLKQKMEMEQQEQPVEAIRRWYGVDVSKDSFTVALYKDLSGEMSETLEFNSNRKGVKSFLSWYGKLADPIFPSAIVMESTGCYSARLAELMLKLDSSLYVSICNARSVSYYIKSHSANKTDKSDAKLIARYGYDFQPQRIKVKSRDERLLRELVSERGKLVSQASALKSKDKTLEFKETKEINKKVLGFLAEQIKELEKRIEEVVRRSEEMNAEIALMDSVPGIGRLSASVIYGAFGSLKQYTRKQLSALSGLCPKISQSGSAPAKSTLSKTGQSYVRQILYLDTTQAMKKIPQLKEMRERLLARENSCKMTARCACMRKLLLIVKGVVDSGVPYDPNYQQKKQENPSNAA

SEQ ID NO: 236054 - protein, 417 aa, unidentified
MKPWKELTHFAALDWADDHHDLVVVDAGGQSVLELTFEHSAEGWQQAEQALTQWPGLPVAVETSAGPAVDQLLQRGFTVYPVMPKAAARYRERKRPTGSKDDLHDAWSLADALRTDGHGWCALSPLDPLTAELRALCRDEISLIEQRTALVNQLQAALKEYYPAALEAFDDWTKPASWAFVLVFPTPAALVAAGKRKWEKFLHTHKLWRAQRAAERLEIFARANQFSGGAAITAAKSMLAQSLARLLQTLEQQLIAYRARIQALFQQHPDHELFGSLPGAGAKLAPRLLVELAGVNWSLLSLVQARAGTAPVTYQSGKIKRVKIRRACIHWLRATLHLWADLSRHSSAWAAAFYHAHRDKGQSHACALRCLAHRWLEIIGAMIRNRTTYDAEKHLAQIQKHGSYVLRLITSPDPKSL

SEQ ID NO: 236055 - protein, 355 aa, unidentified
MDSTKYVGMDVHTEAISVAVRNSAGKVIMESILETKANTILEFLQGLRGNVHITFEEGTWAAWLYDLLKPHVTKVLVCNPRKNALLKDGNKGDKIDARKLSELLRLNHLNPVYHGEHGIRALKELSRSYLTISKDLGRVMNRLKALYRSWGIPCKGQQVYAPRHRSEWLNKITEAGVRRRAEYLYQQLDALQPLRQQVRRDLLAESRKQPATKLLRKIPCIGPIRAALLIALIQTPHRFRTKRQLWNYSGLGIETHDSAQYRFVRGELQRSKRPQQLRGLNKNHNHDLKNIFKSAATMATISAGPFHDFYEALLVKGRKPTMARLTLARKIAAITLIVWKKEVSFDGKHLKPQAA

SEQ ID NO: 236056 - protein, 428 aa, unidentified
MNNEETIRREQFCQIKDEIRRSDAYLIVGIDVAKDKHHTFMGNATGKSLLRKLVFENNLEGFRKLLERSDAVKTQNALSKIVFGMEPTGNYHKPLGAYLIRCGRHVVLVTGKAVKNNRELLDGRWDKNDDKDAANVADLVSRAKCLYYDYPSSSINDLRQLLSLRRRLKKEEHSLRMRIRNNLLAQYFPELDRFYSACESESLAIVRWCLDPGRIAGMELDEFFSMVTRTKRGVAQKLRLQKIHRLAVESIGCPLGPAAELEATLLVQKLKEVRGQLKQVADQMEDICLQFAEYNWLLTIPGFGPYVAARVLASISNPWRFDSSNQVLKMAGYDLGANRSGKRSDDAVPVISKRGNSELRYALYQAAHVASTRNRDFIGYFTRILRGRERERGIKTKMKVKLAAKMLKIAWTLMRKQEVFDPDHLIIE

SEQ ID NO: 236057 - protein, 349 aa, unidentified
MKVLIGVDPHKSVNAVAAIDENGEIISHMAFPANRRGLQTLEHWSKRFPERRWAVEGAAGIGRPVAQKLVGAGEEVVDVPPKLSAKVRMLSVGNARKNDRLDATFTALAALRNLRLARVHPEDGPEGRVEVLRLLTERREDLVAERTRALNRLHVLLRDLLSERVAKGLSAGAAAKLLRRARPRHAAERTRKRLASELVRDVRALDRKIASLDEHIREEVEASGTTLTEVFGVGPVLAAKIMGIVGDVARFPSKGHFASYAGVAPIEASSGEVIRHRVSLAGNRRLNKVLHMIAVCQARSDPRGRAYYHKKVGEGKSRRDAMRCLKRRVSDAVFKALVADSVCTSLAVA

SEQ ID NO: 236058 - protein, 404 aa, unidentified
MWYAGIDWANEHHDSLVIDEKGGQVGTLRVDHSPQGISRLNTFLEQIIGAESKEQMACIIETTHGLLIAHLLEAGWPVYPVNPRTVDRRRAASGAKTDTIDAYLLAKTGRADLADLHRLTPDSEKIAELKLLTRDQDALIQMQTRLVNQLTACLKAYYPVALELFAKLQQKSTLRFLQTYPTPQAAMAVSAEQIQEVLRQAKHSNPTPVAVKIFERLHQPHLQADAVITRSKSRLMLALVSQLLPLIEQIAQYEKEIKTLFLTHEDHEIFASLPRAGKRLAPRRLSEIGDDRTRYQDESLLQALGGTSPVLFQSGMYSKAHRRLGCIKPLRNALHQFAWQSTQSEPWARQYYQRKRAEGKSHTVAVRALANVWVRIIFAMWLHHQCYETATFEQAQQQHARRAA

SEQ ID NO: 236059 - protein, 411 aa, unidentified
MDRIYDNCCGIDVHKKLIVACFRKGNKQEIREFGATTRELLEMADWLKDGGCEMAAMESTASYWKPLYNILESSGLNAMVVNARHMKAVPGRKTDVRDAEWIADLLQHGLLQPSYIPDKEQRELRELVRYRKSLVGERTRELNRLQKMLEGANIKLSGTVSDINGKSARNILEYLLTGASVDGQKYDEMYEQKIIAHNLKATKEQIIDDLNGVMSPLQRRMMKELLAHLDELNIHIKNLNDEIDSFMKPEEKQASHAIQDVTGIGNTSAQAIISVIGTDMGRFPTDRHISSWAGLCPGDNESARKRKSGKTRKGNSLLRTTLITCAHSAVKNKKSYFHAQFMRISSHRGKKRAYVAVAHSMLIAIYHILKDGVVFKDLGADYYNQFNKERKINAYLKKLKALGWEAPVVAA

SEQ ID NO: 236060 - protein, 337 aa, unidentified
MNYSGIDLHSNNCVVAVSDETDRVLCRRRLPNELGAVLALLERYRAELAGVVVESTYNWYWLVDGLQAAGYRVHLANTSAIKQYEGLKHSDDDSDAAHLAHLLRLGILATGYISAPAERALRDLARKRLQLTYSRTAHILTVENIVARQTGGRISSEAVKRLDDETLQKLGQCADVTLSMSANVAVIQTLNVQISKLEMRLREAVKPRAEFKVLTTTPGIGEILATTIMLETGTVQRFAGVGNFASYARCVESKRVSNGKKKGQGNVKNGNRYLAWAFIEAAHFASRYCPEAKRFYERKKARTNSIVATKALAHKLARACYHMLKENQPFDVKRCFT

SEQ ID NO: 236061 - protein, 362 aa, unidentified
MKQALASALVSSPQAQPAGVIGIDLGDLWSRFCVLDQAGAVIDEDRIRTTAEAFTSKFGVLPPTRVVIEAGAHSPWVSRLLESLGHQVIVANARKVRLIYKSDRKNDKLDARMLARLGRLDVNLLCPIHHRSADVQVDLAVVRSRNALVTARTQLVNSVRGMAKAVGGRLPRSTTAAFGHQALPQIPEALKPAVAPLLTSICALSEQIRRYDEQIERLAERKYPETRLLRQVKGVGPLIALTYVLTIDDPTRFRRSRDVGSFLGLRPKQCESGDSSPQLGISKSGNSHLRWLLVQAAQYTLSRLAPDSRLRRWGLTLTVRGGKNAKKRAVVAVARKLAVLLHRLWVTGEVYEPLYGIEPQAA

SEQ ID NO: 236062 - protein, 338 aa, unidentified
MAMYCGIDLHSNNNFVAIQDGMYEDVVCRKLRNDLGAVLKFLEPYREELEAIAVESTFNWYWLVDGLKEAGYDMRLVNTTKASDYSGMKYTDDRHDARWIAHLLALGILPEGYIMPPQERGLRDLLRRRSYLVHQRTSLYLSVKTIFARSNCQKVTTHDIRSWDSETVRRMFDDPHVAESVVAMLPVVRVVTAQIKGIEKIALETGKLRDEFRFLLTAPGIGDILALTIMCETGDISRFRKVGNYGSYCRCVKSERFSNNKKKGKGNRKNGNKYLSWAYSEAAHHAKRFEPLAKRYFDRKKSHSHPMVAARALANKMARACYYVMRDQVPFDSSRTFC

SEQ ID NO: 236063 - protein, 346 aa, unidentified
MEVTTIGIDLAKSVFAVSGADRRGRVVIRRQLRRTQVLGLMRGLPRCVVGMEATGGAQYWARQFTVLGHAVRLMSPALVMPYRKGNKTDRNDADAILEAVSRPSMRFVMVKSVAQQDLLALHKVRAQLVKSRTALCNQLRGLLRERGVAMRTGVAGLKRALPAALADDSNELSGEMRELLSEMSQWLRTLEQRIASCEARITRKFKHDERCVRLAEVPGVGPLTATALVAAVGNAQRFKNGRELSAYLGLVPRQHSSGGKTVLLGITKRGDRYLRTLLIHGARSALRQCKLKGDARSDWARRISAARGPNVAAVAMANKNARILWALLSRGDRYRSSRVLTRVAKD

SEQ ID NO: 236064 - protein, 335 aa, unidentified
MSSLVCGLDVHKDSVYVTVMNYGGEIVDKRKLTNDEVVSYLGRYPIDKVAMESSTSIVPVYRALRGRGYEILVSHPKKTRLIAESRIKTDRVDSWAVTELARLDALPLSYMPPDNIAALREKVRRRAFLVRMRSKLKVKIKAQLTINGFTPPSEYGLFTAKGLEWLRSLQLDAVDSYLPVISTLDIQVGKLSTELRGMASGDEDVKLLMTIPGIGYYSALLVKSEIGTVDRFSDGEKLCSHAGLVPSVSISGGHKRYGSITKEGSRWLRWIMVECVHTHLKYDTSITRAYHAIAERKGAQIAKVAAARRLLMCCYSVLKNRKPHYDFAGSYQASS

SEQ ID NO: 236065 - protein, 436 aa, unidentified
MEEVTDEPLYRDRVCGIDIGKAGMAVTIRVPSETNPARRAAETREFATTKRGVLALADWLRCWQVPAVVMEATSDYWKPVFYRLEAEGFECVLADAKQVRHLPGRPERDTSDSAWLAACFERGAIRSCFVATPEFRIIRLHTRYRRDLTDERTREKNRTEKLLESAAIKLSSVVTDLHGVTGRDIMDHLIAGERNPRVLAQLARARARRKITELEHALDGAEFFTDDHAALLTTMLERIDRVNAEIARLSEVIERLLAPYEEQLQQAESMPGWGRRSAQDAVAETGVDMTKFPTGGHLSSWAGKTPLDHQSGKRAGRARHKKGNRYLAAVTGETAVSAGKTATREGARYRKLARRRGKAKAQVALGNTQLKVYHKLLSSPGMRYQDLGPDYYERQAAIRRKIAYHVREIEALGLDVTLTRPAPEPGPDAPGNTQAA

SEQ ID NO: 236066 - protein, 411 aa, unidentified
MDKVYDKCCGIDVHKKLIVACFRKGSKQELRNFGATTRELLELANWLQNGGCEMVAMESTASYWKPLYNILESSELKAMVVNASHMKAVPGRKTDTKDAEWIAELLQHGLLKASYIPDKQQRELRELVRYRKSLVSERTRELNRLQKMLEGANIKLSGTVSDINCMSARNILEYLLTGEFFDEAKYDEMYKQKIIAHNLKASKEQIIDDLNGVMTPLQRRMMKELLSHLDELNVHINNLEDEIDNFMKPEEKKATQAIQDVTGIGKNSSQAIISVIGTDMSRFPTAGHLAAWAGLCPGNNESAQKRKTGKMRKGNALLRSTLVVCAHSATRNKNSYFYAQFMRISSHRGKKRAYVAVAHSMLIAIYHKLKDGVVFKDLGADYYNQFNMERKINAYLKKLKALGWEVPVVAA

SEQ ID NO: 236067 - protein, 332 aa, unidentified
MNMHLQGGATQRQERPNAGIDVSKEHLDVCWGLNEERFGNDGEGWSELIAKLKAARVDLVLVEASGGYERGVLLALQEAGLTVARVNPRQARDFAKSLGVLAKTDGLDSRTLRDFADVLARHADRAKFITPVMDERRQMLVMLMTRRRQLVDMRVAEQQRLEQAGARAAKSIHSVLKTLDRQIGQIDKDIDAHLERHFKAQRELLESVKGVGAVTTLTLLSALPELGRLKRKPIAKLAGVAPLADDSGKRRGQRHIWGGRSEVRSVLYMAALSARRHNPVIAPYYERLLAAGKPKKVALVACMRKLLTILNAMLRDNAAWDEARHAVTAQNA

SEQ ID NO: 236068 - protein, 366 aa, unidentified
MDTADRLSFGFRNRLAALIAVSILETARTVVRSLETVSLLVRAPVLYLEDKMTTTTKQNFIGIDISKANLDVAIWGSEEFWRTENNVEELQKLTQRLKVLTPSLIVLEASGGLEQPVARELSQENLPVAVVNPTRVRNFARSTGQFAKTDKLDAKIIAQFAQAVRPKVRPLRTSEQEHLDALVTRRRQIVDTITAEKNRKSTTHTKLQERLRRHIDWLKEELEALNGEIEKFIQQSAEWKEKAAILRSVPGVGPVTTATLLAELPELGARNRQQIAALVGVAPVNKDSGKKRGKRRVFGGRAPVRKVLYMATLSATRTNPVIRSFYERLLAAGKEQKVALTACMRKLLVILNSMIRHSRTWSPYLV

SEQ ID NO: 236069 - protein, 340 aa, unidentified
MSIIRIGIDLAKNSFSLCGVDKREQVVLEKTVKRGALLGVFVNLPPCVVAMEAGSGAHHWARELIKLGHDARIMDPAFVTPYRRGGRSSKNDRNDARAICEAAGRPDVRFVPIKSLDQQATLLIHRRRSQVVAEHTRTANQIRGFLAEFGVIAPVGVQRLKRDWLTLRQKHHDALPERAWSEIDTLYDQLLDQHQQILAYDRKIKALVRDDGRAEKLTHLQGIGPITASAIVATVGNAAVFKNGRQFAAWLGLTPRQYSTGGKPRLGRISKRGDRYLRTLLIHGARTELMHTAKRDDRKSRWAEHLKQRKSWNKTAVALANKHARIIWSILAKDQEYTPV

SEQ ID NO: 236070 - protein, 429 aa, unidentified
MTIVQSTPEPFVWVAIDVAKDRHEALIEAPGWRSRKRVRVQNAAEDFRSFAAFLHSFQFPVRIGFEPTSNYHRALAYFLHSEGFELQLISSLALARTREAMHNSWDKNDPKDAQVILHLLKGGLTQHYHDPIVHNLNDLQELSKTHHQVSLEKTRTQHRLLTHYLPLYFPEIARYHCSARSEWLWALLIEFPTPRSMSCLPKADFIRRAWPLVGRKVAKERILTDIYLTAQTSIGLPAEEHSEAVAMLRVVLRQLLTLCQLRATIEERAEVLLENNTDYQRLRCIPGIGPITALTVLAEAGDLRRFSHHRQFLKFCGLDLATEQSGQFRGLTRLSKRGNARLRAVFWMAASVAVRMRENSFRAKFERYMRSDPGNVDRKRKAYVAVAAKIARVAFALIRSGADYRCFPEVAVPSGRTRSARAVEAIPTS

SEQ ID NO: 236071 - protein, 465 aa, unidentified
MKPNRRLPRKKPAAGSSLLERLNPNAAGIDCGADTHYVAVPPDRDTTPVRAFKTFTTDLHRLADWLTACGVTTVAMESTGVYWIPLYEILEGRGFDVVLVNARHVKNVPGRKTDVVDCQWIQELHSVGLLRGSFRPTAAITALRAYLRHRETLVQSAATHVQRMQKALVQMNLQLPIVISDITGVTGLRILRDIIGGQTDPQTLAQHRDHRCQASAAEITAALTGHYRPEHVFVLQQNLELFDAYQHQLTACDAAIEAHVLALAAQAPTPARPVPAARTRKTPRNNEPRFEIRLPLHQLTGVDLTQIDAIGPYSALRLLSEIGTDMSRWPTEKHFTSWLTLAPHNKISGGRVLSSQTQPSANRAAAILRMAAMNLGRTDTALGAFYRRLAYRVGKAKAITATARKLAILVYRTLRDGLVYQDPGAAAYDARHRVRVLHRLRQRAAHLGFSLLNRETGELLEGAVS

SEQ ID NO: 236072 - protein, 329 aa, unidentified
MKLQQIIGADLSKKSIDLVCHLLTTHIQIENSIAGFKNLLQWMRKLKINASETLIVMEHTGLYSYGFEKFLHQQQIAFCKVNALAIKRSMGLVRGKTDKLDAARIAAYGFEKKDKLTIDVPASDALKRLQMLHSTRERLVKQRASLLCAIKEYRYIGIPEKDIIMQTQLQLIKGFDKQIEKLMTEIESIINEQEALKQNFHLLQSIKGVGKILALTTIIKTFNFTRFANARKFACFCGTAPFPHDSGTTIKRKARVSHLADKQMKTLLDLSAKSAIQYDKELREYYLNRTECGKSKMSTINVVRNKILYRMFAVIKRQTPFIENYLQAA

SEQ ID NO: 236073 - protein, 410 aa, unidentified
MEPILISCAGMDVHEKKVDVCIAHGPFDKPPKFEIRTFSTMTSDLEELMTWLNKYEVTTIGMESTGVYWKPIFNVMEDQFEIVLANAQRLKAIPRKKTDIMDCKRIANLLRYGLLPNSFIPPKEIRELRDLNRTRRKLVGMMTSEKNRLVKVLESANIKLSSVVTKIYGVSSLALIRSLLEKDKLSREEISKMAKGKLKKKVDLLEKAVNGKLTDHHRFLLEMHLQNIDHLAKQIKKLDEEIEKKMVPFQKESNLIQTIPGISEVNASAILAEIGVDMSQFPDEAHLSSWAGVCPGNNESAGKKKSGKTQKGNSFLKAALTEAAWAASKTKNTSYNAFYHNLVRRKGKKKTLVALAHRMLIDIYFVLKTGEPYQDMGAEAVHERTSKRKERSMIRSLEKAGYSVTRMATA

SEQ ID NO: 236074 - protein, 403 aa, unidentified
MNSVGIDISKGRSTVAVMRPFGEVVISPFEVRHTDSELSELARRLKSLTGETRVVMEATGNYHAPVAKLLHDAGLYVSVVNAKLVHSYGNNDLRRVKTDRKDAVKLANYGLDRWLTLPRYVPEENTRLLLKNCYRQYRQYSKVQTVLKNNLISLLDTVFPNANRLFSSPIRGDGSEKWVDFVAEFWHCRCVSEKSERTFTNKYQRWCKKHGYNFREAKAHTIYAEASGHIGVMPKSETTKLLVEQAASQLRATSAALAALKHEMQSLASMLPEYPVVMGMFGVGPTLGPQLIAEIGDVRRFYSKKALVAYAGLDAPPNDSGDVTGRHKSMSKVGASSLRRTLFLVMSVYLQNAPLDEPVYQFMDKKRAEGKPYRVYMMASANKFLRIYYATVKAYLESLEHTA

SEQ ID NO: 236075 - protein, 388 aa, unidentified
MQTVADQNVAPTTIRADLCAIFISLELSRSTWLVTSLSPGGGEKMSKHSVSAGDISALLARFSELRRKACARTGKSFPVIVIQEAGLDGFWIHRVLLSEGMESHVVDAASIATSRRRRRAKTDRIDGEALLRALLAHKRGEPRVCSMVRAPTPEDEDRRRICRERKVLIMERVQHVNRIKGLLFSQGASGYEPLRRDRRARLDALQTGDGRRLPRHLKAQVCRELDRLELLLEQIKAVEVERDALINAEQTKASAPPPMLLSVHGIGPEFASVLWSEGLSRHFDNRRQVAAYAGLAPTPWQSGAVNREQGISQSGNSRLRTTMIQLAWLWLRHQPGSALTLWFKNRNERNGGRRRKTTIVALARKLLVALWKYVSAGVVIEGAMTRPA

SEQ ID NO: 236076 - protein, 341 aa, unidentified
MDGTTIAVDLAKTVFEVAVANERGQIIDRRRLGRGPFGRFLTTQSPARIVMEACGTAHYWGRMAQEHGHEVTLLPPVYVRPFVRRNKTDRADAEALVDAARADRIPAVPVKRVEQQALIGLHRVREQWVTTRTARINTLRGLLREHGLNLPAGARAAVQAVPGVLDAATALPATLRHVLASMQEEIRALETRIAEVDRQLQDLASADPVSVRLQTVPGVGRLTATALVGSVGHIHAFGRGRQFASWLGLTPREYSSGGRRRLGRISKRGDRYLRYLLTHGARAVLVTAARRRRAGQSLSRLHEWALTVRDRCGYNKATLAVANKLARIVWAVWTRDVAFAA

SEQ ID NO: 236077 - protein, 371 aa, unidentified
MEQSSKTLYVGLDVHKDSIAVAYAPEERGAEVLSLGAIGTRQCDIDKLIRKLQSKGAALMFVYEAGPCGYWLYRYLARKGLSCHVVAPSLIPRKPGDRVKTDRRDAVMLARLMRSGDLTSIYVPRIEDEAIRDLSRGREDAMRDLKATKYRLKAFLLRQDIRYEGRANWNAAHLRWLSEVVCPTPVQQIVFQEYVRAVTEQVERLRRLESALHDEVKGWRLYPVVEAIQALRGVELTGAVILIAELGDLTRFDTPRQLMSYLGLTPSEYSSGERRRQGGITKAGNTHARRALVEGAWAYRYPAKVSRHLQLRLEKLPAEVQAIGWKAQGRLCKRYRQLSARGKHANQVVVAIAREMAAFAWAIARTVPLVP

SEQ ID NO: 236078 - protein, 316 aa, unidentified
MQAQQVFIGVDVAKDNLVISIGGTPKPQVVVNDEPAIKRWVKTLSPQAVIAMESTGRYHQRLARLAHQAGLRVYVLNAKDVYFYAKALGARGKTDPLDAQIIARYVAEHHGALHPWSPGTTAQVEVQELLQRRERVAVYRASLRQTLAGMKRLAPAVLQLERQFEKLLGRIDREVQGLVDSEPKLSQGSAVLQSISGIGPQSAAMLVALLNRIQFANADALVAYSGLDPRPADSGLRNGRRRLSKRGPPGLRRQLYLAALAATRTKALGPTYQALRAKGFKSTQAVVILARKLLRIAWAVWKSGKPFDATKLTPVA

SEQ ID NO: 236079 - protein, 342 aa, unidentified
MDTPDVGIDLHRRRSVIVVLDEDGEELWTRKIDNTPENLAAAIRDAGPAPEVVIEATWGWYWAADVITEAGGTVHLAHPLGIAAFENRRVKTDKIDARLLADLLRMGMLPEAWIAPAPIREQRELVRYRRKLSQLRAGLKTQVHAVIGKEGLIPPINHLWGPGGKQWLDDTTMAEAFEDRLRSLRRLIKTYDNEIVRLDARIAGVFKGHPGYETIQQIHGVGPVFAAIFVAEIGDVGRFDNARQISSWAGMTPRHRESDVKAHRGAITKQGPRLVRWAAVEAVSRNHKIEPIHDVYVRVGQRRGVNKGRVAAARKLLTLVFYGMRDLEVRCLDIAHPTTEAA

SEQ ID NO: 236080 - protein, 430 aa, unidentified
MPYRIAGIDVHKKVLAVVVSDVEVDGEHQFERRMFGSNPEQLRSLAAWLVEQEAEEVVMESTAQYWKPVWEALERYWKPLREKREGARRRSGTLHLAQAQSNRGRRGRKNDFRDAERLVKRLVARELTLSFVPDAEQRLWRTVTRKKYQLRRDVVRLHNQLESLLEEAHIKLSSLVSDLLGASARRMLKALADGETDPAALAALADQKLRATPEQLCDALGACTDLKPVYRRLLKMALEQLQFLEQQIGQLDQELATLLHPHQDAVQRLAEVPGLGVDSAQQIIAEVGSTAATFPSEKQLSSWVGTCPGDEESAGVNYSHRSPKGNRHMRRILNQTANAAARTKGSIFDIVYRRSVTRLGHNQAVGAIAHRQCRLIWLVLHQGVRYEERGPAVNKQSKQRRTWKMIRQLRSLGYRIQPPNPDQPSQAQEQ

SEQ ID NO: 236081 - protein, 412 aa, unidentified
MADIAAYIGLDWGDERHSVHLQMADGTLEHVELEQKPDVLHAWVTQLKERFAGGQVAIAIEQRKGAVVNALMLYDFLVLYPINPKALARYREAFRTSRAKDDPADSQLLLDLVVRHRDHLRAWIPDTTEARKLQLLCEQRRKLVNHRVALTNRLTSLLKQYFPQALEWVGDLASLQGCDFLAQWPNLDAVQSARPSAVRKFYQAHNCRMASVIDARLAAIKIAQPLTIDPAIVEPLSLSVQTYATQVHGLIRAIQAFDVRIAHVFADHADHDVFASFPGAGDVCAPRLAAAFGTDRSRWDSAAELQSYSGIGPVTERSGKTRWVHHRLACPKFVKQTFHEFADQSIRFSRWARAYYDQQRRRGNDHHAALRALAYKWIRILFRCWKDRTPYNEGRYIDALCRRGSPLVKHFA

SEQ ID NO: 236082 - protein, 313 aa, unidentified
MSLNNTNILYAGLDVAKLSLQLHLAGHFHTLSNDAKGHAQLLKLLGAYPQAQIICEATGGYEQRLVRVLQTAGVPVSIIEAGRVRYFARAQGQRAKTDPIDAAVLSEYGATFRPAPLTPPSVQQQQLADLSQRRRQLVQLLTSERNHAEHYTDAFRLRQTRQLCKTLEKQIAQCDGAIASLIAQDAQLADKARRLQTIPGVGQVVATTLLAEMPELGRLNRRTAAALAGVAPYNRDSGGRKGMRCIQGGRSAVRNALYMATLTAMRYDRILKEFYQRLRAAGKKPLVAMTAVMRKLVILMNRLLKNDNFLLAN

SEQ ID NO: 236083 - protein, 435 aa, unidentified
MTLIKYGYELDTAFDWSFPIRLHSLKPTVLSLYINHRKAGFIMILVGIDVASIKHDIVITNHLGEVFNKHFTIENSRLGYKKLLSEISLAKEFFKDSNVRIGLESTGHYSRNILHFLILEGYNVMFINPLLTNMDRKASSVRKTKTDSIDAKAICMFLIRNQNDFKPYTLLSYHIDELKILVRQRKSLKKQLNKTSNQLKAYIDQAFPEYHKIFKNTLSNASLTLLESYASLSELKRVRTNTLTELLKKSSKGRHGLTKAEVIKEFVKASIGIDSESLSLSIKQSVQTIKSIELQVSQINDLLEHHLNQSKTTLLTIPGIGIQTGAIILAEIGDINRFKSDDALLAFAGLDPSVYQSGKYEGSFKISKRGSSILRWAIFQAAKITVMHDPIFNAYFLKKKSQGKHYLTIIGHVTKKLLRVIRSILKNNSVYTVSH

SEQ ID NO: 236084 - protein, 370 aa, unidentified
MEQYTEAFVGIDTAKNKHALAIADPGRDGEIRYLGEIDSAPAAVQRMIRKLAGRYEKLYFCYEAGPTGYGLYRQVRALGHDCIVVAPSLVAKRPGERVKTNRRDAVTLARLLRAGDLTPVWVPDAVHEAVRDLVRARTAASEDLRRKRQQLLSFLLRHGRIYSGRKHWTKMHLHWLAQQKFDHPAQQIVFQDAVDAIEDAATRLRRLDQQVAEIVPSWSMAPVVEAYQAMRGVSFGVAVTFVAEIGDLRRFDNPRQLMAFLGLVPSERSTGERVRRAGLTLAGNKRARRVLVEGAWSYRYPARVSQTLQARLEGLPKTVRAIAWKAQIRLCARYRRLTAAGKKRPLVIAAIAREMAAFLWAIAQHVAPAA

SEQ ID NO: 236085 - protein, 348 aa, unidentified
MNQRYEKSWEFVGIDLHRRRSVIVRINGEGEVVDLVRIENSIPALLAEVSKAGPGAPVAIEATYGWYWAVDALTGAGFEVVLAHPRGVKSMQNRRAKTDALDAKELADLLRLGRLARAWIAPPEVRELRELVRYRHKLVGDRAAVKASVHAVLGKCGVIPVVADIFGPVGARILDGLVLPEPYASRVASQRRILATLSTEIVRLEVETGRRLKDNPQYRALLSLNGVGPVMAAIFVAEIGDVHRFASADQLACWTGLTTRVDSSDKHTRYGHVSKQGSRLLRWAAVEGCQRAREPYLVNKRRAIIERRGKGAQHIATVAAARHMIKIVYYTMRDGHARCLDAPIPAAS

SEQ ID NO: 236086 - protein, 328 aa, unidentified
MEQELHFIGIDVSKAKLDVDVLRPDGRHRSKKFTNTPKGHGELLSWLRSHNVAPAHVCMEATSTYMEDAAASLSDAGFTVSIINPALGKAFAQSEGLRSKTDAVDARMLAEFCRQKRPAAWEAPHPLERALRALVLRHQSLTDMHTQELNRRETAREVQMPSIDAHLLWLEAELKRLEKQIKDLTDDDPDLKHRRKLLDSIPGIGEKTSAVLLAYAGLKDRFGQARQFAAFAGLTPRQHESGSSVHRASRMSKAGHVSLRRALYMPAMVALYKTEWGKAFRARLEKNGKGAKLIIGAMMRKLAQVAYGVLKSGRPFDATLHQENACVA

SEQ ID NO: 236087 - protein, 429 aa, unidentified
MNYNTQNAKIASITEKTLIVGIDVGSETHYARAFNWRNYEYSKKPFAFSNDEAGFASFKAWMNDMAEKHGMETIIPGMEPTGHYWLNLGAYLQEQGMKPVHVNPHHVKKSKELDDNNPSKNDRKDPKTIAGLVNEGRFSYPYIPTGIYAEIRNLSNLRIQTQEEITRIKNRIARWFSIYFPEIKDVYRNPDAVSGLMVIKQAPLPCDIKELGVNGVNKIWRDARLKGAGIKRATTLVTAAEHSIGNTEAPRSARKEIRNLLNDYETYKNRMDELMQEIKETLSEIPYIDKLMEINGIGIKTVSCFIAEVGDIGRFDNPKQVQKLAGYAIVADSSGKHNGESRISHRGRKRLRYALYEAAISVIGKNKEFKEIHSYYRTREKNPLKKMQSVIAVACKLIRIFYMILTKGVDYDSQKMLNDIVRPEIQLAA

SEQ ID NO: 236088 - protein, 388 aa, unidentified
MEIVYPRSYGVDVHKSFIVAVICISESVKPKYIKKRFSTFNNQLIQFRDWLIENNCQNVCMESTSKYYIPVYNALEGHISNVVVANPKWVKAIKGEKDDNKDAKWIADLFKFGIVRSSYIPEKDIRVLREFTRYQYKLVNMRSSEKNRFQNALTTGNCKLDIVFSDVFGKSVSAIVDTILSNNPYTSEDILSKVHARCKASHEDILSAVDGIQLNQFQKVRIQIVQKHMDYLNSLLDEIQHHIDLMVANYEDYIQLLCTIPGINRKSAITIISEIGTDMSQWSSHRKLAAWAGLAPGCNESAGKKKSVKISKAGVYLKPCLVQVAHAAVKDKECEYYADKFNITIHQFPLINSRHQSCKSRNLVGKAMQLFHIVCADPAINADFLLSK

SEQ ID NO: 236089 - protein, 316 aa, unidentified
MDGANQVAVGIDVAKATLDLHLLPAGQAHNLPNTAAGHEQLRKALPNPANCLIVLEATGGYEREVVADLTEAGYRVAVINPKRARDFAKALGLAAKTDRIDARVLALFAEKVQPAPIQKTPEKQAEIQQLVARRRQLIEFRTQESNRWEVTRAKLARKSIQTMLNTLQRQIHDIEGAIEALVESDEEWRNKAKLVESVPGLGEVTAATVVADVPELGKLNRQQISALVGLAPYNRDSGTMKGKRTISGGRKAVRCVLYMAAIAAKRCNPVIKAFADRLAQHGKPFKVIITACMRKLLVILNAIVKSGRPWAAQTTS

SEQ ID NO: 236090 - protein, 343 aa, unidentified
MNRRVKSNSDDSHRMFVGLDLHKNYLQAAVMDDQGRVLSQERIPNKDDSIEEFTRKTLKDSHAEIVIESSSTWYHVYELLSQKENCHVVLSNPVKIKAIASAKVKTDKVDALTLANLLRTGYIPESYIPPRHIIDLREMVRYRTSLVRMRVEAKNKIHAILLQNGTRIKEKPFTIAFVEELRRLGDYRIDGYLNIIQSLSQQILTVSSTIKREAREDESTRLLMTIPGVGYFSALLILSEIGDINRFPDSHHLCSYAGLTPSTHSSGGVTYHGSITRSGSRYLRWILTECAKAHIRTRRDSQLTRFYTRLAKRRGGSKATVAAASKLLRIVYWVLKEKRPYHS

SEQ ID NO: 236091 - protein, 367 aa, unidentified
MKHYAGLDVSLEQTSVCVVDESGSILCEGKTESDPAALTAWLGRVGHAITRVGLEAGPLSVWLHRGLLAQGYASVLMETREVKARLNSGRHKTDRADARGIAQILRVGWFRPVHAKSATAQDDRLVLTQRKFVQGQLRALENSLRGTLKGFGLKLGKVSVKGFAGRVRELAAGRELMVEVSEAMLAARETMLASFQRLDTLMRARARDPLCHRLMTCPGVGPQTALAFRATIDDPHRFKTSKQVGAHLGLTPRKYQSGETDRNGGISKQGDTLLRATLFEAAQALLMRVRRPSALQAWGRRLVRKRGRKRATVAVARRLAVILHRMWVDGSEFRWTAPAEAATAKAATAKAATPKTVLSRRAQLAAV

SEQ ID NO: 236092 - protein, 341 aa, unidentified
MKPELSVVGIDLAQSVFHLVGMDERGKIILRKRLARGEVLPFMAKLPRVLVGMEACGGAHYWARQLREHGHEVKLMAPQYVKPYVKTNKNDLRDADAIAEAVTRPSMRFVPIKNVAQQDLQALHRVRERLMGARTALVNEMRGLLAEYGIVLPAGINAFRNALAAKLEAEHAKLTPLSQELFGKLCAEFKKVEAEVAYYDEKLQALATTHPESQRLLTIPGIGPITATALIAAVGDMGGFTNGRQFAAWLGLVPKQHSTGGQPRLLGISKRGDSYLRKLLIHGARATLRWARTKTDSRSQWIRGLLARRGWNRTAVAVANKNARIVWALLSRGGVYRESTN

SEQ ID NO: 236093 - protein, 338 aa, unidentified
MKITTIGLDIAKSIFHLCCVNKMGRLLKKKQLKRKQVLPYLAKLEPCVVVMEACGGANYWAREIKAFGHEVKLIAPQYVKPYVKGNKNDYNDAEGIAEAAQRANMRFVPIKTVAQQDIQNFHRQRERLKKERTALVNQVRGLLAEYGIVINKGGSAVREGLPDILGDADNDLTPLSRELFAELLEELQLLDQRFGECEKRMHVINQEHAVCRRLDDILGIGPITASATYAAAGDGKDFVNGRHFSAWIGLVPGQHSTGGKTTLLGISKRGNAYLRTLFIHGARAVLQHSANKTDRFSLCAQALLERRGHNKACVAVANKMARMAWVIMAKGETYRVAA

SEQ ID NO: 236094 - protein, 345 aa, unidentified
MEHYVGLDVSLKLTAICIVDRTGKIVREGVVASDPEIIATFIKSHAPHVARVGLETGATSTWLWTELNKMGLPVICIDARHAKAALKLQINKSDRNDAVGIARIMQCGWYKEVRVKDLDSHALKALLVSRALLVKIKRDIENQIRGLFKNLGLVIGQAKMNVFSVRAAELAEARPELTAAIEPLLRAREAVGRQIADLDGKVMRLARNHAQVRRFMRAPGVGPITALCFLATIDDPTRFKRSRSVGAYVGLTTRRYASGEIDWTGRISKCGDKMLRSYLYEAANVLLTRVAKWSALKAWGIRLAKRSGLRKAKVAVARKLAVILHRMWIEGSEFKWSSKEANQPA

SEQ ID NO: 236095 - protein, 413 aa, unidentified
MLKICYNTCCGIDVHKKMLVATIATTNERKVTTYQTKQFSTFTKDIKKLKQWLIDNNCKDVCMESTGKYWIPIFNILEDYCNVTITHPKYVKAISGKKTDTKNSVWIADIFKPGLVEGSFMPHLAIRQLRDLMRYRLKLVNCKSSEKNRFQNSLTVSNIMISNIVTGTFGKTSKSILELILSKEDNVTLEEITPLLRKKLKSSPQEILDSIEGILTHEQNSKMKVCLSHYDNILECINDIEQAVLPLIQPFQNEIKLILIVPGVKDISAITILSEIGADMSVFKDAEHLCSWAGLTPQCNESDGKKKSVHVSRTGIYLKPLLIQCANNAIRDKKCPYFKLRYDAIKKRRGHKRTIIAIARMLLTCIYQMLSKNEPFNNEIYEQLTQKNFKSKGKKLNINNAINFLESQGYKVS

SEQ ID NO: 236096 - protein, 293 aa, unidentified
MNQDKYIGMDVHQATISVAVMDSSGKLIMECILETKAATILEFIAGLRGTLSVTFEEGTSAAWLHDLLKPHVSHLVVCDPRRNALLKDGSKSDRIDARKLAELLHANKLHAVYHGEHGVRTLKELGRSYLTITKDLTRVMSRIKALYRSWAISCSGATVYAPRHRAEWLAKIPHPGVRLRAERLYQQLDVLQPVRQEARRELLVESQKHHAVKLLRQIPSIGPIRGALLVALLQTPHRFRTKRQLWAYSGFAVEIHDSGEYRFVRGKLQRNRERITVRGLNDPATLCCTSITL

SEQ ID NO: 236097 - protein, 334 aa, unidentified
MKYIGLDIHKKDTQACVLDEKGKVVLVKRVRTDVSDIGHLFKKIEDDTNDELAVVMEATGFYFWINDLIVARGHDVKVVHPTKVKPLMNARSKTDKNDALMLAELLRAGCLEGIYIPSPEIREMRDLTRHRESLVRKKGDAKREIIAALDQRGLKVPSEFRTNFTQKYKDWARSLNDFVINEKLDLLELLLTKIRNVEKIIEDKYGMDEDVQLMRTVPGIGLVTAAVVKAEIGDVSRFSSAENLAAYVGVSPTTSQSGEKTWGGPTRHGNNRVKHVLIEATLFHYHYCPDSKISSYYQRKKDSIGSKKAMVATSRKLVEALYCMMTRKEVFHAH

SEQ ID NO: 236098 - protein, 344 aa, unidentified
MTYYAGFDVSLRTVNICIIDEQGEYVTETKLASDVQDIVAYLDELDLDIESLALEAGTLTQYLTYGLQSAGFEVICMEARQVKGALSAMRNKTDKHDARGIAQILRSGWYSQVHVKSIESHHIRMLLSSRRAVLSKCVDLENEVRGLFKIFGIKLPPKLGHGVFDVTVRDIIEADEALSHALLPLLEARLALYWSFRELDNRTRKMANKDSVCQRLMTVPGVGYITALTFKAGVDDPTRFKHSRTVGAHFGLTPRRCQSGEIDIDGHISRAGDPDVRSALYTAANAMLTRSSRWSSLKAWGMHIAKTRGHRRAVIAVARKLAVVLHRMWIDDTQFRWGTEGARS

SEQ ID NO: 236099 - protein, 659 aa, unidentified
MHHRGEQVQLADHALKGSDLLLSSLLGINLSFKSCRAPAQVSDARFELWLLNQPLGIAVDQATDRAARFGALAGESIKLWLARMRLHRVQPPLVFRNHERGVFQQPTNLRPYGIIKRLDRNQPCIASELAVEAAAIGAAASIVAPPSLMVMTGEPISARLAYKQTAQQVLNACQPLAITFSVLLQPLCGAREEFLVDDGRHCHTDVPLSRCANLSVGPLWYSGMAARRMERRLPRQALATAINGLTDIDPMRASGGQLLCPPVSTLWRIWVMAQSSDTRSHPIALDFDSTLVLAIELSNTSWVLAAQVPGLPRVKAKQSIEPTAEALLAAIDGYRDRARAAGKTVQRVVATYEASWSGFWLARWLARRGVETHVVQPSSVPVDRRARRAKSDGIDAELLLRTLLAWLRGEPRVCSMVPIPDEADEDERRRVREREDLLAERVRLVNRIGAVLATLGVRDYNPLRRDRRERLDALRTALGDPLPPHARARILRMLDRLELVCAQIAELERERDAVLDEEAPGKAEAMIQQLAGLRGIGVQSATVLVREAFVREFANGKALGSYAGLTATPFSSGGTEREQGIDKAGNRRLRAVMIELAWLWQRYQPGSAQVIWFRERVGDTGKRMRKVMVVAMARRLLIALWRFATQGVVPEGAVTKPMS

SEQ ID NO: 236100 - protein, 448 aa, unidentified
MLSDLIDKKAVSPSNGSEYMSEMVYHRKETAVTANSLMQRRSAIKPDTLIVGVDVAKFHHVARILAPGGTIGQPLEFSNSREGFIALSAEIEARKPTSTSSVIVGLESTGIYWINLARWLAEQGYQVVQVSGLYVHHAKELTDNSRGTSDGKDARLIADLVLQGKYLSFVRPAGVLADLRQLVGLRQRLVRERAARYNLLHQSVDLLFPEFPTVFKGVTGPGARRVLRRFPAPTAVLAHPPDEMRRLLSEDGRVQASVAKLAQLQVVARQSIGTLEGTTGLQYALNDTLLELDSLDTRVKQVEAEINRLLAQIDETPILTSLVGPMTAAIILGETGGLRQYSCAAAVLKLAGLNLYQISSGQYSGDRHISQMGRPLLRQTLYLAVLQHTHPGTPLYPYYVELLRRGKPKPVALIALCCRLVRLLYALVRDGRCYSAQPPERNQPAQTA

SEQ ID NO: 236101 - protein, 325 aa, unidentified
MNEGTKFFGVDVSMDTFDVSTPDQKHVQFSNNQDGYVKFLKLMDSGSHCVMEATGAYHQKLAFWIFSQGRKVSVVNPIVIKRFAQMRLRLAKTDKADARMIRQYAEAEHPEVWTPPQVYITQACEINGLITLLIRQRTALKNKLHSVNHKEGTFSLILQAIQKQIKNLDQEIHQLEISMEKLIQEHEREMLATLCSIPGIGKKTAMFLIVITDGFRSFENSKQLCAYLGLAPTIKVSGKSVRGQSRISKTGNSTIRNLLFMCSFTACERNKACRELYTRMVNKGKSKKVALIAVANKLLKQSLAIAKSGTTYEEGYQSMRPACIQ

SEQ ID NO: 236102 - protein, 326 aa, unidentified
MLEGVNGKEGWIVEESVFVGIDVSKGTLDIVMRPGGSRESIPNQEAQIGELVRRLSTLRVTLLVVEATGGVERRVVRALAAAELPVIVVNPRQVRDFAKATGRLAKTDKIDAEVLAHFGEAVRPALRTLPAPASEELRAQIARRRQVTEMLTAETNRLAHSAKAVRKRIEAHIRWLEAELDRVDNELDQSIQQSPIWREQEDLLKSVPGIGAVISRTLLAELPELGKLNRKQIAALVGVAPLNWDSGMMRGRRAIWGGRATVRAALYMAALVASRCNPNIREFHRRLRAGGKAPKVALVACMRKLLTILNAMIKHRTRWSVIVEAQ

SEQ ID NO: 236103 - protein, 318 aa, unidentified
MTNTSSPFVGIDVGQARLDAAVGKAGEEWAANNDATGIQKTVERLTQLQPALIVIESTGGLEIPLMLELSKAGLPFALVHPGRVRDFARSLGRLAKTDRLDARLLAHFAEAIQPPLTQLPSEEVQRLNALMQRRRQLLDILVAEKNHLLSTPLFQRAGVAEHLTWLEEKLAQLDQDIQDQIGRTPEFKEKEAVLRSAKGVGPVLCAKLLSGLPELGQLSRKEIAALVGVAPFNDDSGRHRGRRRIKGGRADIRHVLYMATVAAVRFNPLIRPFYQRLVSQGKLKKVALVACMRKFLTILNAMVRDMRPFAYTSGLFNS

SEQ ID NO: 236104 - protein, 338 aa, unidentified
MSKITTIGLDLAKNVFHVVGCDAHGKRVRRKQLRRGQMLRYFANLPPSLVGMESCASASYWARELQALGHAVKLIPPQYVKPYVRGNKNDYNDALAIAEAVVQPQMRFAAIKTVAQQDIQALHRLRERRIAERTALCNQVRGLLGEYGIVLPRGVASLRRRLPELLEDAGNGLSELFRRLLAQCYQQFGELDAHIDGYTRELKRQSRQSAACQRLETIPGYGPIVASVFYSVVGDGSAYRRGRDVSAAVGLVPRQHSSGGKENLLGISKRGDRYLRSLLIHGARSVVRQAAGKDDRLSRWINRVKAARGYNKAVVALANKLARIGWAVLAHNTTYQAV

SEQ ID NO: 236105 - protein, 460 aa, unidentified
MNQFFLGIDASKGYSDFVMLNAKKQTVIDNFQLDDTFDGHAQLYEVLHSFNKDNPEATIYAAVESTGGYENNWFQSLLTSQASLPVKTAHLNPLGVSHNSKADLKRNITDKISAKNVAEYMIAHPEKVSYQHQDSLASLRKQWGFITMLTKQSTQLLNQLESLVYNANPEILTYCKDGSPQWVLKLLTSYPTALRLSRAKVKVLARIPYISLDRAKQLIATAKKSVASASDKVTEQLIVATVKQIVHLKKTIKAQSEVLANECQIPEVALLKTFTGIGDYSAIGLMLQIQSVNRFLTSKKLSSFFGIHPEYKKSGDGTYKYRMSKKGRKEGRRILFIVAMSAVQSNPLIRDVYQQAVERGMEKMSAMGLCMHKILRILYGMLKHNKAFDPQIDLKNRQKKPSQKRNIGQDKNRRYQEFDSKAPISRRQKMRRKERKQSQNVINVEYGISEASVPSTQLAN

SEQ ID NO: 236106 - protein, 351 aa, unidentified
MLSQAMPPKQEADMELYAAIDLHSNNSVVVVTDASDHVVLAKRFRNDLESIVTALRGCAGEVRAVAVESTYNWYWLVDGLRSVGFDVRLVNTAAVKQYDGLKHGDDFSDGKHLAQLLRLGILPQGYICPPELRALRDLMRKRAQLVRQRTTNILSIHNLLARNLAKSVKGEDIKRLGDVEIDALELLEDQKRALKANAAVLRCLEEQIKLLERAILAKGRLREEFHGLKTVSGIGDVLALTIALETGDIHRFASVGKFASYARMVNSRRESNGKNKGMGNRKCGNKHLSWAFIEAAHYAVRYDPSIRRFCERKRAKSLAVVAIKAVAHKLARACYHIMRDGVPYDGARAFA

SEQ ID NO: 236107 - protein, 389 aa, unidentified
MLDQHLAEPAAIRVQLAAIFVSLELSRSNWLITSLSPGRGERMSRHSVAAGDLTALLARFGELQRQAQRRTGRSYRIVSIHEAGLDGFWLHRALQQHGIESHVVDAASIAAPRRKRRAKTDRLDGESLLRALLAYQRGEPRACAMVRAPTPEEEDRRRLCRERATLLNERIVHTNRIKGLLFAQGISDYAPLHRDRRAKLATLRTGDGRALPRQLTAQISRELDRLEQVLTQLAAVEAERDALLAAENVPQAANTPQPVAMLLGLRGIGAEFAAVLWTEGLYRPFANRRQVAAYAGLAATPWRSGAIVHEQGVSKAGNPRLRTTMIQLAWLWLRHQPDSALSRWFQAYGARTGWRKNAIVALARKLLVALWKYATQGVSIEGAVMKVAA

SEQ ID NO: 236108 - protein, 382 aa, unidentified
MPAYADPTPTPISADTIFLAFELSGTSWLVALHAPDADKVERHRLPAGVAAEVLGLIARTKARVTRRLGTTPRVACCYEAGRDGFWLHRVLEAEGIASHVMDPTSLQVDRRARRAKTDRLDAQALLRALMAWSRGERQVCSMVRPPSPEHEDERRLSRERGTLLKERLRLSNRIKGLCAAQGIYDYEPLGADRRERLARLVTGDGRALPGRLAAEIGRQLDCFELVLRHLAEVEAVRDARAAQAREEGGSKLAALLRLKGIGPELATVLELEVFHRHFANRRDVAAYAGLAPSPYASGGTSREQGISKAGNRRARKALIELAWLWLRHQPESALARWYRDRVGTATGRVKRIAIVALARKLLVAIWRYVETGLVPAEATVRT

SEQ ID NO: 236109 - protein, 355 aa, unidentified
MFYSGIDLHRDNSMITTINDSGTIINQQKLPNDQVSLLNYFLSMGNEHRAVVEATANWYWLSDLLNDHGIDLVLAHAKYLKAISYAKVKTDKVDSQTLANLLRIDMIPTAHQITPELRALRDLMRARLKLVHKNISCQNSIHRLMGKYNLNIPDDRKLHDLSTLDTLKDLPLPEEALLQLELLKEQMRLLHRQINDLEKSLHPKLIPNPDIQRLLWIPGIGKILAFTIYLEVDGIERFPGTPQFLSYSRLVPGADNSNRKAKHKSANKDGNRYLKMAFTEAAVRAIQYFKEVKAFYQSKERKKHKAIAKTLVAQELAKICYHVLEKKTDFNNTFKGKTLSKRKSMQWPRLASPDA

SEQ ID NO: 236110 - protein, 429 aa, unidentified
MNSCEQTAQDWLAHRAFGGLDWASEKHNVIVVDPRGKVVEDFEIAHSALGWKKFRERMAPYGAIPFAIETNQGAAVEQLLEAGMKVYPINSKSAKSYRERKAPSGVKDDWLDAWSFADACRIDGQDWRALRPEDPLVKELRLLCRDEVELIQQRTSFICQLRHALGEYYPTALEAFEDWGSMSAWMFIQRFPTPQLLQAAGKRQWEKFLHARRLWRTESGPRRLELFAHATELCGTVPMANAKSQLALSLISMLFALEKQLGIYRRRIEELFSRHPDHDLFGSLPGAGPKLAPRLLSEIGDDRGRFEDGPQALQCLAGSAPVTRRTGKCKVRANPDHWPCHQRWACDKHLRHAMHLFSEHSLGQCVWAQIYYQHHRQKGSSHADALRRLAQRWLKIIYRMWMDRKPYDAMLHHHNQLKHGSWVFELKTA

SEQ ID NO: 236111 - protein, 398 aa, unidentified
MVFCGIDWAEEQHDVCVVDAGGRRLWRGRVRHDPEGIAQLRAALAALEPEPGAVMVGIETGRGLLVGELVLAGYSVYPINPKSAERYRDRRRASGGKDDRLDAEVLANAVRTDRAVFRPLLPDSDLAVEIATLARDHTALTRERTRLLNQLRSALLEYFPAAITAFALDARSAQAFLKRYPDPAAAARPSVVQVARFLRAQRANRDADARAVEIVAALRAPALRARPEIARAKARLVGALCAQLLTLRPAMAAYERELEHLLKTHPEGEIFLSFPGLGVVLASRVLAGTGDNPDRFASGYGAYAGTAPIVVQSGKRRVVKARIAAPKHFRDAVQQWAEQARRHSPWAAEFYARYRSRGHEHNEADRALGNRLLELLFDLRRLGRTYDEAVHLANIRAA

SEQ ID NO: 236112 - protein, 362 aa, unidentified
MGMVGGLDVHRAQITFDWVDHDTGETGRGRVAPATRTVFAEWLASLPSQQGAFAVEACTGWRFVVDELEQAGFEAHLAEPADTAAARGKKRRAKTDRADAKHLRVLLEQQRLPESWIAPGHILDLRETARLRHTLVEQRGQWQQRIHAILYHHGIPKPAGGLLTAATRGWLETVQLPAASRQAVMVALGQTDQLQTTLTPIDGWLRAYARRQVGCRALVANHYGIGWLTAPTILAELGDVRRFRNGDAIVRYTGLDVTVYSSDGKRSPGHLARQGPPALRWALFEAAMTSARHRDAPDYDYYHQVKERVGGKRPGLSVARKLARRIRFTLAELGDDALAPVDNGQLPELSGACRSEAVSAVA

SEQ ID NO: 236113 - protein, 361 aa, unidentified
MTTMTQTTIYVTGGVDTHKDVHVAAALDQLGRLLGTESFPTTTAGYRQLLRWLRAFGDIDAIGVEGTGAWGAGLHRFLTAHDVRVVEVMRPNRQRRRRYGKSDTADAISAARAVQAGEAVGTPKTATGTVEAIRLLRIARRSAMKARTQAGNQIHAVVDTSPEELRHRFHGHTTTQIVAVAARFHRRYPDTPIDAAKTTMRVLARRWQHLDEEVAELDAHLDDLTATVAPTLRALNGVGPQVATALLAAAGDNPERLRSASSFAALCGVSPIDASSGRQQHHRLNRGGDRQGNWALHVIVISRLRWDQPTKAYMARRRAQGCSNKAIIRCLKRYIAREVHRAITTDIGISPPIEQPAAIAA

SEQ ID NO: 236114 - protein, 337 aa, unidentified
MFMQVYGIDLSMEKFDVNFIDANGKEKHRVVKNKLGSISNFLESVPEGYVLCAEHTGAYGDLLVYLCNQLNVQIALAPGYTIRHSLGLRKGKSDPIDARRIREYGERFFDKLVFKEYDTEEIAELKSLHTLRSQLVKARKELRTGNHGRSVLPMQSVSVNKHLNQILHNLDEQIKEVEAEIKAVIMAKNELKENYELAITVKGVGPVTTTDLLIKTGNFAIIDTARKASSFTGVCPFPNASGKMVGKSKTSPFADKELKSVLYMGAKSAVKHNKEYRLYYEKKKLEGKPHFLIMNNICNKLLRTIYSVVKNKTPYRQDYICLDPREKNLTSSTEKVA

SEQ ID NO: 236115 - protein, 279 aa, unidentified
MNMHPQGGVATRDRRPNAGIDVSKQHLDACWGSQDLRLVNDATGWDALIARFKEAEVDLVVIEASGGYERGLVGALQGADITVARVNPRQARDFAKSMGVLAKTDRLDARILRDFGDVLAQHKDRAKYITPMLDEQRQELAALMTRRRQLVDMRVAESNHLEQAGKRAVRSIKSVLKTLDKQLAAIDQDVDDHLDRHFKEQRTLLDSVKGVGPVTILTLTAALPELGRLGRRQIAKLVGVAPLADDSGPRKGKRRIWGGRSDVRTVCTWPRWLRFAATL

SEQ ID NO: 236116 - protein, 354 aa, unidentified
MRQLKPYIVKDRNIYIGLEDSKVNWKLCVRSDDRIIHETSMPAKYPVLKSYLLNKFPGCKIKLLYEAGFRGFNLYDKLTEDNIECIVTPPGKVTEEKNSRQKSDKRDCRRLAKILEINDYKSCYVPDKERRQDRQVSRTLVGVQKDMTRTRNRIRKYLEYHGLDDDFKPGAWSESDYTLLKEKKYEEMVQYNLDTLLVQLDQLKEHKSSLQKKLREIAQKKRYKNIAELFASAPGIGPMTAIRLVLEWGEDMSRFNSAKHFASYTGLVCSEYSSGETQRYGRITAQSAEYVRAWLIQCAWIAYKRDEALLDKFERVWKNSGNKKKAIVAVARMLAVRLRACALTNTPYCLGVVK

SEQ ID NO: 236117 - protein, 351 aa, unidentified
MKITKLSTSHNPMKYADANFYDYYIAIDWSSTVMTIAWLRNNSIDPVVKRDLPAKLKVITDYIKGLPGKKILTIEETTGAQWLYVGLKDRVERIIICNTYRNALLKDGPKNDAKDAADLCRLLRAGLLKEVYHSNDENYKIRRFFSSYNDLVKAGVRAQNQLSAIYRSYGLNYKKDKLNIKDDPYITFIIEDKLKAIALYKEEKKKYEKLFREILKSNKTIKNLKTVKGIGLINAMKIFSVVIDANRFQTKYRYWAYCGLVKYKMESGQKYYGKRNTQYSRMLKEAYKTAVLAALRGKNDIREYYQNLLKEGFPEKLAMNKVCRYIATSTLAIMKHGSEYKPYNWRKEKVK

SEQ ID NO: 236118 - protein, 411 aa, unidentified
MIKENYMYVGIDLHKETHTAVIIDCYNQKLGEITFPNRPADFPKLVAKVKKCNTAGKEVVYGLENAYGYGRALAVWLIDKGYFVKDVNTAISHRQAKHRGAMYRKSDSDDAGAIALATLNMLDKLPDACPNDAYWSLGQLVHRRDNIMKQRTRLVNQLHEQLCIAYTSYKQFFNDISRPTALYFWEHYPSRKYLKGKSVEDLRAELVPVSHNKCSTKTCEKILDAVASDKVKNNAYQDARDMVTLSIVSDLQHYDIQLAEVDKMLEQMYKMLGCTLTTIPGVNVITAVKILAEIGDIKRFSNANKLAQFAGIAPLHLSSSGKGKDLATKQGNRRLQATIYFLAIQMVQISSKGTPRNPVVRAYYEKRKAEGKTSQQALICISRRLISVIYGMLKNGTEYRMPVVENAGENM

SEQ ID NO: 236119 - protein, 420 aa, unidentified
MTTSNSTPADVVLVAIDIAKLRNEVLIEAPGHKRRRRLLVLNTRAEHDHLIEVLQAYGRPVVCAFEATGNYHRPIGWRLAEAGFEVRLVSSLALARTREALHNSWDKNDPKDAQVILHMLRIQATQLYHDPLRAGINDVQELSKTHEAIARAKTEIQHRILTHYLPLYFPEIDRFRGNSRSDWFFAFLHAFPTPASVTALTKEEFVAAAWDVVGRKVSKTQILMDIYETARSSIGLPLPLDAPAIRMFRMVIDEARSLIRQRNEIEAQADELLRHSQDYQLLRQIPGIGPINALTIIAEAGDLRRFGHHRQFLKFCGLDLSTQQSGQYRGQTRLSKFGNARLRRTLWIAGQVAIRQRENGFRHKFERYIAKDRDNPDLRRKAMTAITAKMARVVHAVVKGGSDYRPFVEGRVPGGRTSVS

SEQ ID NO: 236120 - protein, 322 aa, unidentified
MLNEKGKKLKSGRVANYRSELEKFLDGRGEVKAVVEAGRSSYTMVDLLDELSIDVTIAHPKQVKAIAKAKIKTDKRDSFMLAHLLRTDLIPEVYKRSRENRGYQRILRQRAFYVGSTTRTKNKIRALLAQQGEELRDKVSRKKNLFTGSGVKFLKTLNLPDTDKKLLSALLKTFSHLDERKKETNGLVEKLYLQIPEARLIHTVPGYGVFLSVLTAVEIADIERFSEVSRFHSYAGVIPSTHSSGERTCHGKIVKQGNRWLRWAAVEAVWPSLKADFDMRCFYNKLKKRKGPNPAKVAAARRMLTIIFRILKENRPYIPYKR

SEQ ID NO: 236121 - protein, 327 aa, unidentified
MAKHTMFCAGIDTGKHKLDVALDRCSERLQVENTLAEHTVLSEWLRRHRVTRVGIEASGGYEQAVVAELRRAGFVVIVFQPAQVRAYAMFHLKRAKNDKIDAALIAICTAAAQKIHAAPDPRLAPFAQHLTMIDQIGDDIARLKNRIETCRDARIRQVWKEEIARLKKLQRSERRSLVAAIRQHRDLAERLDLINSVDGIGLPTAVAILVRMPEIGRLTREEVAALGGLAPYDDDSGQRSGARHIAGGRERLRTAVFAAALPASQRWNPQLMTFYQRLIAAGKLHRIALVACARKLLIFANTIVARGTPWKRHHPIPTAIAHAATAR

SEQ ID NO: 236122 - protein, 445 aa, unidentified
MLRIMYRIVAGLDVHKKTVVATRMRVDEEERLFWETKTFGTMTHDLLALLDWLAEWDCTHVAMESTGDYWKPVYNVLEGTFEVYLVNAQHVKHVPGRKTDVTDSEWLAELLLHGLLKPSFIPPKPQRALRDLTRYRNKLIEERARTVNRIQKLLEGANIKLGSVVSDVMGVSAQAMLAALCEGYMPPQAMAELARGRLRSKIPELEKALTGLVESHHRFLLSKQLAHIDFLDEQVVDISTEIARQLEEMSCPPSAPREEGNETPPETSPEADDTLPPLTWQEAVALLDTIPGVNVKTAEGMLAEMGLDMSRFPTAKHLTAWAGLAPGNHESAGKQYSGRRRKGNRPLATTMVQAAWSAVRTKGTFLKARYHRLATRRGKKRAIVAVARSMLVSAWHMLTFRQPYQELGDDFFDQRRKDSKINYLTRQLEKLTGGSVHVELRVSAA

SEQ ID NO: 236123 - protein, 346 aa, unidentified
MEHYVGLDVSLNLTAICIVDQTGKIQREGVVHSNPEAIATFIKSNAPHVTRIGLETGATSTWLWTELNKLGLPVICIDARHAKAALKMQINKSDRNDAVGIARIMQCGWYKEVRVKDLDSHAVKALLVSRALLVKIKRDIENQIRGLLKNLGLVIGRAKMNMFAVRATQLAEDRSELFAAVDPLLKAREAVEQQILDLDRKVLRLARNNAQVRRFMTAPGIGPVTALCFLATIDDPARFKRSRSVGAYAGLTTRRYASGEIDWTGRISKCGDKMLRSYLYEAANVLLTRVAKWSALKAWGVRLAKRSGLRKAKVAVARKLAVILHRMWIEGTEFKWSSKDAADQPA

SEQ ID NO: 236124 - protein, 487 aa, unidentified
MGCRARPVCGVSTVFISSLMVLLLATEHVWCIGGRETWLLFVGDDWAEDHHDVEVMDAAGRRLAKARLPEGVAGIARLHAMIGQWLGDDADDAAQVKVGIETDRGPWVQALVTAGYTVYPVNPLQAARYRERLAVSGAKSDAADAHMLADMVRTDSHQLRPIAGDSVQAEAVKVVTRIHKTLIWERTRAVQRLRHALREYFPAALAAFADLDAGDTLELLAKAPDPGAAARLSIGQISAALNRARRRDIAAKAAAIQAVLRAEHLGRPAVVTAAYAVSIQALVALLVTLNEQVNTLQGQVEAHFGRHPDAEIIMSQPGLGAILGARVLAEFGDDHDRYVSAKARKNYAATSPITRASGKKKAVAARFVHNDRLVDALMAQAFTSLRASPGARAYYDRQRARGSRYNAALRQLANRLVGILHGCLKTGTPYDEATAWSHHLIEAAARHSSSWDVFRAIASSAPYETTGPRLGPPGTRRQHPRRGPCCG

SEQ ID NO: 236125 - protein, 324 aa, unidentified
MVHGINEHGEVAFNRALRRAQVLAFFERLDPCLIGIEACGTSHHWARELIKLGHNVKLIPPAYVKPYVKRGKSDAVDAAAICEAVTRPTMRFVEVKTPEQQAILAVHRTRDLIVRQRTQTINMLRAQLAEFGIILPQGVYHPLRFAKDCANGEQPDLPNDAREVVADLCDQLLFLHSKILRHSRHMTQIAKCEKRVALLRTIPGVGPITASAIVATVGSGEQFNNGREFAAWLGLTPLNKSSGGKERLGHISKMGDQYIRRLLVLGMTSRIRSIRSEPEKFDPWFADILSRKPSRVAAIAMANKTARMIWAVLIRNEPYKVRTV

SEQ ID NO: 236126 - protein, 450 aa, unidentified
MAKRKKKGKTVKTLHTLQPNAAGIDIGATEIYIAVPEDRCSETVRHFGTFTEDLHQAAQWMKQCNIESIAMESTGVYWIPVFQILDRYGFDVSLVNARHVKNVPGRKTDVQDCQWLQYLHSVGLLRGSFRPGQDICAVRSLLRHRDTMVKSASSHVQHIQKALTQMNFQIHNVISDIVGVTGLAIIDAIVAGERDREKLADLTNPRIKADRQTILKSLEGDFRPEHLFTLKQALSSYRHYQQMIRDCDLEIGNHLNSFDSHPDFDETSLPPSNRSKRKSKDTEPAFDLKSHLHRLFGTDLTQIDGVSTLTGQVILTEIGPDLSMFPTANHFCAWLGLSPHNKISGGKILSSKTRPGSNRAANALRLSANALFRSKSYLGNYYRRMRSRHGAPKAITATAHKLARIIYHLIKNRKPFDETVFAEQERKHQERMKRSLIKRAKSFGLQVVPA

SEQ ID NO: 236127 - protein, 356 aa, unidentified
MSHDIKYIGMDVHKEAIVIAVLNGSGKLVMESIVETKASSILQFIHGLRGELHVTWEEGTWAAWLYDLLKPHLHQVLVCDPRRNALLKEGNKSDKIDARKLADLLRTGMLRPVYHGEHGLRTLRELGRSYRTISQDLNRVMNRIKALYRGWSIPCAGTQVYAPRYREEWLHKIEHAGVRRRAELLYQQWDGLQTLRRTLRPELWAESRKHKASKLLRQIPCIGPIRAARLIALMQTPHRFRSKRQLWTYSGLGIETRDSAQYRFVRGQLQHAKKPQQIRGLNQNHNHEMKEIFKGAATRVSCGVGPLRDFYLSLLAKGMKPEMARLTLARKIAAIALTLWKKEERFDAEQLKPQAA

SEQ ID NO: 236128 - protein, 410 aa, unidentified
MVLTRPFFSVVMGHVGDIGEPVATDIPFERVSITTYPNQRDIPTDMMEDVMSKRKQSKLELTHPNAAGIDIGAASHYVAVPHDRDDEAVREFKSFTADLNDLADWLEACGIDTVAMESTGVYWIPLYELLESRGLTVYLVNARHVKNVSGRKSDVLDCQWLQQLMSFGLLSGAFRPNDEICALRAISRQRDMLIRYQARHVQHMQKALAQMNVQLANVISDIVGVTGQKIVRAIIAGERDGGELAKLKNKHIRASKEEIEKSLRGNWREEHLFALKQAVALYDAYNDRLNECDRELEIMLGALQVHEVEPEQKKRRSNVKNTPKFDLRAHLIGMCGVDLTRIDGIEVTTALKVLSEVGADMSKFKSAKQFASWLGLCPGTKISGGKVLSGASKRTANRAAQALRMAARFR

SEQ ID NO: 236129 - protein, 391 aa, unidentified
MICVGIDVAKDKHDCFIISSEGVVLADVFTIPNNREGFNCLLGRIQACAMPGNEIKVGLEATGHYSCNILGFLLDNGLDSFVINPLHTNLYRKSLSLRKTKTDRVDARTIAAMLMSDVGLKPYTDTAYHNEELKSLTRYRFDKVKERAQLKQSVARLVCILFPELEKLVPTLHMASVYALLDEFPGAQQIADAHLTHLKAVLHDASKGRYGRDRAIELREAARASIGSRMPAKSLELRHTIRLIRELDAEIDEIESAIQQIMDDIHSPITTIPGIGTRMGAMILAEVGDFSRFDSPDKILAYAGLSPSTYQSGQLTNCYAHMEKRGSRYLRFAIFNATKYVCLWDPTFAAYLAKKRAQGKHYNVAISHAAKKLVRLIYALEKSREPYHQAA

SEQ ID NO: 236130 - protein, 409 aa, unidentified
MTFFVGLDWATREHAVCVVDGRGAVVTRFTTAHTASGMADLVARLTKLAPATELRVAIERPTGLVVDTLVEQRFAVVPIHPNVVKAARPRYSAAQGKTDLGDAYLLADLLRTDGHRFRTLTPLSDETKALRGLVRVRDDLVGQRVATANQLRCLLEQFWPGATEIFAEVDSPIALEFLDRYPTPQSASALGEKRMAAFMARHSYCGRRSARELVERLRAAPASIAGDLEAEAKGECVRALVAVLRPLVAQIATLTAAVEHAVDAHPDGKIVTPLFRSGRVCAAQILAEIGDDRGRFVSGDHLAAEGGAAPVTRESGKHRAVTFRWACNMHLRKALMTLADTTRHTNPWARAIYQRARDRGYTHPHATRILARAWCRVIWTCWQQRVPYDPTKHRAAQQFTLRVVDQEAA

SEQ ID NO: 236131 - protein, 320 aa, unidentified
MMAQNDLVVVGIDVAKDKVDACIRAFALRQTCPSTAQGHRKLVAWLRRHQVGKAVMEASGGYEREWRKVLHNAGIEVRIVDPKRVRSFALSAGRLAKNDAIDAEMIAWFAETFSEAPSQTHDAAHEDLVGLVKARQGLVELKIRLQSQSAHAAPGPVQKAHARLLKSLAAEIEKLEAAIAARVKATADFAERAEIIESVPGFAETTAANLVAGMPELGHVSNEIAAALIGVAPYDDDSGKRRGERHIKGGRRWIRNAIYMPCLGAATQNNPVIKAFYQRLIAKGKEPKVALVACMRKLIVILNTLIARRQKWNPGHYALS

SEQ ID NO: 236132 - protein, 370 aa, unidentified
MRKDTSRNKQQIRSKKERETREGFEFYIGIDLGDKNSDVCVLDQSGEVSKEFRLRMKEADFRTYFASIPRSRVAIEAGGQSRWVAEVVEKCGHEVYVSNTRKVPYIHQSDDKDDPGDACKLAELLYFKPRLLHPVQHRSREAQVDLSWIRAREVLVKSRTQLINAVRGISKAFAERLEKCAAESVTAKLAGQVPEVIRGAVAPLLETIDHLNEQIRYYDEMEEHIARERYPKYRLLEQVSGVGVHTALSFMLTIGDPERFQKSRMVGSFLGMRPKKQESGESKPQLGITKAGDMYLRKTLVNCAHHILGPNRKDSDLRRFGQRICARGGKNAKKRAVIAVARKLAVLLHRLWITGEVYEPLRNSKQSKAA

SEQ ID NO: 236133 - protein, 326 aa, unidentified
MNLPAVVLGIDIAKLKFDVCLIKENQKVKHKVFANAQRGFEQLVTWLASHQVDSLHVCLEATGSYGEALALFLHEAGHRVSIINPAAIKAFAAASLTRTKTDKVDAELIARFCLAQQPATWTPPASEVRQLQALVRRLESLVEMRVAEENRLSSGISIDAVRHSLEEHIAYLIKEIKQTELMIRGHIDNHPDLKEQTDLLDSIPGIGQTTAALLLAEIVNIKQYKSARQVAAYAGLVPRERRSGTSVRGRVQLSKIGNARLRKALYFPAMTALRCSSFFQQWASGMRERGKCKMAVIGAAMRKLIHLAFGVLKTGKPFDPNWAKTA

SEQ ID NO: 236134 - protein, 428 aa, unidentified
MSNQEIVRREQYCQIVKEITGSDQYLIVGIDVGKDKHHAFMGTAKGISLFRKLIFENDLEGFSKLLKTADQIKVQNGLSKVVYGLEPTGNYHKPLARHLIRCACNVVLVTGQAVKNNRQLLDGRWDKNDTKDAANIADLVSRARSLYYDCPAPSIIEIRGLLSLRRRLKREEHSLRMRIRNNLLAQHFPELDRFYSACESESLAIVRWFPDPDTISAMPFSEFFNLVTKTRRGVAQTLRLRKIHQLAAESVGCPIGPSVEFEADLLVEKLHQVRDQIQKTDDLIEDFCLEFAEYSYLLTIPGFGPYISARVLASIADPFRFENRKQLIKMAGYDLCAERSGKTSDKAVPVISKKGNGELRYALYQAANVAVARVDLFRTYFARLLRGRERERGIKTKMRVKVAAKMLIIAWTLMKKKQPFDPAHLDID

SEQ ID NO: 236135 - protein, 338 aa, unidentified
MTYIGFDHHKKWTQAAAIDDQGKIIREMRVLNDSSSLKGFLKGLPKPLKGVVEAGPTWGWIYDTLGELGVKMIVANPSAVRAIAEAKIKTDKIDARMLASLLRVGLIPEVYVPTEEVRSQKMLWRERIWLVRMHVRLKNRIHRLLNHYHIEVPEFSDLFGAAGRRFLEELKLPEPGNRILNAQLKLLQSYRLQIEEVQRWAVKATQGHPNRAYLESLPGFGKVFAPIVALEIDDPKRFANPAKLASYCGLVPSLYSSGGKSWQGGIGKEGNHWLKWAFIEAAWAAIRSSAYFRLVYQRLRQRKTAQVSIIACARRLCEIAYHLLKERRCYEERPLRCA

SEQ ID NO: 236136 - protein, 411 aa, unidentified
MDVLYERCCGIDVHKKMVVACLITPDATGTPTKQTRTYGTMTADLLELLDWLTDAGCTHMAMESTGVFWKPLYNLMEGALEILVVNAAHMKTVPGRKTDVKDAEWIADLLRHGLLRASFIPDRPQRELRELTRYRTSLVQERSAEVNRLQKTLEGANIKLAGVATDIMGKSGRDMLAALVAGQTDAAALARLARGKMREKLPQLEKALRGQFAAHQRFLVAQQLAHIDGLDDIIERVSAEIAERVQPFEEAIEQVDTVTGIGRRTAEVLVAEVGTDLSRFRTSGHLASWAGLCPGNNESAGKRHGGKTRKGSPWLRAALVEAAKAAGRSKKTYLGAQYRRIAARRGAKRAAVAVAHSILVIVYHILTRHEPYHDLGVTYFDERDRQAVERRLVKRLQALGYDVSLRPLSAA

SEQ ID NO: 236137 - protein, 338 aa, unidentified
MFFIGIDPHKTSHTAAVLDAHEHLVSEVRVGADRSQRGRLMAFAAGFEPRCWAIEGATGTGALLAQQLVAAGEIVLDVPPALSARVRLLDNARSDKTDAHDARSAAVVALRHSKLRTVGLEDHSALLRLLAKRHHDLVAHRTRAVCRLHTVLCLLVAGGLPKGLSAARAARELRRIRPTDQVGIERRRLAGELLAEVRRGDADLIELKARIAVAVTASSTTVTDVVGVGSIMAAYLIGYSGDVRRFPTAGHYARYNATAPIEASSGPNARHRLNPRGNRQLNHALHIVAVTQVRNDTPGRAYYLRRQAEGKTRKEAMRALKRRLSDAVYRQLLTDTPR

SEQ ID NO: 236138 - protein, 344 aa, unidentified
MDHFAGLDVSVKATSVCIVDDSGKIVREVKVASEPEALLAVLKNPAHHFKRIGLEAGPLSQWLFSALAEAGLPVICVETRHMRAVLKAQINKTDRNDARGMAQMMRVGLYRPVHVKTLRSQKLRMLLTHRQLLLSKAIALENDLRGTLRNFGLKVGMVGKVKFEARIRELVENLPDLAVLVEPMLIVRRVLREQIVILHRRLLAIVRDDEVCRRLMTTPGIGPVVSLTYRATVDIPARFRKSKSVGAVFGLTCAKYQSGEVDWDGRISRCGDEMMRTMLYEAAQAMMRSKKWSWLKAWAMQIARRRGMKKAIVALARRLAVIMHRIWVDGTEFRWTREQAAVAA

SEQ ID NO: 236139 - protein, 342 aa, unidentified
MENKVSRVSIGVDMAKDSFYAAVIYLMDDQHIICKGTRKFPNTAKGFYDFVEWGDNKVKVDNLVSYTMEATGVYYENLACFLYNSDRQVHVVLPNKAKKFSESLDNKSKTDKLDAKVLGRMGAERNLKLWNPGSKIFQTLKQLTRERETIQKDSTRIKNMLHAEAYSAFSESDVVGRLEDRLTLLNTQLKAVEKDIKSTIKKDAEVDRKVKQIEESTPGIAITTIAVIIAETFGFAAFNNMKQLTSFAGYDIVHKESGSFKGKTRISKKGNSHIRRALYMPSLSAIQHNKTLNNFYENLNERKKNGLISGTAVQRKMLCLIYTLWKNDTPFIENYQHSLNPK

SEQ ID NO: 236140 - protein, 366 aa, unidentified
MDAIYIGVDFHARQQTICYLKTETGELVIVALKHEDKEQVRAFYQQFQGPVIVGLEASGYSPWFEALLEQLGCEVWLGHATEIRRRARWRQKNDRRDAELIWELMVHQEFPRLHQPAGPSREVLRMLRYRQKLIKMRTMLKNSLQAIALQAGLAKGKQLFTAAGQEQFQAAAMSEVLQWQREHWFELLQPLNQQLLDTMVWFKAQSKDDVGIQRLRTHPGIGLLTSLCILHTLQPVSRFRNARKVAAYAGFDPVERSSAERQHFLGISKAGSRLLRYLLVEAVQTAVRHDEDLKRFYKRLAERRGRPKAKVAAARKLLIRAYIMMRDEIDYAEFRRRAVAARLARTGQGPTKVPEVLIGQPASPGA

SEQ ID NO: 236141 - protein, 418 aa, unidentified
MAAIHERVAGLDVHKTSVVACVGLKSGAKVQRECRSFETTTAGLEALLGWLEEMSCGQVAMEASGVYWRPVWNILSDGDFELVLANAAHIKNVPGRKTDMNDAMWIADLLACGLIRASFVPEQEMQDLRTLLRTRKQFVREQTRHVQRMQKTLEQGNIKLDGVISDILGTSGRRMIEAMIAGESDPQALAALADRRLKASPTVLREALHGRLNETHRFLLRTHLKQWDELDAAIVEIDRQVDAMIAGMEKAARFRMLTALLCKIPGVSKLAAITILAEIGIDMSRFSTAGHLIAWAGLCPGQNQSAGKRKSSCLRKGAPWLKTMLVQCAWAAKRRKDSYYKAQFHRLCGRRGPQKAICAVAASILTAIYHMILRGTPHQDLGADYFDRRPNEVKANRLVAQLNKLGYQVQIQPLPAAA

SEQ ID NO: 236142 - protein, 366 aa, unidentified
MNQLIRIPAARVGVDLAKRVIQVHAVDAAEKVLLSRSLPREKFLAWCAQLPPGCLVVMEVSSSAHHWARALLAMGLQPRIISAHLAAPYRTQGRRGKNDANDSAAICEAASRPHMHFVPVKSVEQQSLLAVHRLREGVKTDRTACINRIRGILLEFGVAVPTGSRALQGSLDDILEDASNELNALTRWTLQRAQAQWRELDAHLQWCDERLAAHARDNAQVQRAGQLMGVGPVTASAAVATVGDFKQFRSAQQFGGWLGLAPSQNSSGGKARLGGITKRGDIYLRTLLIQGAKSVVNTAHLRDDPISRWAAQLRDRVGWQKAVVALANKNARILWAVMSRGIDFDPHHRSVKPGDEFPSPQACAMT

SEQ ID NO: 236143 - protein, 421 aa, unidentified
MKPQAPEAFAAFVGLDWADAKHDVCLQAAGSARREFLVLEHRPEAIEAWVRTLRTRFNGQLVAVCLELNKGPIVSALRQYDFLVLFPVNPLTLARYREAFTPSGAKDDPTDAELQVELLLKHRDKLTPLTPQSPAMRALEQLVEHRRRLVGDKVRLTNRLTSALKNYFPHVLQWFQEKDTAIFCDFLGRWPTLKAAQLARRTTLEDFFRAHHVRSADVITTRIQAIKSAMALTTDEGVITPNALLVQALVAQLRVTLQAIADFDTAIAQRAQCHPDFPLFDALPGAGAVFAPRLLVAFGEQRERYASAEDLQKYAGIAPVTERSGKKAWVHWRFRCPTFLRHTFVEWAAESTRHSFWAQVYDQQQRDKGKAHQAAVRALAFKWIRILYRCWQDRTPYDESTSLQALHRRGSSLMQNLAKAS

SEQ ID NO: 236144 - protein, 364 aa, unidentified
MDVHTTNYTLCCYSMEDDRFFAEVQVEPDAKNILKYLARIEKQQSRDCRIVCGYEAGCLGYSLYHQLHAHGIACVILAPTTMMTKPGKRIKTDRRDARLISKCLAFHTYSPVYIPTEVDDAVKEYIRMRDDANSALARVKQQIIAFCIRHGKIHDGKSYWTNKHLEWLSSLDLGNKILSEVLQEYLIRYYQLREQVDMYDMRINELAQAEPYRQKVEKLGCFRGIAAHTALPFCVEVGDFRRFATAQQFASYLGLVPGECSSGDKQQYTGITKAGNSHLRKLLVETAQVFGRSATKSGKSVALKERQAKCDSLTVAYADKANARLKKKYFKIVMRSKVNIAKTAVAREMACFIWGMMTDNISCA

SEQ ID NO: 236145 - protein, 465 aa, unidentified
MTKKRQSQVRNNLRVPGSRSLTLLNPDAAGIDVGASEHYVAVPPERAEQPVRRFGAFTEDLHKLAQWLLQCGVRTVAMESTGVYWIPLYQILEDYGLAVKLVNARHVKHVPGRKSDVQDCQWLQQLESFGLLSGSFRPEAKICVLRSYMRQRQMLISHASRHIQQMQKALTQMNLKLHQVLSDLSGQTGMRIVRAILQGERDRLKLAALKDPRVKSSLGTIAKSLEGDYRAEHLFALRQAVELYDYHQQKIAECDQAILKEMQALETRAAPDSMPPTPLKRKKRSRHNPLPFDGQAELYRIMGVDLTRIDGINEATGQLMLSELGLDLCKKWPSEAQFCSWLGLCPNNEISGGKVLRRGTRKVINRVANALRMCAESLLNSKSALGAYARRLRAKRDSKIAISATAHKLARLIYRTLKYRQEYSDIGQAQYEAKYHANAIKSLQKRARQLGVQVIDSNPPTVVVP

SEQ ID NO: 236146 - protein, 405 aa, unidentified
MITAGIDSGRRIISVSYVEDGEEIAYKEYENSFTGYRELEEDMRDTGVEVVCIEGHGDSSRQAAVYLYEKGYKIYEINPLMLLKLKESMTEKKTDHIDAYVCGMFPFIRKDMKPLVLSIRVQDLKRLVRLYEKISKQVVRYKNQLHGELHQVFGCKYREVFPRINRTSLAFFSTFSTPEEVKEADIEEIHEVLKAGGSCMYRGKYGRDKAARIKEVLTEGYDEELKLSTDVGGTMIKTLCRILLSLTKEKEEIKRKIERNVEELYPGYKEHFRGIRLSSLRFGQIMAEIQDIDRFPDDGHLASYAGQAPVQKQSGDRNMMKNKKKYYNRHLAHVIHLLACSNVQKGAKYHGYYSILKKKFKKPLRALKTIKRKLVRDLYSGLVNYSSNPHQTDTLSNRSYSLTGS

SEQ ID NO: 236147 - protein, 332 aa, unidentified
MSIIGCDLHTRYQVIAMLDTETGEVATRRLEHEGGEAKAFYAGLGKRALIGIEATGYTQWFERLVGDLGHELWVGDAAEIRARAVRRQKTDTRDAEHLLDLLLHQRFPRLWIPTPEERDYRQRLKHRDKLVKMQTSVRNQLHFLAMSQGVCRKRRLWSTRGRRELEALPLGQWASIRRQELLALLDGLGPRIEEMDRAVKAEALRRAEAVRRMEQQGVGPVTALAFVLTVGPVERFPSSRKLVSYLGLNPREDSSGGHQRLGHISKQGNEMLRWLLVEAGHTAARLDPELGRVYQRLKFRRGGSVAKVAIARRLAVRLYWKLRNGTAGSHVQ

SEQ ID NO: 236148 - protein, 400 aa, unidentified
MISVGIDVSKEKSTVCILKPYGEVVSRPFEVCHVEKELSELTSMLLRLNDDVRVVMEATGIYHLPVLCYLKEKGLFVAVVNPFEMKEYRCQGLRRVKTDKQDAITISNYGIDHWYKLKNYEAEESVYAELKLLGRQYRHYMRMRVESVLELTHLLDYTMPGIKTLLKGWNETNGKDKLGDFAEEYWHYDNITKKSEEQFIKSYLKWAKEKGYHQSKDKAVKIYALAKEGIPTVSSDTPSTKMLVQEAVRVLREVDNTLMTILTQMQALAKSLPEYPVVRAMGGVGNVLAPKLIAEIGDVRRFHSGKALIAHAGIDAPPYQSGQFIGTERKISKRGSSSLRKIGYEVMRCLKTHKEPEDAAVYRFILKKEKEGKSKRAAKIAGLNKFLRIYYARVMEVYQK

SEQ ID NO: 236149 - protein, 516 aa, unidentified
MAPVLAIASLVANAVDTTRLFDPVGEIFKPFVTGPNWIVVCPARRTAMAAEKKLWNRKERKELARQLQSANPGLEIVHPHAAGIDVGNQAHYVAVRPDRDPEPVRRFECFTADLYRLADWLKNCGVKTVAMQSTGVYWIPLYDILEERGFAVYLVNARHTKNLPGRKSDVQESQWLLKLHTYGLLNNSFQPSSEIRTLRTYWRQRAEHVAGAATCIQRMQKALTQMNLQLANVISDLSGLTGQRIVRAIIAGERDAQRLAGFRDPRVQASQEEIAKSLEGNWRPELIFLLQQEMAMYDTYQQRIAECDQQLHKHLTSFADHAHQVRSQSAQGKAEGKKAKKPAAKNAPRFDLSSELERITGVDLTRIHGIDVMGSQTILSEIGLDMGRWKTEAHFASWLGLCPDNRTSGDKVLRRGTRHVVNRAALALRMAANSLLRSQSYLGAQYRRLRTKLGAPKAITAMAHRLARLVYRMLKYGQQFVDKGVEYYEQRYRNQQVQLLQKKAAKLGLQLVQAQT

SEQ ID NO: 236150 - protein, 355 aa, unidentified
MVMLAENYEFVIGGDPDRDTIDLAVLDTSAGRVQAHLADSADGPGYDRMLTWAGEHAPGRRIWALEGTGSFAAGLVVVLLDAGETVVEVGALKRARGAKNDRIDAIRAARQALARDEQGAPRAGGLREALRMVFACREGVLASRTKAINELKSLIVVAPEQVRAELRGRSLAVQLTRIEALQAPTAAPVELRLSVFSLQSITARIRFLSTQLAELDPQLLSLITQHPAGPALLAEAGVGPIVAAQLLISWSHHGRVRDEAAFASLAGVSPIETSSGQRSRHRLNRGGDRALNRALHTVAITRLRCHPESIAYEIKRTAQGKTHRDIRRSVKRALARRLYRRIEAAIRLENTSVAA

SEQ ID NO: 236151 - protein, 339 aa, unidentified
MIASPDYVSVDVSKQHLDLAMAETPVLRIPNTQAGVRRLIVRLGTLRRPHVVCEATGSYTRLMARELAEHGIALSKVNPRRVRDLARADGQMAKTDAIDAQAILRFARLMQPQPDPHDPYALELTDLVRRRRQMVDMLAMEKQRSEHPEGQTIKASIKAHIDFLSTQIAAIDKQITEHIAQHAGLHRRAELLASIPGIGRVTAAVLIAEMPELGSIGNKQAAALAGVAPFVHDSGQMRGQAHIAGGRLSVRCALYMATNLSHPRQPTHQNLLSKAPQPRQTSKACHRRRHAEAAHHRKRHPRKRRTLDPKPRLTSNTVAQGGGEPNLPELPVSPSRAAA

SEQ ID NO: 236152 - protein, 344 aa, unidentified
MSNLDTCGIEVSAKELLVRLRRQGELEPLRNFTNTPEGREMIIRYLRRAGRVVRVCLESSGLYGLDLALALSGQEGLEVMVANPRAVRHFAQAMMKRSKNDQIDAGVLEQFALPMPFKPWQRPSVAALALHALARRLRELVEMQTAEKNRQHAAGVSKAIPAVVRRDLARSLRAQERAIERLTRQARKLIAQDSRLTERFELLDSVPGIGETSAVQLLGELGVLAPDLEARQWVAYAGLDPRQYTSGTSVHKKPRISKTGNKHLRHALFMPALVAVQHDPHLRAFYQHLLAQGKFKMQALVAVMRKLLHALHAMFKTHQPYDGSKLFRLNTDAAQEVTHVLVAS

SEQ ID NO: 236153 - protein, 368 aa, unidentified
MQELITGFVGLDAHAQSTAIAVAEAGRAAPRFVGTVGPRIAELTKALGKLGEPHSLYGVYEAGPCGYALARELIDLGYRCEVVAPSKIPRRPGERIKTDRRDALNLAGLARAGELVSVTIPDERDEAIRDLSRARVDAVRARHKARQQLKALMLRHGRRYSGKTSWSAAHERYLATVSFAHPAQDIAFTEYRQAVGEGAARVQRLSESLTREVEHWRMHSLVSAVMTLRGLDLVAATTVVAELGDLRRFAHPRELMGYLGLVPSEHTSGSKRRLGAITKTGNTHVRRVLVEAAWNYRYPARISPALQVRQERQPPEIRAIAWRAQLRLNHRYRRLKARGLQHNKICVALARELAAFVWDIARHVTASP

SEQ ID NO: 236154 - protein, 328 aa, unidentified
MGVAIGVDTHKGSLAAAAVDGLGRILGAREFRNDPAGHRALLEWARGQGEPRTIGVEGSGTYGAGLARVLASAGEEVREVPATLTYRERRRKGSQGKSDPVDAVAIARVVARDGDLPSPRRVQALQDLKLLSDHRDQLVRSRTQVANRIHHDLVVLRPGYERSVPNLVGGRHLSQALSLLRGDPSVRAQLVRQRIGELRRLGREIAQTKAHIARKVKESGTTLTELQGIGPAIAARFLGEVGDVARIRSKPAFAAMAGTAPLVASSGLTHRHRLNRGGNRQLNYALHYMALVRYRSDEETRAYIERRRAEGKSFKEAIGEHGCRERAR

SEQ ID NO: 236155 - protein, 362 aa, unidentified
MNRNTGMNAGQIIGTMGGKQVVGLDIAKHVFQLHTVDMSTGEIANVQIKRAKVLEHFVNKPKSLIALEACGGAHHWARELTALGHTVRLLHAKIVRPFVSGNKTDATDARAIWLAVQQPGVKFVGIKTAAQQATLTLHRQRELLMKMRTMQTNALRGLLYEFGATFAQGRKAMFKDVEQTLEDLSAQLPQMVRDSLREQVARIKAMSDDILTIEKRLGLQLKADPHMQRIAQIPGVGLLTATAAIATMGEASAFKSGREFCAWLGLVPKQTGTGGKVRLGGISKRGDTYLRTLLIHGARSVLAHAKEPGPWLAQIQARRPANVVIVAQAAKMARTIWAVTAKEQSYQRGFQSVRPNVSVQAA

SEQ ID NO: 236156 - protein, 339 aa, unidentified
MKLTPVGVDIAKNVFQVHYIDAETGEVVNKPIKRAAFLEYFANKGPCLIGMEACGGSQHWARALSMMGHQVRLMAPKFAKAFNIRNKNDAADAQAIWLAVQQPGKSVAIKTEAQQAVLALHRLRQQLVKFRTMQINCIRGLLGEYGEVMPQRRKSFDTSIPAILERIAERLPAVLVDTIREQWRELSKLDEQIARIERRLQQWMSEDKGVQAISAIPGVGLLTATAAVATIGDARTFKSGREFAAWVGLVPRQVGSGGKVTLMGISKRGDTYLRTLLVHCAWSVYTHSKMRSAWFEQLVKRRPTNVAIVALANKIARTIWALLAYGRQYQPNFAGTKPA

SEQ ID NO: 236157 - protein, 341 aa, unidentified
MSDFSYFCGIDLAKNHFSLHAVDQNGKVILHKSVTRSKLLTTIANMPLMRIGVEACGGAHYWARTLNKLGHDARIMAVKYVIPYRTKGKNDLNDAVAICEAVQRPSTRFVPVKSPEQQAILSVHRMREHWVRERTALMNRMRALLSEFGLIIPVGRSSLMKHVPLMLEDAENELPHLARTVIADAYHHLGELNQRIADTEQVFESFAKVSDNVQRVMKVRGIGPQTATAILASIGNGSQFDKSRDFSAWLGLVPKQYSTGGKPRLGRITKHGDKYLRTLLVHGARTVIANLGDKQDKLSQWCRGVLERRGMNRAIVALAAKNARIIWSLLHNQTEYENYAA

SEQ ID NO: 236158 - protein, 402 aa, unidentified
MNAVGIDVSKGKSMVAIMRPFGEIVSAPFEIKHTASDINSLVELINSVEGESRIVMEHTGRYYEVLAHQLSEANLFVSAINPKLIKDFDNDSLRKVKSDKADAVKIARYALDKWQNLKQYSVMDELRNQLKTMNRQFSFYMKHKTAMKNNLIGILDQTYPGVNTYFDSPARSDGSQKWVDFASTYWHVDCVRKMSLNAFIDHYQNWCKRKKYNFSQSKAEEIYGKAKELVPVLPKDDITKLIIKQAVDQLNSASITVESLRTLMNETASQLPEYPVVMAMKGVGTSLGPQLMAEIGDVSRFTHKGAITAFAGVDPGVNESGSYEQKNVPTSKRGSSNLRKTLFQVMDALIKTHPQDDPVYQFIDKKRAQGKPYYVYMTAGANKFLRIYYGRVKEYLSSLPES

SEQ ID NO: 236159 - protein, 467 aa, unidentified
MSKPSQSPKRRRRQKKELPQDIPKVDPLEQINMNAAGLDIGDDEIYAAVPEGRDKEFVRVFGTFTTQLHSLADWLEACEVTTVAMESTGVYWIPTYEILEERGFEVYLVNARHVKNVTGKKTDILDCQWIQQLHTYGLLRASFRPPEDMAALRSLVRHRANLIRSATAEIQHMQKALQLMNLKLTNVVTDITGLTGMCIIRDIVSGVHDPEALAKHRDPRCAKGQDEIALSLHGNYKAEHLFELKQALEAYDFYQRQIQQCDEQIEVVYNAFEPQVDIDERPLPPSRKKRRKPKDNEPAFDLRLYLYQMAGVDLTEIDGVNSLTVQVILSEIGTDMSSWPTVKHFTSWLGLCPHNDKTGGKVIRTHTRKTQSRAASALRMAASALSHSHSALGGYYRRMKAKLGAPAAVTATAHKLARIIYAMLKNQTEYQDPGEGYYEEQARQRAIKNLKRKAKQLGFQIIGETAA

SEQ ID NO: 236160 - protein, 346 aa, unidentified
MEKISRIGMDTSKNVFQLHGVDETGQVVLRKKLTRQAMVLFFEKLPPTVVGIEACGGSHHWARLLGSFGHRVKLVPAQYAKPYVKRGKNDAADAEAICEAISRPSMRFVPVKSPQQQSVQMLMGMRQRLIVRRTQLSNSIRSYAAEFGLVAARGLVKLEPLLARIEQEPDLPALARDLFRIHAAEYAQLQMQLRKIEAMLMVLHRENEVSRRLAQIPGIGPIGAMLLTARVTDAKAFACGRNFAAWIGLTPKNHSTGGKTRLGGITRAGDEALRSTLVVGATSVLRHVRSGRGYASPWLVGLLKRKPPKLVAVALANKIARIAWKLMVSGQCYNPNYGVAVTMATV

SEQ ID NO: 236161 - protein, 338 aa, unidentified
MYYTGIDLHKKTCFITTVDEEGKTVHKAHLENTEGSILSYFRVLQGETKIVIESMASWYWLYDLLTEHGFKVVISNPIKTKAIASAKIKNDRVDSHMLSQLLRVGLICTVYVSTVKTRQLKELLRHRQRLVRDITRMKNRIHILLMKNNYQVPCSDLFGVQGLKYLQDISPPDYQREQVEIYLYLYEQIREKVGPLTKKIREMAQEHPIAKLLMTIPGIGPIVAMFIVAEIEDLGRFRSYRNLASYAGLVPSLDASGGKERRGRITKQGSPYLRTALIEAAQAIARMKNRRLNLFFRKRIVKSGYQKAIVATAHKLLQYVFYVWKNQTVYREEYPVCA

SEQ ID NO: 236162 - protein, 357 aa, unidentified
MGKASENLARVTRIGLDLAKTVFQVHGVGAEGEVVIARKLRHRTMLEFFGRLASCVVAMEACGSAHHWGRQLVALGHEVKLIPPAHVKPYVRRNKTDAADAAAICEAAMRPGQRFVALRSIDNQAALMRHRVREQLVGQRTALLNALRGHLSEIGVVAPQGAQHAYRLKRMLADGADENGEIVIPERVRVPLAPLAAQIDALDQSIAAIDDKLIETVKADEKARRLMTIPGVGPVIATAVVATVGEVASFASGREFAAFLGLTPRQRSSGGKERLGRITKMGDRYLRKLLVVGATTVLHHATGHNDPLRRWARQMLERKGGRAGFKLTAVALANKLARIVFAILRSGEVYDDRPVPA

SEQ ID NO: 236163 - protein, 414 aa, unidentified
MRVVYPRCAGIDIHKESMTVCVIVDRQDGSAPEYQKRKLATHSEGIRELCELLVRNEVTDVGMESTGVYWKPVWNALEGKWGLHLCNPQHVRAIPGAKTDMRDGTRVGELLAYGKLPESFIPPQWQRELRDLTRLRARMSQEVTREGNRILKVLEDAQIKLDCVASDALGVSGRQILKALLEGTTDAGELAELAVGRLKKKKKELRQALEGNFTDHHRFQIRLLLQAVKEYEDKIVQLDGRIEQYLEPYEEIMTRLDKIPGVDRLGAATIMAEIGPDMSHWEDSRKLANWSCLCPGNCESAGKRLSGRTRKGNRWLRRVFCQMAWAATRKKGSYFKTQYRRLAGRRGKQRALLAVAHTLITVVYHMLREPQLEYRELGENYFDQRDAEQTKNHLTKRLAKLGYEVILKPVCERT

SEQ ID NO: 236164 - protein, 269 aa, unidentified
MIESKLTVIKYFIGIDVSKATFNYCLRYAGGPVLNGKVANNVESIKEFILTLKEIPGFKLGYTVFGMEVTGVYGLILIDTLTKMKAKVVVEPSMRIKNSLGIIRGKNDKLDAARIARYLIKNLQELKLWVPHRKIIDELSSLSTLRERMVKVGVIITTPLNEDINFVDPAISLTNINLCNPSIIQIEQLIRNIDIKIKALYTNDDHCNRLMKIMLSVMGIGEVTALQILVHTNEFKTITTARTFASYCGVAPFEHDSGTSVKKRARVSP

SEQ ID NO: 236165 - protein, 374 aa, unidentified
MVDDIALYVGLDVSKEKIAIGLAEAGRKGEVRYYGEIANRADAVRKFVDKLAGRHGRLCLCYEAGPTGYGLYRQLCDLGHECLVVAPSLVPTRPGPQIKTDRRDAVALAALLRAGELSSIWVPDETHEAMRDLCRAREAAVSDLRRARQHLLSFLLRHGRVFEGRSHWSKAHRNWLATQRFDHRAQQIAMEEYIRAIEQIEERRDQLTRQMLELLQDWSLNPIVEAIQALRGVAQISAVTLVSEIGDFRRFSNPRQFMAWLGLVPKEHSTGASVSRGSITKAGNTRARRMLVEGAWTYRLPARVSQEILKRTEGLPEAIRATAWKAQVRLCQRYRRMQASGRPTNIVIVAIARELAAFVWAIATTVPITPTKAA

SEQ ID NO: 236166 - protein, 345 aa, unidentified
MELHTIGIDLGKTIFHLVGLNQNGEVVVRKKFSRKQLLHFTANLQVKRIGMEACGGSHFLGRALREQGHEVRLMPAQYVKPYVKTNKSDYIDAEAIAEAVERPKMRFVPIKSDDQLDLQSLHRVRERWVMRRTAVINQIRGLLLERGITLRQGRRHVDEALPGILEDASAKLSGAVRSLLAQLRLELDHLQMRIDEADAVIQKIAGENEACRRLVAIPGIGPVTATAIIAAIGNGAAFKKGRGFSAWLGIVPGEYTTGGKQKLLGISKRGNSYLRRLLVQGARAVLQQSAKQSSGLSAWLAQLTTRTHSNVAAVALANKLARMAWAVLAKNEPYRPPMLAAAATT

SEQ ID NO: 236167 - protein, 313 aa, unidentified
MPEEVFIGIDVAQDRLDVHTLPQDTQFSCSNDPKGIQSLIERLKKEAPLVIVMESTGGLEKDTVVALTIASLPVAVVNPRQVRDYARGIGKLAKTDKIDAYVLASFAETNKVKPKPIPTESQQILKDLVRRRRQLVDLRAGEKNRLRRVRSQPVRDSILVVIQTLDEQIRNIDRDLGDILKNSPIWRETEELLKSFNGIGPVTARTLIALLPELGYANRQQITALVGLAPLNRDSGKKRGKRMIAGGRADVRNALYMAAVSALKHNQKIKSFYNRLIQAGKPVKVALTACMRKILIILNAMIKSKRSFGELSA

SEQ ID NO: 236168 - protein, 382 aa, unidentified
MQASTTVTPTAGHCGTIFVAIELSQKTWLVTLHSPDRDRISRHKLTGGDHGGLLALIEQVRARAAGKLGAVPAVTSCYEAGYDGFWLHRLLEADGIRNFVFDAASIAVEQRARRAKTDRIDGELLLRTLMAHLRGEPRVVRIVRVPSLAEEDARRASRERDRLITEQTAHTNRIKALLRLQGMAVGNPRRGDWLAWLQRQRDRQGQSLSPQLLAEVTREHARLMLVRQQLAALEQAQAARTLSLPAPMAERQDRLLRIKAIGTTFGATLVNELFYKNFRNRREVASYCGLTPSPWKSGSIDREQGISKAGNHRARHKAIELAWLWLRHQPDSALSQWFRTRTASAGKRAKRIAIVALARKLIVALWRYLTTGLVPEQATMKA

SEQ ID NO: 236169 - protein, 420 aa, unidentified
MQQPPPVSNATPRVVGLDVHPDSFTASIVEGPTPLSANVLKTFNKVPIAQLGSWAAKNTLPTDTLVLEASGNSFEAVRRLRTAGRTPLVLESGFIGRLKEAHANNDRISAVRIARAYLSGNARTVWVPDESTQRRRDLFHAHRKAVRGVTAANNSLVSYLSDNGVRLGRTLLKLAPAARRESVLGARAWNPTQLQVLEIHLLGLEHQIELEARLSSLLAQQVLEDPRLLELTRLCGIRDVIAFAIGAIVGDVTRFPSPRSLVKYVGLNPAFDDSGEKVWKGGIKGHGRKDLRSLLIEAGHSILRSRNHPHGEWGRKLLARKGEVAVVVAALARKLITQVWYSLQGRTEPMVEPTKSMSVKIGRIVSKVGKDGLARLGLGARDLRQQAFETLRTRTAVREYLLRDDPSLPDPGTSSSVPAA

SEQ ID NO: 236170 - protein, 387 aa, unidentified
MIQVSHEAFAAFVGIDWADAKHDGCRQVAGSAKRDYCQREHTPEAIDAWGTTLRMRCHGQPVALCLALNKGPLGSALRTYDFLVLCPIHPLTLARYREAFTPSRAKDDPTDAALQLALLLTQRDTLQPLNPQSPTMRALAQLIAPRRRVVGDTVRITNRLTSPLKNYCPHVLHGLQEKDTAIFCDFLSRWPTLKAVPLARRATLATFFRAHHVRYAEVIAQRLQAIKAAPPLPTDAGVMAPHALLVQALVAQLRGTLQALADFDTAIAQRAQSHPDFPLFQALPGAGPVFAPRLLVACGEQRERYACAADLQKYAGSAPVTERSGKKSWVHGRLQCPKFLRHTFVEWAAESLRPSFWAQVSYQQPRDKGKAHQAAVRARAFQWIRIL

SEQ ID NO: 236171 - protein, 346 aa, unidentified
MTRPSTAAVATLGIDIGKNVFHLIGLNKRGAITLRQRLSRRQLEARLTNMPPCLVGMEACVGAHHLGRQLRALGHDVRLMAAKYVRPYSKGQKNDYRDAEAIAEAVQRPTMKFVAIKTVEQLDLQALHRVRERLVSQRTGIINQIRAFLLERGIAVRQGPRPLRSELPLILTMDKLSSRMLHVIEALAADWRRLDERIEALSSEIAALAEDDASCQRLMTVPGIGPIISSATVAAIGMGDLFSKGRDFGAWLGLVPKQMSTGGRPLLGRISKRGNRYLRVLFVQAARVLLRLRPETWERHGLKRWIEAAATRMHHNKLAIALANKLARIAWSVLHHGRDFQMSKLR

SEQ ID NO: 236172 - protein, 388 aa, unidentified
MNAGADKSEPLTAIHTHLGAIFVSLELSRSSWLITSLSPGGGEKMSKHSVPGGDFAGLMQRFAQLQEKAKLRTGQSFRIIVVQEAGLDGFWIHRALQNEGIESHVVDAASIATSRRRRRAKTDKIDGETLVRALLAYKRGEPRVCAMVKVPTPDEEDRRHLCRERKALIAERVRHVNRIKGFLFSQGVSGYQPLRRDRRQRLEELQTGDGRTFPQHLKALINRELDRLELLLKQIKTVEAARDALLAVEQTAKPAPAAMLLAIRGIGPEFAAILWSEGLFRHFENRRQVAAYAGLAPTPWQSGAVDREQGVSKAGNPRLRTTLIQLAWLWLRNQPRSALSVWFHERVSRNGGRLRKTTIVALARKLLVALWKYVTAGVVIEGVTMKVA

SEQ ID NO: 236173 - protein, 428 aa, unidentified
MKIEDTIRREQFCQIKSEIRGSDQHLVVGIDVAKDKHHAFMGSATGKSLLRKLVFENNLEGFRKLQERSEAISIQNALSKVVFGMEPTGNYHKPLGAYLIRCGHHVVLVTGKAVKNNRELLDGRWDKNDIKDPANVADLICQGKCLYYDYPSASINQLRELLSLRRRLKKEEHSLRMRIRNNVLAKYFPELDGFYSACESESLAIVRWCLDPSTISCLEFDEFFSMVTTTRRGIAQKLRLQKIHRLAVESVGCPMGPAAEFEATLLVDKLKYVRQQLKEIAALMEDFCMEFSEYSWLLTIPGFGPYIAARVLASISNPWRFDSSNQVIKLAGYDLGANRSGKTSNEAVPVISKKGNSELRYALYQAAHVASSRNPDFIRYYTRMLRGRERERGIKTKMKVKLAAKMLKIAWTLMRKQEVFDPNHLIIE

SEQ ID NO: 236174 - protein, 313 aa, unidentified
MTKRVDEIIFGIDVSKDELVIFCWQTEQLQRLPNEAAAIQSWLKSLNGPASMAIEATSDYHLAVIDQAHALGHTVYLVNGRQLAHYREAVNLRHKSDPDDAWLLARFLAHEGAQLRPFAPHSRNAQELWQFIKRRAVVVETRKQLQQSLAGTAIGCQALMTQMRALLRRIERRIRELIRKLGWNDDYQRCLTIPGVGPINGAALVCAYHRGAFAGSDDFIAYLGLDIKRRRSGHFKGQEKLSKRGESELRRLLYCAAKPARSYPPFERFYQAQLEKGLSKTAANMILGRKIARIAFSLLTKQQTFIKQDIAYS

SEQ ID NO: 236175 - protein, 344 aa, unidentified
MKLSTVGIDLAKNVFQIHGIDQHGKVLVKKQLRRDQMATFFVNLPPCLVGIEACGSAHHWARKLQAMGHTVRLMAPQFVKPYVKTNKNDAADAEAICEAVSRPNMRFVPIKNIEQQAVLALHRVRQGFVKARTAQANQIRGLLGEFGLIVPQGIGYIASRVPELIEDAANELPGPFRVLVQRLLDHLKDLGRQVEELETQIQAWHRASDLSSKLAQVPGVGPITASALVASIGNAKNFESGRQLAAWLGLVPRQHSSGGKSNLLGMSKRGDTYLRTLLIHGARSVIYRAGQKADPCSWVNAVVQRRNKNVAAVALANKNARIVWALLTHERRYETGYTRVIETV

SEQ ID NO: 236176 - protein, 351 aa, unidentified
MAEYISFDSHKHYTWAEREDVQTEQRRTCRINHAPGAIREYLKACEPGTPVALEATANWYWIVQEIEEAGLAPRLVHPRKAKLMMGMTNKSDKLDAHGMNVLQRNKTLPTVWIPPAEVRDLRELTRTRMVLAHHRTRLKNRITATLAKYAASLTEYSDPYGVKARQAMQERIAQLPTQTRFVTGMLLQQLDFVVGQIEQMEGRLKPLIQVTPEMEWLMTLPGVALILGAVTAWEIGDVTRFATAERLASYSGTTPRVWASGDKVRYGPLRCDVNQYLKWAFAEAANSVAVNHERCPGRHVSQLYRRLRARKGHSKAIGAVARHLAEAAWHVLSRREPYRDPALKSGPLREV

SEQ ID NO: 236177 - protein, 368 aa, unidentified
MKMYVGLDVHSKQCTFAIQDGDGKLQARGEFETTIEGIAGWVKKHSLDQQTTVGMETGLITPFVASQLRANGIENVVVINAVEVRAKARRRTQKSDTSDAFEICDGIRRGIYVSIVEVPDAATQKLRETLATRRHFVSAATSEVNAIKSTLRKAGLGHLYRTLDSEKAFERLLAFPQINVELRSTIEAHKRVWDALRKEVKTLDKQLEQMHAAMSEQVERLRTVPGVGPIVALTALAYFARPERFKNAKHAASYTGLVPQTYNSADRECYGHITKQGPRELRNMLCESAQHAAKKGHPLNPLYRRVRNKKGHKVAVIAVAHRLARILWSMMKKETEFEITRYIGTDSKWDQLLDGDELTAPHQEAVKH

SEQ ID NO: 236178 - protein, 326 aa, unidentified
MSRTPTAGDNTINSTLFVAFELGWKTWKLASTVGLGQKPRISTIPAGDLEAVVKEISKALERFDLSADSRVVSCYEAGRDGFWIHRFLTHVGVENIVIDSASIEVSRRSRRRKTDRLDAIKLVTMLVRWDLGEKPWSVVHVPSVEGEDSRQLHRGLKTLKKDGTRHINRIKGLLANHGIRINTIPKDLKPWLEEQRLWDGSPLPHGVAVRVLLEFDRLRFIRSQILVVEIERRRLLSERKTKDAQIAHKLHRLGGIGVNGAWTFSTELFATREFKNRKQVGSLVGLTPTPYDSGESYREQGIDKAGNKWVRSMAVEIAWAWLQFQP

SEQ ID NO: 236179 - protein, 409 aa, unidentified
MEILYPRCAGLDVHKETVAVCVLTPGPGAEPSKQIEQFGTTTGELRRLRDWLRESGVTHAAMESTGVYWKPVFNILESACQIILVNARHVKQVPGRKTDKADCAWLASLLRHGLLQASFVPELEVRELRDLCRGRTTLVRECVQVGNRLRKVLEDANIKLDSVASNTLGVSGRDMIGALVRGCNDPAELAELARGRLRAKLPELEQALEGQVTAHHRFLLRELMRQLAFLEGQVARFEKQIERHMPPFEWAAELLMTMPGVDRTAACALIAEIGADMSRFASSRHLASWAGLCPGNNESAGKRRSGKSHRGNRWIKGLMTEIAWAASRKKDSYSRAQYRKLAGHRGKKRALVAVANSLLQAAWYMMTNRQSYHNLGADYYERLNRKDLERSLVRRLEKLGHKVILQDAA

SEQ ID NO: 236180 - protein, 419 aa, unidentified
MAFKILRKNCCGLDIHKTWIFACIGITDSNGRTEYKQARFSSFSNGLRDLADWLTKSSCSHVCMESTGKYWIPVFNILEKTCWVTLAHPKYTKPQKGNKTDRKDAKWICDLYMCGMVKPSFIPPPDIRQLRDLMRCRVKLTNMLTGEKNRAQNCLTVSNLKLDDVFSDVFGKSSRSIIQYILEHPGEQFDVTPFIHRRCKHPVEEIQAAVDGVVSREQAAKLKECLLHIDQLNAHRERIEAEILRLAEPYPYQLELIRTVPGFAAAPLTAVALISEIGVDMSVFPSAKHLASWAGCCPRNDQSNKKVKSTRISRAGCYLKPLLVQIANAVIKSDRHPECRERYRRIKARRGHKKAIIAVCRMLLTAIWNILSKLEPYSAKGYLADKLTEHSVVISKAEGLALLRKRGYIFKDELAVESG

SEQ ID NO: 236181 - protein, 418 aa, unidentified
MPDDLSWFVGVDWASAHHRACLLGGDGTRVAERDFTHDGAGLTELCAWLLTKTGASATTVAVAIETPRGPVVEALLERRFAVFSLNPKQLDRFRDRFTVAGAKDDSRDAEVLASSLRSDRRAFRRLSVDDPLVIELREWTRIHDELTQERSRLANRVRDQLWRYYPQARELSDDLAADWFLDLWQQVPTPAQAARTSEKTIARILKQHRIRRLDAGTVLRVLRAQALSVAPGTGEAASAHIRTIAARARLINTQLKEAQRRLDELCGAIAAAAEASPGQICEQRDVVILRSFPGLGRITLATLLAEACEPLRRRDYHALRCLTGAAPVTRRSGKACFVVRRRACNKRLAQAVFHWARVAAQHDPTSRNRYVEQRRRGHSHGRALRSVADRLLYVLCTLLERQMLFDRNFQAPQMAQAA

SEQ ID NO: 236182 - protein, 390 aa, unidentified
MDVLYQSCAGIDVHQATVVVCILHGPLTSTRPKREMAQFDTTTKGLKACHDFLTQFHVEAVGMESTGVYWRPVWHELCDDFELILAQPAHMKAIPGQKTDKKDAHWIAQLTRIGLLPRSFVPDETIQELRELTRQRKHYVESRNRETNRIHKILQSGGIKLTTYIEDIMGASGRNLLQLLIDETPVTPRMIHQSVYTSLKRKVPQLLEALDGYFSAHHRFMLGQSLEIYDFYQKQIDCLEERMNGYLNLYERPVEILDSIPGMDLITASVIIAEIGVDMSQFPTAGHLASWAGLCPGNNESAGKKRSTKIRHGNSYLKRCLCQTVFAAKKQKGSPLAERYYQIQSRRGPQKATIALAHQLLKIAYILLKENLTYQEFVLQKKATRDEPVA

SEQ ID NO: 236183 - protein, 474 aa, unidentified
MAIRKSPRPVRSRPRPPAVEPDLPVQHAHAAGIDVGDATHWVCVETTPDGTDPVREFPAHTPGLRDLVAWLRHCGVTTVALEASGAYGHVLFLTLVEEGFAAVMTSPAFTRQIKGRPKTDRRDCQWIRRLHAHGLLPSVFQPDDATQTLRSYVRQRANLVRLAGQHVQRMQKALELMNLKLTTVLDDITGVTGLKIIRAVLAGERDPQALATLRDRRCKRAAADIAAALDGRYRPEHLTELRCCLAMWDKYQDVIAELDVVIAGQLRAMRRQSALPPLPPKTRVRGRRPHDPRFNVREALYYVCGVDLTAIEGIDEIHALTLVGELGTDFTKWPTVKHFASWLGLCPNWKKTGGTVKSSHTRKGKNRAAAALRLAAWALIRSHTYLGAYLRRQRSRLGAPKAITATAHKLARIIYNLMRYGEAYVHREEAAYADQVRQRLEKQLHRRAKELGFEVVRVAPPAAGDDAPVPVSSA

SEQ ID NO: 236184 - protein, 359 aa, unidentified
MQRNKISFKGQKIYIGIDVHAKTWEVCVLTESGYKLRHPQQASAKTLFDFLKKHFLDGEYHAVYESGFSGFSTYYALKEYGINCVVTHAADVPTTQYEEVMKTDKVDAAKLARSLRAGDIRPIYIREKENINDRSVIRIRKTIQKQLSGYKARVKHLLHCNGVEIPERFARPGTHWSRAFIKWLKEDVVLLSSSRLSLDLLVKQVETIRQTLLDATKSIRRLAQTDRYRNNYELLMSIPGIGVSVAMCILTEIYDVKRFRNENQFASYLGLIPTCHNSGEKTASGEKTFRGNKHLGPMIIEAAWIAIYRDYGLGMTYARYKQSMKPQEAIVKIARKMSNIIFSVLKNSRKYEPYRWDKE

SEQ ID NO: 236185 - protein, 394 aa, unidentified
MARHLPDGSVQRERIATEPKLLKDFAETLGPQDVVALESTTNAMAVARLLKKRAGKVLISNPMKTRLIAESHIKTDKVDASVLAQLARSGFLPTVWQPTEDVELLRRRAAYHGALGRQLTRVKNRIHAVLARNLVEAPVSDLFCEKGRAFLRQAPLPEDEALQVEMDLHILETLEAVRQEATQQLAALAHAHPRAQLLMSIPGIDYPTAVGILGAIGEVTRFREPKKLVSYFGLNPIVHQSAQHTYTGRISKQGRCHARWLLVEAAHCAVRPAGPLKAFFLRLKARKGANVAVVAAARKLTTIIWHMLTSGEPYRWAPEKTTREKLGRMHYHATGVRRKGGVKKGTPRPATFGSGVRARDVRAKEDKARRADAQADYERLIEERAESTRSPRST

SEQ ID NO: 236186 - protein, 331 aa, unidentified
MNQVGVDVSNDVFDATLQQGRDVVRKQFSNNSTGHRQFIRWALRQAGSARICLEATGVYHLQLALALDRHPDTEVMIVNPCAARRFAQAYMVRAKTDVIDADGLLQYLQRMPFQRWSAPREELLQLQSMAHRIAQLDKEVIRERSRLHAAHRAGPHSRLAQQDIQVHIAHLQRRLQRMRSLAYRIIANDPRLADDARIVESAPGFAELSTTKLLAELSSLPAEMTAKQWVAHAGLDPRPCESGTSVRSPRRISKQGNVRLRRALFMPALVAIQRDANVSAYYENLLKRGKAKLQAITAVMRKLLHALWGMLHHRQAWNGEAFYRLNQPNTA

SEQ ID NO: 236187 - protein, 418 aa, unidentified
MAKKTKVTGEVEEIVYERCCGMDIHKSEIKACLNIGGKKEVRTFSTMTEDLLIMTKWLKDKKVEMVAMESTGSYWKPVFNILECEEISAILVNSQHIKNLSEPKTDVRDAKWISSLLRHGLLRASFVPARDMRELRELVKYRSSLCDDSTRTLNRIEKVLQGANIKLSNVISKTGTKTELSIIEALAGGESDIETLVENAKGTLKKKKSELKRALNGLIGEHQRLLLGSMYNHLKQIKEEIAVIEAEIDKRMEKDFEIIERLVEIPGVGKTTAQAILAEIGTNMDQFPSEKNLASWAGICPGQNESAGKRKSGKTRKGNSNLKKTLVQCANSASHSKGTYFSAYFKRLFARRGRKRAIVALAHTILIICYVMIKDNVRYRDLGADYFDKRDKEGIAKRSIKRLEALGYDVTAKLKEAS

SEQ ID NO: 236188 - protein, 353 aa, unidentified
MDRYVGVDAHASSCTVAVIGPSGRRIGSQVVETNARALIEVVRAIPRRRHLCFEEGTLAEWLHEVLEPHVEELVVAGVEERRGSKSDKRDAFDLAEQLRIGSINRRVFKGRGAFKRLGSLAKAHAWMTRDAVRVKNRIKSVYRARGIACGQGTSVYAKSERSSWLSELPHELQPMVLLLYEEHDRLVSLKAKAKQAMLAEAQHHRAWHLVKSCPGLGPVRAAELVPVVITPYRFQRRSRFWSYCGLGIVTRSSSDWARAPDGGWVWAPVRQTRGLNSNFNRTLKKIFKGAATSVIRQASEQEPLYEHYLRLLDGGTKPNLAKLTIARQIATITLALWRTGEPYDPSRLQPTMT

SEQ ID NO: 236189 - protein, 339 aa, unidentified
MTIVMGLDQHRGQITAEWIDTANGEVSRARIVPAHREPVARFLGRFRGRELEVALEATTGWRFMVEELRRVGAGVHLAEPAETSARRGNKKRAKSDRADARHLRELLLTGRVPESWIPPDHLLDLRARVRLRHTLSDQRGEWQQRIQAVLYHHGCPQRRQLMTRDGRAWLQAAPLPETAREQVTVAIAMIDAIDVQMAPVEKELRAYARRQAGCKALMTHYGIGELTAVTILAELGDVSRFSSSRQAVRYSGLDVTVSQSDRRRAPGRISRQGPPALRWALYEAAQAARRGERSPDREYYLATKERIGGNRACIAIARKLLKRSYHTLRELGEEALAPA

SEQ ID NO: 236190 - protein, 366 aa, unidentified
MEQDTRTVVGLDVHKASIQVAVFKCGVDRPQAYAIENETKAIERMAARASAGGPAAFVYEAGPCGYEVHRRLTAAGHVCAVIAPGLIPVRPGDRVKTDRRDAEKLARLYRAGELTEIRVPTCEEEAARDLIRAREDALADRLRAKNRLSKFLLRQGRIYGETKAWGVRHRQWLRTQRFEWPAQEETFRTYLQSLEEIEERIRVLDQRITDLAESPRHRDLVRDLRCLRGIDTLSAITVAVEAQDLRRFPNASALMSFTGMVPREASSGERIRRGGITKTGNAHLRRVLVESAWSYRRVTGSSPQLAERRRGRPAEIVRIARRAEERLRRKFFRLVGRGKPPQVAVVAVARELTGFIWAIGQVSAAA

SEQ ID NO: 236191 - protein, 377 aa, unidentified
MKRIKFVGLDVHVETIAVAVAEQDGEVRALGIIPNREESIRKLVKKLGPVEQLRFCYEAGPTGYVVYWQLTAIGAKCEVVAPTLVPVKSGERVKTDRRDALKLARNFRAGELTPVWVPDVAHEALRDLVRAREAAKKDQLRAKHRLGKFLLRHGRRPPTGVKPWSLNYLSWVKHEVHFEQLAQEAALLDYLHEVEHAEGRIARLDRAIEEAVKLTPAKMRAVIEALQALRGVAQVTAVTIVAELGEVSRFTRARQLMGYGGIVASEHSSGKSTRRGSITKTGNAHLRRVVVEAAWAYRHRPNVGGTLRKRQEVVSEEVREIAWKAQHRLHTRYRKLTARGKNKRKVVTAIGRELLGFIWAIAVKAEAPQKESERRAA

SEQ ID NO: 236192 - protein, 453 aa, unidentified
MCLEDRPVLEPNAAGIDVGAREMFVAVPPGRDENPVRVFATFTEDLERLTDWLEQCGVTTVALESTGVYWIPIFEILEQRGIRPCLVNARHMKNVPGRRTDWHECQWLQFLHSVGLLRAAFRPGQDVCAVRTLLRHRNELVAAASQHVQHMHKALTQMNLQIHHVISDITGLTGRAIVDAILAGQRDGAELAKLRDPHIKADTETIRKSLEGNWRPEHLFTLGQSRDLYRIYQHQIVNCDLEIEKMLQGFEPRTDPAERPLPPDRKRYRGGSKRRKKNGHPHPEFDLRTETYKLFGVDVTQIPGLEENALPLFSEIGRDMSRWPNAGHFVSWLALCPDNDISGGKLLWRGARKVKNRAGHLFRLAAYSLHHSLTPLGNYLRRMKAKLGPKAATMATAHKIAVIFYTMVKKQVEYDETLWDLRDAQREKRLGAKLKRQAKQLGYELVPIEPKAA

SEQ ID NO: 236193 - protein, 343 aa, unidentified
MAEYVALDVSLRSTSVHIVDQQGRCLWRGTCPTDATALVDTIRRHAPAVERVGLETGMLSTWLCHELAEAGLPVVCMDARQAKAALSCRINKTDADDAEGLAQLLRTGFFRQVRVKAKGTMLVRTLLSARRQLVRTGLDLANQIRGLLKIFGLLLPRGGGRAFEAAVRERLAGHAQLATVITPLLQAWRTVREQVLALDRQAYAVAKRDARCRLLLTAPGVGTITALAYVAAVERPEEFRNGRAVSAWVGLTPARYQSGQVDYSGRISRQGDVHLRTYLYEAANAVLTRSRPDTALKRWGLGLKARLGHKRAVVAVARKLAVVLHAMWSKGEPFETDAVAAAA

SEQ ID NO: 236194 - protein, 403 aa, unidentified
MNSVGIDISKGRSTIAVMRPFGEVVISPFEIRHTDSELSELARQLKSLNGETRVVMEATGNYHAPVAKLLHDAGLYVSVINAKLVHGYGNNDLRRVKTDRKDAVKLANYGLDRWLTLPRYVPEEDTRLLLKNCYRQYRQYSKVQTVLKNNLISLLDMVFPNVNRLFSSPIRGDGSEKWVDFVAEFWHCRCVSEKSQKAFTNKYQRWCRKHGYNFSEAKAHTIHAEACGHIDVIPKSETTKLLVEQAVAQLRATSAALVALKHEMQALASMLPEYPVVMDMFGVGPTLGPQLMAEIGDVRRFYSKKALVAYAGLDAPPNDSGDVTGRHKSMSKVGASSLRRTLFLVMSVYLQNAPLDESVYQFMDKKRAEGKPYRVYMMASANKFLRIYYATVKAYLESLEHTA

SEQ ID NO: 236195 - protein, 363 aa, unidentified
MKIVGCDLHARQQSIAMVDTETGVLTEKVLKHEGNAVREFYAALEGPVVVGIEATGAMQWFLELLEQLGIECRVGHPAKIRAAETRKQKHDRRDAEVILDLLLMNRFPDIWMPSTEQRDLRTLLRDRHQWVKMRTRLQHTLQAIALHHALREGRALWTAAGRRSLQDLTLPKYTAQRRDELLSLYTQLDKRIQQLDKQVETEARQRPQARRLLTHPGVGPVTALATEVFLGDPHRLAGAHQVASYIGMIPCEHSSGKRQRLGKLSKEGNSLLRYLWIEATLHAAVKDPELKRFYRRKLVQKGMGKARVATARKLGIRLWIMLRDEIDYEEFCRRGKLPQKGKTHAGMPDYNSGPARAVTGSTE

SEQ ID NO: 236196 - protein, 388 aa, unidentified
MQTVADRPEAPTAIRTDLGAIFVSLELSRSTWLITSLSPGGGEKMSKQVVRGGDVAGLLERFARLREKARARTGKVFPFVVIQEAGLDGFWIDRVLQNEGIESHVVDPASIATSRRRRRAKTDGIDGEVLVRALLAYKRGEPRVCAMIKAPTPEEEDRRRLCRERKVLIVERVRHVNRVKGLLFSQGISGYEPLRRDRRERLDTLQTGDGRLLPVHLKAQVCRELDRLELLLEQIKAVEAERDVLLAAQQVAAPAPAAMLLDIKGIGPEFAAILWSEGLFRHFDNRRQVASYAGLAPTPWQSGSVDREQGVSKAGNPRLRTTLIQLAWLWLRHQPQSALALWFEERVRRNGGRLKKTTIVALARKLLVALWKYVTAGVVIEGAVMKRT

SEQ ID NO: 236197 - protein, 284 aa, unidentified
MTYVGIDLHSNNMVNVAINSNGEVIREAKLPTSRRSLEDFFSTFGGPVKAVVECTSNWYWLSDWCRANGVELTLAHAKMVKAISYAKVKTDTVDAKTLAELLRADLIPEAYQVKHDRRELRELTRGRLRLIQWRGKLQSTLWNQAIKYNVKINGSQWRELKKLQQWLQPQLPSAARFQAQLLIEQMSQLQQHIHRVEEEIEKQLPYEALAKRLMALPGLGKVGAWTILAEIGDIRRFPSAKQFVSYCRLVPGAKDSGGNRKHQSGNKDGNKYLRAAFGQAAVSA

SEQ ID NO: 236198 - protein, 409 aa, unidentified
MLKIVYPNCCGIDVHKTFIVAVIAITDNHGITSYHRKRFSTFTNGLLQLQDWLEYYSCFNVCMESTGKYWIPIFNILEETCNICLAYPKYVKAIRGKKTDKKDAQWMADLFKHDLVASSFIPPLKIRQLRDLFRYRMKLTQLQVSEKNRYQNCLTWSNLQIASVVSDVFGKSAQTIIQSILDNPEEKPNIEQLVHKRMKDKVLDLEIAMEGCLTPEQAEKIRIIKAHYDALAICKEDLEQMIRELGQEYKEQVKLIQTVPGFKEELSALRIISEIGVNMTIFDTAGRLCSWAGLVPANNESAGKKYSTRISKGGQYLKPFLVQIANAVVKSEKHPEFRNKYLKLKKRRGHRKAIIAICRRLLVAIYQVLLKQENYNPALQGLTEVRNPNKTMSVQDAICFAQQHGFTVA

SEQ ID NO: 236199 - protein, 358 aa, unidentified
MNRNTGMSAGQIIGTMAGKQVIGLDIAKHVFQLHTVNMCTGEIVNVQIKRAKVLEYFANLTACLVAIEACGGAHHWARELSKLGHTVRLLHAKIVRPFVSGNKTDATDARAIWLAVQQPGVKFVGVKSATQQATLTLHRQREALMKMRIMQTNALRGLLYEFGATFAKGKRALFKEIEATLEGLADRLPQMVADSLREQILRIKAIEVDMQAIQMRLQLQLKQDPQMQRIAQIPGVGLLTATAAIATMGDARAFKSGREFCAWLGLVPKQSGTGGKVKLLGISKRGDTYLRTMLIHGARSVLSHAKEPGAWLESLKTRRPANVVIVAQAAKMARTIWAVTAKEQDYQRSFKSVRPISA

SEQ ID NO: 236200 - protein, 461 aa, unidentified
MIRRLVGVDLGIASAHTVRVLTEDGREVCRRRCEPTVDSLRRVETAALAGAPAGTVLEVVMEPTGPAWLPIAVFFTARGHRVFRVSSGKAADLRRFLSRHAKSNGIDADTLARLPLVDPAGLYPLELPGTEAAALDRRVRATDRLTVLAAQHKVRIKDLTRQLLPCSPLTGDLGVADLAVLERWADPRALLAAGPARLTALIVKASNGHLGADRAQQWRAAAAAAVELYGDHPAIAWTDLAAEVGTEVRLLRATLGELAAHARERETAYRYADLGGLARSLPGVGDVGGPVLVAGMGRPGRFPNGAAFKSYTGLAPRAAETGNTDRKGQPMSKAGSSLLRTTLIRAADTARKQDPQLARIYYTQMVERGAEHLKAVCVVAGALAERIWTVMNRQMPYVICDIDGTPVTPEQAKQIIAQNFTVPDEVRRRRRSSKTPSRKPAQQPTISSKGGRPLSKPHTAA

SEQ ID NO: 236201 - protein, 448 aa, unidentified
MSKGKTKNEKVKRISQMAVINPTAAGIDVSDTEMMVAYPINSEQLEIRVFGCFTRDLHSIVKCLKENGTTTIAMESTGVYWVALFLLLQEYGFEVYLVNAKHVKNVTGRKDDESDAEWIQKLHSCGLLSASFQPDNMERTLRSMVRHRKNLVQTSSTYINRIQKAMELMNIKLHTIISDIDGKTGLLIIEAILTGERDPEVLADLRDKRIKASREDIIKSLEGHWTTEHLFELRQCYQLYCTHRQMIEECEREIEKQLVEQIALKNEGIIPDIPKVKRKASGKHKAPFNLTAYLKEILGVDVTEVFGISELSALTILSEVGRDMTKWKTEHHFTSWLGLTPNTKISGGKVISSRIKKKKHHAGQAFRIAANSLYNSKSPLGDYYRRIRAKAGAAKAVVATARKLAIIYYKMVANKEAFNPKALEYYHQKYKEKKINQLKKKLALLEAA

SEQ ID NO: 236202 - protein, 411 aa, unidentified
MRYIGMDVHREFAQLAVLEDGLVRDEGRIGVTPEALRAWADTLCPDDQVALEATGNSDAIATLLTPIVGRVVVSNPVKTRAIAEAKVKTDKVDARILAQLLAADFLPPVWLPDERTRSLRRQVHRRAHLVRQRTRIKNQVHAILARNLVPTPPVSDLFGKTGRHWLSQQVLPGDERSSVQALLRQLDFHGEELAIVDRELAVEAFADPVVARLMSIPGVDAIAAISIVAAVGDFTRFTSADKLVAYVGLNPKVRQSGNSAPVHGRISKAGRAHVRGVLVEAAWSASRAPGPLRAFYQRVRGRRGFPTAVVATARKMTVLAWHLVTKNQDYAFARPGLLTHKRRKLQLAAGAPSRRGNHGTPGAAYNSKQQRAEENAAVEQAERAYQVFVAHWQPRKPANHRAERPANIGGA

SEQ ID NO: 236203 - protein, 375 aa, unidentified
MTMVTDPAAVQQVLSVTGGVDTHADVHVAAVIDAVGRELGHREFATTPVGYAALLAWLGSLGPLELVGVEGTGMYGAGLTRVLQAAGVTVVEVDRPDRKARRFQGKSDPIDAFADARAALSGRASGTPKTRTGTVEMIRTLRVARSGAVKAKAVTWNQLKALIKTVPDELRERLRGLDGAALLDNCAGLRAARGPAPEHGPHAKRRRPGVLVDPSAACKRSLSVLARRIRALEAEVADLDDDLEPLITATAPTLLAMYGVGLDVAGQLLATAGDNPDRLRSEAAFAHLCGAAPIPASSGKTTRHRLNRGGDRHANHALWRIARTRLRYDPQTRAYRDRRAKEQKTNKDIMRCLKRYIAREVHQALLVDLTAPSAA

SEQ ID NO: 236204 - protein, 327 aa, unidentified
MTQKMDVVGIDVSKATLDAYALTSQQARQFANDPAGHQELVAWLQELGVGVAVFEASGGYERAAAQSLRRAGLVAHVVDPKRVRHYAKAAGQLAKTDRIDARMIAAFGAAFLPGKPGGIVDGDDPARPDLAELVGTRQVLVDHRTTLQQQADAVTSAIAKKLFLATLKQLDRQIETLDRHIAAAIARHEPFAARARRLDTVPGLGPVSIAALIAWLPELGQLDRRQVAALVGVAPFADDSGKRTGQRHIQGGRMKLRNVLYMATVGAATRHNPVLQARYRRLLENGKKPKVALIACLRTLLTILNAMVARQQDWNPAGPPATEPAAA

SEQ ID NO: 236205 - protein, 432 aa, unidentified
MEKIREKAGGIDIGSKKVFVAIEGQEVKSFFTFTEDFEKLREYLFENNIVTVAMEATGVYWNILYEMLEEAGIDVWLVDGRQTKQVPGRKTDVKDCQWIQQLHSYGLLNRCFVAESDIKELRSYQRLREDHIRSASMHINHMQKALTEMNIRLTEVLDQIHGMSGLAMIEAILKGEREKEKLLKLCHTKIIKNKKDEVLKALNGRYTKQGLFALRQAFESYCFYQNQIEQCDQMIDEVLQKISRGKPDQKTDVRRKPIRHNKPDIDNLGSMMLKIFGGKDATTLSGITDYSWMQLLSETGADLSRWPTEKHYTSWLGLAPGQHNSGRMKKNRRKSGRPKAGQIFRQIAQSLLTSKKIALGAFGRRLSARKGSPVAIKSIARKLAVLYWRIMVKGMAFVENGVKKYEEQMLIQKQRSLNRLAKELKVHVVYNV

SEQ ID NO: 236206 - protein, 330 aa, unidentified
MQGKVMSEHCAVTEGAVGIDVCKAWLDIRVLPANTVERFANDKKGYKQPLAALKGLSVGMITIEATAKYHRGVHRALYAAGWPVTIVNPLRARLFAESMGALAKTDQVDARVLALFGQMARLSATPPLPETLENLREIVRSREVAVSAKVALENHLETATLASVRKQIKLQIKAARRAIEALQKEAVEVTKGDAGLARRLVVLTSIPGVGDVTAIGLLANMPELGSLDAKKVGMLAGLAPVARDSGQRNGLRHIRGGRGIVRAGLYMAALSAARRNAHLKRFYDRLVAAGKAKKLALTAVMRKLLVLANTLIKQDRLWSRETPIAKHLHA

SEQ ID NO: 236207 - protein, 375 aa, unidentified
MTEHSEVFVAFDTSKLRNAVAIAEAGRAGEVRFLGEIENTAGATTKLVRKLEAKYERITFCYEAGPTGYELQRHIRGLGHECIVAAPSLIPKKPGDRVKTNRRDAVSLVKLSRAGELTAVWVPDRRHEAMRDLTRAREAAVIDLRAKRQRVSALLLRQGRSYPADKKTWTKVHMNWLASQRFEQPELGVVFAEMMFATRQAQERVERLEQAIRTAVPDWSLAEMVTAFMAFRGIDLVSATCLLAELGDLTRFPTAPEVMGYVGLGCSEGSTGDRIKRGGITKSGNRRARRTLVECAWSYQHPPRVGIAKQAKVAAAPTKVREIAWKAQCRLNRRYRVLLRRGKLKTVAITAVARELAGFLWAAARELSSPQRVAK

SEQ ID NO: 236208 - protein, 425 aa, unidentified
MSTSISPLIERYLGIDLHKHYLVIGGVNAKQEVVLPPRRIELGDWPQRAKTHLQPTDVVGVEATTNAWDFYDVTSPLVQRVLVANAAKIALIAKTRVKTDKIDVMVLARLLAAGLIPEVWVPPMDVRELRSLIAHRRRVVGTRTSLKNRLHSVLHRHHLVLPSGDPFSDIHRAWWDTLPVSPTERLHLKHDLATVAQLDTQIAEIEDELRRLSCVAPWAAPVTYLIQLPGIALITAMTVLSAIGDVTRCAHAKELACPCMLFAGVGYSGLGAGVHDSGQTHHTGHITKEGRKELRPVRVEALWRAVECSDYWRVEFERLTRRMPPTKAIVALARKMLVVIWHVLTEQAADIHANADLVAFKFMVWSWKLTDAQRGGLTPRQFVRYQLMHLGLGQDLTHVVRGGARHLIAPSEEVLALKPELTAAA

SEQ ID NO: 236209 - protein, 345 aa, unidentified
MQASTVPRHYVGIDIGSKEHTAAIVTTIAAPRPLITFSNDEDGFMKFLDWLAENGVQPTESVVCLEATGVYGEALTYFLAARQWRLAVEAPQHVKRGMGKPNKNDAVDAKQIAEYALRYFDQLTLWQAPNAILERIETILTTRQHCMTEKTRLVNMLHAFGRKTVQTPVAEQILRQQKELVEKHIKELDAALKKEIRSDPTFKEKVRLAETVPGVGPLIAAGILVLSKGCTEHLNHKRLASYLGICPHEHTSGTSVRRKARSRRSGPGLMRGWLHNAVMCLISHEERYITYFRERKAKKQLGIVIMNNIANKLLKVLCAVINSGKPYQQNHVSLKPDNKSVLAIS

SEQ ID NO: 236210 - protein, 382 aa, unidentified
MLWTATSHFAEAGQNDCITMHVGLDVHKDSIEIATADVRGGEIRHVGRIGGDLPALDAALARLRCPVAGMQVVYEAGPCGYAIYRHLVARGIACAVVAPSLTPRRPAERIKTDRRDALKLARLSRAGELRAIRVPDTQDEAIRDLLRAREDTVRVQRNARHRLKALLLRQDVRYTGKTAWTPAHERWLARVRLPTPAQQIVCQEYVDSVHQATLRIARFDTVAGDLLPHWTRYPLVRELQALRGVRQLHAAMLIAEVGPFERFDSPRQLMGFLGLTPSESSSGSRRRQGAITKTGNAFARRALVEAAWQYRFPARVGTTIARRQGECSETARAIAWKAQVRLCARFRRLQARRMLSTKAVVAIARELSGFVWTIACAEAASH

SEQ ID NO: 236211 - protein, 589 aa, unidentified
MLLQQAPVSQPQPDAKMHRIGVGIDTSRYGHYAAFLRDDLQPAAGELQFAESAVGYAQLRSRLEQIVSKLGTVHFAVRLDVAGQYADNLLHFLHSLQGQLANATFVISCGDPQRNKNYRAALFGSQKSDPVEARAAARYALSERPAPVKMLSAEQRTLRHVASRLQAVVRQRTRLINQFHLLLTSTFPELALLVKDIASGWVLTLCERYPTAKLLAAASAPDLRQITYLPEKLIDPLLEHARTAIASLEGDTVAELVRDQVSQLRDARARQLRLEKTLVDAYRQLDANHLDSIPGIGEVTAAILTAYIRDIDRFETPNQLVAYFGAMPIEASSGVDRDGKPRAAKRYVMSRRGNDLVRRYLWMAALSAVRHNPAVRALYARVVAKHPDHKAIAIGHAMRKLLHLAFAIWKTKKPFDKTHYPWDTPAHVAGLDARDEEKAAATPEQEQAAGLTLTAEPAQKEVTAACEASLPHDAEPGQHAFVDFAHVKAQLPIVRVLEYLNLTRKLHGAGAQKRCACPIHCPHSHGRTFSVNLDDNVFQCFSVRCQKKGDVIDLWAALHHQDLHQAALDLVRTFALEAAPTQPTEKRKG

SEQ ID NO: 236212 - protein, 418 aa, unidentified
MNVKTRRTKKQVNVENQAINLLSKEELNKKIEVVEKELRSYTWRELETNGKFAKNDKLSFITDDMLIVGCDIGSENHYIRAIDVRGRELSRGAFEFSNTSEGFENAKAWVLALAAKHDKKQIVLGLEPTGHYWFALAAWMISNGISVVQVNPYAVKQSKEIEDNSQLKDDRKDPKLIANLVKDGNYGMPYLPEKVYADMRRLSMFRDQLTEDRIRNINRLHRELKIYFPEYMDAFGKIDGAFTLEVLKGSAIPSDITALGAEGIKNIWHNEKLRGRGYSRANEIVSYAEKSVGLTDGIDAGREAVKWYAEQILKLVACSSGKHKGQTKISHRGRKRLRYWLFQAAKSAVSHADEFKQLHEYYTTRTNNPLKKMQSLVVIACKILRVIYTILKTGTTYDPQKLLEDIKRPTASQTPMAA

SEQ ID NO: 236213 - protein, 381 aa, unidentified
MTTPTTRTEHSNTPAGTLLMAFELSDKTWKLGFTTGPGQKPRERNVTARDQKRVLDEIASAKRRLGLPETAPVVSCYEAGREGFWLHRFLEAHGITNRVVDSSAIAVNRRQRRAKSDGLDGRKLLSMLRRYEQGERQVWQVVHVPSVEAEDQRHLHRDLETLKRERGSTTTRIKGLLSSQGIQVTSLTHLPEQLDALRLWDGSPIPPGLRQRVLRVYAHHQFLSEQIAEVEAERRALLQTSSDASIDKIRQLMMLKGIGINGSGLLVMEFFGWREFKNRREVGGLAGFTPTPYQSGESAREQGITKSGNRHVRWMTTELAWSWLRFQPESALSVWFRERFGSGGKRLRRIGMVAVARKLLIALWRFLKTGVLPEGAVLKEA

SEQ ID NO: 236214 - protein, 433 aa, unidentified
MQEAEDEPLFADRAAGIDIAKTGIEVTIRVPSDTRRGGRQQETRAFRTTRKELLALADWLHCWQVTKVGMESTGDYWKPVYFLLEAEGLDCVLYHAAQVKALPGRPKTDKLDSVWLAKITERGALPGSFVPPEEIRRLRTHTRYRRHLTQARTAEKQRVEKLLEDAHLKLSSVISDIHGVSGRAMLEAIAAGERNPKTLAQLARGTMRSKIRQLEEALDCSFMTCEHVAVLTMMLATIDYYTARIEELTVRIGVLCQPYEHQIAQLDAVPGTGVITAQDIIAEIGTDMTVFPAAAHLVSWAKWCPQVAQSGGKRKGANATGRGNRYLSAALGEAAVGAGRTQSFPGAKYRRLVKRMPKRKALVATGNSLLTIYHALLSDPQAAYTDLGTDYYERRANIRRQARNHLRGLQRLGYKVTIEPIDPATGELQAVTS

SEQ ID NO: 236215 - protein, 362 aa, unidentified
MTLVGGFDVHRKQITFDYVDDDGLVHCGEIRPATRTTLRGWLGEHCPSGDAEFAVEGCTGWRYVVEELAMAGVVAHLGDPAEIAGLRGPKKRAKTDRADARLLRTLLVEGRFPESWIPPAHVVEVRTLGRLYCALMEERRAWQQRIHAQLFHQGCPPVTALLSVAGRDALAGAELSRVGRQYVDTALRRIDELGAEIVPLRTQLVNFARHQRGCQALQARHYGIGWLCAAIIWAEIGDARRFSSSDQLVRFAGMDVTVYSSDAKRSPGHLSRQGSPELRWATFEAAKCAARRGSPDYSYYHQLAVKHDGHNGKNPTLAVERKILRRCYHTLRELGDAALSPPQPVREDRLRCQLCVPCPSIN

SEQ ID NO: 236216 - protein, 470 aa, unidentified
MAARKDKADGAGVPGHGSDGAEVAEELTQVVAYAAAIDVAKGFGMVCTRVPGSRPDRRRQKVWRVEATCGQVTALMDHLRAEGIQRLVLESTSDYWRIWHYLAEAAGLEVWLVNARDVKHLPGRGKSDTADCVWHCKLNERGMLRRSFVPPQAVRDLRALTRTRSRLAQDQARHQARVEKILEDALLKISVVISDLFGASGRRFLDALVAGERSPAALAALGDPRLKATRKELEEALTGRFRDIHATEIALHLRLIDAINAEITALDEQIGQQLAAVPGTAPACTGCGLAGGGHTPDCDDLGILLLGLADRLDEVTGIGAVNGRAIIAELGTDPSQFPTPGHAAGWARLTPRSRQSGETARPGRTGKGNRYIRGALGQAVMTAAKTDTRLGAMYRRIARRRGKQKAIVAVARVICEIAWILICDPSARYQELGPDYYAPRSPARQTQARIREIERLNPGKKVILADDDAA

SEQ ID NO: 236217 - protein, 397 aa, unidentified
MSAVVGIDVGAYKHAAAVCRPGEREAERGVFRLSADRSGFDELDLWLERQGPVERVVLESSGHYYWPLASHLHRRGYGVAVVNPLQAKYFAKSRLQRSKSDPADARTLAALGMSEEPRVKDPLLGAEAKEAARFWGGLVKEQAQIRNKLLRLVEIGFPELKECFEDPLCDTALAVLREAPTARVAARKRVSTLAETTRPGGRRRLGENKARRLHELAKQTIAPPELDAQMGFEVGMLIQQFDLLDKQIEIAEQRVAEVLDSELARRLQTIPGVGPALAATFLAEIGDIWRFDDFDQLASYAGVHPKELSSGTKGQNPETSWRMAKTGNAYLRSAAYKMAVIGTQHNPVIRAHYLRKRAQGKSAMNALGHCMSKALAIVWGVWRSGRDFDPTLGGPTT

SEQ ID NO: 236218 - protein, 372 aa, unidentified
MPDVISLAPADVRMFVSLDMHKLSIVAATLPPTGGQPKVERIETTEKAIRRFIDRLGGGEGLAVCYEAGPGGFALWRLLTSMGVACDVVAPSLIPVRAGDRVKTDRRDAKKLVTLYRAGLLRFVRPPTPETEGLRDLLRCRDDIRCARTAARHRVGKQLLRHGHVFREGKKSWTAKHQAWVRRQRLADPLAHEALVQMLIHLDGLDRQLAALDAKLEQLAGDEPWGWQVAKLRAFRGIGTLTALGLIAEVGDFARFGHPRELASWLGITPSEYSSGEQQHRGHITRAGNHHARRLLIEAAWHYRHAPRRPSSGAQPSDRAWQAQIRLFHRHRHLTAQGKRSTVVTVAVARELAGFLWAELTDQPPREDKLAA

SEQ ID NO: 236219 - protein, 428 aa, unidentified
MTQSPNPTPPTFAAFVGIDWADQEHAVCLSPADTLKPEQFTIHHTPEAIAEFVAMLRCRFGGQPVAIALEQARGALLYALMGHEFVRLYPIHPATSKRYRDAFAPSGAKDDPVDARLIWELLVKHRDQLRPWQPQDATSRQLTLLCEHRRDLINQRTRLVQQLQAALKTYFPQALDWTGEDLASVMATDWLVRWPTLEQLQRVPPKTVRAFYYAHHCRRPDLVQQRLHQIKTAQPLTTDAAVIAAHSLRVQSLAHQLRPLLASLAAYDQQIQALFATHPDAAIFTSFPGAGECLAPRLAAAFGTDRDRFPDADSMLRWSGIAPVTRRSGKFQTVHRRYACAKFLRQTFHEFARCSIKFCEWARLYYETQRAKGKGHHAAVRALAFKWIRILWRCWRDRRPYDDSLHAAALRRSGSPLAKLLPLPSQQP

SEQ ID NO: 236220 - protein, 387 aa, unidentified
MAKPRTNTTAQLTMEVSHENDVGIDPHRKTLTATVLDGRGGTVATASFKVSGVGHRALLEWATGFGPVRCWGIESASGLGRHTAMFLIEQGHDVRDVCPTRTAEQSRKRRQGKTDALDSLRIAREVQADPDLPVAFKRAPGDVGPDETHELLHLWHNQRRSLLKSRQHLLNEVDALLHDLPEEIRAGLPDDRSIRPRLSALSERDRTVTWDPVTALRLRLLDDHAAAIAEFDARERAASRELHHLTRRAGSSLGELCGIADRSDAELLVEAGDPRRFAGEGGFARFNGTAPLPASSAEGDDEPNRHRLNRGGNRRVNSVLHLMAVTQLRCEPRAQQIYSDARRRGHTKKEAMRILKRHLSNVVYRRMIRDLNARLSSPPADTRQAAA

SEQ ID NO: 236221 - protein, 308 aa, unidentified
MVYVGIDVSKERLDVHVLPQEIAFAVARDGQGLADLVERLTSLGPERVAVEATGGFETVVAAALAGAELPLVVVNPAQIRHFAQALGRRAKTDPIDAAVIARFVEATRPELRPFADEATRLLAGLVARRRQIIEMMVAERNRERRTDVRRIKKSIARLIATLEKELAEIDAEIDAGVRGSPAWREKEDLLASVPGVGAITARTLIAELPELGTLDRKQIASLAGLAPYTRQSGQWKGKSMIGGGRKTVRSALFLAALTACRHNPALKDFRQRLLDQGKPKMVAVIAVARKLLIILNAILRDQKPWQPA

SEQ ID NO: 236222 - protein, 399 aa, unidentified
MLIVGIDWSKSKHDVALMDPDGSVLQYLVVQHTLEGLEALAGAIGRYESDRSEVRIAIEQFDGALLAWLRAQGYIVYGINPKSAQRARDRYRPAGAKDDRSDAYILADMLRQDRGSLRPLGRESQTPAELRTLGRLRTQRVQERTAVMLRLRGLLDDWCPELGTLCNDFGNVSWQREFLRRFPLLTDLATADGRTVNAFIRRHRMRPAKADRIRELRKCRALPIPAGREAALRLDVVFLVEQVERGTEAIRTIEQDLQRLVDQHPDAEIFQSLPVKGLVGISALLAAFTGQDAPRHRELAARWGVAPVTVASGRSRFVKYRRACDGHMREALMFFAFNTAFRSDCWAQDYYRRKRAAGATHYGALRCLAQRWLKIICRMWTDKTTYDEQFHRRRLSLAP

SEQ ID NO: 236223 - protein, 352 aa, unidentified
MTVTIVETRAPARAITGGVDTHAGAHVAAALDPVGGLLGVQEFPATPAGYAQLLGWLGGFAAVCLVGIEGTGSYGAGLARYITAAGVRVVEVDRADRQDRRRAGKSDPLDAVSAARAAQSGRAAGAPKGRDGAVEAIRALMVAQRTARSERTQTINQARALVVTGPDDLRIRFATHAPADLVAELASLRPRPGAVVGYATRIALRELGRRAQFLDRQLERLDEFIVPLVTARAPGLLALYGVGPDTAALLLITAGDHPGRMRSEAARAHLCATAPIPASSGKVTRHRLNPGGDRQANHALWRIVFTRMGSHPATRAYVARRTKEGLSKKEIIRCLKRYVAREVYPHLRPGPG

SEQ ID NO: 236224 - protein, 342 aa, unidentified
MKQRYYVGLDVSKDATAICVRRADGAVERVCETATEPEAICAALADLRDGLERVVLETGRMANWLHGELTRRGLPAICVDARQAHAVLSQMHNKTDANDAAMLSDLARTGFYRKVEVKSRDAQERRALLAARDAAIGARRNAENTIRGLLASFGLRVPGQPRTYEGRIRAGLEGQDALAPIILPLLAIRTEALRQAAALTKELVRQVKSSDACRRLMTVPGVGTVTAATFVATIDAPSRFAKSRSVGAYAGLTSRRHQSGAVDYGGRISKRGDRLLRTMLYEAANSLLCRVKPGRGQALKDWAMAVKRRTSHKKAVVALARKLAVMMHAIWVSGGVFEEREA

SEQ ID NO: 236225 - protein, 344 aa, unidentified
MKKHFIGLDAHSRTCSFVVMDARGKVVLRKQVETKESEILGLVRGLEGAKALAFEESTLSQWLYILLKDEVDELVVANPALIIRTRAAKTDFIDATELADLLRVRRLKPVFHSADERMELRALISGYEDLVQEIVRTKNRIKALFRLSAMKTEGASFYADPEVAKKLPSKAHQEVARALFEQLELLTRQQKEVYGERFKKNLRRFKELRLLCSVPAIGVVRANQIVGIVVTPYRFPDKYHFYSYAMLVRHKQLSDGVQYGNKRAFGNGQLKAIFKSSAVCVLRGDNAFRRKYDLMRQAGVADKTARNAISRSIAATVLGVWKSGKKYDDRYMEVRRQGGCCSQR

SEQ ID NO: 236226 - protein, 453 aa, unidentified
MHRRTIGVDLAISAVQVAQIFDDGIPMGRPIRFRLDPEELRRFTATVTAGVPPGVPIQAIMEPTGMAWFPVASWLREAGVEVIRVKGQRVKALRRYLSEHAKTDLADAHVLGALPRFGGHALDPVHVPTAEQHALQRLTKQRHRYQEQICSSRRRVLDLIRWACPALEAVLPDTMTRVTLAVLAEYFDPRRVLRVRRATLVRFVGENASGNHPHQGPFVEQLVDRLREAARTTLALHGDRVDFESLQFELRQEIELMRMLDRNVTELDRRAETLYRGLHPGDSLRSIPGIGLALAPLLVSVLAAPGRFRNERHIRGYCGLFPTKTSSGGIDRPGQRITKDGNDRVKRALYLAADTARRIDPDLAAVYWRMMVTRGHHHKQALCAVATRLVSRIFRVLKTGHAYELRDLDGRPITVTEGKRIVAERFTVPTEIRRARRRHTATDAIGAAIASCA

SEQ ID NO: 236227 - protein, 340 aa, unidentified
MQIVRIGLDLAKNVFEVHGVDAQEEAILRKTLRRDAVAQFFADLPPCIVGMEACSGSHYWAKVFANLGHEVRLISPQFVTPYVKSNKNDRNDAEAICEAIGRPSMRFVPPKSSEQLEIQAVHRIRQRLVSNRTRLVNQIRGLLAEHGVVVARDITRLRHALGQIADGTDNNLGDMILELVCDVREELGELDQRIAAYNKRIRGLFRSNEMCQRIGEIEGIGPITATALVAAVGDRTCFKNGRQFAAWLGLVPKQRSSGGKSRLFGISKRGDRYLRTLMIHGARAVLAKAGGKTDPRSLWIGRMRNRRHPNVVAVAVANKNARIVWSVLSGGGRYQPVAPM

SEQ ID NO: 236228 - protein, 459 aa, unidentified
MPVKQQDKQVRSKQVVTLDSLKQIKLNAAGLDIGSAEIWVCVPEGRDETSVRSFDTFTVDLYALARWLHECGVETVAMESTGVYWIPIYEILEAQGFEVYLVNARHIKNVPGKKSDVLDCQWIQQLHTYGLLQASFRPEAEMCALRAYVRHRDNLLRHRSAHIQHMQKALQLMNLQLTNVITDITGQTGMQIIRAIVAGEHDPVTLARYRDPRCFSNEAQIAKALTGNYQPEHLFALKQALELYDFYGLQIKACDEEIEHKYSAIKPVVAIEAEPLPPAKRRKRSKNDPDFDLRSQLYQLLGVDLTRIDGMQALTVQQIISEIGVDMNRWLTVKHFTSWLTLAPHNDISGGKVLKSRTLKSKNRAAQAFRLAAQSVGNSKSALGAFYRRMRAKHGAPVAITATAHKLARIVYHMIKYREEYVDPGQDYYEQKYQDRVIKNLQRKAQQLGMQLVPLASVS

SEQ ID NO: 236229 - protein, 311 aa, unidentified
MKDDSIGIDISKDHLDAHRLSDGAAARFANSAAGFRALAKWLGADIPARVVYEPTGPYHAAFERRFAGNLALCKVNPLQARRFAQSKGTRAKTDQVDARMLAQMGVALALEPDAPLSQSQRDLKELQIARMALVKDKTRLKNRLQTLILAFTLKQAKARLTLILRQLSDIEAEINACIAQDGATAHKRQILTSIPGIGAVTAATILIECPEVGNMTGKQIASLSGLAPMTRESGKWRGQAYIQGGRKHLRNALYMPALVAARFNPDLKRKYQAMITAGKPPKVALTTLMRKLIELANTLIKNDRKWLPKGA

SEQ ID NO: 236230 - protein, 353 aa, unidentified
MTVYCAVDFHARQQTISYCDTADGEIHRRELHHQQDDVRGFYAQFQGEVIVGLEASGYSAWFEEMLEELQHTVWLGDPAEIRRKAPRRQKNDRRDADLILDLMLKGDFPKLHRFSAESRMVLRQLRYRHKLVKVRTIAKNSLHAISINAGLPMKRGLLTARGTERLQALALPPVLAQQRKEWLELVTVINQRITQVEAALELVAKDDAAVALLRTHPGIGLLTALGLRYTLMPVTRFSTTRKITAYVGLDCMEDTSAGIRRMGSISKAGSRLLRFLLNEAGHTACRKDPDLKRFYQRLVHRRDRPKAKVAVARKLLVRSFIMLRDQIDYAEFLRRGVAARSARKTHRPPMPGL

SEQ ID NO: 236231 - protein, 472 aa, unidentified
MIRSVGIDLHQGRHRARCLDDRAQPCDSFSFQTTPEGLATLEERVFREGANPIIVLEPAGLPWLMVAVYLRSRHPDCRLVKAKTQKVAALRRYLRGPVKSDRLDALTLAKMPFIDPEQLDEIYLPPAEIHALQRLTRQRKRIEQDITGRKVRISAIVDGYLPGVRRAFNDVWSSPVRAFLRSRLNPFAVVRDGEDALHAYLSKTSNRSKWSRAQTREVFLACQSVATVCELSGPVGTVNEEFFTDLQDEIARELRMLEADEAESESVARRIAELYRKLHPSDNLCTIPGVGEHTAPIFLATVGDPARFHNQSAFANWEGVVPGARQSSDVQAKGLRMTKAGPSIMRMALYQAGDIGRRWDPQLAAVYHREMVYQGKNHRQAMGAVMSHLGARVLRVLKEDSPYELRDIEGNPISKDEARRLILSKYHVSEDIRRERRRRNRKVGKDRETATYRTNEAGKAPQPVQVQAVSRQ

SEQ ID NO: 236232 - protein, 419 aa, unidentified
MLYDSRVHMDRTFVEFLPSSAHLLGGVFMTYFIGIDIAKYKHDCFIMDQDGSVIRDSFSFSNDSAGFCLFLSVLDSLDPSYEKRIGFESTGHYGLNLKCFLEEHDLSFMEINPILIKRFSSATTLRRTKTDKADAALIASYLTTVEYITYPIQSYHIHNLKSLILSRDALVKLRSGQLVMITNVMDKIFPEFKPFFNKSLKSSTAMYLLRNYTVPSKMASMNSESYRKMSSKLKKTISYARFSKLRELAKNTVGREDPCLTFELNTYLDIYQSLDSKIKEMEAHIEEEFKKIHSHIQTIKGIGWMSAASIYSEYGGIENFQTPNQMLAYAGLDPSRSESGEHAYKGHMVKHGSSHLRYVLLNCAEMVILHNPVFYDYYRKKREEGKHHRVALSHVARKLVRIIFFLEKNNVDYDPKKMR

SEQ ID NO: 236233 - protein, 378 aa, unidentified
MNRIIKIGMDVHTSNYTLCIFEPSFEHDGTVHCITQVKPEVKNIIHVIETFKKKHENEELNIVCGYEAGCLGYSLYHELKEKGIECVILAPTTMKTEKGGRKLKNDYRDAKMIAECLAYGGYSAVHVPTELDNSVKEFIRMRDDIKENLKSIKQQIIAFLTRNGKQFEGKSFWTRKHIDWINTVSFSEPLLQDTLKEYMIEYNHLCDRVETLDKQIEEVSLKEEYVEKVQQLQCLIGIKTHTALSLIVETSDFNRFKKGNMYSAYLGLIPGDDSSGGHENKLGITKAGNSHLRRLLVEAAQGYTRGRVGFKSKDLKSRQEKCSSEVVAYADRANERLRRKYYRMTLRGKKFNVAKTAIARELACFVWGIMTDHIDLCN

SEQ ID NO: 236234 - protein, 415 aa, unidentified
MLKIVYPICCGLDVHRDFVYACIATTVNGVTTYKSHRFSTFTKGLRELLSWLLASNCKDVCMESTGKYWIPVYNILETDCKIVLAHPKYVKAIRGKKTDKKDAKWIADIFKHDLVSGSFIPPADIRQLRDLVRYHAKLTNFTTGEKNRAQNCLTVSNLKLDSVFSDVFGKASSKIISHILANPSEKLSDVSAFRTKGMKATDEEILEAVDGEIYPEQAEKLRIIRDHMSSLDLCKANLQSLILSTAEKYIPEIDLVCTVPGIATFSAISVIGEIGVDMSVVPTSKHLCSWAGLTPQNDQSAGKKKTTRISRAGAYIKPLLVQCALAAVKSKNKHPEVYNRYSALKKRRGHKKATIAIARMLLTAIYNILKKHEPYNAEIYRKSDAPPEHRNVSVEEAIFILQRQGYLISSPVSIE

SEQ ID NO: 236235 - protein, 345 aa, unidentified
MYFIGVDHHKQSSTMTVLDEHGQEVRTTKLLNIEADIEAFIRAAAPGGFQAVLESGRSSYVMVDFLRELGGDVKMANPFELKAIAHAQIKTDRRDSKLLARMLRTGMIPEVYQRELGNREAQRVMRQRAFWTRLQVEVKNKIRVLLAQQREAVRLAVDALHESLFGKKGLQYLSQVELRDKDARLMQELVAAFRELEAHKKMSDGMVEALYQELPAAQLIDTVPGFGKTLSVMVAVEIGDVRRFSRVEKLLSYAGVIPSTHGSGEKTYHGHLKQGNNWLRWALIEAVYPATQSDSGLYIYYHRLASRKGANIAKAAAARRLLTIIYRILVEERRYIPDLSKTSAA

SEQ ID NO: 236236 - protein, 394 aa, unidentified
MHKDTHCAVVIDCWMNKLSEITFENRPSKFPAFVEDVKKICGTKEFVFGLEDTRGFGRNLSAYLVGRKFDVKHVNPAYTSAVRLSNPIVYKDDGYDAYCVARVLRDMVDTLPDAKHEDIYWTIRQLVKRRDLLVKNNVMNKNTLHNQLMYSYPSYRKFFAEIDGKSALCFWENYPSPEHIQNTTPEKVYEALKAVNQSLKMERVYQILALIESDGNTRKDFQEERDFIVKSLVKSIKNNLVQIKEIDVELERIIPLVGYKLHTMPGIDLVTEAHLISEIGDINRFPDSDKLARFMGLAPVSFSSAGKGKDERCRNGNRVLNAIFHFLAIQMVAVSKGGKPRHPVFREYFEQKVREGKSKPQALVCVARRLVRIIYGMMKTKTEYRPLEKVEVKN

SEQ ID NO: 236237 - protein, 407 aa, unidentified
MGITCGIDWAESHHDVALADDTGHIVARARIDTGATGFNDLLRMIAEHGGTPEGTPVAIETDKNLLVVALAEAGFTIYPINPRAVARYRERHGQAGGKSDPGDAAVLANVLRTDPDGHRVLPAVSEHGRAVKALARQHQEAIWTLHQTISRLRSVLLEFYPAALHAFPNLKHRAALTVLTAAPTPEAGQKLTRRRLESLLRRCGRRNDPGLVEQILTDLRAPTLRQPPQVEASLGHAVAGLLGIVDSMHRAVDDLEKELGRVFDTHPQAPILRSVPGLGPILAARVLAEIGNDQTRFVTPAGLRAFAGTAPITRASGRSHYVKARKVRNKRLCDACHWWAFAMLTKSAGARAHYDKRRAAGDHHNAALRNLANKLLGRLWWCLQHGEAWDDRAAWPQAHDGPNPAAA

SEQ ID NO: 236238 - protein, 357 aa, unidentified
MKKHIRIESTGQFTIGIDVSDRTSCYCILDHAGEIWGEGKLRSTPEAYRQQFGGMARTLIALEAGTHSRWMSALLRECGHEVIVANPRRLRLLTTSDKKNDPQDARTLAEMAWAKPALLSPVRHRSAEAQRDLNLVRARDLLVEARTKLINGVRCLVKSEGARVPACASGQFTKHADLHVPEEARSAVAPLLELIDELSERIQEYDERLEHEARTRYPQTALLTQVSGVGTLTAMAFVLTIEEPQRFERSRDVGCYLGLRPKQQDSGERSPQLRITKAGDSYLRRILVSSAHYIIGPFGPDTDLRRWGLRLCDRGGKNAKKRAVVAVARKLAVLLHRLWVTGEVYEPLRNAQAKLAA

SEQ ID NO: 236239 - protein, 374 aa, unidentified
MNSNGITWVGLDAPKKSIHVAMLLPGREDALSWQEANEEGAVRRLARKLTREAPGEVRACYEAGPLGDALQRELEAQGVICEVIAPSLIPFKPGERIKTDWRDARKLAELLRGGLLTEVQPPSEQDEALRDLCRGRDSVRQDLMRARHRMSKFLLRRGYRYRATQRHWGVQHMKWLRPLTFEQSAGQVVFDHYLLTSDHLDERQRQLDAQLERFGGQDPYRQSVAWLRCFRGIDTVTAVSLVAELHDFRRFRSPRSLMAYLGLVPSERSSGEQRRQEGITRTGNRHVRRLLVEAAWHHRHRPVLSQPLRRRREGQPASIIAIADRAQERLHARFMRMTRRGIHYNKPVVAMARELVGFLWVALYPHEPEAPPMA

SEQ ID NO: 236240 - protein, 370 aa, unidentified
MLDTTTFVGLDVHARSIKAVSLDVMTGEVRCATFGYDAGAVAGWVRSVDPRARCVYESGVTGFDLQKRLSGLGVDCVVGAVSKMIKPSADRRRKNDRNDAEFLARMLSVGNVVEVWVPDDECEAARDLTRALEDARDDLSRSKQRLSKFLLRHGLVFDERTPTGRRKGNWTRAHWSWIESIRFAERADNDVLAYYVDAVRRAAEEKARLEGLVGAEARKPRWRKRVDSLRCLKGVDTASAADLVFEAGEFSRFRNARSFAAWVGLTPSEHSSGESDRRGAITKAGNKHLRKTLVEAAWHYLTCSGRPKDLAKGQAPDRGARRHAAKGVRRLVERREALLARGVHGNKANVATARELACWVWAVGLMAEEA

SEQ ID NO: 236241 - protein, 342 aa, unidentified
MSEKRYLGIDLHRRVFTCCVRLENGRQFLSEVRLGQLPQFVKKLRATDEVAVEVTSNTRLFHDAVAPHVARVVVVDPHQFRVISQSVKKTDPNDARNLALYLAKGLLPEVRMKEKEQAQVASLTQTRDRLVKLRTALKNKVNNLLSARGIELQKEELSGEKGLTRVLAMDVEELTRFELQVLVEQIRSLNHSIAELEKVIDREGKKLKGHGNLTSIKGIGSLGASILLSVIGDVRDFPDEGRLASYFGIVPRIHNSNETERSGHITKRGSKLGRTALVQCALIAKRYSPYLANYYERIRGRRGTGRAIIALARKLLGIIYHTLKNNWIFQDFPNFILRETTA

SEQ ID NO: 236242 - protein, 452 aa, unidentified
MKQKAPDSKMKIADRPKLAKIIILEGTKMNDTQNKKIAQVTDKTLVVGVDIGSDKHIARAILARGFEVSKKPFEFANTRDGFEKFVNWSYNLAKENQLTKIFVALEPTGHYWFNLADYLKAYDIKLVLVAPQHVKHSKEMDDNTQMKNDRKDPLVIAKLATEGRYMFPYIPEDIYAELRAAFNRRCDLVDALTRNTNRMVRWFDIYFPEYREVYGKANAISGMMILMRAPLPSDILNLGVNGICQIWREAKVRAAGINRAKKLVAAAERSIGRKGCEAVRQELWQLMEEHDLLSRQLSDMMQIITDILGQIPGADRLLDVPGAGVVTVAGFLSEVGDISRFTDPKQIQKLAGLAVVENSSGKRKGLPGISRRGRKRLRWVLFQLARCMVKSNKEMKAYHQYYTTRKENPLKKMQSLIAIAGKITRIFFGMLKNGTEYDPAIVMKDLKKVVAA

SEQ ID NO: 236243 - protein, 360 aa, unidentified
MTGTMTWAAMDVHARSTYAASLDVITGELCRQRFDTGAVEPVIGWLAGLPGPVRACYEAGPTGFGLYRAAVAAGIDCQVIAPSKTPRPSGDRHKSDRRDTDLLLRQLMAGALTAVAVPSATCEAARDLARAREQVRLDLMRCRHRLSKLLLRHGRVWDRSAWTKVHREWLGSQTFAHHNTELAFIDNLAACDGLSARRDALDERLSRVATDPEFWPVVRRLRAFRGIDTLSALILLLEVADFARFPRAVQLGSWLGLVPSREQSGESDVHGSITKTGSKYARRILVEAAWHYARPPRVGKTLYERQEGLPDHVLQIARRAQSRLYRIHRRMRERKKPGNVITVACARELSCFLWAAATVP

SEQ ID NO: 236244 - protein, 340 aa, unidentified
MHKPSAEVFLCCGIDVSASQLMVALEGQGGTHLQRSFPNRASGHQALILWLQKNQTRIRVCLEATGLYSLDLALALHAANGIEVAVLNPKKVSGFAATLRRSKTDPADAQVLAEYARRMPFQPWHPPQAAALELRAITRHIAALTQQRTQQSNRLHALSASSAAARCVQQDLKRSLRDLERRTEKMRRAARALIAQDAELRPRLALLLSMPGIGEVSALNLLGELALLAPSLTVRQWVAHSGLDPAHHDSGTSVHKRSRIRRAGNRYLRRALYMPALVAVRHDPHLRAFYQALVARRKAKLQALMAAARKMLHAIFGMFRGGVGYDGSRLFPQLALADAD

SEQ ID NO: 236245 - protein, 434 aa, unidentified
MNEQNSTATPPLPPDYAAFVGLDWGDEKHALSVCAAGSTAVERATLEQTPEALADWANTLRTRFPNGKIAVAVELARGPLLAGLSQYEHIVPFPVNPKSLARFREALYPSRSKDDLVDADLLLELLTKHRDHLRAWQPDTRETRQLALLNEQRRHFVDHRTCLTNQLLSHLKAIFPQAPKLVGEDLSSRLATDFLKKWPTLQEVQKVKPAVLRQFYYGHNSRSEELISQRLALVKSAVALTTDSALLATHSLALQALAGQLAALRPFLDQYDQQIAQLFAAHPDASIFESLPGAGAVLAPRLLTSLGTDRSRFPEPAAVSCYTGIAPVTEQSGKTQMWIHIRWSCPKFLRQSWHEFANSSIKFSAWAGLCYQEFRKKMDHHEAIRKLAYKWQRIVWRMWQDRQPYDEARHLAMLQKKGHKFFPAQAVQPLKSGE

SEQ ID NO: 236246 - protein, 369 aa, unidentified
MEKKLFYVGIDVDQNSFSVAIIDIYTNQETFVKCSPNAPALISKLQKIANPEEFDICYEATYLGFNLQRILNKNGFRCAVVSPSMIPEIKGKKVKTDKIDAKRLAEYHMKGLLTEVHVPDEKLEMDRALIRSRTYLSKQVAALRRHILSICQRIGWDFRQETSLKSYWTIKFKNWLETKIAKSSDSSLKVNLKLLLRQLLQNEQTLDLYDSEIKNLSESDEYKNKTVALVCYRGLDTISAMGVVTEIGDINRFDHPKRLASYSGLDIREYSSGGRELKFNISKCGNKHLRTLVNEACQFAIRPPRIGQKLKQRRKHANIKQIEIADRCMNRLYKKSTRLLYKDKPRNKIKIACAREMLCFIWESLKVAA

SEQ ID NO: 236247 - protein, 324 aa, unidentified
MDMAWLGIDIAKRKYEVALLRPDGKWRSKSIANTPAGHGELLAWLRRQHEGPVHACLEATGTYGAAVAESLHDAGHRVSVINPAAIEAFGRSRLSRTKTDPTDARLIAQFCRTQEPPPWAPLPREVRELQALVRRLDALEGMRQQERNRLAADPGSAAVCASIQHLIDTLDEEMTALKGQIVDHFDAHPTLRQQRDLLTSIPGIGAATAAILIAEFGPMARFAHARQCAAFVGVVPRERRSGTSLRGKPVLSKLGSAAVRKALYYPALTALRCNPIVTALRDRLRLRGKHPMAIVGAAMRKLVHLAYGVLKTAQPFDPNFLQTT

SEQ ID NO: 236248 - protein, 452 aa, unidentified
MAKQSHRRCDQLPVLHPDAAGIDVGASELFVAVGADRDPQSVRRFPTFTRDLHALADWLQQCGVRSVAMESTSVYWIPIYQILEARGLEVCLVNAQHVKNVPGRKTDVSDCQWLQYLHSVGLLRASFRPPGAICAVRALWRHRGSLVQMAAEHIMHIQKALDQMNLQIHRVLTEITGLSGLRILDAILAGERDPLVLARLCHKRVKSSESTVAKSLEGDYRPEHIFALRQSLAAYHYYQQLVLETDQEIQRQMVELEAADNALAKMPKRTKRLPYQRQGHEPRVFDLRRELYRIFGVDLTNVPGISAMTSQTILCEVGTDVSRFRNASAFASWLGLCPEKKISGGKVLFTKSRRVRSRVAIALRLAARSLHHAKDYMGEFFRRICRKLGKPQAITATAHKLARIVYHLLSTREAYDESVFHKCEEEALKRAEMRLRRQAAHLGFRIIPAEEG

SEQ ID NO: 236249 - protein, 315 aa, unidentified
MNPRWIGIDVDKNNLHVHIRPDAQNFSCPNTPEGITALVKQVKRFKPILIVLEASGNLEMAVTTALKKAGLRVAVVNPRQVRDFAKATGRLAKNDSLDAGVLAHFAEAIKPPVRPLPEPEAQELEALVNRRHQIVEMLTMEKNRLSSAAKNIRPKIEVHIKWLEDELDQLDRRIEKDLKTNPAWKEKDQILQSVKGVGKILSSTLIANLPELGQLNRWEVAALVGVAPFDDESGKKKGKRRICGGRDDVRKVLYMATMASIIHNPIIKEYYNRLIGKGKKAKVAIVASMRKLLVILNTMMKEKTMWERRNFAYAS

SEQ ID NO: 236250 - protein, 397 aa, unidentified
MYIVGIDIAKRKHEAAVIDGEGTVIIKPFSFTNNCSGYNRLLAMLAKAKLPLDEVSFAMEATGHYWLALFTRLQKEGFRVQVINPVQTNSIRSFYIRQAKTDPRDALLIAEVIRFGHFSESTLHPENIYELRELCRGRHAIVSMQADVKRKVVALLDQVFPEYETAFTNLFGDTSMAILQACPTPKELSEMPLEELCYLIEVSSHKRFRMAKAQELQELARNSFGFAMAGDVFSTMIRLYAKHLDFLKQQVREMDRKIAEIMDTLDTPITTITGIGPTLGAYILSEIGDISRFSSAAKLAAYAGIDPTMRQSGEYNGVRNRMSKRGSPYLRHAIWLAASSAVLHDPALKLYFQKKRDEGKPYMASVGHACRKMVSIIYAVMRDNKAYTPYIPNEISA

SEQ ID NO: 236251 - protein, 385 aa, unidentified
MQKLNDLSRCLTPLEPDGTLIAVIEMSLSSWLVAGIVPGVERQPLKKLAVDESALLKLLNRWREEAEKAGRKIERIAVAFEAGRDGFWLARWLRARGIEAHVIHASSVAVSREHRRAKTDRLDTELLKRAFLGWLRGERDHCKMVAIPTTKDEDAKRPNRERQSLVGEQTRIVNRMKAALIRLGIRGFNPKLKKAAGRLEDLRTPEGEPIPPNTLAELRRDMERRRLLSDHIRQIEEARLERMEQAPGDGPHAMVRLLARVIGIGIETSDMLVHEVLSRRLRDRRAVARYAGLTGAPDESGSKRREKGLAKAGNARVRRGMIQLAWRFLLFQKDSALAQWYRTRTEGAGKKRKTMIVALARKLLIALWRLVTTGEVPAGVVLRAA

SEQ ID NO: 236252 - protein, 427 aa, unidentified
MSNHISRIEQFRQFKQEIRGSEAYLIVGLDIGKSSHHAFLGTATGRGLLRRLKIKNSAEGFERLMAHVDFCMTKERVSQVVFGLEPTSVYHKPLAEFLVERDYLVVYVTNEAIKKNRALLDGRWDKNDTKDAANAADLVSQGRCQYYDLPDMALRDVRSLLAVRMSLKKQRHRLRMRIRNNLVAQYFPEFDKLWSKSQAENLAIVRWCLAPEKIARLEFDKFFQMVTTRSRGNDQYCRLRNIWDTAHHSIGCQAGSALELEARIMVEALHQVEEHIRKVDASIEQLCKGFDEYKLLLTIPGFGPYISAVVLAAIGNAHRFENQSQVLRLAGLDLNASRSGQKSATAVPVISKKGKAHLRYALYQAGLIASTANTGFMAYFAKLLRGREREKGIRTKMRVKLAAKLLVIAWTLMKKKEPFGPDYLDID

SEQ ID NO: 236253 - protein, 412 aa, unidentified
MDVIYPQCCGLDVHKKTVTACLITSIEGLEPVKEIRTFRTMTADLLALADWLQEAGCTHVAMESTGVYWRPVYNLLEGQCELLVVNAQHIKAVPGRKTDVKDAAWIAELLRHGLLRGSFIPSNPQRQLRELTRYRSTLVQDRARTLNRLQAVLEDANLKLASVVTDIYGVSARAMLEAILAGERDGEALADLARGRLRAKRDQLKEALEGRVTAHQSFLLTEHLSTLEYLDEAIARVSGEIDQRLIADQEAIALLDTIPGVGQRAAEIRIAEIGTAMSRFPSAKHLASWAGMCPGNYESGGKRRSGKTRKGSRWLRQVLVAIAPVAAKTKHTYLAAQYKRIAARRGKKRALIAVGHTILTIVYMMLTRKQPYQDLGAAYFDQREQQRVERRLVQRVERLGYEVSLQPRALAC

SEQ ID NO: 236254 - protein, 450 aa, unidentified
MSSRVSIGALSADRTITVLTVPCSLTPAPDSLDGREAVQRDGGRSDADEVVVGVDTHKAFHVAAVIDSVGGVLGSTTVPATAAGYARLVGWAGSFGRVERAGVEGTGSYGAGLARHLARAGIAVIEVNQPDRSTRRRRGKTDAIDAESAARAVLAGYAQAQAKSGDGRVEMLRMFKLAKESAVKSRTQAINQLRAILVNADPGLRESLAGLGTVRLVERCVRLLPGTGGDALAAAKYTLRLLARRIQHLSAEINDLKQQIHEVVAAHRPQLLERYGLGPDTAATLLITVGDNPHRLRSEASYASLCGVCPVEASSGNTSRRRLSRGGDRRANAAIYRIAISRLRWDPHTKAYLQRRISEGKTKREALRCLKRYIARQLYPLLLDQPTNPPRTHPDSRLTSIGASNTPATTELASSSPASCCSGRRQRPINQTGPSTTAALSLMGLCVSAV

SEQ ID NO: 236255 - protein, 354 aa, unidentified
MYYSGIDLHRDTCFITTLDDAGRKVKTKNLPTDPKQIQQYFTDLPGDHRAVVECTTGWYWLSDLCQELGIDLILAHAKHLKAIAYAKVKTDTADALTMAQVLRLGFIPEAHQVSRERRGLRDLLRHRLRLVETRSRLQTQAQAILLKFNHSPAPGKMLRDVNALDAYLDNTLPPDYRLQLDTFALQLQQLDASVQRIRSHLRTDLIPLPDVQHLLTIPGVGLMTALTVYLEVDGIQRFPTVGHFFSYARLVPGAHNSGGKHHHTRRKDGNRYLKMAFGQAAPKARQYYPVIRQWFAHKERKKGFPIANALLAKEIARSAYYVLLKGEPFHGHWKGQPLDHHKQRHWPQPVNASA

SEQ ID NO: 236256 - protein, 346 aa, unidentified
MAMTIVTRAVTGGVDTHGDVHVAAVLDEVGTLLGTDSFPACTSGYVDLTRWLRHFGAPAKVGVEGAGAYGAGLARHLASEGIEVIEVDRPNRQARRTQGKSDPLDAVEAARAALSGRAHGHPRGRDGVVEAIRVLVVAKRSARGARVRAINQMRHLIYSAPDELRLRLKALSITELVATASALRPKRCGDPVMAATQAALRSLARRVHALGEEMRLLEQLLQPLLEAAAPALLSVRGVGPDTAATLLITAGDHPERLRSEAAWAHLCGVSPLPASSGKLIRHRLDRGGDRQANSALWRIVMVRLACDPETQRYVERRTKEGKSRREAMRMLKRYVAREIYAYLRAT

SEQ ID NO: 236257 - protein, 344 aa, unidentified
MDISTIGLDLAKTVFQVHGIDASGAVAIRKTLRRSQVLPFFAKLRPCLVGMEACGTSHHWARELVKLGHEVKLMPPAYVKPYVKRGKTDANDAEAICEAVTRPTMRFVAVKSREQQAALGLHRTRELLVKERTQLVNMIRGLLAEFGIDIPRGLERAIAMARQVAAGEVLDVPEDTATCIVELCGQALAAHERVRIIDRAMLASHRANDVAMRLATIPGIGPIGASALAASVADPHQFKSGREFAAWLGLTPLQQSSGGKERQGRISKMGDKYPRKLLIIGMTSLVRRAKYKPESADPYVVRLLARKPARVATVAMANKAARIAWAIMTRGDTYHASAPRLLAA

SEQ ID NO: 236258 - protein, 378 aa, unidentified
MYRIIKIGMDVHSTNYTLCAMEPVIGAEDRIFANIKVTPDYKNVLMFIENLKLKLGLNDTYDIECGYEAGCLGYSLYNQLTAAGVRCVILAPTTMLTQQGQRIKTDARDAVMIAQCLSYGGYHPVYIPTEEDDSVKEYLRMRDDHKLALKKVKQQINAFCLRHGHRYEKTKWTIAHLKWLKQLELSALYRETLDEYMASYDEQTAKIERFDKRIEELASQERYQKKVKKLGCFLGIKTHTALSLIVETGDFERFAKGNVYAAYLGLAPGERSSSDSINRLGITKAGNQHLRLLLIEASGGICKGAVGHKSKDLRQRQNGNPADVIAYADKANTRLRSRYYKFIRHGKKRNVAVAAIARELACFIWGMMTDHIQMQKAA

SEQ ID NO: 236259 - protein, 337 aa, unidentified
MKYSGIDLHSNNSVVTITDEEDRVMAEKRLPNDLHRILDFLKPWKEELSGVVVESTFNWYWLVDGLQEAGYKVHLANTTAIKKYDGLKHSGDETDARHLAHLLRLGILPTGTILPKEQRAVRDLARKRMQLVRSRTTHILAIENITARQFGARMSSNQVKKLTDDEIDRMPLHADVALALKANLAVITAASAQIDLLEKRLQEIIKERTTYGLLTSVPGIGKVLATTILLETGPIERFADAGNFASYARCVDSVHTSNGKKKGEGNTKNGNKYLAWAFIEAANFARRYSAEAKRFYERKKAKTGNVVAIKALAHKLARACYHILKDGKPFDVTRCFA

SEQ ID NO: 236260 - protein, 468 aa, unidentified
MSEVRLGIDVACRADHRASLADERGEFIWSSWKFRTTTADLERLWTKIPDGASVSVILEPTRNAWVPLSAWLQARGATVILVPPEQSADLRDYYNKHTKTDRLDSKVLARLPLLHPEGLRGIDNLGPAGSLRRAVRHRFSLVKRRSAASLRLDALVELLGPGWADSLGSATASKTALVILEKYADPRALKRLGRARLTALLIRSSSGLWREDKADELLAMATETLELWSCGGIDFAELAHDIASEVRVLRQLDDEITAANKRIAVLYGEADPKGIVASAPGLGPVLSAAILGNVGDFNRFASLAGVRSFTGFVPKIDQSGLVAGHKGITKAGDAGLRRALYMAADHARHIDPTLAQRYYRLVMVEGKHHNSALCSVSAVLITRIAACWRKGELYNLRDEDGEAITEAEGKAACADRFKIDPKVRAARRRSTPAKALKNRVAGRGRKESAQKVAPAIDPPGKEASENVA

SEQ ID NO: 236261 - protein, 392 aa, unidentified
MYIVGIDIGKNHHEASIVSPEGKQIGRSLRFATTHKGADSLMSFIFKNIGNSPCVFGMEATGHYWYPIYSFLKAKGYTIYVINPIQSDSLRKMYIRQTKNDSIDSFLIAEVIRFGQFGTTSMADENILAMRQLCRYRDSVISSRTEIKLRIGTIMEQIFPEYEKQFSSLWVSTSMGILEKYLTPENIENAPIDELFEITKDKSHNRLTKAKAISIKEAAADTFGIKIAQDAFSFQLKQLIDRMNFLDKQIEALDCQILEYYEKFDCYLHTIPGIGMIAAATILAEIGDINRFKSSSALVAFAGIDPTVRQSGEFSSTHNHMSKRGSPYLRHAIFLAATTRSFHNSPLNAYYKKKRDQGKHHLTATGAVARKLTTVIYAVLRDSKPYEPKKFC

SEQ ID NO: 236262 - protein, 368 aa, unidentified
MKEVTTRYVGLDVHKATISIAVADDGVAPVLFGTIANEATAVHKAVSLLKSGGKLVAAYEAGPTGYGLHRQLTQLGVDCVVVAPALIPRRAGDRVKTDNRDAIALARLLRSGDLTPVWVPGQQDEALRDLVRSRFDAKDDLRRAMHRLAKFLLRQSIQAPPGIKPWSARHLQWLETLRLNHPTSQLVFEDYRVAVHAARERVRRLEADLERCAEQSPRLGTILALQVLRGVAFLSAVTIVAEVGDFRRFPNAPRFMSFTRLTVSEHSSGQSRRQGRITRAGNRYLRHILVQAAHNARFAPSLEGELKRRLKDVPADLVALSVTAQNRLHRRYRHLDRRIGRPKAVTAVGRELAGFVWAIGQRMEASAA

SEQ ID NO: 236263 - protein, 369 aa, unidentified
MKHSIIFSGLDVHKDSIDIALADDGRNGEIRSFGTIGGDLASLDKAIRKFRRSGVELRFVYEAGPCGYEIYRHLVSQGFHCDVIAPSMTPKKSGDRIKTDRRDAITLARLYRAGELTPVYVPREDDEAMRDLVRGREDAVNATRKAQQYLSVFVLRHGFRYSGAKAWSLAHLRWLADIKMPHPAQQITLQEYIHSVEESSERIDRLTEQILKLIPAWRMAPVVVAFQALRGVAPIVATTMVVEIGDLRRFENPRQLMAYLGLVPSENSSGKTTKRSGITKTGNGHARRALIEAAQAYSFPARVSRALRKRQEGLPREIKEISWKAQVRLCGRFRKLLARGKNRNRTITAIARELSRFMLANAKEVPMPA

SEQ ID NO: 236264 - protein, 458 aa, unidentified
MNPKRSKSRNGGKMPMVHPNAAAIDIGATMHMAAVRADRAPEPVRSFGTFTADLHRLVDWFTECGVETVVMESTSVYWIPIFELLDARGFTVFLVNARDAKHVPGRKTDVSDAEWLQRLHEYGLLRASFHPEARIAALRDFMRQRERLLDCAASHIQHMQKALTQMNLQLHHVVSDITGVTGMNIIRTFVAGERDPAALAALRDQRCKASDETIRQALVGNDREEHVFALTQALELYDAYQTKVADCDKRIASVLDRLQAECPPPAAPMPAPRHRTRQPNALGFPAREALHRIVGLDLTQIHGLGPYLALKLVSECGTDLSAWPSAKHFTSWLCLAPSNKISGGKVLSARTRRSSNRAAALLRLAAVTVGRTETALGAFYRRLSGRIGKAKAVTATARKIAVLFYNTLRHGLAYADPGASYYEERYKCRVLSNLQRRAKSLGYVLQVAGLASAAEGVS

SEQ ID NO: 236265 - protein, 340 aa, unidentified
MKEISVLGIDLAKSIFHFYGVDEHGKAVVSKKVRRGQVLETVAKLAPTLIGLEACPGSNYWARAFRKLGLDVRIIAPQFVKPYVKSQKNDAHDAEAIVEAMMRAHMRFVPIKEIAHQDIQCIHRVRSRLIRNRTRLSNEIRGLLAEYGIVFPLKIYSVKKKMPLILEDAENELTDRSRSFFQELLFELYDVEKRIAVYDQKIQEVYIERKEVCDRLLEVPGVGILTATAILSAVSDPHQFKNGRHLAAYFGLVPRQVSTGGKTILRGITKHGDRHIRTLLIHGARATMRHSKNKTDKRSQWIQKKIETRGVNKTCVAIANKNARIIWNLLAKNERYRKAA

SEQ ID NO: 236266 - protein, 323 aa, unidentified
MSNFVGVDIAKNTFDIATHLPNGKHKTKAKLANDPKGFKEFEAWLNKQVEPSSLIVMEATSVYHLELAEFVYNRGYRVCVVNPSTTSAYAGSELRRIKTDKSDAKLIADFAREKAEKLQLWAPEPLKYRQLKAMVRRLDDLQEMERMELNRLDVSDEKVKDSINSVLRHIEKEIAETHKAIKKHIDDDPDMRQMRDLIVTIDGIGQKTLERLLAELGDLRKYDDPRKLVAAAGLNPKLQDSGVLKGRTVISKIGSARVRAGLYMPSLVALKHNEAIIAMKDRLKANGKAPKQIICAAMRKLLHFVYAVLKSGQPFDPKFALAR

SEQ ID NO: 236267 - protein, 358 aa, unidentified
MDPADEDSLKRVSQHLTKRQDNMDTVTTVGIDIAKNVFQVHGVDKKGRCILKKRLSREKLLDFMRNLPPCVVGIEACGSSHHWARELKKLGHEVKLMSPQYVKPYIKTNKNDCNDAEGICEAVTRPSMHFVSAKSIEQQDIQALHRIRQRLIEGRTALVNQIRGLLAEYGIVMAQGVSVVRKKLPEILSDENNNLTSLAKEIFRPLYEELETLDKKIKEADMCVEKISKASEVCQRLVKVEGIGPLTATALVAGVGDVSVFKNGRQMAAWLGLVPRQRSSGNKQLLLGISKRGDSYLRTLLIHGARSVVSRVKDGSSWLMGLIRRGGSNKACVALANKNARVLWALMAQGTEYQPRAL

SEQ ID NO: 236268 - protein, 449 aa, unidentified
MSIVEGSAAAVAVGIDAAVVANHHVVVRRPEAGRPGTVVDDFVVPPTLAGMERLTKRLAAWPGAVAVAEPTSMTWLPLSIALGDAGVELSLVGNRHSARLRSALAGKNKSDPIDAAVLSRAGEFFELSPARIPAATELALRRAAQRRGKTITDANRCLRRLISQARWAFPDLWNAFAGSRPTALGVLGRWPQLGALARARVPSITEVVAAHTRGVAGVEQRAQQIRATARAWAEFWDGHLDLDALGWETAELLADLAAAEERVERATDQTRHHWEQLWGDDPVLLSVPGMGPILAPTVRAFLADGSHLDDAKAAQSFVGLNPSNWSSGQMESPSRAITKEGPPVLRLAFYQAANVARAHDPQLAEFYRRLMIERGHCHTKANCAVARKLVARTWATITSGTPYQLRDLDGTPITRRQATKLAAALDVPDDVRRRTRAHSAATHRARLTR

SEQ ID NO: 236269 - protein, 338 aa, unidentified
MKVTTVGVDLAKNVFQLHGVDEAGRGVLHKRLSRGRLLGYLANLEPCLIGIEACVGAHYWAREIGKLGHTVRIMSPQYVKPYIKSNKNDRNDAQGICEAVGRPHMRFVAPKSVEQQTIQALHRIREQLIKGRTALVNQTRGLLAEYGIVVPKGVHKLRAALPEILEDGENGLTALAREVFAESYEQLLDSYRRIEAYDRRIESLFRASPTCQRVAQIEGIGPLGATALVAAVGDAKVFKNGRQLAAWLGLVPKQHSSGGKNRLLGISKRGDRYLRTLLIHGARSVVSRCDNKQDARSRWLCALKQRRGTNRACVGLANKNARIVWALLAREEAYRAAA

SEQ ID NO: 236270 - protein, 327 aa, unidentified
MTHQILGIDISKQSFDAAFLDGGHTYQGQFSNDKKGLQKLATWLKKRRAEQVHACMEATSRYWEEVAYFLYEQGHKVSVVNPKLIKKHAEATMQRNKTDKQDALTIADYCAKHEPDLWTPPPPSVRQLQVIVRHVASLKQDRQRERNRRETSTQAADVVAAIDRHIAFLDEQISDLEQRIKDLIDNHPDLKQQYELLRTIPGVGDKVATTFLAEVPNVNWFAQASQLAAFAGLTPGERQSGTSLHGKGKLVKWGNAHLRSVFYMPALSAHRWNPIIAGLRTRLKAKEKHGLTIVVAIMRKLLHLCYGVLKTGKPFDPDHAAWAQFIS

SEQ ID NO: 236271 - protein, 453 aa, unidentified
MCLEDRPVLEPNAAGIDVGAGEMFVAVPPGRDENPVRVFATFTEDLERLTDGLEQCGVTTVALESTGVYWIPLFEILEQRGIRPCLVNARHMKNVPGRRTDWHECQWLQFLHSVGLLRAAFRPGQDVCAVRTLLRHRNELVVAASQHVQHMHKALTQMNLQIHHVIRDITGLTGRAMVDAILAGQRDGAELAKLRDPRIKADSETIRKSLEGNWRSEHLFTLGQSRDLYRIYQQQIVNCDLEIEKMLQGFAPRIDPGERPLPPDRKRNRAGSKRRKKNGHPHPEFDLRSEAYKLFGVDVSQIPGLEENALPLFSEVGRDMSRWPSAGHFVSWLALCPDNDISGGKLLWRGARRVKNRAGQLFRMAAYALHRSLTPLGNYLRRMKAKLGPQAATMATAHKIAVIFYTMIKNQVEYDETIWDARDAQREKKLQAKLKRQAKQLGYELVPIEPQAA

SEQ ID NO: 236272 - protein, 387 aa, unidentified
MQSVTPATVVAAAARTNDITLFASLELSKSKWVVTINSPGSEKFSKHLVEGGDGAGLIDLLSRSRAKAEQRYGVPVKAIVIQEAGLEGFWIHRLLIANGIESHVVDAASIAVPRRHRRAKTDSIDGETLLRTLMAWARGERRVCSMVQAPSPEEEDRRRLTRERGALLEERIRHTNRIRGLLSGQGIRDYNPLRRDCLKRLEGLRTGDGRELPAMLKEEIRRELDRLALATTQLAAVERARDALIRADAEERNNPAAMLLKLKGRGPEFASLLWLEALFRSFANRRQVAAYGGLAPSPWQSGGVERDQGLSKSGNRRLRKTMIELAWFWLRHQPDSALSRWFQARVGAAKGRVRRIGIVALARKLLVALWRYVTQGVVPEGAVFKAA

SEQ ID NO: 236273 - protein, 311 aa, unidentified
MPANADPHYVGLDISKDQLDYCISETDEGCFPNTSDARAAFIKKLLLLGAARVVCEASGGYEKIVVAELLAAGIEVCVVQPGRVRAFAYAEGLLAKTDRIDARLLRRYGQKVQLRLAAPVAATLATLRELLEHRRQLTTQLSELEGRLPLAGPTLAKLLGRQRTFLRKQIERVEKMIDQHIDHDPDLRHKSARLQQITGVGPILASTLLAYVPELGAINSAQLSALIGVAPHPKDSGKTRAPRHLRGGRAQVRHVLYMAALAAARSNPILAGFYQRLLANGKPAKVCLGAVMRKLVCLMNRLIQEPDFILV

SEQ ID NO: 236274 - protein, 338 aa, unidentified
MQYVGLDVHKTSCQACVKDENGNVLLEEKIPSTKEELNRFFSQFDEAEVVLESTILWEYVYETIEEIGFRVVLAHPLKTKAIAAAKVKTDKVDAKILADLLRADLVPESYVPTKEIRDLRNLVRERRYLVNLSTGLKNRVHSELTRKGLRRPGGANLFTDGNRRWLRSLDIMNIDIDLNVIEFVGTQIKDVEKIFHQEFMRNDDARLLTSIPGIGETIALTIIAELGDIERFRGAGSACSFAGVVPTVRCSASTEHYGPISKEGSKGLRWALVEAALFHIKFAPDSRLTRFYRTLSKRKDHGTAIVATARKLLVVIYWMLKMNEPYHAQGFDPVIEPA

SEQ ID NO: 236275 - protein, 366 aa, unidentified
MKKTSTVQAFGNEIFKEQKLTIGVDLGDRWSFYCVLDETGKIILEQKVPTIPEAMKQTIGKMPRSLIALETGTHSPWVSRLFTELGHEVIVAHAQKVQLITKSNRKDDRRDARTLARLARFDPELLGPVRHRSVQAQLHLTVIRARAELVSARTALVNAARGLVKSYGQRLPKCGTYQVSRELAAALSTELRDVLEPLLKEIESLNERITEYDGRMEKLAREVYPEVSLLKQVKGVGTQIALSYVLTIEDPYRFPKSREVGCFLGLRPGRRNSGESEPQKGISKEGDRYLRTMMVQGAHYILGPFGEDSDLRRWGLKLAERGGKNAKKRAVVAVARKLAVLLHRLWVGGEVYEPLRHSQKALREVA

SEQ ID NO: 236276 - protein, 387 aa, unidentified
MARKRTLSTLDTSIAYEAVGLDLAKEDTAIAAFGPDHEGPYLIDRMPYDKLYELLADMAPTLVAMEPCSGAHQIAEQIQELGHEVMMISGRHVQAWVKDHCNGQKTDLNDAFAILNLAYDRWLTPIRGKTREECRLLALQASYRQLKGQRTKTMVHVKATLHAWGFPIRAGSFNQKALHELIDANREAFGDEVAETLHLMINRVRDLDHDIATVLKLLTEATKRDPRASLLRSIPGFGILTMSRWCAVIGDIARFDSPKQTMAFVGLVPNNRITGHHTETSSGREARGQGRMSKRGDKMLRSLCILGAGALCLMVRNDRLPDCPFVASIKERLASPRPWFKVLVYVAAKLVRIATALLKYGETFSFEKAGISKAVLKQWELEQAKAA

SEQ ID NO: 236277 - protein, 377 aa, unidentified
MTCDEDPSAQTLVDMASEMFQELEEVPKTMVGGFDVHRQQITFDCVNDDGLVHWGQIRPATRQGLRGWLGKHCPDGDGEFALEGCTGWRYVSEELAAAGVGVHLVDPAEIAGLRGRKKRAKTDRADARLLRRLLLEGRFPESWVPPAHVVEVRTLGRLYCTLMDERRAWQQRIHAQLFHQGCPPIRALLTEACRAALAGAALSAAGRQYVDAALRRIDELSIEIVPLRIQLVDFARRQRGCQALQRHYGIGWLCSAIIWAEIGDARRFSSSDQLVRYAGLDVTVYCSDGKRAPGHLSRQGSPELRWAAFEAAKSAARRGSPDHAYYRKLAAKHDGHNGKNPTLAVERKILRRCHHTLRELGDAAPALPDTPAQEVAA

SEQ ID NO: 236278 - protein, 345 aa, unidentified
MNKVVAGMDLHSNNVMIGVMDMNGKRLASRKVPCELGEVVKFLAPYKKRLERVAVESTYNWYWLVDGLQFLKYPVVLANPAGMAQYSGIKHADDTNDAFFLAELLRLKILPTGYIYDANLRPVRDLFRRRLMLVHQRTALMLSFKSLYTRTTGQEMSLSELKALEIKEAQKLYEHPANQLIAGMQIKHIEQLSESVDKIEKAVLASARELPFYAKLTTLPGVGKILGMTITMEVGEINRFASPGDFASYCRAVQAQRLSNSKKKGENNSKCGNKYLAWAFVEAANFARRYDEPCRKWYDRKAAKTGTIIATKALACKLAKAAWFVMAEGTDYDPKRMFGQPATQK

SEQ ID NO: 236279 - protein, 341 aa, unidentified
MKNKSFIGIDISKNVIDVSIFCEETPIKDFSHDVFNNSRKGFGEMCTWLKKNHVVLSNCLFGMEFTGSYSMELEKFLNTRNYQFCMLSTHVVKHYPMGPKDKSDKIDSAKIADFLYRYNGTECVKPYNMPDKTMQRLKALMNERKFLVEQRTCFMNRRQLCITKEDAQLYDGYIKKFSRDIENIELEEQKLLATDDSLLSTYKNLLTIPGIGFVNAINVIVITRNFTVFETARQYASYVGVAPHFRTSGTSVKWRPRPSARCDGQAKADLSMAATVVVQYDAELQSFYNRKLGGKQDSDTKRKALNAVKFKLVLRMFAIGKQNRKWEPLDSKSSNEKLAIS

SEQ ID NO: 236280 - protein, 373 aa, unidentified
MKKVRFLGLDVHAETIAVAMAEPDGEVRSLGIIPNREESIGKLVKKLGPAEQLQACYEAGPTGYVLYWQLTALGVKCEVVAPTLVPVKAGDRVKTDRRDAMKLARSYRAGDLTAVWVPNEEHEALRDLVRAREAAKQDQLRARHRLSKFLLRHGRRAPAGIKVWTQKHEEWIKKQVHFEQPAQEYTLLDYLHEVEHMGDRIQRLEQAIAEAVKLAPRRMQEVIQSLQALRGIAQISAVTVVAEVGEISRFEGARQLMGYSGAVPSEHTSGKRMQRGPITKTGNAHLRRIAIEAAWAYRHRPAIGPRLRKRQEGLSEEVKEIAWKAQHRLHKRYRTLSAAGKEKQKVITAVGRELLGFIWAIGVQAERNSKRVA

SEQ ID NO: 236281 - protein, 347 aa, unidentified
MTTLEAVRGITGGVDTHRDVHVAAALDPLGGVLATESFPADAAGYQALLKWLETFGDVTKVGVEGTGSYGSGLASYLCRSGVEVIEVDRPDRQKRRRSGKSDPLDAVEAARAAQSGRATGSPKSKDGAVEAIRVLVVAKRSARQARVKALIQMRHLGFTAPEQLRCRFKGLTVPAMVGEGIKLRPTRSGDPVMSATKASLSSLAHRISALDDELAELDERIEALLVKTVPDLLDLFGVGPDTAAALVMAAGDNPERLYSEAAWAHLCGASPIPKGSGKSSGRVKVHDGGDRQANSALWRIVMVRIAHDPKTKIYFERRVKEGKTKPEVIRILKRYVAREVYRYLPRG

SEQ ID NO: 236282 - protein, 454 aa, unidentified
MDPKVVKQRRCCGLDVHKESVFACVLSVEGNKPIHKVYGTFRNDLIRMRVWLKQMGVTDIAMESTGVYWRPVWNVLDGHGLVLLLANPQQVKALQGRKSDKRDSRRIAEFLHDGRLDGSFVPPREIRDLRALTRLRTSWLEQRNEVHNQIRDLLETANIKLSSVASDLMGVTGKGILKAMAEGMDSPERLSWKARGSLRKKEAEIKESVKGEFSPMFRELLEMHLKYYEFLTSQIEKLEQSIEAAMEPYQEQLRLLNTIPGVKDTSAWNLLAELGADMSVFPTAGQCASWAGLCPGQNESAGVVKNTKTKKGNRYLRRGLTQSAWAISHKKDGYLRAVFYRVKASRGWSKAIVAVAHKVLVIAYEMLKTGQEYRELGGDYFDKLNPGRTTRRLTARLQRMGYSVTLTPQEGGHDASVGLTPAPVQQVAVPEKRKRGRPRKSPAVGPTNSAPSAV

SEQ ID NO: 236283 - protein, 402 aa, unidentified
MNCVGIDVSKGKSMIAVMRPFGEVVVSPFEVRHTASELSELARLLKNLDGETRVVMESTGNYHAPVAWLLHDAGLYVSVVNAMLVHDYGNNSLRRAKTDKKDAVKLANYGLDHWLTLPRYVPEEDTRLMLKTCYRQYQQYSKVQTMLKNNLISLLDTAFPDANRLFTSPPRADGSEKWVDFVATFWHCECVCGLSEKAFTAKYQKWCRKHGYNFSEDKALDIYASACRHFGVIPKTDTAKLLVEQAISQLRATSAALAALKQEMQSLAASLPEYPVVMEMFGVGPTLGPQLMAEIGDVRRFHSKKALVAFAGIDAPPYQSGQIDVRSRSISKRGSASLRRTLFLVMSVILQCAPIDEPVYQFMDKKRSEGKPYRVYMMASANKFLRIYYASVKAYLESLEHD

SEQ ID NO: 236284 - protein, 320 aa, unidentified
MRFYTQQHPFYCGIDLHARTMYVCILDQAGETRLHRNMTATPEALLKAIAPYRDQIVLAAECMFTWYWLADLCAEHGIPFVLGHALSMKAIHGGKAKNDKIDAHKIAVLLRGGMLPQAYVYPAKMRATRDLLRRRMHLARKRGALLAHVQNTNSQYNLPAIGKQIAYKTNRDGVAERFADPAVHKSIEVDLALITSYDELLRDVELTIVKTAKHHDANTLYLLPTVPGIGKILSLVLLYEMHQIERFPRVQDFASYCRLVKCAKASAGKRSGTSGTKIGNAHLKWAFSEAAVLFLRDNPAGQKFLTRLEKKHSKGKALTI

SEQ ID NO: 236285 - protein, 357 aa, unidentified
MSPQINQLDFKGQLFFIGIDVHKQNWSVTILDDERELQRFSMNPTPEDLARYLQRNYPGGRYKSAYEAGFSGFWIHRRLVELGVDNIVVHAADIPTRQREKNQKSDKTDSRKIARELRNGSLQGIWVPDPALQDLRSLCRLRFKLARDRSRTKNRIKQFLHIQGITIPDPSEIWHWASAFEDWLESIVFENQTARDCLSGYVKEYKLLQKLIDDTLNKLRQYSQQAEIREIIYDHLMSIPGIGFIIAITFYTELGDPRRFKRLDQMACFVGLVPSVSASGEKERVRGISDRHNRYLRYLLLEAAWVAVSKDPAMGLAYKQLCKRMSKQEAIIRIAKKLLNRLRYVWINRKPYVVAVC

SEQ ID NO: 236286 - protein, 368 aa, unidentified
MNEYKLKAAATAVSKEGNSQKEAKANRIAIGVDAHLKSYQAARKIDNGAVGVAQTLRSKEALLLYVEKQRGQAKEVVVVYEAGPLGYTLYRQLKAMGLECLVCAPRSGEQKRKRRKNNAIDARSLTSELANYLNGNEQALQLVRVPTEAQEQARVESRQHDALVEQRKRIGAMGNSLLLSQGYGSWSNWWRPKAFERLSKGVAAWIVKHLRRWVGILRELDQQIQQAKAELTKQYQGARPKGMGAPSLAQLNAEVLDWNLYSSGRKIGCLAGMVPSEWSTGEAQRLGSITKVGVPAIRRIITEMVWRMILFQPEYKAVQKWRDVLEGPNRGLKKKAVVAIGRQLMVDIWRLQTGRISAQELGLSLIEG

SEQ ID NO: 236287 - protein, 416 aa, unidentified
MKKNTNSPTNKEPRAKRAKAQRPVQREAKEVLAELVEKLRGKLEVKSTSASQAEAGPRGELGPNLDRLTVGLDLGDQWSHFCILGFEGETLSEGQLQTKEAEVAEFFQALAPARVVMEVGTHSAWMQEIIAGEGHEVVVANPRLMEGSKRRKRKNDRIDAKKLARLGRVDPQSLHPIRHRSREVRQDLVVLRAREALVAARTELINATRGLVKSMGTRLPKCSSPSFGQKVKDVIPEKVREALLPLVQLADALSDCIQSYDQKIEELGSEKYGHTKLLRQVKGVGPITALAYVLTLENPEHFAKSREVGPYLGLVPKQEDSGESQPQLGISKTGDTMVRKLLVGSAHYILGPFGPDTDLRRYGLRLCERGGKNAKKRAAVAVARKLAVLLHRLWVSGEVYEPLGYASSRAIVQQAA

SEQ ID NO: 236288 - protein, 376 aa, unidentified
MSNLRFIGLDVHAETIAVAVAEPDGAVRSLGVIPNRLESIQKLVKRLGPTTQRRVCYEAGPTGYVVYWQLTALGVQCSVVAPTLVPVKAGDRVKTDRRDALKLARSYRAGDLTTVWVPDAAHEALRDLVRAREAAKKDQLRARHRLGKFLLRHGRRPCRPVKAWTPAYLTWVNTAVRFEHPAQEATLLDYVHEVEHAARRIERLEHAIDEAIKTAPVRMRAVIAALQALRGIAQVSAVTIVAEVGELSRFTTPRQLMGYSGAVASEDSSGGRIRRGAITKTGNAHLRRIIIEAAWAYQHRPSVGAALRKRHAPLDAAVIAMAWKAQHRLHARYRSLTARGKSKQSAMTAVGRELLGFIWAIGRTAERPRLGAPVAA

SEQ ID NO: 236289 - protein, 344 aa, unidentified
MKIIRVGVDIAKSVFHCHGVDRFEATQWQGAYRRDRWVNALCKRVPVGSEIGMEACASSHYWGRELQKRGYNVKLVAAQFVKPYVKSNKNDRVDAEAICEAMSRPNMRFVSIKSVQQQDTQASHRIREELVCQRTAKANQIRGLVGEYGVIAPVGIGQLRKAIPVWLEDAENELTEQFRVLLCGLAEDLRHLDDRIQVLSTCIEQHVKQDPVACRLLELRGVGPLVASALMSALGDGKQFSKGRDFAASLGLTPRQHSTGGKDRLLGISKRGDSYLRKSIIHGARAVMRHCKNRDDNLSQWLNELASRKHINVVTVALANKTARADWALVRNECAYDPRRIAHS

SEQ ID NO: 236290 - protein, 395 aa, unidentified
MFIVGIDIAKRSHEAIIIAEDGQVVRKAFSFRNNCTGYNLLLEQVRKLTLVKSQIVFAMESTAHYWLALYARLLKDGYTVMVLNPIQSHSLRELYIRKAKTDARDSLIIADLVRFGRCKASNVPQDKILALRELCRSRAYLVDMAADLKRKLIALLDRIFPEYESLFESVFSKASIAVLSKYSTPQKVKNANLRKLTDILMESSNGHFGEWKAHQLKEAACSSFGIDDSGGVYSTLLGMFLEQILSLTAQADSLEKQISVFFQEFNNPLTSIPGVGTVLAATILSEIGDITRFSSADKLLAYAGLDPSVKQSGEFKSNQNRMSKRGSPYLRRAIWLASTVAVHRDPMFQTYYEKKISEGLHYMNVIGHVSRKMTAVIFAVLRDGQPYQPILQSAG

SEQ ID NO: 236291 - protein, 416 aa, unidentified
MKIVRPICCGMDVHKNIIVATIGITNKKTRITEYIQETFSTLNPDLLNLKQWLINHKCFDACMESTGKYWIPIFNILEDEINIYLTHPKYVKAIKGKKTDKKDSKWICDLFKHDLIKFSFIPPKEIRALREISRYRYKLVGMRSSERNRYQNCMTVSNIGIGSVFSDPFGKSAQAIMKEVLESDIIEDEKILKCVHGLCKNKDKILDSIKHCNIETDQRFKMNESMTHMEELQVHIDNCEIEMMKRAAPMFDQFMHITQLPGISTLSAILIISEIGVDMKQFESDKQLTCWAGLAPANNESANKKKSVRISKAGQYLKPLLVQCALGAIKDKEGYFGIKYSRIKKRRGHKKAIIAIARMMLVSIYHMILTGETFNPSDYESFRNPNPPIKQQVLTEESAIEFLKKSGFDVSKLTKQ

SEQ ID NO: 236292 - protein, 348 aa, unidentified
MLAEVVDAVVGGDTHRDTHALELTAPSGATIATLMIGNDERGFAEAIAWVAEHAPGPRVVVGLEGTRSYGIGLARVLQAARLTVVEIERPRRGERRRGKSDPIDAHLAALHALRLDADRLPTPRADGDREALRILLGARRELTTAKTRTINRLRALLLTGSDADRALSRGALSSDRLAAITRRRGGQHETREYAVRRAEARRLALAISGIDRELADNKWHLADLVTHLAPQLLAKRGVGPVSAAQAIVSWSHPGRCRNDAAYAALAGASPIPASSGRIVRHRLNRGGDRHLNRTLHDILLTRWRTCPRTRAYIARRRAEGKTDPEIRRCLKRYIARELYRSLNTAMAA

SEQ ID NO: 236293 - protein, 475 aa, unidentified
MEDVEFKFLVDWTKPAFYCGLDVHKYELAVAVYCKDDSESELLKTNIFSVDSPGLNRFWSFVSKFRPEGFVMEATGIYHHVIYRFLVKKRVHSEWAFKILVVNPADASGIPNRQKNDKIDAENLARYLAMGLLKGGKPVIEVIEDLKAIFRMALRIEKDRTALKNRIKKTLDRAGIRPKGMELNHEWVREFLHYFLEREANLGQVISQIQGDLELLKSHRHKILKNVNKFIPYFDFTLSSAQRSMVRQDLVELDFKTARKRLLAVEIDQLILERPALRQHAFNLSTIPGISPFSAVWILAEIGNIQQFHAVKPFLAYCGCSPRIVSSAGKVYSAHVSRHSNTYLRTILYNAAVVLCNLEKKESVLKEYASQVIKRKRSVSMTLVYCIVAAKIAKIIYALLKTSAPFNPRQKRDLDKRNLKEGGSQFSLTSKNLIRKARNSLRRVGDVQELGLLGARVSILAEQLDLLLQRKKLSD

SEQ ID NO: 236294 - protein, 342 aa, unidentified
MKLKTYCALDLHHSHTTFEAQTAKGAVMCRKDVPTERRHLIDLARSVPGPKGVVIEESPMADWAMRVLQPYVAEVIVCDPRRNRLISHDGDKTDDIDPGKLNALYRLGALRPVHHPARQSMADLRAWVWAYHDQVQLVTAAKNKLKAAFRSLGLQYDRCGIYNPARRGEWLGKLPRAAVRDRVAELYGNMDDLTVRRDRMHERLTRISHRHPVAKRFLAVPGYGPVRSMTFLVVVDTPFRFGSPQKLWKYAGLGLCRKQSGKSDARQRPGWQYNRRLKAVAWGATQHALEGSVVNPFQRIYERLTEAGLRESLARLSVARKLIAVPWGMWKSGTEYNPALVT

SEQ ID NO: 236295 - protein, 408 aa, unidentified
MQLFVGVDWAEDHHDVCVIDVSGSVRAKGRVTNDLAGVAKLHDLVGRAVPAELDEDPEVIVGIETDRGLLVRALVAVGYRVLAVNPLGVDRYRDRVRVSGAKSDPGDARVLADMVRTDGHQHRPVAADSDLAEAIKLVARSHQSAIWSRRRLANQVRSALREFYLAALDAFDELTHPDAVSVLAIAPTPELGKALSRSKIASALRRGGRKINVDKRAAAIQAALRTDHLTQPPLVADAYGNIVASLVKVIAAHNTQIAELEEVLEAHFGQHPDAEILRSQPGLGVVTGARVLGEFGDDPDRYATAKARRNYAGTSPLTIASGTRRVVRARHIRNRRLADALHWWAFNAISQSPGARALYDHRRAAGDTHSGALRVVANRLVAIAHGCLKTRTLYDEATAWAHRNDLAA

SEQ ID NO: 236296 - protein, 317 aa, unidentified
MNSQTIIVAGVDISKAKLDVDLANTNQPQQFNNDEKGIAKLIAWIRKNKVQQVVMEATGGLERKLASILAAKQIPFHIANPRQVRDFARAAGKLAKTDRIDAKVIAQFGEKFQLPQTVLPSKIRQKLIAAITRYEQLVQMRIAESNRLDRIEDEVIRALTEQMIENIKQQIERVMVIVKQLISEEEQLKRDVEILESVPGIAILTASRLVALLPELGQRNRKQIARLIGVAPINRDSGTMRGKRTTGGGRARVRKQLYMATLVAIQHNPLIQQTYQHLVKRGKPKMVAIIAAMRKLVIILNVMIREQKTWQEVTNYA

SEQ ID NO: 236297 - protein, 328 aa, unidentified
MEGPIVSIDVSNGNSHYMCFIKNNKRFGKVKKIDHNIEGFKRLLEDIQKLEAETNEKVCAVFEATGVYTKPLERFLSKNSIKTYMINPLESARKRKEEIHNKKTDKLDPISISKVYYDKEEMMELKKKDETYNWLRKKNRLYEDQLNHLRKYKVTFQNQLSICFPGYLDLFKDGYSDIPMTILKKYPHPDLLKNKKAETVARYLEKNTCHTHKVSLEYALKIIEFAKKTYPGCEKDDVEVEIFKILLDKVIETQRECEKTLNEMITVASTLEEYRYILSIDGIGIDLAARIIAEIGDIEEFKSREALVAYAGLDPHIYISQETRMENI

SEQ ID NO: 236298 - protein, 342 aa, unidentified
MSEKRYMGVDLHRKVFTCCIRLENGRQFLSEWRLEQLPQFVKKLRATDEVAVEVTSNTRLFYEAVAPHVARVVVVDPHQFRVISQSVKKTDPNDARNLALYLAKGLLPEVRMKEKQQAQVASLTQTRDRLVKLRTALKNKVNNLLSARGIALEKEELSGEKGLTRVLAMEVEELTRFELQVLVEQIRSLNHSIAELEKVIDRQGKKLKGHGNLTSIKGIGSLGASILLSVIGDIRDFSDEGRLASYFGIVPRVHNSNETEHSGHITKRGSKLGRTALVQCALIAKRYSPYLANYYERIRSRRGTGRAIIALARKLLGIIYRTLKNNWVFEDFPNFVLREATA

SEQ ID NO: 236299 - protein, 354 aa, unidentified
MDEKIEYFVGIDLHKKFMHVAILDSKGEVLDDFRLDCDFDTIRKKFSNMPRNTKYVLESSSVWYGIYRLLTDELGLDVTLSHPYHTRLIAESKKKTDKIDAIILADMLRGGFIVECHVPDADVVQNRQLVRYRASLVKSRTSYKNMIHGILLQDNIKIDGISFSNPWIGKVRKLNDWRIDQNLGIIAYLDDCIASTNIRISNAIKDNDDAKLLLSIPGVGNLTALTLAAEIDEIDRFHSADKLVSYFGLVASVRRSAESVHHGKITKKGNSMVRHLIVEAILVHCNTMRRKKSSTPVSEFYNRLAKRCIMSKARVATGAKLLRIIYWMLKKRIDFDSCIKEGRKSTYREPKTHS

SEQ ID NO: 236300 - protein, 351 aa, unidentified
MSEYIAFDSHKRYTWVDREDHSTGKSTGHRLEHAPGAVRKYLNGCEPGTAVAVEATGNWYWIIDEIEQAGLQPRLVHPRKAKLMMGQINKTDKLDAQGLNRLQRNGTLPTVWIPPGPLRDLRELTRTRLVLVAQRTRLKNRLSATLAKWGTPASEYSDPYGKRGRAELENHLQRLPEQTRWVSGQLLAQLDFVSGQVRQLEQRLEELVEITPEMQWLLTMPGVGVILAATIALEIGEVQRFPSAMHLASYAGTTPRVHASGGKVRYGSLRADVNRYLKWAFAEAANSVAVNHKSHPERHVSQLYQRLRQRKGHPKAIGAVARHLAEAAFHVLRQKQMYQDPSLGRGRTSEV

SEQ ID NO: 236301 - protein, 331 aa, unidentified
MFPVGIDVSKNTLDLCMLYDGIKGRIKTRNIQNNRHSVENILGWLRLQHCGPEDVHVVMEATGVYHERLATELHDAGFRVSLANPHRSREFARGMGIMTKTDKVDAYMLACYAFLKKPHRWEPPTPEIRYLGALLRRRDVLLGDALREENRLEKYLSTDTPADIISSCRRMAQLLREEVSNIERQIKAHIKASPALRRDYTLLTSIKSVGPQLGMHMLVVLRSHNFVSAEQAAAFLGVVPIEKRSGTSVRSRPRMSKIGPPQLRAKLYMSALCGKIYNKRMRNIYDEMCLRGKPKMVAIGALMRKLVHWCYGVLKTGTVFNDESLKQVLST

SEQ ID NO: 236302 - protein, 426 aa, unidentified
MKLQEKELEKPIRAWIGMDWADEKHDVSLYEVGSEKEEAFVIRQTPEALQEWLGQLRSRYEGGYVAVVLEQGRGGLLNALMGCEFLVLYIINPKSLSSFREAFYGSGATSDPVDAKLMRDMVRQNPDRFRAWRPDDVMTRSLRLLTEGRRNLVNQSTALTNQLTALLKGYYPQALAWVGTLDTAWACDFLEQWPTLQSLQASSRRQILRFYEKHPRASLDLNEQLKRIQDAHVLTQDEAVLESSALMVQALVSQLRSLLASIAEFDRKIAMIFRKHPDRPIFESFPGAGAALAPRLTAAFGTDRDRFQAAKEMQELAGIAPVTEKSGKKSFVHWRYACPKFMRQTFQEFADHSRRWCKWAKAHYELLRRRGKSHNAAVRALAYKWIRIMFRCWKDRQPYQDDVYTKSLFKHGSPLSTLLAESVENP

SEQ ID NO: 236303 - protein, 350 aa, unidentified
MIIIGVDFHPEHQEIASVNTDTGEYQEKRLTHPREAEEFYRSLASTGQAVRVGMEASGQGQWFERLLEGLGVELWRGDAEVIRAKRGRKQKTDREDARHILKLLLKDDFPRIWVPSWENRDLRQLLWHRHRMVQARTRVMNQLQAVALNEGLRCKKRLFRAGGRQQLECLQLAPWASRRRGELLELLDRLNPRIAELSQAIEREAGKSPEAQRLMTHPGVGALTALAFVLIIGNTERFGCGKQVASYLGLVPLEKASGNRRRLGHITKQGSSIVRFLVVEAAQATVRSLPEWRSKYHHLLVRRGRKIAKVAMARKLAVRLYWMWRKGWDYEQWKKFGSHVGQPGNRYGVQ

SEQ ID NO: 236304 - protein, 406 aa, unidentified
MNQNTCITIDVSQNKSHIQGFIGPNKPLSKARTMRNTKQGFQFILIIKNLIESKTNETPLIVFEFTGIYHKPLEKFLISQNLKYHIVAPLKAAKARNSEIREQKTDARDCLSLSKLFYSNNLGIFYSENETYSNLRKLNRYYDTCMKHLIKIKVNFRETLAVVYPNYKKLFSSIYSDDSLTFLKEFPHPSLYTSKLEDRIIEILKNKWDHLESWTSSKVKILTPLINEVVSGCNVTEPDIIMLLSYISQIEYYLNQIEITVSQMNELAKKVPLYNLVHSLPGIQDILTCKFIAEVGDISRFSNYKQIVAYAGIDPMIRQSGDKDGLHLKMSKKGNKRLRTILHLMVSSLIKANREPNAIKDKYQKKTHQLNPLKPKVASMACANQLVRIIFYMHKTSSTYTYHECK

SEQ ID NO: 236305 - protein, 309 aa, unidentified
MKQSVVYIGIDVAKAHLDVAWAGTFRRLPNERSGHAALVRWIKQSTTPVQLICEASGGYEQALLESLEKSEVKVTLVQAVPVRQYARAAGILAKTDRIDAKVLAAFGSAMQPQPTSPLSAEQKRLRQYEAQRRQLSRILVAEENRLAQLSCTELRTLSRSLISKIKTQIKTLDRGISDLIAQDQTLCVKAQKLTAISGVGVRTAALLLAQMPELGQLNRRQAAALAGLAPFNHDSGSVRGKRAIFGARPALRSGLYMAALSAARFNPILSSFYQRLRTKGKPHKLALTAVMRKLLLALNQTLKPLPCST

SEQ ID NO: 236306 - protein, 341 aa, unidentified
MKNKSFIGIDISKNVIDVSIFCEEAPIKDFSHDVFNNSRKGFGEMCTWLKKNHVVLSNCLFGMEFTGSYSMELEKFLNARNYQFCMLSTHVVKHYPMGPKDKSDKIDSAKIADFLYRYNGTECVKPYKMPDKTMQRLKALMNERKFLVEQRTCFMNRRQLCTTKEDAQLYDGYIKKFSRDIDNIELEEQKLLATDDSLLATYKNLLTIPGVGFVNAINVIVITRNFTAFETARQYASYVGVAPHSHTSGTSVRWRPRPSARCDGQAKADLSMAATVAVQYDAELQSFYNRKLGGKQDSDTKRKALNAVKFKLVLRMFAIGKQNRKWEPLDSKSSNEKLAIS

SEQ ID NO: 236307 - protein, 347 aa, unidentified
MSEYAGHQFVGIDLHRRRTVLVRTTDAGEVLESVRISNDIESLNRVIARAGVDPEVVLEATYGWYWAVDALQAAGARVHLAHPLGVKAFEYRRVKNDERDAKDLADLLRMGRLPEAWIAPPATRELRELVRHRAKLVGLRSHCKAEVHAVLAKCGVPMSLNDLFGVAGTEVLDRLVDGGRLPSPYVARVRSLRRLIEDLDFEIDLFAGIVRGRLARDPGYLAVQQIPGIGPVLGAVFVAEVGDVTRFDTAAQLACWAGLTPKHRESDTHVHRGRITKQGSRLVRWAAVESVQLLPGHTKVGAVRERVAARRGRNIGVVAAARAQVELVYYALRDHHVRALHRPRVAA

SEQ ID NO: 236308 - protein, 363 aa, unidentified
MSKTPDRVVIAVDPHKASWTAAAVNTSLQPLDIIRVPVSRDGYRALRRFARRWPDPTWAIEGASGLGAPLTARLRADGADVVDVPAKLAARVRMLSTGHGRKNDDADAVSVGIAALSARTLNTAAVHATVTALRAVVEHRDDLVKTRTQTINRLHVLLTHLVPAGARRELTADQAAELLRGVRPRDAAGKALRGLAADLVAEIRQLDRYIAKAAANIQTAVSASGTTLTELSGIGTLTAGKILGRVGTIKRFRSAAAFATYTGTAPIDVSSGDVIRHRLSRAGDRQLNLCLHVMALTQIRQDTPGRAYYQRKRAAGKSHKEAMRCLKRRLSDVVYRQLVRDETRLEAGPGGHSGAALLSSAAS

SEQ ID NO: 236309 - protein, 256 aa, unidentified
MTQDIIGVDIAKDWIDIHRLSSGQSKRIAATGSALARFAAQAGGSLLVLEASGGYERPLMEALAEAGVAFARVNPRQAREFARATGRLAKTDRVDAAMLAEMGRALRLKPSPPRAPERVRLADLMARRDDLSDMRRREANRLKQARDAWIRTDIKAVLRVLERRLARVEAEINAQIETHEALARAAARLQSMPGIGPILAASLVARLPELGRLDRRAIASLAGLAPHACDSGVFRGKRRVWGGRAEVRRSLIWRAS

SEQ ID NO: 236310 - protein, 328 aa, unidentified
MLALPALGLDIAKVKFDAALLTESGVTHHVFPNTPQGYRALQGWSTQLGVTHVHACLEATGTYGDGVALALHAAGQTVSFINPARLKAFAQTTMTRTKTDKTDAVLLARFCAAFRPAPWTPPLPELRELQALVRRWQALQQMRQQDVNRRTGGLVQPAVHASIDTLLVHFDQALAQVEQALHDHLRQHPTLQRQVTLLDSIPGIAWPSAVQLLAEIGDWSNYASARALAAQAGLTPKQRLSGSSVHGKPKLAKTGSARLRKLLYFPAIVARTHNPVIRAFCDRLAAQGKPKMVIVGAAMRKLLHLIYGVLKSGQPFDPAYRPVSAKTT

SEQ ID NO: 236311 - protein, 398 aa, unidentified
MGARFWVGFDVGKASHWVSVLDDEGEELLSRRVEAAERDIEAALSEIDRLCATGERLVGLDLTGGPATLLEAVLLGHGERVLRVSGLAVSRARESYAGGERKSDPGDARVIADQLRFRWRQLPELRPTDDRVAELRVLVSRRRDLVQDQTRRVGRLRALLCGVFPGLEATLDLTKRGPLLALTRVATPTAARRLGRSRLARWLKAHGALKADSLAERIVRAAEAQRLELPAAEAKAALAAELAHEALREKERLATLEARLEELVADLPEARIVRSLPGMGTSLTAELLAEAGDLLGRYGSADRLAAAAGIAPVLRASGGSSYRRRATRGNRVLKRVFYQSAFCSLRAGGASRAFYDRKRGEGKAHNQALMSLARRRVNVLWAMLRDGRLYEEPVPDAV

SEQ ID NO: 236312 - protein, 401 aa, unidentified
MKYVLVLDVAKSKSMFMLSSDVGEVLLEPTEYIHNKSDFERIDSYISKLNIKDNLTVIMEATSIYHKAPERFFKENNYHVIVFNPLIGKEITNTIRKTKTDKQDCIKLTNLFWKGSIPDRNYTEDEIYTKLNELSRQYYHLDEGLTRHKNRYKELLHLCFPEFELCFKDGKIYDLTALNFIKEFPHAYIIKDKRVDALAYNMANTNDRHLNYYKRKANIIKEYAINSYPGVSENSKDVDNLKQLANIIIEIAKQKEIIKEQMIELAKQTKNFECINSLFGIGELSASLIIAELKDITRFNNIKQINASCGLDPTIVQSGKSIDYHGPISKRGNRYARKILFNCSRNIVTLSAKCDKENPIYVYYQKKKQEGKHYYACLTACSTKLIRIIYALCMNNSTQQN

SEQ ID NO: 236313 - protein, 355 aa, unidentified
MIIIGADYHPGFQQIAFVDTDTGEFQERPLRHREEAEKFYRDLAAQGMKVRVGMEASGHARWLERLLAERNFELWIGDAAEIQSKRVRKAKTDREDARLLLRLLLEDRFPRIWVPSWENRDLRQLLWHRHRMVQARTRIMNQLQGVALNEGLRSKKKLWRESGRQQLESFRLAPWASRRRHDLLELLDRLNPMIAELNQAVEQEVERSPAAQRLMTHPGVGPLTALAFVLIIGETKRFGCGKQIASYVGLVPLEKSSGNRRRLGHITKQGSSMLRFLLVEAAQVTVRSIPEWRGKYFHLAMRRGRKIAKVAMARRLAVRLFWMWRKQWDYEQLKKFGSHAGQPGSGDGVYTTPSN

SEQ ID NO: 236314 - protein, 340 aa, unidentified
MRVTTIGIDLAKNVFQVHGITPDEEVVFNKPLRRAQFLPFFAKLEPCLVGMESCSSAHHWARELTALGHEVRLIPPMYVKPYVKRGKSDAIDAEAICEAVTRPTMRFVAIKTVEQQSLLSLHRARDLLVRQRTQLINGLRGLVAEFGIFIPRGLARVIGFAEDITLGEVLDLPDIANEVILNLSEQLMALHKRIRWYEDRLKQVAKEDERVRLLRTIPGVGAVTASAIIASIGDGHQFQNGREFAAWLGLTPANKSSGGKEKLGRITKMGDQYLRSLLVVGMTSLVRQTRSHPERASKWLTGLLERKPARVATVAMANKTARIVWAVLTRNEPYSPRAAA

SEQ ID NO: 236315 - protein, 383 aa, unidentified
MRTQETQGNVKDVVLAVSLELAAAKWKVALHDGHRESPSIHTVAQTDPATRLQAVLALIATQKQAWALPDNARVVVSYEAGQDAFWIFRALQARGIECYVVDPASIPVQRQKRRAKTDRLDVTKLVINLRAWLGGERDRMHAVHVPSAQDEASRHLMRERGQLQKEVLQHRDRMRKLLATVGCWEDVNSRKFATRLERREVCCHDGAPLSEELHERLLRECERLALVEKQAAALEKAYHLRLPERARERIDHLTHLRGIGPVSGSRLALELFWRHFANRRQVGACTGLVPQPYDSGETQIDQGISKQGNRRVRALLIETAWTWIRYQPGSRLTRWFNERTKPTGPNRRARRIAIVAVARRLVIALWRYLKDGVIPEGAELKIR

SEQ ID NO: 236316 - protein, 417 aa, unidentified
MRKIQPKKLKSVNSDTLLATVDIGKNAFSGYARCPDRSEMKPSDFSNNFAGFVRFWNTLVQRRKAHGLKQIVLGFESTGVYAEPLLHFLKDKPVRLVQVNPMHTKRVKELNGNSPNKTDQKDPKVIADIIELGHGLTVLIPQGAAAELRRLTQARERTIKRRTALFNQLHDLVFISFPEFLQVIKNIKTKSARYLLRHHARPESVVREGLASLTQALKRVSRGRLGPAKAQALFEAAASSVGLREGCLGVDLEIQALLEAIDGCDRFVQRLETEMALYLEEIPYSRLLLSMKGLGPVTVAGLIGEVGDFRHFDTQKEILKLAGLDLFEISSGKHKGQRRISKRGRPLLRKILYFAALNTVRKGGIMHEHYQQHLQKGMPRSKALIAIARKLLCIILALVRTQTEYAVDRQIELAKVA

SEQ ID NO: 236317 - protein, 310 aa, unidentified
MDTIYVGIDVSKDRLDVHVRPGGEAFAVERNGKGLEDLVDRLRGLSPSLIAVEATGGFETIVAAAVAGAGLPLAVVNPAQVRHFAQAIGKRAKTDPIDAGVIAHFAEAVKPEPRPMPEETAVLLAELVGRRRQIIEMLVAERQREKHASNVRVRKSLARHIAVLEKELPSIDRDIDGLVRGAPVWREKEDLLISVPGIKNTLARIFLAEAPELGNLDRRRIASLAGVAPYTRQSGRWRGKAMIGGGRTALRSALFIAALTASRHNPVLKAFYARLLAAGKPKKVALIAVARKLLTIINAMLRDNRKWQNA

SEQ ID NO: 236318 - protein, 317 aa, unidentified
MGAVKVDKYVGIDVAKSTLDLEVRPSGERHQYSNDADGLAHLVKQLRKIRPVLVVCEATGGWERFLVGALAVAHLPIVVVNPRQVRDFAKATGRLAKTDRLDAESIARFGEAVRPEPRALPSADARALDDLVTRRQQLIEMRTAEGNRLRLATGRLRQQLDEHLGWLDRQLEDLDKELDHTLRTSPVWREQADVLRSAKGVGPILTATLLSALPELGHLNHKEIAALVGVAPFNRDSDMWRGKRQIWGGRAPVHAVLYMATLSAVRTNPVLRSFYQRLISAGKLQKVALVACMHKLLTILNAMARDSRPWQPAKITA

SEQ ID NO: 236319 - protein, 384 aa, unidentified
MPKVVIGVDPHKASNTLVVIDGHEQVVAQQRFVNDRAGYRQMKSFARGFPDRTWAVEGARGVGAGLAQRLVAESEPVLDVPAKLSARVRALGGGSGRKTDTADAYAVAVAGLRARDLRPVRVDDATEILRMLADRRQELVRTRIATVNRLHEVLAALIPGGARKNLRASTARRLLSSVRPRNVVGKARKQLALDYIGDLERLEARLKELKRQIAEAVATQRSSLVSIDGIGPLGAGKTLAEVIDVRRFPSKAHFASYTGTAPIDVSSGDNNRHRLNRGGNRRLNHVLHIAAITQTRMPGPGQDYYRRQRDQGKTHLEALRCLKRRLSDVVYRHLVDDLAAGSPGGQVGASLQSSAADLIPMASTSEQSLPGLDHDPTPVLTVVS

SEQ ID NO: 236320 - protein, 373 aa, unidentified
MNYNTVFVGMDVHKENFSLCCYTNEKEQAEYHQKVAGHYSKVINYLEAMRFHYGDDVTFICGYEAGCLGFTLYHQLTDHGVKCIILAPTTMLKPSGKKKVKTDKRDAALIARCLAHHDYSPVHIPTEQDEQTKEYLRMRDDHKLALKKVKQQILSFCLRHNYRFDGTANHWTQAHLKWLRALKPDGLYQEILSEYLLTYDQLTEKIERFDRRIEELASDKEYRENVHKLTCFIGVKTTTALAVLTEVGDFKRFATAQHFASYLGLTPGEDSSGDGQNRLGITKAGNRHIRSLLVEAAQSYARGQIGFKSKALKDRQQGNDPKVIAYADKANERLRRRYYRMVLHSNKKANVAKTAIARELACFMWGMLTGDIA

SEQ ID NO: 236321 - protein, 358 aa, unidentified
MEQITRGECGRVVVRVGVDLAKRVIQVHAVDAAGRLVTGRALARDRFIAWCAQLPGGCVVAMEASSSAHHWARKLSSLGLDARIIAAHLVKPYRKQGSSGKNDANDAAAICEAASRPSMHFVPIKSVEQQSMLCVHRLREGIKEERTACINRIRGLLAEFGLVFAQSPKVLRLALADTIEDASNEMGTLARLTLQRAYAQWCELDEHMAWCDERIAEHACTNEQVKTATALLGVGPVTASAVVATVGDFRQFRNGAQFGAWVGLTPKQHSSGGKARLGRITKRGDTYLRTLLIQAAKSAVLTAHRRSDRISSWLCMLRERSGWQIAAVALANKNARILWALMTKGAAFNANHLSAKPA

SEQ ID NO: 236322 - protein, 338 aa, unidentified
MDPQAVILGVDTHRDLNVAVALNAYGQRLGCLSVPTTEAGHAQLVAWARGLGAIDRIGTGSFGAGLSRFLTSAGLTVLEVDRPQRRNPRAGKSDPLDAERAARAVLAGEVRVLPKGGDGAVESLRLLSTARRGAINARTQAANQLHGLVVTAPDALKAHLRDLTTAQLVQRAARWRIGAARDPLPAARVAIRAIARRYQALEREVRQLDAELQPLVRALAPELLAARGVGYETATTLLVAAGDNPGRLRSEGAFANFCGVAPIPASSGKTVRHRLSRLGDRQANRALFLIALVRMYRDERTRAYVARRTAQGLSKLEIMRCLKRYVAREVFRLLPRAA

SEQ ID NO: 236323 - protein, 372 aa, unidentified
MDQHSRLFIGLDVSKLKISVAVADGERGGEVRFFGDIPSDPASVSSIVQKLAKRGAKLHFCYEAGPTGYELYRQLTEMGHDCVVAAPALIPKRPGDRVKTNRRDAVSLARLHRAGELTAVWVPDRGHEAMRDLVRAREAAQEAQKRARQQLQSFLLRHGRVYSGRSSWSLAHTRWISTLTFEHPAHFIVLQEYCQAIEDAEVRLKRLTDLISETVKSWTMAPVVEAYQALRGVSLIAAVVFVAEIGDIRRFENPRQLMAFLGLLPSESSTGEHVKRGGITKAGNSRARRMLVEGAWAYRFPARVSRTKQAQLEGLPRTVREIAWKGQLRLCSRYRTMILAGKHKAIAITAIAREMAAFLWAIGQEVQPAHHA

SEQ ID NO: 236324 - protein, 350 aa, unidentified
MLIIGCDYHPGFQQIAFVDSETGELSERRLAHREQAEQFYREMKQQNLWVRVGMESSGHSRWFERLLSDLQFELCIGDAAKIRAKRVRKQKTDRQDAQLILQLLMENRFPQIWVPDAENRDLRQLLWHRHRLVQMRTRVMNQLHVVALNEGLRRKKALWRTAGRKELESIALAPWASRRRQDLLDLLDQLTPKIQELTQALETEVERRPVTRRLMTHPGVGPLTALAFELVIGRAERFDCGKQVASYVGVVPSEESSGDRRRLGHISKQGNVLLRFLLVEAAQVTVRSQQEWRNQFFHLAMRRGRKIAKVAMARKLAVHLYWMWRQGCDYGTWQKLGSHAGVPGNLDGVQ

SEQ ID NO: 236325 - protein, 362 aa, unidentified
MREFTALDAHKQYTFASVERDGRVVREERIWHERGAIKGFLAGCQPGSPVAVEATGNWYWIVDEVEAAGLVPRLVHPRKAKLMMGLINKTDKLDARGLNLLQRNGTLPTVWIPPGELRDQRDLPRTRMVFARQRAQMKCRLHAALAKYGIAGPEASDIFAPRSRPALLQAIRQLPENTRFAAEREMEQLDGLREQIELFEVRMEEVCGRSRAVELLDSLPGVGFILAVVMALEIGDVERFPSAEKLAGYAGTTSRVKASGGKVHLGRLRPDANRYLKWAFIEAANVVSLHRRHWAGRHAVQLYERVRSRKGHHKAVGAVARHLAEAAYWMLKKGEPYREPGSRPAGGEQAGFVHEGASAVMT

SEQ ID NO: 236326 - protein, 319 aa, unidentified
MAETAQPICIGIDVSKSTLDVAIGEHGAFWNVNNDPAGIATLLERVRPLPVARVIVEATGGLELPVVAELYAAQLPVALTNPARVREFAKSVGQLAKTDKLDARVLARFGEAVKPPLYQLPTADEQQLSDLLLRRHQLIEMRTAERNRLGTARATLRPYVETHLAWLAQAIADLDAAISEFMRQTPLWQRKDEMLQSVPGVGRVTADTLVADLPELGTLNRKQIAALVGVAPMNHDSGRRRGKRRTKGGRTTVRNVLYMATLTATRVNPQIKTFYERLVKAGKEKKVALTACMRKLLTILNALLKHSKPWQVKLTVAAT

SEQ ID NO: 236327 - protein, 449 aa, unidentified
MSKGSGITRGDRRRNARKARLRVLVPARYAVAGLDLGEKKQALVVTGADGLVLARRSPQASVHELGPLLDWALAQARAAGYAGLSVACEPTGSGWMAVQDLCSVRGLPFVCVQPLMSHLAREQEDLTGDKTDGGDCVLIARLARELHCYEPERLEGAWAELREEGRRRAQLITSATAAKQLLRDKLGLVAPALLEAACEPFDSPAWLASLEVVLERCGGDPATVTAMGFAAFAAAVRAALPGWGGQRAGGTCRQLFGALGDGRGVARMRRAALRRARGALADLKYARARRAQTEADMTALLAELGIDTARICQIPGLSPVTLAAILAETGDLHKYQSSSSVVKHAGMSPARNESGSFRGQAKISRRGRPALRLATWRATWAVLRHCDVLAAKHAALTSRDDDSRLTPGQARVACAASLLRWIWSLTVHGTQWDPRIAAGQLGHHHAMAA

SEQ ID NO: 236328 - protein, 384 aa, unidentified
MSMYFVGIDISKYKHDCCIISAADQQIVSKFTVKNDKDGFEHLLTTLNSLSNPEDIKIGFESTAHYALNLELFLENAHHSFMEVNPVLIKEYKKSTTLRRTKTDSVDCESIARWLMTVEYKPHSKGFYHSYSLKSLTRLRDRLIRQRSFYLVKITNVLDHTFPEFKLFFNERLSKTAIYLLENYGSAEKMAHMNSASYDKLRCASRGKFSIQQFLRLKELAANTVGVNNSIFDIELNSLLTLYNSLCKEIKTLEAEITKLIEEVHPHYMSIPGIGPISAAVIYAEYGDISNFSNPGQMLAFAGIEPGINDSGTESHGSSQLRYVLLNACLPLIRFDITFATYYAKKRAEGKKHRVAITHVAKKLIRVIYALERQDVDFNVKKLR

SEQ ID NO: 236329 - protein, 347 aa, unidentified
MNSVGIDLHRNRSHVAVIDGQGELSLSRRIVNSRETFLELLGELEGESRIAVEATYGWEWLAELLEDAGYEIHLAHPLRTRAIAAARVKTDAVDAKTLAHLLRADLLPEAYVAPRELRDLRELLRHRIALTGMRSALKNRVHAILAKHGITRQHSDLFGPGGRRFLSEVRLREAPRRRLDSLLALIDDFDREIEATTKEIEQRAKADDRVDVLTQIRGVGRYTAMLIIAEVGEIDRFPDARHHCAWAGLTPTVRSSDGRARLGHISRQGSPALRWALVEAAQKCTTGGGPLRESFERISKRRGRKIAKVAVARQILTLSYYGLRDGEIRCLACRSRASAKEKLAVAR

SEQ ID NO: 236330 - protein, 450 aa, unidentified
MANGSCVSRGDRNRNARLARLRALVPVSNAIVGIDLADKKQMVVVTDHDSKVLARKTFRCRAWDLGIALDWAADRARGTGWAGVTVACEPTGHRWRVLGQLAAERSMPFVCVQPMLSSWARRSEDLTFDKTDEKDAVLIARLTTQLRCYAPEPVDETWGRLRHLGARRDQLLTSLVSQVQQIRALLECVWPAALDTAQQPFRSQTWTAAMRIVCDRDGGDLTRTRRLGLTRFEQAVRHEILKRGGQKPCGRIARKLFTALADPAGVLAHRRGALERVHLLLADWAEDQRRLADTETRMLTVLDELHLTELVTSIDGVSPVGAAAVLAETGDPRRFTTARALVKHAGLAPREKLSGTYVGRTKLTGQGRPGLRLAAWRVVWAVLHTNTVYAARYRHLTSRENNKLTPTQAQTVIAAAVLRQLHAVIVTGRAWDPAIARHGTQPQLEAPIAA

SEQ ID NO: 236331 - protein, 405 aa, unidentified
MTESSDYESVQVFIGVDVGKDSVDVGKDTHHAVAINRSGKRLFDKALPNDENKLRSLISDLKQHGQILLVVDQPATIGALPVAVARSEGVLVGYLPGLAMRRIADLHAGEAKTDARDAAIIAEAARTLPHALRTLKLADEQIAELSMLCGFDDDLAAQTTQASNRIRGLLTQIHPALERVLGPRLDHPAVLDLLQRYPSPEKLASLGEKKLAAQLCKLAPRLGKRLAADIAQALAEQTVVVPGTNAAAVVLPRLALQLITLRKQRDEVALAVEQRVLAHPLYPVLTSMPGVGVRTAARLLTEVACRAFASVAHLAAYAGLAPVTRRSGSSIRGEHPSRRGNKALKRALFLSAFAALRDPLSRAYYTRKMSQGKRHNQALIALARRRCDVLFAMMRDGTFYTPQAS

SEQ ID NO: 236332 - protein, 427 aa, unidentified
MNNPEQQAGSWLEQRGFGGLDWATEHHSVVVVDPQGRVLEDFEIEHSALGWKKFRERMQPYGSIPFGIETSQGAAVEQLLEAGMQVYPLNPKSAQSYRERKAPSGVKDDRLDAWSFADACRVDGQGWKALRPEDPLIKELRLLCRDEVALIEQRTAFINQLRHALAEYYPTALEAFEDWGALSAWMFVQRFPTPQALKEAGKRHWEKFLHSRHLWRTESGPLRLELFAHATDLCGSVPMANAKSRLALSLVSILFALEKQLGIYRQRIEELFGRHPDHDLFGSLPGAGPKIAPRLLSEIGDDRGRFGKEPQPLQCLAGTAPVTRRTGKARTNPPRWPCHQRWACDKHLRHAMYLFAEQTLTRCTWAEIYYHHHRQKGHSHADTLRRLGQRWLKIIFRMWMDRKPYDAMLHNQNQLKHGSWVLQLKET

SEQ ID NO: 236333 - protein, 357 aa, unidentified
MKQHKYIKKPSFKGKDFFIGIDVHKKTWYISIRHNGLLIKAFAMDPIPEILVNCLNKNYPCANFFVAYETGRFGFWIYRKFKKLGINCMVVNPADIPSTHKEKDKKSDKIDSHKLARELENNNLNPIYVPPPEAQHLRSLVRLYLNYTKNITRTKNQIKSFLDYNGITLPKHTSSWSNNFIKYLYSITIDNGPGDRTLYSLLDTLRFFRKEQNNILKQIRKFINNSYFKKNFDLIRTVPGVGFKIGFIILSEIIDMKRFKNFDQLKSYVGLTPSVYSSGDTYYEHGLTYRKNSRLKYALIEASWVAIRKDPALLESYNKLITRMKKQQAIIRIAKKLLSRIRYVWLNKQPYVTGIVE

SEQ ID NO: 236334 - protein, 315 aa, unidentified
MSQKSLDANFARGQRKQSRTFENSPDGWKLMLAWFKAMGGKPAHVCMEATGRHSLGVALALHDAGHVVSVVNPAQIRDFARTKLGRNKTDKIDAVLIREYAELFKPGPWAPPSPAMRRLCELQTVRTGMVNNRAEWKNRMGSGLEDSIATSLAAATIEHFTAQIEAVDTAIRATIDQDSELRGRRNLLLSVVGVGETLAASLLVEMPEPEVLRRSGEMVAYAGLNPSHHRSGTSIDRPTRISKVGNATLRSSLYMPALSAMRYNPAIIALVARLKNARRLKPKQIVVAAMRKLLVICFGVLKTGKPFDPAIAMPA

SEQ ID NO: 236335 - protein, 344 aa, unidentified
MDHYAGIDVSLEYSSVCVVDASGKVVREAKVVSEPEALIGWFGSLGLELARIGLEAGPLSQWLYAAMKQAGLAVELLETRHVSDAFKAMPVKSDRNDARKIAQLMRLGWFRPVHCKSTTAQEIRAMLTARKLVQSKLLDLENSLRGILRGFGLKVGKTTRTKFAGRIEELVQGHPNLQTIGQALLRARAVLLAEFNGFEKRVRAMSRLHDKARLLMSTPAVGPIVSLTFACAIDDPSRFTSSKQAGPHFGLTPKKYQSGETDYTGRISKHGDASVREALYEAAHLMLTKPIKGCSELKSWAMRIARRAGTNKAKVALARKLAVIMLRMLKDNVPFNPAAKPATA

SEQ ID NO: 236336 - protein, 337 aa, unidentified
MELYSGLDLHSRNTYIGILDTDFKRVFKKRVSNNLDLIVETLEPFRDQLKGLVVESTFNWYWLVDGLMDAGYGCVHLANPSAIKQYEGLKHSDDQHDAFFLAQLLILGILPQGYIFPKEDRAVRDLARKRMFLVKHKTAHILSLQSLIARCSGQRISSHQIRKFTSADLKQLLTEEHLVLSAQANLNIIVFLIQQIKTLEKAIKKKVKLDKAFKQLMTVPGIGFILAMTIMLEVGDISRFAKVGNFASYCRCVSSQRLSDGKSKGSGNRKNGNRYLSWAFVEAAQLGRRYSQRFGRYYDRKAAQTNTIVATKALSNKLARICYYIMRDQVSFKEELF

SEQ ID NO: 236337 - protein, 317 aa, unidentified
MAHSSTMTAGIDTSKSKLDVAVHGRTEHWQVANSLAGWRVLAAKLIEAGVSRVGIEATGGYECGVVGHLRAAGFMVSVLQPVQVKAFGKVHLRRAKNDVLDAVMIAACAAALDQDRIAPDARLAELARHLTFLEQIEEDIRRFKTRLEHIDEPRLRRLVLGDAARLKARRLAQIRYIARQLRSHPDLATRLDLVLSIPGIGERTALALLIRMPELGRVSREEAAALAGLAPFDNDSGQHRGQRRIAGGRARLRRSLFAAALPAAFRWNKALMALYARLIAAGKAHNAALIACARKLLIYANTVVQRGTPWAEKPLST

SEQ ID NO: 236338 - protein, 365 aa, unidentified
MTSIPVFVGLDYHQDCVQVCVLDLAGKQLCNRSVDNDVDLIQQVVSRHGAPQRIAIEACCGAANLAEELASKRNLPVQLAHPGYVNRMKRSPDKTDLSDAQLLADLVRVNYLPRVWLAPQAIRELRRLVRHRANLVRQRKDTKLRIRGLLRENRLKCAEARAWTKRWYEWLQEEAELSDSDRWLLQQHLDLIVYLEGQIAATLARIEAAVADDPVVAKLQGLYGVGLITAVTFRAEVGRFDRFDSGKQLARFCGVTPRNASSGARQADAGLIKAGNPELRQVLIEQAHRLIRFQHAQWGKLAHGMLQRGKPKNVVVAAVANRWVRWLYHELKRDADSPVNTTSAPARQKGAAPSVSTVASTATKG

SEQ ID NO: 236339 - protein, 395 aa, unidentified
MSSGDVLSDRVVIAVDPHKASWTAAVVNSSLQPLARLRVPVSAAGYQQLRRFADRWPQASWAIEGAGGLGAPLAIRLCGDGIAVMDVPAKLAARVRLLSTGHGRKNDDADAISVGVAALTAPGLHTVALDDAVLALRALVDHRDELVKTRTQTLNRLHGLLTQLVPAGAPTGLTADTAAHLLHTVRPQTPMLATLRALASDLITEIRRLDRRITATATKITTAIQASGSTLTQLHGIGNLLAGKILARVGNISRFRSAAAFASYTGTAPIEVSSGDVIRHRLSRAGDRQLNSCLHIMAITQIHHDTPGRAYYQRKRAAGKSHREALRCLKRQLSDAVYRRLLRDAQPDVKTGPGGHQGATPISSAAGSTPTTDSSDKSLSEPVGTDPTNPTPRST

SEQ ID NO: 236340 - protein, 344 aa, unidentified
MSEVIIIGLDIAKHVFHAHGADGKGRAIFSKRISRGKLLDFFAAQPSCTVALEACGGAHHWARQLAQLGHEVRLIPPAYVKPFVKRQKNDAIDAEAICEAAQRPSMRFVAVKSEQQQAAGLVFRTRDLLVRQRTQLINAIRGHLTEYGWVAPKGPSHVAMLTDLIEEEEMASSLPKAAHAMFRLMLDLLTDLNGKVADLDQEIARRAREDEVSRRLMTVPGIGPISATAIAALAPPAETFAKGRDFAAWLGLTPLQRSTGGKQKLGATSKMGERTLRRLLIIGSSAVVQQASKRGAPRGSWLEQMLARKPRMLVTVALANKMARIVWALLVKCENYRAPVVAKA

SEQ ID NO: 236341 - protein, 413 aa, unidentified
MDVLHPRCCGLDVHKNSISACILIQMAGRVQKHQRRFGAMTQDLQELASWLRQFEVTQLAMESSGVYWKPVWNILEGEFTVLLANAQHIKNVPGRKTDQKDAEWIAQLLQHGLLRPSYVPCEVIRDLRDLTRMRASLSQEASRISSRVQKVLEDANVKLASVATNTLGKSGRAMLEEIIAGQNDPEYLASLALGHLRAKTPQLKLALEGKIRPHHRFLLRRLLDQLRFVEHEIELLDERLEGIGREWPELSQAVTRWDTIPGIDRVAGWTLLAEVGHNMAQFPTAEQLASWASLCPGNHESAGKRLRGTTRKGSPWLRRMACQCAWAAARTKNTYLSAQFRRLAARRGIKRAIIAVAHSLVIIGYYLQKSQRNYEDLGGDYFDRIDSDGLKRYFIRRLEKLGHKVTLVPLNAA

SEQ ID NO: 236342 - protein, 358 aa, unidentified
MRQWNSYLTQSRERCARTTTFVAGVQFEAVPNFFPTEKAQARTGRNFPIIVIHEAGLDGFWIDRVLKNEGIESHVVDPASVATSRRRRRAKTDKIDGEALVRTLLAYKRGEPRVCAMVKAPTPEEEDRRRLCRERKVLIIERVKHVNRLKGLLFSQGVCGYEPLRRNRRRRLDELRTGDGRPLPKHLKAQISRELDRLELLLEQIKVVETERDALLAAQQIAAPPSAALLLAIKGIGPDFAAILWSEGLFRHFDNRRQIASYAGLAPTPWKSGSIDREQGVSKAGNPRLRTTLIQLAWLWLRHQPQSALTLWFKERVVRNGGRLKKATIVALARKLLVALWKYVAAGVVIEGAIMKAV

SEQ ID NO: 236343 - protein, 412 aa, unidentified
MQIVYERCAGLDVHKKSVMACLITPAPNGERRKERQTFSTMTPDLLRLRDWLREQQCSHVAMESTGVFWKPIFNILEGHLEVMVVNAHHIKTVPGRKTDIKDAEWIADLLQHGLLRPSFIPPAWQRIVRELTRSRASLSQECTRAIARLQKGLEDANIKLASVASDLMGQSAQDMLHALLEGERTPEEMATFARGKMRPKRDLLVQALTGHFQEHHRFLLAEHLKHLSELQDAIDRMSVEIAERLHAYEDLLTRLETIPGVGRRLAEIILAEIGPDMSRFPSAAHLASWAGMCPGNHESGGKRLSGKTRKGSQWLRTALVEAAHAASHCKECYLSAHYHHLAFRRGKKRAAVALGHTLLIIIYHVIADAKEYQELGADYLEQLERQGKEKRLVHQLEKLGFEVALTPIASQA

SEQ ID NO: 236344 - protein, 338 aa, unidentified
MLHSGIDLHKRTIALSTVAADGQPVRDAQLPTTRAAVRAYFDALPGPHRAVVESTSNWYWLRDVLAGAGIDLRLGHSKYIKAISYAKVKTDAVDAATLAQLLRSDLIPEAHMVSAEWREARDLLRARLQLVAQQVRCKNTLAGLLAQYNVPSPDALPPLVQVRTRMLAEQFALLAAQAKRLAAELNPALLPAADVQRLLWIPGIGRLAAFTIWLEVDGIGRFPSARDFVSYCRLVPGAGNSGGKARHKRTKDGNLYLKIAFSHAAVRAIQYYPEIRAFYRALARRKPPVVARAVVAKELARIVFYVLSRQEAFNGTFKGKPLSRTKQPKWPRLASPSS

SEQ ID NO: 236345 - protein, 387 aa, unidentified
MIYVGIDIAKNTHWASVMNSDGEILLEPFSFQNNNEGFQKFISKLSSFDKQKMLIGLESTAHYGENIISYLFNLDYKIGIINPIQTSNLRKSNIRKTKNDKVDTFIIIKSLTLNNYTLVTTRDINNIKLKGLSRSRHNLIVMRSRSKIQLASFIDQLFPELNKFFKGNLHINVSYQLLKEYSSPKDISSLHLTKLSNILHDNSHGRYNKEDAIRLRELAKNSVGIDNPTLSLQIKQAILQIELYTEQIEEVEKLSKQILDEMKSKLLTIPGMSYNQATVIHGFIGDISRFNKSCQLLAYSGLDPSIYQSGNFEARSTRMSKRGNSLLRYNLVYAAHNLVLHNNTFKEYYDLKRSQGKSHYCALGHCAHKLVRIIFKMLKSNVDFDLD

SEQ ID NO: 236346 - protein, 452 aa, unidentified
MNRRVEKPAGLPIIHDRAAGIDVGARFHVVAIGPDLSDEPVQTFQAFTGDIERMADWLISAGVKTVAMESTGVYWVPVYEVLEDRGIEVIVANAREARTVPGRKSDINDAQWLQRLHACGLLRPSFRPGRDIAALRTYLRLRERHLEYGAAHIQHMQKALTFMNLQLQHVVSNVTGVTGLNIIRAIVNGERDPQVLATLRDVRCKASSETVRQALVGNYQPEHVFALSQALALYDFYQARIRECDVEIERALAVLNAIQAIPATPLPEPRHKTKQPNAVSFDTRVPLYQLTGVDLTQIHGIGPYLALSLVGECGTDLSRWPTPKHFTSWLTLAPGCKISGGKVLSAHTRKTTNRLAAHLRLAAVSVGRTSTALGAFYRRLAGRIGKAKAVTATARKIAVLFYNAMRFGLAYQDPGADYYESRYRERVVKQLHRRAAEFGFTLQEAAASTAVS

SEQ ID NO: 236347 - protein, 374 aa, unidentified
MKKNTRYLGLDVHAETITAAIAEGRQKIRSLGQFPNRPEAVRKLIEKLGGPDGLQVCYEAGPTGYALYWQLTKLGVMCEVVAPSLIPKKSGERIKTDRRDAEKLAQCYQAGTLTAVWVPDGAHEALRDLVRARGAAKDDESRAKHRLVKYLLHYALRHPDNCRAWTHPWWRWLQALKLEHEAQRETLQAHTAEVLHQGERVSRLDKAIERAIESVSPEKKAVINALQALRGVAQLTAVTIMTEVGTFQRFRKPTELMGYTGLVPSEYSSGGKESKGRITRTGNAHLRHVLGETACHTRHKPWLSNRLKQVLPTLPPGVSEIAWKAQERLHRKFTKMTYQSKQPGKVLTAVARELVGFIWAIGYKVEREALAKAA

SEQ ID NO: 236348 - protein, 369 aa, unidentified
MEWPAPPSGVVGSPELQEEDLDMALATVSVLGVDLGKNVCSVVGLDGSGKVVMRRRVRRETLVGLAEKLPPCMVAMEACCGAHHLGRVFAAHGHDVRLMSPEYVRPYIKAQKNDDRDAEGIAEAATRPTMRFVDLKSQDQLDVQTLHRSRDRLVGERTALINQLRAILLERGMVVPKGRRNLEQFLIVLMDEQGGAGLSPRMILLVADARAQWAELDGRIAAFDAEFVRWTKENEDARRLGAIPGVGPIVASALVAAVGHAESFDHGRDLAAWLGLVPRQFTTGGKPKLLGISKRGNRYLRKQLIHGARAALPYVAEQDTPLGRWAKALMTRAPRNVAIVALANKLARIAWAVLRRGEPFVATGVSMAA

SEQ ID NO: 236349 - protein, 446 aa, unidentified
MSRGKRPSSGAFEAVNPRAAGIDVGDRVHFVAVPDPSGTPAWRKFDSFTQDLHRIADWLEEERITTVALESTGVYWIPLFEVLESRGFTVCLVDTRRLKSVPGRKTDVKDCQWLQQLHTYGLLQSAFRPDEEVTRLRTYLRQREMLIRYGSDHIQHMQKALQQMNIKLSTVLSDITGTTGMAILQAILNGERDPVKLAQLRNPRCKNSEETIAKSLEGHWRADHLFELRQAVDLYHFYGQKLAECDQQIEQALESLPDQATQSERPLKRKKRHTHTPRFDAQGLLFRKAGVDLTTITGIDTNTALKIISEIGTDIRRWPTAKHFASWLCLCPGNKTSGGKVFSTKTRRSKNRVAAALRMAAQSLERSRTALGAYFRKMKGRLGAPAAITAAAHKLARLVYVLLNRGQPYFDMGQEAYEKQYQARILQTVHRRALQLGYTLVPMAAS

SEQ ID NO: 236350 - protein, 337 aa, unidentified
MAREYVGVDLHRRRSVIYRMDEEGEPLGCVRVENDPLGFAKEVSRAPVGSDVIIEATYGWYWAVDLLEDLGYAVHLANPKGNDWGHRRVKNDERDARDLADLLRLGRLAEAWIAPPKTRELRELVRFRHKLSNLRTGIKAQAHSVLAKNGVIPCRNDMWGTGGAAQFDSLELPAAYAHRIGVLRDLVDFYDREILELDRQTHRELRRDPGYNAVQAIYGVGRVFAAVFVAEIGDVHRFPSPEALCSWAGLTPIHRESDSKVHRGPITKQGSRLVRYAAIEAVARYHGGDAFSTKFAAIAERRGRTKANVAIARKVLTLVYYGLRDGEIRCLKGRKAA

SEQ ID NO: 236351 - protein, 409 aa, unidentified
MQVLVEHGCGLDIGKALIVACVLVGGHGKVPKKCLRSFGTTTRELLALRDWLESLGVSHVAMESTGVYWKPVYNILEGHFEIVVANARHIKAVPGRKTDVRDSEWIADLLRFGLISPSFVPTQDLRELRDLLRYRRKVVDAQTAERNRVLKLLETANVKLASVASDVFGVSGRLMLKALIERQATPAAMAQLARGRLRRRLGDLELALEGRVTEHHAFLLSVQLSRLDHIESTISMLDAKINQKIEPLEAIVERLTQIPGVDRIVAMTIVAEMGVDMSVFRTAPRLASWAGICPGNDESAGKRKNARSNKGNVYLKVALVQAAMATRNTKSYLGQKFRHLARRRGKKRAAVAVGHKILVAAYHMLATGQPYVDLGEAYLDRLDVTKTASALVRRLHRLGYQVELKGAVA

SEQ ID NO: 236352 - protein, 407 aa, unidentified
MTASDSTARTRILVAIDIAKAKHDVLVELPNGKRRKMIVRNQLSDFRQLVAYLKRLEGALEIALEPTADYHRNLAYFLKAQGFAVKLVSSIAVARTREALHNSWDKNDPKDAQVILHLLRNGNTQYFYDPVIEQTNDLQELSKTHFQVSLRKTRVQHSLLNHYLPLYFPEAERFLSNSRSSWFARLLLEFPTPQAITQLTENEFLERASRLLKRKQSKAAILRALYAKAQESVALPVSLESQAIATFRLTLAQHLELCRIRTELEETAHELLQDQLDYQILRSVPGVGPIIALTVLAEAGDLRRFGHERQFLKFCGLDLATSQSGAYRGRTQLSKRGNSRLRSALWMAARRATHMQENTFRQKFSRYLRADTTNTDLGRKTYTAVYGQDGADHLRTDQTPTVLSRLS

SEQ ID NO: 236353 - protein, 345 aa, unidentified
MKDIKVLGIDLAKNVFQLHGINAKSKCVLKKRLTREKLIEFMAQLPPCLVGMEACGGAHYWARMFIGMGHTVKMMAPQFVKPYVKSNKNDANDAEGICEAVTRPNMKFVPVKKIEQQDVLLSHRARELVIKQRTAQANQIRGLLAEYGIVIALGISHIREMTEILENNKLKLTVKSEAIFIRLYEQFKVYDEQVKIYDKEIQYQADTDPMCIEVQKIEGIGPLIASAIVASIGDASVFNNGREVSAWLGLVPKQYSSGNNVRLGGISKRGDRYLRTLLIHGARSALTRCEEKEDKKSKWMADVKQRCGFNKAAVALANKNARTIWALMAHGECYRASDIQESIAA

SEQ ID NO: 236354 - protein, 406 aa, unidentified
MTLDQEPGQVCERVYGGVDTHEDTVHVAVISGDGRDLADREFPTSPAGYRRALAFIASYGEPIAVGIEGTSSYGAGITRAAIQDGIAVCEVVRPERAERRRLGKSDPIDAYQAARAAISNHRIAPAKDASIDGIRALHNARRSAMKARTAAMRQIHQQLVTAPAPIREKYRQLGGDKRVQVLAGLQVRSAPAPLQRAVLLALKSLARRCVDLQREHHRLGIELDQLVTAANPGLRAVYGVGPDTAAQLLLTAGGNPARLRTDAAFAALCGASPIQASSGKVTRHRLSRGGDRAANNALYRIAVVRMAGDQRTKDYVARQRQTGFSSKEIQRKLKRAIAREIFRNLTTPVTVPAIDDLRPLRQHKNITLTTAAHHPDVWPTTISELERGTRRNDQLATTYRQWLKTA

SEQ ID NO: 236355 - protein, 414 aa, unidentified
MSVGINKACGLDIHKRFLIATILGRSDTIAQERFERNDQGILELKSWVIEKQCDVVACESTSDFWVPIYDTLISHVTVIVGNARDMKAYSHKKTDKIDSEFIAQLALNNMIKHSRVFPKFHREFRSYVRLRHNLVQKRTDIKNQAHAILSSEMFHLNDVLTDIFGKNGRMVLSGICSGKKFDQIVDKLSPNVRKKSEQIKEILESEMSQSAAVRLRTCLSLIQHIDEQISILETQLFNYVYKHHKHEMDILMSCPGIGEISAATLIAEIGDFNDFSSGDKLASWLGVVPNVYQSADKYHSGRITKRGSKVARWILTQVAQAASRKKFSKLKEFFNRKKKTIGYQKAIIALARKIVTIIWHLITNNEMYEDETGYQKGNVQKRRIVEIAEISIDERISIISEMFALVNKKETDVI

SEQ ID NO: 236356 - protein, 426 aa, unidentified
MNTTTDFAATLGWDWADQKHDLWLRPADGTKAEHLRLEQSPEALHEWAAQLGERFGHRRVAIGIETSRGPVISALLAYDFIVFFPVNPKALKDYRAAFSVSGAKDDRTDAMLLEELVRLHRDKLRALEPDTELTRKLGGLTENRRRLVDERTRQVNQLHSLLKTYYPLAETLLDGHLTTPLAANFLARWPDLPAVQKAEAKTLRAFFYQHNSRGAKKMEARLETVKKARSLTQDEAIIAPARHLVTALAGMLKVLHQAIAGLDQAIAETFDQHPDAALFRSLPGAGPALAPRLLVAFGTRRDRFASASEVSQFYGIAPVVKQSGTTKTTHMRSRCPKFGRQTFHENAGCAFKAEPWAKRYYEDQKGKPEGEHHQAVRALGYKLIRIYYACWKQRTPYDRQRYLHALEKHGSPLHKKLQTPTPKNSE

SEQ ID NO: 236357 - protein, 338 aa, unidentified
MKKFTKFIGMDVHKATIAVSVADANGGEVRYVGEIANTPEAIEKLVRQLRKGDAHFSFCYEAGPCGYGIHRQLSDLGWDCQVVAPSLIPRKPGERVKTDRRDSLMLARLHRAGELTAVWVPDDAQEGLRDLTRAREDMKHLQRQAKQRLCAFLLRYGKCYSGKSNWTQAHYRWLEEQQFRQSVQQIVFQEYVDTVKALSKRVDGLDTQLESAASESVFWPVIESLMALRGVNLLSATTVVAEIGDLKRFASAPQLMAYLDLVPSEHSSGATKSRGAITKTGNAHVRRVLVEASWTYRHPARKTAHLQRRAERTSEAVGIPGHRDRRFRTNVTGHSGSS

SEQ ID NO: 236358 - protein, 349 aa, unidentified
MKKCSTVSFEGQVIFVGIDVHKESWVVNLRHCHRELDKFSMNPCPEMLAKYLRKNYPGAEYRSVYEAGFCGFWAHRRLCELGIQNIVINPADVPTSGKERDRKNDAVDSRKLARELENRTLEGIYVPPEDNLELRNLVRRETKLTGNITRVKNRIKGHVNFMGLKFGGWSGRSLKIMYADAEKRHDYALQSMLRELRFLREEKLHVIRDERQCLKRLKRDKIQGHLQSIPGGGFHTAVMLQAELWDLQRFEDKDALSSYVGFAPRLVGSGAHEVLKSAGNRKKKQLHAILIQAAWRSVLHNLEMRARYGALLHKGANPQRAISIIAKKLLYALRAVWHQERDYVVSANE

SEQ ID NO: 236359 - protein, 433 aa, unidentified
MKVLHERVAGIDVHKDMVKVAIRSPGDKPWTRKTEILEFRTFYGVLQHMAAGLRRRGVSHVVMEASGACTEPVYYALAEEDFEEIAVINPAHARALKGHKTDAKDCARLAELFECGLLRGSYIPAPELKEVRDLTRYRMKTVQARTSEIQRLAKALESAGIKLGSVASDITGKSATAMIEALIDGERRGQVLADLAIGRMRTAGKLADLSQALAGRFTGHHALLCRLHQDRITGFSAAVDDLDQRIAGKAARWQREADLLTTVPGFGDVVARAWLGEIGPAPHLWFSSHEKLASWVTLCPGNNISARKRKHGQTGDAGTYIKPMLVQAAWAAIRVRGRLQARYNRLVRRFGGDKNPGAKKKAITAIAHTLLKIAYQVLQAGVPYQEPGADFYTRRESPQQRHAFLERQLQKLHPGCTITITISPPGAALAPRA

SEQ ID NO: 236360 - protein, 386 aa, unidentified
MENSNSQTRQCETFAESRNVTNIKFASFIGVDLHKTTVTLRAVDPSENIISSLTIHTKSVNKIEDWIIALPKSRWMAVEAVSFIEWFIDRYRDCVDRIDIADATELARRKGKRRKTDRNDALDIAVRLVRGDCPLGFIADEPLMHLRKLGRHWRQLSKTLSKAKQCIKSMFHASNIHGPKLNGATAQSWLLAHGHLLKDAQRDAFANFTDIISLIERQRECLRRKIIFANRSKEFSARTTMLKSVPGIDEIWACIIAAEVGPFNRFPNADALEFWAGLTPDNKESAGRTQSGKITKAGSATLRWAICEAGVTLCKSDARQEAIRQRLIKKAGNAKANVAMGRRLLRTIYAMMRDGTLYECTEPTKSQSLKKARKARWNKKNKKEVA

SEQ ID NO: 236361 - protein, 432 aa, unidentified
MSKYFNKLVIGIDVDSTSSVATILSPTGEPFKKAFRFTHTLKGFKYFLTEIKKAEKKFCMKPITFMESTGVYHSTLFYFLIKNDYEAFIINPLITNCNKNKNVRKHKSDKSDSLAIAKLAKYEDIKAYSYFDISIFTLKALCRDYYKLIDTRTTFKLKLNADLGLIFPGYNKVFSDKASKTSFTLLKAYQTPQSIIDAPRKDILEILSVSRQSENWCNKIYDKLISLASEAVEISIPSSALSVRILNSISVIESLNKQIDILLNEIKTFANSDDVPQSFRDNISYIRSIGGIGILSAITILSEIGDIRRFKKPKQLVAFLGVDPSVNQSGKFIGDRNKMSKRGSRLARRVLFTIILSVIKKKSNGEFSNQSLYEYYHKLIITKKKKVSMIAVMHKMIKYIFAVLRNQKPYVHRPPEIHKRMFLENTAPKPAA

SEQ ID NO: 236362 - protein, 417 aa, unidentified
MLVQRDKACGVDVHRDSIVATILDRNGRKDQKEFGTTVSELFEFRDWLSSNGCKAVALESTGTYWIPIYTILEEGFEVIVANPYMIKHIRKRKKDQLDSEWIAELCLNDQIVPSRVFHKDQWELRMLTRSRESLGKMRSSLKNKIHRDLASANVKLASVITDIFGKSGMHCLTGKLLGKDLDEIIKTIPSKRVRKNADEIREAIMPNLTQVQCLSINISLSLIESINQKIQVIDGEIRSRILDRQKDLEIVMSVPGIDFASGTTILAEIGNYRDFSSPEMLASFFGLVPYVYQSAGKLYTGPITKQGSKHMRWILVQVARAASKVKGSRLKRFFLRIKARRGSNVATIALARKILCILYHLLINQEMYEEATIKKSKPSKKRILKSSSPGEMNLEDMIEVIRQSGYSVDKVDRGSHG

SEQ ID NO: 236363 - protein, 379 aa, unidentified
MEIITRNEKILYIGIDVHKDTYSLCCFDFHKNELSDEMTIKATTKAVIKYLEAIKKKHKEEILFACGYEAGPTGYGLCRGLQKAGYGCVVMAPTTMSNPDGKKRVKTDRIDARAIARILAYKSYSQVHLPSEEMEALKEYTRARDAKKRMFKKAKQELLSFLLRNGKSYPESGNYWTEKFFKWIKTVQFSEKWMQEAFNEYLAEVYSLKAKIELMDMKIREIAELEIIKDKVDKLVCFSGIDVTTAVETVVEIHDFTRFATAAQFVSYLGLCPGEDSSGKTKNMLPLTKAGNKRVRALFCESAKAIKRTNPYGQKSKRILERQKNASPEIVAYADKATKRIRTKMKHLEERGKNYNVSSAAGARELACFVWGMMNGKIA

SEQ ID NO: 236364 - protein, 356 aa, unidentified
MQTQVTKKIDFTGKQLFIGLDVHKKSWSVTILVDGTEHRTFTQPPDPGSLHAYLQRLFPGGTYNSAYEAGFCGYGIHRRLNELGINNIVINAADIPTSQKDKLQKRDHVDSRKIARSLEKGTLHGIHIFDRELEELRSLNRTRFYLMRDLRRSKTRIKSFLQYYGEPIPVEFDNNQWTLKFVSWLKQVKMQTMSGQDAFSNLISSYEYHRSQLLTLSRQIRERIRDYDRELYTLLKTISGIGPLTASALITELGDINRFANIDQLGSYVGLIPRIRESGETTYTGGITFRCNSFLRTLLIESSWQAIRMDPALMQYYHSHLINNKGHKVVIKVARKLLNRIRYVMKNRQPYVTGVA

SEQ ID NO: 236365 - protein, 394 aa, unidentified
MKLVGIDVGKNSHHFCVMDKENGEFNVTPTSFSNNKEGFDFLINSLKPYSKKSILIGMEDTGHYHVALLKFLLSNGYTVALINPKTTDLTRKMEGGITKNDKLDTITICDVLDTPERKKQYRITKVDRFDFYEQRQLTRHHHDLKEELNVYCNRLQKSIDLVFPEFNTLFSSKYSIVYMNLLKTFGSAEAIASTDIRTIRKCFEIKGRGNRISLTPEKLKECAKNSIGISSEVETIQIKHLVNQITLIKEQIAEIDKKIEEFSITNNSPILSIPGISHFSGTSILAELGDIGNYSKPSQIIKFAGVAPYHYESSQYNAQHTGITKKGSKYLRKTLYQIILTVINNNPVFKKYYRLKISQGKGHRCAQGHCIRKLLRIIYHLLETGQSFDPALLR

SEQ ID NO: 236366 - protein, 321 aa, unidentified
MSKYSMVCAGIDTAKHKLDVALEGRSETLQVDNTADGHMALSAWLRQHWVERVGIEASGGYEQEVVAQLRRDGFVVVVFQPAQVRAYARFLLQRAKNDKIDAGLIAACTAATKKIHAPPDPRLAPFAEHLTLVEQITDDIARLKNRRESCRDPRIRGFWKAEIARCNKLLRIELKALAAAIRQHRDLAERLDLILSVDGVGLRTAVAILVRMPEIGRITREQAASLAGLAPFDDDSAEHEGVRHIAGGRERLRGSLYAAALPAAMRWNPQLMALYQRLIAKGKPHKVALVACARKLLIFVNAVVERGTPWVEEPPARLKPS

SEQ ID NO: 236367 - protein, 381 aa, unidentified
MSIVALDIASKSATFCVLGTQGVQSQGSLTFDHDGFSSFIASTQISDASLFVMESTGGYHLPLYHFLLNHGRKARIINPLLVKHFHDGQTLRRTKTDALDAVTIARYAQANLSALQEDRMQLDSESKMLARRRAANAEDLAKAKTILKSDLSVAFPELLRFNVFTKTLLEFLSIYGCAKDVLGATDGQLQQAMDVQKGRKSEEITVQNIKDLAQTSIGVSYRAAMVRDSAKAVLACQQRDEDLTKALVELENALHKRQMEILTSIPGIGEVTASHFLSEIPDIAQFATYQKLIAFAGTDPGIYESGDTSKNLRISKHGNAVLRKYLYLMADSCVKHNIVFNTYYHKKRDAGFPHRKAMVATMNKLVRTLHALLTKDEMYSL

SEQ ID NO: 236368 - protein, 336 aa, unidentified
MKLRTIGIDLAKNVFQACGVNEYMKSQFNQKLKRHELLDFMRQQAPTMVVMEACYSSHYWGHDVKLIPAQHVTPFVRGNKNDHNDAFAITEASQRPYIRFVPIKNEHQQEISCLHRIRERLSKNKVALSNQSRGLLSEFGAVFPIGHIALLNGLTSVIDNAQYSHRLQNMVKDMLGEYKTLVKRLKSIEKQLAEFVDESESGRILRSIPGIGVINASALLAAIDKGQAFNTPKEFAVWLGLTPKQHASGDISKMGGITKRGDRYLRKQLVHGARSVVSRAAKKTDPLSLWATKLRVTKPFNKVAVAVAHRLARLIWILLTRQEHYCAMPTSLEVSA

SEQ ID NO: 236369 - protein, 368 aa, unidentified
MKQVTTYVGVDAHKKDLFIAMLVGAETTPVTWQLANEPNAVRRLVRKLEREAPGPVRVCYEAGPCGYALQRQVTTSRVSCQVIAPALIPRKPGERIKTNRRDARKLAELLRAGLLTEVRPPTPQEEAVRDLCRARDDAREDLQRCRHRLGKLLLRRGLHYSGRNWTRAHRRWIDSLEWVQPAERVVVDDYLLAIDHLEARLIELDARLTDIAQTEPYREPVGWLRCFRGIDTLTAILILAELHDFRRFQAPRALMAYLGLVPGEDSTGEKHRRGRITRTGNALVRRLLVETAWHYQHRAGVGVALTRRRKGQPPRVIAIADNAQQRLCRRFRRLAEHHKPAPKIAVAIARELAGFLWAALQPGPAPAK

SEQ ID NO: 236370 - protein, 320 aa, unidentified
MSQNTSAFMNDKPPSVHAGLDIAKASLQLHLQSKSYDLPNTPAGHAQLLKRLAAIPGLHVICEATGGYERAVVAALHTASVPVSVINPARVRQFARASGELAKTDPIDAAVLCAFGVAFTPDATAPRTAVEIKMAALVIRRVQLLELRVAEAQRAASCADPELRQLFTPWLAQMEKQITKVEALIEVLLREQVPLAAQVQRLDDIMGVGRLTAVMVLATMPELGQLNRRQAAALAGLCPYNRDSGQWAGQRCISGGRAEVRRALYMAALSASRSNHLLKPFYDRLIAAGKPAKVALTAVMRKLIVLMNHLLKNPNFSLAK

SEQ ID NO: 236371 - protein, 309 aa, unidentified
MIAVGIDVGKSFLDVAVYGEQKVQRFKNTSGGVERLVKGLKKHKQVRIVLEATGGYEESVLEACAKAGLWIARINPRQGRDFSRATGQLAKTDHLDARMLAEMAAVFHGRLRQHTPAMPWQTELKGWLRRRRQVTDAIIGTRQQMTMALPVIRALMRKTLAALQRELAVVDAAMKQLLQVHATPAVRSAKGLGPVFQATTLALLPELGQLSRQQIAKLVGVAPLNRDSGQSQGKRKIYGGRAQMRVALYMATLSAVRWDPVLRSHYVQLRARGKVAKVALVACMRKLLGIVNARRREELRGCGEISCVV

SEQ ID NO: 236372 - protein, 428 aa, unidentified
MRKQAKVIAKSSLSPRLSYALCKSRWKKLRVDMKSPLKKLRVGKNSHHFCVMDKETGEFNVAPSSFSNNKEGFDFLINYLKPYSKKSILIGMEDTGHYHVALLKFLLSNGYTVALINPKTTDLTRKMEGGITKNDKLDTITICDVLDTPERKKQYRITKVDRFDLYEQRQLTRHHHNLKEELNVYCNRLQKSIDLVFPEFNTLFSSKYSIVYMNLLKTFGSAEAIASTDIRTIRKCFEIKGRGNRISLTPEKLKECAKNSIGISSEVETIQIKHLVSQITLIKEQIAEIDKKIEEFSITNNSPILSIPGISHFSGTSILAELGDIGNYSKPSQIIKFAGVAPYHYESSQYNAQHTGITKKGSKYLRKTLYQIILTVINNNPVFKKYYLLKISQGKGHRCAQGHCIRKLLRIIYHLLETGQSFDPALLR

SEQ ID NO: 236373 - protein, 408 aa, unidentified
MLFVGDDWAEDHHDVEVQDDSGRRLWAARLPEGVEGVAKLHALIARHGGEDLEPGGVVVGIETDRGPWVQALLAAGYQVYAVNPRQAARFKERYGTSGAKSDKGDAHALADMVRIDRAQLRPIAGDSEQAQSVKVVARAHQTLIWERTRTFQRLRSTLREYFPGALAAYAGLELTSTDALELLLKAPTPEQAAKLTKQQITAVLARHRRRNREQRAASIQAALREPQLNVAAPVADAYAAAVTAHARLMITLNEQIDALEGQVKTHFLAHPDAEIYLSMPGIGEITGARVLAEFGDDPTRYTSAKARKNYAGTSPITRASGKSHSVQARFVRNNRLADALQRQAFCALQNSPGARRYYDKQRARDLDYNPALRQLGNRLVGILHGCLKTRTHYSEATAWAHHANLATT

SEQ ID NO: 236374 - protein, 430 aa, unidentified
MKQSELLHSLFVGIDVSMKENVVHAMPFSPEDHPGHAHLRFSAPNTPAGSVGIVEKVSDFLKFYPDVIQVVIALEATSVYSFPLATFLSVAHFNGHIPAIVYSVNPKEIHAYKKTFTDVGKDDYVDAMVIADYARSNKIRSRPWKGPELLGLRVLTRLRFRIAKLMGIVKNSTGNSIYLECSGLMTGENPFCNVWTTTCQELLTTFQGPDEILSLPDEELLNFITEKGHGRFSHPLDVVEKVKKAARNSYRLDKRVYEPLTSGLSVSFFIIHSLEAAIKKLDKSIETMAKSFSSDSYQILLSIDGVGPVIAGGLLAEIGDIKRFKTDDALAKYIGLTWRGKQSGQSESPVKHLSKAGDVYLRYYVLLATGQIINYSAKYREAYERIRSRKTLFPYRAALNLVARKIVRLIFTLLDKHQLYSDNKVMVTLE

SEQ ID NO: 236375 - protein, 321 aa, unidentified
MNTSLVSSIGIDVSKSSLSLATLRVDHSAVVKSCANDEDGIDSMLAFFKEYKTDIAVPCVIESTGDYHVQCALMVADAGFTVNVINPLITKQYQRASVRNNKDDTVDAVRLARIGLMEPNLKRFKATKQSLALKKVVASVGKLDHYKQELKAHTKQLKEAGTLLGVKVNLSHLEKAIASIEKQIDQFETYIHDHAPKEAIEISNGVRGVSQTSVAKILSLLDGHEFTDKHKLVAFTGLDVAARRSGSWKGRERISKRGNPHFRKILFQMAWGLKQHNETYREYYQKMRERGKHYFTCLIAVARKFLRFLFAYVWKKSVSFS

SEQ ID NO: 236376 - protein, 344 aa, unidentified
MKFIQFIGIDVSKKTLDASIFVAGEVINKFPHVQVRNDKQGFKDLLRWAKEQGVKTKDTLFGLEFTGYYSDALELFLTKKQICYAMLPTTVVKHYQRGTHDKNDKIDSAKIADYLFRFNGTECIKLRVLPSKALQKLKELKSERKFLVQNRVGCECRLQVAKSKSEEKHMQKLIDLYNDEIEQVEKEMLDVVAQDPQIYTTYRLLTSIPGIGFVNAINTIANTQNFTAFETARQYAKYVGVAPSEHSSGTSVQWRRRPSPHADLQAKADLSMAALHAIELSAEMRQLYERKLGNRTKDKDMQKKALNTVKFKLIREMFSVVRQARNFELRGLDKAQAETHSTEE

SEQ ID NO: 236377 - protein, 320 aa, unidentified
MSVSSVVVGIDVAKAHVDVSVLGGKLDAQRFDNQAEGHSALTAALKPLDVALVVMEATGGYEAELACTLQAAGLPVAVVNPRQARDFAKSMGRLAKTDAVDARMLAQFAAVLLRREDLQRFLRPLADAQQQWLAALVTRRRQLLTMLHSERQRLQITPKGLHPSIEAIVAAIKAQLDDIEGQMVVHVREHFAQLDALLQSASGIGPVASATLIAELPELGRLNRRGICALVGVAPMANDSGSSKGRRRIQGGRFDVRSVLYMAALTASRRNPVIKAFYQRLIAAGKCPKVALVACMRKLLTILNAMVRTHQPWNNSLHGA

SEQ ID NO: 236378 - protein, 469 aa, unidentified
MTDPPPARNRGWILSVSQQKKRKLSAQVVEDEDYQLRYERCAGIDVAKASGVVCTRLPAQRDGGRRVAVTETVAATVPAIAALAGRLAAAGVELVSMESTSDYWRVWFYVLEAHGLAVQLVNSAQARQLTGRPKTDDLDAKWLARLTEMGLLRPSFVPPADIRQLRDYTRARVHLVQDRTRQYQRLEKLLEGALVKVTAVTRLTTASAKDMVRAMIAGERDPRTLAALARTRLKARHEDLVAALTGMRFTDHHAHLARTLLNLIAYLDEDIAILEDKIAACLDAIPAAQGVDADGTAGGVGPDPLVLPAVWRLAEIPGLTTELACQVIGETGLDMSRFPTAAHLVSWAGLAPVANQSGPRTRKGKKGQGDSYLRGFCTQAATGAALTDTFLGERHRRIARKRGPGRAKVAVARSILIIIWHLLKDPETRFTDLGPEHYASRTDKDKKTRNLIRQLNALGLDVTITPQAS

SEQ ID NO: 236379 - protein, 350 aa, unidentified
MNDLIRIGMDTSKSVFVLHGVDGAERPVLRKKLRRGEMVAFFAALPAVRIGIEACGASHHWARALSALGHEVVLIAPQHVKPYVRRNKNDAADAEAICEAMSRPRTRFVPVKTVDQQAALMLAGMRDGLVRRRTQLTNTIRAYAAEFGLTASRGLDKIEPLLARVAQDEGIPALARRLFAELGREHEELERRLEGIEAELMAWHRADAKSRRLREIPGIGPIGASLLAMKVPDPGAFRSGRDFAAWIGLTPKDHGTAGRQRLGGITCAGDPALRSVLVAGATAVIQQVLRGRSQASPWLTALLKRKPPKLAAVALANKTARVAWKLLATGERYERHHREVRSEAGLVAAA

SEQ ID NO: 236380 - protein, 360 aa, unidentified
MFTERTSVGLDVHARSVAAAAIDSVTGELVQARLTPSHEHIRSWLQSLPGPVAVAYEAGPTGFGLYRALTVAGFRCEVVAPSKLQRPGGDRVKTDAKDAVHLARLLRLDEITAVAVPTVEQETARDLVRAREDCRGDLMRARHRLSKLLLRQGIVYSGGQAWTGAHDAWLRRQSFESKALQMTYESDYDAVLTVKARRDRLDAAIADMAADSAFTPTVRRLGCLRGISTLTGLALTVEIGDWTRFTGNTIGSFVGLVPSEYSSGASRMQGPITKTGNSHVRRLLIEAAWHHRTRYVVGKTMRDRWELAPPAARARGDAGNRRLHQRWARFRERRKRHVIANVAIARELAGWCWSLAVLEE

SEQ ID NO: 236381 - protein, 405 aa, unidentified
MTVLFVGHDWAETHHDLHIEDRDGRCVGKGRVSTGVAGVSQFLEMIAEHDVNPCDVLIASETDRGLFVTALISAGFSVIALNPMSTARYRERLSNSGAKSDAGDAKTLAAVARLDGHNHRPVFGDSDLVEAIKITARAHHNLIWSRQRQMNQLRSALREYYPAALEAFPILIHSDCFGVLAAAPTPTQGRKLTLPQIKAAMRRGGRKRGFDKRAPQIQQILRSEQLSAPSQVEKAMGSHVTALITMAIEFTSQIHRLEAELGELFDSHQDAEIVRSIPGLGTKLGARVLGEFGDATDRFVDARARKNYAGTSPVTRASGRSHVVLARHARNLRLADACYQWAFVTITASPGARAFYDEKRAKGDSHSKALRALSNRLVGILHGCLINRTRYDEHTAWGHRQLIAA

SEQ ID NO: 236382 - protein, 345 aa, unidentified
MDSVTLVGIDLGKHSFHLHGQDRKGQAVFRRKLNRKQLVEFFAKFHPCTAVMEACAGAHYLARKLMGMGHEVKLISPQYVRPFVKGNKNDFIDAEAICEAASRPTMRFVPPKTEAQQTLSMLHRVRESLVHDRTKTANQMHGFLLEFGVSLPVGFAAIKRLPALLAEHEDLPPQLVSVLERLQEHFKYLDGQIAEVEKLLSHQVHEDDLGQRLMTLPGVGPITASVLSAEMGDGHQFSASRDFAASLGLVPRQYSTGGKATLLGISKRGDKNLRRLLVQCARAFMQRLDKYPSPLADWVRALLTRRHSNVVACALANKLARMAWALARGHTVYDPGKLRPDPTSA

SEQ ID NO: 236383 - protein, 413 aa, unidentified
MLLLIGDDWAEDHHDIEIEDDTGRRLAVARLPEGLEGITRFHALVAKHAPAEWADLPAEEIASRVIVGIETDRGPWVAALSAAGYRVFAINPLSAARYRQRHSTSGAKSDAADAHLLAEIVRLDRDHHRQVAGDTDLVDAVKLLARAHQTAIWERTRHVLRMRSALLEYFPAAVEAFEDLAAKDTLLLLARASSPARAAKLTRSQVVSALRAARRHHVEAKADALLTVLRAPGLRQNPTLEAAYAAIVVTQVGIITALNEQITQLQEVVAKHFGRHPAADIYLSQPGLGEVLGARALGEFGDDKKRFTDARARKNYSGQSPITRASGKKTVVLARFATNRRLGDALHQQAFAALNASPGARAYYDALRARKIGHHAALRQLANRLVGILHGCLKTGTKYDENTAWQHQISGAA

SEQ ID NO: 236384 - protein, 313 aa, unidentified
MIYVGIDIAKLNHFASAISSDGEILMEPFQFSNDADGFLMLVSRLDSLGSDNIIIGLESTAHYGDNLVRYLVASSFKVCVLNPIKTSSMRKNNIRKTKTDKVDTYIIAKTLMMQDSYRFVTFYDLDLMDLKQLGRFRQKAVKQRTRLKIQLTSYVDQAFPELQYFFKSGLHHKAVYALLKEAPSPQDIASMHMTHLSHLLTTASHGHFKKEQANELRVLARKSVGANDSVLSIQITQTIALIELLDSQLKKVETEMTEIMKFHDSVIMTIPGIGYINGRIILGETGDIHRFSTPSKLLAFAGLDPSVYQSGNF

SEQ ID NO: 236385 - protein, 343 aa, unidentified
MGEVITIGLDIAKSVFQVHGVDADGAVVIRKRVSRSRLLEFFADLPPSLVGIEACPTAHYWSREVAALGHTVRLMPPSYVKAYVKRSKNDANDAAAICEAVTRPSMRFVPTKSEQQQSALMLHRSRQLLVRQRTMLSNAIRGHLSELGIISAKGRNGTAELLEIIADQEDDRIPVAARLSLNALAGQYAAMTIEIRNIEKHIHAWHRSCEESRRLEEIPGVGPIVATALVAEVGDWTVFSSGRSLAAWIGLVPRQHSTGGKERLGRISKQGNRHLRWLLVAGAMAVIRYARQHGTKRLWLTRLMGRRPTKVAAVALANKIARMAWAMMVRGERFKEAKLLPAT

SEQ ID NO: 236386 - protein, 407 aa, unidentified
MDSLKTVFGIDVSSRKSNVCIMVNGQKVNDYAISNDMVGFNQLLGDLKQVTNPQIIFEATGVYSRRLQAFLDMHELRYVMMNPLEAKRKTKDDLHQNKTDKLDAMYLAKMQSEHPQRLAYVQSEEYQELMANNRIYEQASHDLITNKNRLHKAIQLTFPEIEHLMVNPRGKNYWSIVLRFPHPDIVLETKEADIIDFLKGLTGIGKKRANDIAQSLIRLAKVACPAVKKNSAHIRGLKMAINNILNAEEECQTALQEMAKLAPKRDLEILTSIPGIGENTALRIISELGDIRRFNNPSQLNAFVGVDPQVYESGNLTAHLSISKRGTAIGRKVLYLAINQIQSAKKVGNPCHIADYYEKRKRSSETASHKKAAIASIHKLLRTIFALIKNDQLYSYDVAKHNQRLLS

SEQ ID NO: 236387 - protein, 466 aa, unidentified
MTQSRRTRSSSSRRRSLPPELQHVNLNAAGIDVGAEAHFVAVPAGRDPQGQNVRQFGAFTADLYTLADWLAACGVETVAMESTGVYWIPLFEVLEERGFEVKLVNPRHVKNVPGRKTDVLDCQWLQQLHTYGLLQAAFRPEDQICVLRSYLRQREMLVRYASHHIQHMQKALEQMNLKLHHVISDLTGVTGMRILRAIFEGERDPHKLAGLRDHRCKNDEATIALALEGHWRPEHLFALRQAVELFDFYRQQITACDAQIQDCLHTFQDRSAGRPLDKPTRRRNRQKNQPAFDVRSHLFRITGVDLTAIEGIDAQTALKLIGEIGLDMSRWPTEKHFASWLALSPGSKISGGKTLSARTKPYPNRAAAAFRLAAHGLHNSHSALGAFLRRKKAHLGAPKAITATAHKLARLVYAMLKNGSQYLETGEAEYERRYRERVIHNLKRKARALGYDLFQRNVPVLPLPPP

SEQ ID NO: 236388 - protein, 426 aa, unidentified
MSNAGYHVIQLMEESFMYNAVGIDASKLKSTVTVIQPAGIVIHKPFDVLHTSSELNTLVAYLKSLEGETRAVIECTGRYHEPVVKSLSEAGIFISAVNPKLIKGQKPNSLRKVKSDPADSRKIARYALDNWAELRQYSSMDTIREQLKTLNSQFDFFMKQKVAVKANLISLLDNTYPGVNKLFDSPARDDGSEKWVDYAYSFWHVDCVRKIGLKAFTERYEAFCKKHHYNFQKGKPAELFEASKQLIAVFPKEKSYKLLIHQGIQQLNLASEHIEILRKEMNQLASTLPEYDTVMSIYGVGETYGPQLIAEIGDVSRFTHREAITAFAGVDPGVNESGQFRQRSNRASKNGSTRLRKTLFQVMTTYLQNKPVNEPVYQFLDRKRAEGKPYLVYMTAGANKFLRVYYGKVKECLHNLEPDSLPSEKS

SEQ ID NO: 236389 - protein, 369 aa, unidentified
MKKHPSTALTAEVSLKNGPKRAKTKQIFLGIDAHLRSYEVAIKRDNGAIQAAQRFGLAELLLFGQKQLQWAEEVYAVYEAGPLGYALYRQLKQLGIQVYVSAPECLEQGKRKTNQLDARKLASRLYSYVQGDREMMRVVRVPSPELEQSRIESRQYDQLVKTRKALSMQARSLVLSQGYGTMSGSWWRPLGWKKWGPLLPAWLVRHLLVWQSTLRLLDQQIAQRKSELIQSVKEALPKGFGAQSICQLDREIGDYQRFRNRRQIACFGGLVPQEHSTGTQQRLGSITKVGSPRIRRLSVEMGWRLVQFQPNYGPIVQWGQALRGSNKALKKKAIVAVARRLLIDIWKMRTGRTSAQELGLVVNSLASEL

SEQ ID NO: 236390 - protein, 362 aa, unidentified
MAMEKSSTRRQKDKPPVVTKRDQVYVGLDVHKLSVHAAVRINGELFGAKVLPAKASAVLAFLAPFRAGLKKVVYEAGPTGYALIRALIADGVNTAIVAPSKIPRPAVQGAKSDGLDCRMLAEFAEKGLLSEVAVPTADEDASRQIQRMRDSIRDRRRKAKQHIRSFLLYHGIEEPKNLSSWGEGAIDELQKIPMSPKLKFCLDILLEDLYHALDQMEHVNERLKVLASEKRYAKEAERLKTHPGVGDTTCIQVLTELYQPERFQNSKQVAAYVGLAPQVRQSGQTRTEGALLKAGRGELRSTLLEAAWVWIRVEKRATKLYGRLVRNTGNAQKAIVAMARRMLVNLWYMLIRKEDYRPFAAK

SEQ ID NO: 236391 - protein, 355 aa, unidentified
MTSVKYIGLDVHQATIVVAVRDESGKLIMESVVETRASTILDFIDGLRGKLFVALEEGISADWLYNVLKPHVDHVMVCDPRKSSKMKAGSKSDHIDARDLSELLRGGQLQPVYHGDSGVRTLKELARSYMTLTEDVIRVMNRIKSVYRSQAIRCAGPRVYSARYRAEWLNQLLQPGQRLRAEHLHQQFDLLQPLRMQARQELLKESQRYPARATLQKIPWVGPIRAALLIALVQTPHRFRTKRQFWAYIGLGVETHSSADYQFKNGELQRSKKKSSTRGLNVNHNHDLKNLFKSMAVSASTRRGLMQDYYEDLLAKGIRPAMARLTLARKFAAIVLVLWKKGESFDPKKLTSQAA

SEQ ID NO: 236392 - protein, 440 aa, unidentified
MVRIYFYARSAIPREKGKEMPYRVAAIDIHKKVHMVVVASMAEEVEDTAAAAVEFECRKFGAGASERENLVAWLGERQVQEVVMESTAQYWKSVWLELEPHFGKLHLAQAQSNRAPRGRKTDFRDAKRLGRRLLASELMLSYVPEPEQRRWRLMTRGRLQLVRDRVRLQNQMEGLLEEARIKLSSVIGDLLGVSGRRILEALAEGTRSPAQLAELGDRSLKCTKQELTDALTGAPDPCHIELLKLDLQRLQLLDEQIEKLSRMAGEALRVHQAVVLRVAKMPGWGAESAQQIIAEVGVDAEAFQSPGAFASWAGVCPGSNVSAEENHSSRCPKGNRYVRRLLTEAAQAAVKKKGSRFQNLFRRFLPKLGWNGAIALVRHRMARVLWKVLHDGVEYVECGQDTTPKARKRRAQKLTQALRKLGYQVTLTDVQIQTEPAATA

SEQ ID NO: 236393 - protein, 343 aa, unidentified
MKITRVGVDLAKNVFQLHGVDRSDKCVWKRKLSRGKWLRTLLTETDPSCEIGMEACTGAHHWARVLRNKGYQVKIIAPQFVKPYVKSNKNDANDAEAICEAMSRPNMRFVQVKTTEQQDLQALHRVLYELKCHRTAKGNQIRGLVAEYGLVAPKQLLALRRAIPDWLEDAENGLSDAFRWLLKGLWDDLVLMDNRIAQVNDEIEQIAKTHPVAQRLQQLRGVGPLIATAMIASVGTGKQFTRGRQMAASIGLTPKQYSSGGKERLQGISKRGDVYLRCLLIHGARSVVSHAKHKEDRFSRWMTELEQRSHMNVAAVALANKTVRMAWAMMTKEVDYDPSLASH

SEQ ID NO: 236394 - protein, 353 aa, unidentified
MKYVGIDWAYRTAQWCALAPGGEIAGEGRIAADRGGLARLVLELGDEVKACLEMMSGALWVRDQLAACGWQVEVADARKVKTVAPLAAKTDKVDARLLAELSRRELVPALWLPALDERALRERLRRRMHLVRLRTSAKGRIFGLQTQWGVRVSLARLRRGDGLALLEQAGMPAVWRRSVSECLALVDFLDARIAPLDAELRPFAKADPRAVLLDTIPGVAELLALTIAVEIGEISRFAGPEKLVSYGRLAPRVHQSGQARPRSGPLSKSGSRLLGWAAVEAAQQAWRETNPWHDLYTDVSRRSRHNNSAKAAVARKILIAAWHMLSRNQPFNPAPRSTRGTSVPASSRLALAA

SEQ ID NO: 236395 - protein, 397 aa, unidentified
MYIVGIDIAKRKHEAAVIDGEGAVIIKPFSFTNNCSGYNRLLAMLTKAKLPLDEVSFALEATGHYWLALFTRLQKEGFRVQVINPVQTNSIRSFYIRQAKTDPRDALLIAEVIRFGHFSESTLHPENIYELRELCRGRHAIVSMQADVKRKVVALLDQVFSEYETAFTNLFGDTSMAILQTCPTPKELSEMRLEELCHLIEVSSHKRFRMAKARELQALARNSFGFAMAGDVFSTMIRLYAKHLDFLKQQVREMDRKIAEIMETLDTPITTITGIGPTLGAYILSEIGDISRFSSAAKLAAYAGIDPTMRQSGEYNGVRNRMSKRGSPYLRHAIWLAASSAVLHDPALKLYFQKKRDEGKPYMASVGHACRKMVSIIYAVMRDSKAYTPYIPNEISA

SEQ ID NO: 236396 - protein, 347 aa, unidentified
MTIVENHTLITGGVDTHLEFHVAAAVDANGGVLGVETFSTRGAGYAQLVAWLQRFGPIDRVGVEGTGSYGTGLSRHLRSEGIAVVEVDRPNRQARRRHGKSDTVDAIAAARAALSRTATGQAKHRDGNVEAIRVLMVARRSAVDERIKVLNQIRHLVLCAPEPIRARFHGLTPTSLLNQTSTLRPRDHGDIVDYTTLITLRELGRRAKNLHDENLRLNKLLRPLIRRTAPGLLDVYGVGYDTAAKLLVAAGDNPERLHSEAAWANMCGVAPIEASSGKTKRHRLNRGGNRQANSAIYHIMLTRLSYDQRTRDYFARRSAEGKTNGEICRILRRYIAREIYKQLPHPD

SEQ ID NO: 236397 - protein, 337 aa, unidentified
MKRYLGVDLHRTQMTVCTRLESGEESVREWAIKDLPEFAEQLRAEDEIAVEATGTTGRFYDAVVGRVARLVVVNPHKFKIISESVSKTDGKDCRELALFLSKDLLPEVRMKPKKQRELTHMTETRDLLVKQRSAVKGKINNLLAMQGINLKREALSSKVALERGMGLEVSAMVKLELRVLVEQIRALSASIGELEELIAEEGEQLAGHRNLTSIKGIGSLSATVLLTTIGSVGDFADENKLAAYLGLVPRVQNSNATERNGAITKMGNKLARTALVQCGLVAKRYSPYLNRFYQRIKERRGGGKAKIALARKMVKIVYDTLKNNWVFDDFPSFTLAA

SEQ ID NO: 236398 - protein, 365 aa, unidentified
MQKISTMRTRGKNIFQGQLTVGLDLGDRSSAYCVLNEAGEIVLEHKLATTPEAMKQVFASMPRCRIAMETGTHSPWVSRLLTALGHEVIVGHAQKVRLITKSRRKDDRLDARTLARLARIDPELLSPVKHRSAQAQLHLTEIRARAVLVSARTALVNAARGLVKSYGERLRKCGTEQFRRETTSGLSAGLREALEPLLREVESLNERIQEYGRRIARMAKETYPQTALLKQVKGVGDLIATAYVLTIEDPHRFRKSRDAGCFAGLQPGRRNSGESEPQMHISKEGDAYLRTLLVQGAHYILGPFGEDSDLRRWGLKLSARGGKNAKKRAVVAVARKLAVLLHRLWVSGEVYEPLRNSQKAMTVAA

SEQ ID NO: 236399 - protein, 312 aa, unidentified
MAMLSFCGIDVSKDRLDVVVLPEGWFFSVSNDTAGWAELVGRLRPLAVSAIGLEPSGGYERGIIRALLAVGLSVRRINPNKLRQFARARGVLAKNDRLDARLIAEYVAIMPTRVVQRDAAVERLAEIVTMRRQLCDEHVAAQNQAAHLEDAMLRRLSKRRQTRLEADIHLLDKRLAEMVAADVALAQRYELLTSMPGVGPVLAFTLIALLPELGKMTRKQIAALVGLAPYDFDSGKLKGHRSIYGGRMPVRNVLYMAALSASRYSPALKAFHNRLAHANKKFKVIIVAVMRKMIITLNAMLRDNAAWQPQSV

SEQ ID NO: 236400 - protein, 405 aa, unidentified
MDGIRRYAGIDWAKDAHAVCIIDERGSALARFEVEHSAAGLRELVRRLTGVEGVAIERPDGPIIEALLEAGLPVVVIASRHVRALRTRHGLAGNKDDRADAYVLADALRTDGQRLRPLQPDAPETLALRATVRARKDLVHHRTALGQQLAAHLALAFPGAVDLFDELASPIARAFLRRFPSAERAAWLSPRRFDHWLAAQGYSGRRSGAELHARLVAAPAGVGGETAEAMAAVTLALVAAVGAIDEQAKALEARIAEQLARHPDSALFRSLPRAGRVRAAALLAEIGDRRERFPTPESLACLAGATPSTRQSGQHRAVSFRYTCDKKLREALVDFAQDSRRANPWAEDLYRRARERGKSHPHAVRILARAWTSVIWRCWQDRVPYDPARHRALQRVLLGPTAVAA

SEQ ID NO: 236401 - protein, 367 aa, unidentified
MNYKLKAAATAISKEQNSQKGPKANRMVIGVDVHLKSYEAARKIDNDSVGVVQRMGSKEEFLLYAEKQLQQAQEVVVVYESGPLGYTLYWDLKARGVECLVCAPQSQEQKRKRRKNNAIDARTLSGNLFNYLNGNKHALQLVRVPTKAQEQARIESRQHDALVEERKRIAAMGNSLLLSQDYGSWKNWWRPKSFERLSQLVAPWVLKQLKRWVEILGELDQQIQRAKVELTQQYQGPRPKGMGAPSLAQLNAEVLDWNLYSTGRKIGCLAGMVPSEWSTGEGQRLGAITKVGVPAIRRIITEMVWRMILFQPQYKAVQKWREVLEGSNRGLKKKAVVAIGRRLMVDIWRLQTGRISAQELGLIMIEA

SEQ ID NO: 236402 - protein, 370 aa, unidentified
MGKSVLYVGLDVHKMSVDVAIAEPGSAGETRYYGRIGGDLEALDKVTRKLRAQGVELRFAYEAGPCGYQIYRHLTAQGSSCLVAAPALIPRRPGDRLKNDRRDALNLARLLRAGELTPVRVPDADDEAMRDLTRAREDAVSVERRAKQRTAAFLLRHGRRFPGKTTWGRGHWRWLLQQVMEHPAQQIVLQEYLDAVREAGARVQRLTGQIRELLSQWRRAPFVAAYQALRGVSIIVAATVVAEVGDLSRFNNPKELTAYLGLVPSEHSSGGTVRRGRITKTGNGHARRVLVEAAWAYRLRARVTRPLLQRQEGLPESIRQISWKAQLRLCARYRRLLARGKAKQTIVTAIARELAAFIWAIGRAVEPVTA

SEQ ID NO: 236403 - protein, 314 aa, unidentified
MEMYYVGIDVSKIELEVAVRPTGECWTEKNSASGIADLGRRLSKMSPELIVLEATGGLEMPLATALVTAGLRVAVINPRRARDFAKSLGRLAKTDRIDAHDLAEFGERVRPEVRALPDQAAQELAALVARRQDLVAIRVAEQNRRSTALPDIQTRIDEHLAWLDEEIADLEAEIARRVQENTVWRETADILDSAPGVGQITAFKLVTGVPELGQLDRKQIAALVGVAPFNKDSGKKRGLRRVWGGRAQARSALYMATLAATRFNPVIREFYQRLVAAGKPKKVALTACMRKLLTILNAMVKNRTRWQVPQPAAA

SEQ ID NO: 236404 - protein, 415 aa, unidentified
MGQASRVWHLWRFPRQPTRCSMSQPNDSNKSVIALEQDNTMIAVIEMGQASWLVAGIVPGLERQPLKKLGSDEQALFQLLRRWRNEAVQTGRTIKRLVVAYEAGRDGFWLARWLRARDIEAYVIHPNSVAVSREHRRAKTDRLDTELLKRAFLGWLRGEAGHCSMAAIPTIEEEDARRPNRERENLVGERTRIVNRMKATLARFGIRSFKFTLRHADERLNDLRTAEAASLPANTHAELRRDIARLRVVRDQIKEIEQQRLQRIEQAAPSEKGPHAMIRLLARVIGIGVETADMLVNEILSRQLRDRKAVARYAGLTGSPDESGKRRREKGLSRAGNARVRRGMIQLAWRFLMFQKDSALAQWYRARTAHARGGTRKTMIVALARKLLIALWRMVTTGEIPEGISLHPAVARTTR

SEQ ID NO: 236405 - protein, 344 aa, unidentified
MELYVGLDISQSMTHLCVVDSKGKRIWEGKCRTSPEDIGETIRAKAPEAQLIGMESGALSPYLWHELTGMGLPVVCIEARHAHKTLSEQLNKTDKHDARGIAQLVRTGFFKEVKVKSMKSHQVRTLLGARAQLVWMRTDVKNQIRGALKTHGFVVSHSVEKGFKAKVAGITEDCPVLARLVAPLLRVLETVEREVQELDKLFGEYAENNSTCRNMMTIPGVGPITAVAFVTAVDDPKRFRKSRSVGAYFGLTNRRDQSGERDVAGRISLRGDKLVRCYLYDAAGALLTRTKSWSALKSWGLRIAQRSCLGKAKVAVARKLAVMMHQMMITGEAFRWSDTEAAAA

SEQ ID NO: 236406 - protein, 416 aa, unidentified
MFHLGIDWASMSHAVCITDQDGAVVKQCKIDDDYDGYLTLLAVLRNLPAETREILFSIEDKNLKLVDFLLSHSFSGFFVPPASMESYRKRYSQNHAKSDTSDAFILSDLLRTDRNNLKPIVKDSAFIRELSALLKDRDAFVKDCSRLTLRLISTLKEYYPEFLKLFKDPARDTALDFLLKFPTFQDASKLSFPRLYKFCTKRHFCQTESIKKIFSILKAKPTPVDEVVMKTKSIKAVATAEQIKELLVVILSYEEKISALFNSHPDAKIFSSLPRSGTITAAGLLTIFGDNKDKFASSDEVQMAVGTAPVTIQSGKFRIVKFRHGCNHFHRSVLHYFSMNSTRESIWAKNYLQTKLNQGKSFSCALRCLGYRWNRIIFSMWKNNTVYDENVLLANFAKQSIAADLSKNLKFFPAAA

SEQ ID NO: 236407 - protein, 389 aa, unidentified
MPTVADRHDAPTAIQTNLAAIFISLELSRSIWLITSLSPGFAGKMSKHSVQAGDVAALLARVSELKRKASERTGKSFPIVVIQEAGLDGFWLHRVLQSEGIESHVVDPASIATSRRRRRAKTDRIDGEALLRALLAFKRGEPRVCAMVKAPTPEEEDRRRLSRERKVLVAERVKHVNRVKGLLFSQGVSGYEPLRRDRRQRLEDLTTGDGRSLPMHLKTQIGRELDRLELLLDQIKQAETERDALLASQQAAAPASAGRMLLEFKGIGAEFAASLWLEALFRSFDNRRQLASYAGLAPTPWQSGSVDHEQGVSKAGNPRLRTTLIQLAWLWLRHQPQSALALWFKERVSRNGGRLKKTTIVALARKLLVALWKYVTAGVVIEGAVMKDA

SEQ ID NO: 236408 - protein, 368 aa, unidentified
MKQVTTYVGIDAHKKDLFVAMLIGTQTAPVTWTVPNEPKAVRRLVRKLERETPGAVRVFYEAGPCGYALQRQVTTSRVSCDVIAPALIPRKPGDRVKTNRRDARKLAELGRAGLLTAVQPPTPEDEAVRDLARARDDAREDLQRCRHRLAKLLLRRGLHFSGRHWTRAHRQWIDGLTWTQAAERAVVEDYRLAIDHTEARLLALDARLAEIAAHEPYCEPVGWLRCFRGIDTLTAMLILAELHDFRRFASAPALMAYLGLVPGEDSSGEKHRRGRITRAGNALVRRVLVETAWHYQHRPGIGVALRQRRNGQPARVIAIAEKAQQRLCRRFRKLAAEHKPAPKIAVAIARELAGFIWAALQPVATPMR

SEQ ID NO: 236409 - protein, 340 aa, unidentified
MRQLYVASDLHGNNNLVGIIDGEGKRVFKKRVPNDPQLVRDVLKPYKGEIVGIAVESTYNWYWLVDTLMEEGYRVHLANPAAIQQYSGMKHADDTHDAFWLAEMLRLGILPEGYIYPKEERPVRDLLRKRGHLVRLRTSLVISLQNILSRNLGVSVIGNEVKRLREDRITPLLRGSEDLALAGQVSKEAIDFFTHQIRRIEGMVEKRVELKEGYRYLLTVPGVGKILALTIMLETGPIGRFETVGDYVSYCRKVPSEWTSNGKKKGSGNKKNGNKYLAWAYSEASDFARRFYPEPRAYYQRKMQKTNPAVAHSALSHKLARAGYYIMRDQVAFRPEKLFG

SEQ ID NO: 236410 - protein, 307 aa, unidentified
MNKDIKYFGIDISHLVFDVTDSQGNYYQFKNSISGFKKFVKLLSINSHCVMEATGYDHYQLAYYLLECGMKVSVENPLAVKRFIQMKLSKIKTDKSDSKLICEYGKQVELKLWKGTSKHQTECLQMTRLLAVYTKQSTMLKNKLHGEAVLGNPSKIVVSSLKRSLKQVQKEIKTLEDKLLILVKEVHQDLLTRMKTIPGIVAKTSLMLVVLTDGFKRFKSGSELCSYAGLTPVIRKSGSSVNGRSRISKIGNQKLRNLLFMCSFNACRYNKACREIYERIVAKGKSKKLALIAVCNKLLKQAFAIAK

SEQ ID NO: 236411 - protein, 340 aa, unidentified
MFYVGLDIHTKRIAFCVLSDQGQRVQRGQVRGLDEILRILKALPDRFEVCYEASCGYGHYHDLLQPLAARVLVAHPGQLRLIFRSKNKNDRNDAERLAKLLYLGETPTVHVPSLEVRTWRELIHCRSQVIAKRTRAKNTVPALLRSAGITPPKQPGLWTKKGLAWLRQLDLPTPSQQLRRDLLLEEIETLLRQGRRLEQQLNHQAQHTPAVAQLRSIPGVGIRTAEAVAAFVDDPHRFRNAKAVGRYFGLVPCQDQSGDKNRLGHITREGAPVVRQLVAEAAWQALRRSPTVRAYFERVQRGDPQRKKIALVATAHHLVRVMWAMLKRGTLWEEKEAKAS

SEQ ID NO: 236412 - protein, 395 aa, unidentified
MFIVGIDIAKRSHEAIIIAEDGQVVRKAFSFRNNCTGYNLLLEQVRRLTLVKSQIVFAMESTAHYWLALYARLLKDGYAVMVLNPIQSHSLRELYIRKAKTDARDSLIIADLVRFGRCKASNVPQDKILALRELCRSRAYLVDMAADLKRKLIALLDRIFPEYESLFDSVFSKASIAVLRKYSTPQKVKNANLRKLTDLLMESSNGHFGEWKAHQLKEAACSSFGIDDSGGVYSTLLGMFLEQILSLTAQADSLEKQISVFFQEFNNPLTSIPGVGTVLAATILSEIGDITRFSSADKLLAYAGLDPSVKQSGEFKSNQNRMSKRGSPYLRRAIWLASTVAVHRDPMFQTYYEKKISEGLHYMNVIGHVSRKMTAVIFAVLRDGQPYQPILQSAG

SEQ ID NO: 236413 - protein, 350 aa, unidentified
MSRKTAPSTAVSTIGIDLGKNSFHLVGLDQRGAIVLQLKCSRAQLERRVANIPRCLIGMEACSGAHYIGRQLAALGHDVRLIPAQYVKPFLKGHKNDYRDAEAIAEAVQRPTMHFVAIKTPEQMDLLALHRVRSRLVSQRTGVINQIRGFLIERGITVRQGVAPLRKALPDILSSNTQALSPRMVHLIAELVQDWRRLDERIAAVSAEIESLAEQDEGCRRVMTVPGVGPIISSAVVAAIGNGAGFEQGRDFGAWLGLVPKQESTGDRTILGKISKRGNKYLRTLFVQAAHVVLARRPSAAMQGLWPWIEQASRRLHRNMLAIALANKLARIAWAVLARGCSYQPRIADA

SEQ ID NO: 236414 - protein, 347 aa, unidentified
MTYFVGLDVSLEETAICVVDNAGEILREGKAETEPEAISSWLKAVDVAIERLGLEAGPLSPWLSQSLQVAGLPAVCIETRRMKGATAAMAVKTDRNDARAIAQAIRVGWFTAVHVKSAESQELRLLLTNRKTLLTGRVMLENEIRGTLKAFGLKVGRVPVATFEARVIELTADQPRLQAMVRPMLAARLALRLQFEALHVMVLKAVKSHAVCRRLLTVPGVGAVTALTFATAIDDPARFARSRDVGPYLGLTPRKYASGEIDRNGAISKSGDRLAREALFLAAHSLLTRVTRWSALKAWGTAIAKRRGLRRATVAVARKLAVIMHRMWAGDSEFHWSRDEIVASAAM

SEQ ID NO: 236415 - protein, 366 aa, unidentified
MAILAEQVDGVIGVDTHRDTLAAAAVSPIGAVLASTDSPANARGYRRLLDFARENVPGRRCWALEGIGSYGAGLASFLDQAGEHVVEVCRPKRAANRGGRKTDILDAVRAAKEALATEHLIQPRLRGEREALRVLLATRQGAVLASTAAINQLKALIVSAPDDLRAELRKLKRPAQLTHCAQLRDRPARDLEHRMTARALRSTALRVQALQAEAKDLEKEILALVREVAPELLGLLGVGPITAAQILVSWSHRGRFRSEAAFASFAGVSPIPASSGLTNRHRLNRSGDRQLNRAMHTITLIRMRLDPATKAYVNRKITEGKTSRDAQRCLKRVICRSIFKTLERTERTERTERTKTGNIKELTQAA

SEQ ID NO: 236416 - protein, 352 aa, unidentified
MLYTAIDYHRKYSVVRTEDATGNRVCSARIDQNEPAAFAGYFAGLPEPSRVVLEACWNWGWLYDLLGECDQVADRVLSHPYKTRLIADAQIKTDGLDTKALCTLLRGNLIAAVHAPSPATRARKYVIRQRMCWVGMRTRLRNRIHALIARQRGLERPQFSDQFGKKGLHWLKGLTLPAPDGELLAQDLKALALLGELIRELEKQTLAENALDPAAAHLQSLPGVGPILAAVMVTEIDGIGRFHRADKLCAYAGLAPTTHASGGHVHHGRMLPFCNKQLKWAFIEAAWVAIGCSDYFGQLYRQHRARGKKANIAITSIARRMCRIAWQLLTQKRDFTPNLPKLILSPAAPRKD

SEQ ID NO: 236417 - protein, 269 aa, unidentified
MTFRPHALHLKAELFVKSSRVHVRDDGFTRCNFHLKFFIMVYRGIDISKSSFVAAYPSTNGNPTKTFPNTTAGMRELIGTLAVAEHHCVMEATSNYGCCCTCYIRTVLPSVLPPQKKQIKHFSRMMMPVTKTDEKDAYMIAMYGEKMNPPIYKMPSQATIRILTTEEFTYFDNAKQLSRFIGICPTYQQPRTSVNIREHINRNDDERLRSLLYIAFWTALRYNSRECYIRLKANEKPFKVALIAVTNKLVRPVLTITTINSIYRWICPG

SEQ ID NO: 236418 - protein, 369 aa, unidentified
MNHSTEVFVGIDVSKARNAVAIADGERGGEVRYLGEVDASEENMRRLVRRIATKHDRVHFCYEAGPTGYGLYRLITALGHPCTVVAPSLIPLKPGDRVKTNRRDAVALAKLLRADELTAVWVPDEGHEAIRDLVRARSGAVETLRVHRQQVSAFMLKHGRIFPRKTTWGARHLRWLQEQSFDHAAHQIALQEMVEAVRISKERVERLEAAIEEFVPAWSLAPVVQALQALRGVGLIVAVTFATEIGDPRRFESPRQLMGYLGLVPSERSTGDTIRRGGITKTGNGRVRHMLVESAWTYRHPPRIGKTKLYRLEAVSPRVREIAWKAQTRLTTRYRALSGRGKKTTVVCTAIARELVGFMWSVAREAQTA

SEQ ID NO: 236419 - protein, 461 aa, unidentified
MSSKKPEGKRHKSVSTKMEWKALEVVHPDAAGIDIGGSEHWVAVSPERDPEPVRCFGCFTADLREMARWLVVKGVRSVAMQSTGVYGMPAFEVLQQHGLEVFLVNARHTKNVPGRKSDVQECQWLLKLHSFGLLNNSFQPSDEIRIARTLWRQRGNLVAEASSVIQRMQKVLIEMNIQLSTVLSDISGLSGMSIIGAILAGERDPWTLAALVEPEVKATPEEIAKGLEGNWRKELLFVLRQEVELYRIYQNKIRNCDRELRKHLQSFASVVDLKKQPIGPQPKHKKVAKNAPSFDLRSELYRITGIDWSQVNGINVLTAQTVIAECGADLSGFPSEQQFTSWLGLVPTNEQSGGKILKRRTRKVVNRAATAFRQAATTLLRSQSYLGAQYRRLRTRLGAPKAITAMARKLACLFYRLIKHGQQYVDKGNEYYEAKYRDQQIRALAKRAQKLGVQVVLPALA

SEQ ID NO: 236420 - protein, 423 aa, unidentified
MKNSTARKLRQVPKGYLVMGVDPHKKKHAAVAVTQDFITHSKFKFNNSREGFEMALEKARTEMVRTGSRGVIFAIETGGHYWRNLAYFLDERGIPFHFINQFTLKRRREGKDLNRRKNDYRDSEVAAQLLCTGEFTDTKLQHGVYAELRSAYNAYRRLVKERTRITNLVKGLLDGIFPEFTRVFKDPCGLTALSVLSICLVPNIIAQMTEEEFVNAIRAKHQGRLMRKKLRALHYAARTSIGIEAGAWSVSSEISFLVEKLCLIRRQIRSIDETLVKLVDGTDEGKYLLSIIGLNYISVAGLLAELGSFRSYRSAKQLIKMAGSNPTESESGGKRSAHTPMSKKGRPVLRYCAWTAVIPMLRFNPDFRAWAKKLRERPVHANPLNGREVVGAALNRLLRLAFALVKNQTFYRVPQLEVAQVAI

SEQ ID NO: 236421 - protein, 342 aa, unidentified
MKHTIVGVDIAKNVMQIHWVDADSGEIVNKPIKRAAFLEYFSNRAPCLIGMESCGGSQHWARRLIEMGHQVKLMPAKFVKAFVTGNKNDAADARAIWMATQMPSKEVAVKTEAQQAVLALHRMRQQLVKFRTMQINSLRGLLTEYGEVMGTGRAALDRAIAGVLERLSGRLPAILIDTLREQWNGLEALDQQIAQIERRLHAWMKQDEASKAIAAIPGVGLLSATAAAATIGHAKSFRSGREFAAWLGLVPGQTGSGGKVQLLGISKRGDRYLRTLLIHGARSVIFHAKDAGAWLDQLKKRRPINVVVVALANKMARTIWAILAHQRPYQKGYESVRPAPAR

SEQ ID NO: 236422 - protein, 348 aa, unidentified
MKIIGCDFHPSYQQVAMVDTDSGELWEGRLEHEKGEAGRFYQNLQGQVVRVGMEAVGNSHWFERLLSQMGHQLWIGDAAQIRHLVVRRQKTDRRDAQHLLQLLIDERFPRLWVPSAEVRDVRQLLRHRQKLVEMRRAVKNQLQHLAMNQGVQRKQRLWSRQGRAALEQLPLQGWTARRRSELLALLDQWDKQVGELDQAVLSEAERRPAVQLLMTHPGVGPVVGLAYVLTLGPVGRFPRGKQVASYLGLIPREHSSGGRQRLGSISKQGNTMMRTLLVEAAQTAARFDEELRRDYRRLAARKHAALAKVMVARKLAVRMYWMLRENQPYGQRPVAGTQDSPSHSVVAG

SEQ ID NO: 236423 - protein, 370 aa, unidentified
MSVRRILAKTIDTDLEYEAIGIDLAKNCVSVALLTTDGEVVCIDRLDYSELEKSAQVLCPTTFAMEPCTEMNYLIQKLEAWGHRCLVIGGKNVQNYVENHFSGQKTDLNDAQALAFLAQDTQLRTIKAKDVEQQKYASLTTLREQYIKQYRQTIVSLKGICQAWGLNISKGISGKARLKDLIENHAAFPEELKESLVDMVTHAQTAQKALNKITKTLEELAKSDKVCQLIQTIPGLGSICSCRLRATVGDIKRFKSPKDFPAYYGLVPRSIATGHNERKGKITHRGDRTMRSLMVQAAGSLVNMATKGKLKSKQLTKWILKKQKEKMPWGKLVCAVAAKLLRIVRAVLISNKPYNSKIAGVAKCSLPKGS

SEQ ID NO: 236424 - protein, 403 aa, unidentified
MNAVGIDVSKGKSMVAVLQPGGKLLARPFEVLHTKSGIQKLISFVHSLGGDTRIVMEHTGRYYEPLLQWLAASDLFVTAVNPKLIKDFGNNTLRKIKTDKADAKKIARYALDNWADLRQHTSMDTTRAQLKTLNRQFAFYMKQKTACKNNLIALIDQVYPGANTYFESPARADGSQKWVDYVCTFWHVDYVCAMRLSAFTERYRKWCHRHGYNFQPDKPRLLMEKAKDLIAMLPMDKTTKMLVQTSIAQLNVLSKTVEALRTQMIALAEQLPEYPVVIDMNGVGPTLASQLIAEIGDITRFPRRGSLTAFAGVDPGAKQSGTMQLKSNKTSKAGSPHLRRALFQIVSGLLMRSPDDAVYNFMDKKRSEGKPYYVYMTAGANKFLRIYYGRVNEYLAGLSQEQE

SEQ ID NO: 236425 - protein, 412 aa, unidentified
MFKIFRNNCCGLDVHKTWIYACIGITDPNGRTEYKQARFSSFSKGLRKLAAWLAKYSCTEVCMESTGKYWIPVFNILEKSCFVTLAHPKYTKPQKGNKTDRKDAKWICDLFMCDMIKPSFIPSPEIRQLRDLVRYRVKLTNMLTGEKNRAQNCLTVSNLKLDDVFSDVFGKSARSITNYILEHPGETFDVSPFVDPRCKTPVSEIQAAVDGAISPEQAVKLRQCLAHINELEAHRKEIESEILQIAEPFSAVLDLLYTLPGLDKNPMTAIAILSEIGPDMSVFPSSKHLVSWAGCCPRNDQSNQKVKSRRISRAGSYLKPLLVQVANALIKSKKHPEFKERYHRIKSRRGHKKAIIAVCKMLLTAIWNMLSKLEPYNPEGFLEHRPVKQEKTLTLSQALELLRLRGYTITNQ

SEQ ID NO: 236426 - protein, 422 aa, unidentified
MDLLRREVPASSLVVAIDPGKAINRVWLTTGERGLIGEPVSLPVLRDGVDELQRLVDRSGVSGPPVIGLEATGALHRAWAAEIERRWPGSLRLFAPSETTAARGQLGSRRFKTDDRDCAALVWLLRQGAGRPAEPDALDALLGTVRHRRQLVDARKRLQQRLHDQLNALCPGLSAPASQGRALKLESPTGQAVLACAAAFDGRAPTTRSLQARAPGRMTGATAAFWAARWKRLLAPPADAQLRAARLGRDLRRWQDLQADIALAEEQLALLLAQTPGQVLASLPGVAVIRAAAFGAFTLPIDRWPTAEHLYSATGLAPAAYQSSTITRRGKIARTGLGEHRDALMGIAWGLSLNAPAFAARNAQLKARGMRPMQARVALARHACRLCWRLLQTQQPYDDRRYARARRAGGDGVTAMPHDGAN

SEQ ID NO: 236427 - protein, 403 aa, unidentified
MEGPLISLDVSKGKSNYRFFENGTDRKGKKGVIRHDIQGFDSIRDEAEKMEKRLRIKPSVIFESTGVYSDVVEKYFTDKGFDVYVISPLLSASMRKEGVRPAKNDSLDTLSIAKVFYSKDDLRKCSENDKNAERLREMSYELDMMNRRIRPMKCQFLRLLDKVWPCLDEVSDYSSRFMLDFIIAFGHPENIKTVKGVLSVIRKSKMGTAGRKDKIAQDLFDYCHTHLSAVSKDSSYVELLKRMAIELKAMAKKKSELIDRMAEEARNKDEFARLLTIPAVAKTTALKIMARVGDISRFRNAEALVAYCGLDPRVYQSGKMTGEHRTITKKGDCILRSTLFLAVKLMVMLYPDTKVARFVAAKAKNGLSYKQAVVAGSAKLARIIYSMLTHHENYVEFNADIVA

SEQ ID NO: 236428 - protein, 419 aa, unidentified
MSFKILKFNCCGLDVHKTWIYACIGITDSNNRTEYKQARFSSFTKGLNELCDWLAKYNCTDVCMESTGKYWIPVFNILEQHNLWVTLSHPKYTKPMKGNKTDRKDAKWICDLYMCGMVKPSFIPPADIRELRDLVRYRYKLTCMITGEKNRAQNCLTVSNLKLDDVFSDVFGKSSRSITEQILQHPGEKFDVAPFVHGRCKTPIEEIQAAVDGAISKEQAVKLRQCLDHIDELNKHISELEQEILRLSDKYEAALNLIRTVPGFNKNPLTAIQVLSEIGGDMSVFPTAKHLVSWAGCCPRNDQSNQKIKSTRISRAGSYFKPVLVQVANALIKSKKHLEFTNRYKRIKARRGHKKAIIAICRMILTAIWHILTDLKPYTPEGFLESRPVNKEKVLTTSQALNLLKQRGYFIKDDPLSVS

SEQ ID NO: 236429 - protein, 360 aa, unidentified
MKKDIRDGSGLIVGVDLGDRWSRYCVLDQKGQVLEEDSVATTGKAFRKLFGDRPAARVVIEVGTHSPWVQRLLQELGHETITANPRYVRLIYSSESKNDQLDAERLARLARVDPKLLHPIQHRGGTAQADRALLRSRNALVECRTKLVNHARGVVKSIGGRLPTCSTSSFHKRVRQDLPDELKPALTPVLDTIAALTLKIQKLETRIERLAAKRYPETGLLRQVSGVGPLTALSFVLTVEDPERFKSSRAIGPYLGLRPRQSQSGDVDPELRITKAGDSDLRRLLVGSAHYILGPFGPDTDLRRWGLALAARGKKNAKKRAVVAVARKLAVLLHRLWVTAQVYEPLRTDQQTIVAEAVSA

SEQ ID NO: 236430 - protein, 338 aa, unidentified
MELYCGIDLHSTNHMVTILDEADRRVFERRLANDLQLTRRTLEPYREHLVGVAVESTFNWYWLVDGLMDCGYPLHLVNTAAVQKYSGLKHCDDRHDARWLAHLLRLGILPTGYIYPKEERAVRDLSRQRGRLVQLRSSQVTALQTQIWRVTGEKLTARILKSDADEGWPALNYEEQRIGVASIRRVIATLNEEIESLEQRLLQRVKLAKPFQALRTVNGIGEILALTIMLEVGDIGRFASVGQFASYCRCVESIHSSNGKRKGEGNRKNGNPHLAWAFHEAAHFAIRYLPAAQRFYQRKARERNAIVAMKALAHKLARACYYVLRDEVAFEPERLFSH

SEQ ID NO: 236431 - protein, 365 aa, unidentified
MSKEYYIGMDVHKDTVQLAVFEESGEEPIYERQVKNDTDLLVKEVLRFTRKGKTEAAYEAGCMGYVIQRGMEKAGVTCYVLPANKVAKKRSDRIKTDKRDARLIGRELRSKSIKAISVPDETDEAARDLLRCREDTNEDLRRMKQRLLKFLVRHGHIYTDGNNWTQKHWLWMDKIEFKREYEKSVYEEYRSQIRSHEERLARLEKQIEEVAESPRYKAKVSKLRAFKGIDYIIALSMLCEIGDFRRFSSAKAFMSYLGLVPSENSSGGKKNKGGITKAGNGHLRRLLIEGAWHYTKHPRVSKKLERRRRGCSVEMIETADRALHRLHKKYFKLVFNGGKHTNVAVTAVARELAGFIWAVQVNNVA

SEQ ID NO: 236432 - protein, 320 aa, unidentified
MSEPYNVGIDVSIDRLDVAIRPGGQAFSVTNDAAGWAALVAQLPCGAIAAIGLEPSGGYERDVVRVLLAAGFSVRRINPNKLRQFARAAGALAKNDRIDARLIADYITVMPTRVVERNPAIERLAETVTMRRQLCDEQIAVESQASHLEDAGLKRIAKRRLTRIKADIVLLDKRLAELVAAGPDLVQRFRLLCSMPGVGATLAYTLLALLPELGQIGRKQIAALVGLAPYDFDSGRFRGQRHIYGGRIAVRNTLYMPALAAFRFNPALRTFHRRLVAAGKKPKVAIVAVMRKMLTTLNAMLRDGNSWTEGHFGRHTAPAI

SEQ ID NO: 236433 - protein, 351 aa, unidentified
MSGLLVRARTVASTLGTRATESASARKGQAIMDSPRPVVGIDVSKDRLDVACLPSSVLTPKEAAFDNTPKGHQRLIAVLKRIQPRLIVLESSGGYQRVLVATLGAAGLPIVVVNPRQVRDFARAMGVLAKTDTIDAMVLARFAEKVDPPIRPIPEPELVDINALLARRRQLVKDRTSETNRLEQCTCARVRTSHNIVIDLLSREIADIDNDLDQRIRNSPIWQHKVALLTSVPGVGDVTARTLLAFLPELGTINRQTIAALVGVAPINRDSGLMRGRRSIFGGRAVVRHVLYMATLTARRHNPDIKRHYEQLVARGKPKLVALIACLRKLLVTLNALIKHQTMWAPKTLQA

SEQ ID NO: 236434 - protein, 359 aa, unidentified
MDGSKGQPKMTAGLDLGDKYSYLCLIDTQSGEVIEEGRLRTTPEAFRRRFASEQPPMRIAIEAGTHSPWVSRLLEECGHEVLVANARKLRLIYANKRKTDEIDAENLARLARLDPKLLYPLKHRGEDSQAHMTLIRSREALVSTRTQLVNHVRGAVKSFGARLPKCPARTFHNKAAEHIPEALMPALGPILEQIGSLTQRIRDYDRKLQAIAKERYPETDLLRQVEGVGPLTALTFVLTLEDPYRFEKSRSVGAYLGLVPARDQSGDRDPQKRISKEGDEMLRKLLVSGAHYILGPFGSDSDLRRHGEKIASRGGKNSKKRAVVAVARKLSVLLHSLWISAELYEPLRNTHRSSGGQAA

SEQ ID NO: 236435 - protein, 343 aa, unidentified
MDYFAGLDVSVKETSVCIVDETGKITREVRVASEPDARLAVLRNTTYRFKRIGLEAGPLSQWLFSALAEADLPVICVETRHMRAVLKAQINKTDRNDARGIAQMMRVGLYRPVHVKTLRSQKLRMLLTHRKLLQSKAIAVDNDLRATLRNFGLKVGVVGTVKFEARIKELVDDLPDLAVLVEPLLVVRRVLREQIGVLHRRLLAAVRDDEVCRRLMTVPGVGPVVALTYRATVDVPARFQRSKSVGAVFGLAPSRDQSGETDRPGAISRCGDAMMRTTLYEAAQSMLVHSTRWSWLKAWAMKIARHRGMKRAIVALARRLAVIMHRIWVDGTEFRWTREAAAA

SEQ ID NO: 236436 - protein, 355 aa, unidentified
MEDTKYIGMDVHKDSISIAVLNSSGKLVMECVIETKAITILEFVHGLRGSLHLTFEEGTWAAWLYDLLKPHVAKLVVCDPRRNGYLKQGSKSDRNDARKLAELLHSNMLRPVYHGEHGVRSLKELARSYLSITKDQARVMTRVKAVYRSWAIPCVGKQVYGQRHRLEWLGKIEEPGVRRRAEFYYAELDALRSLRLVVLRELLLESKKHSVSTLLSQIPSIGPIRAALLIALLQTPDRFRTKRQLWAYSGLAIETHDSAENQYVNGQLQRSKKKQSIRGLNSNHNHDLKNIFKGASAVAAVKSGPFQRFYAAQISKGIRPEIARLSLARKIAAIILTVWKKGASFDASYLNPQTA

SEQ ID NO: 236437 - protein, 412 aa, unidentified
MQTLVERGCGLDVHQATVVACLLTVQKDGRVQKQMRTFGTTTPELVGLRDWLGAEGCTHLAMESTGVYWKPVYAVLEGELEIVVANALHVKKVPGRKTDVKDAEWLADLLCHGLLRPSFVPPQAIRELRDLTRYRRKLVQSQAAERNRLLKLLESANIKLASVATDVFGVSGRLMLRALIEGKASPREIAELAKRKLRSKIPELERALEGRLEEHHRFLLKLQLDRLELVEKDLAVLEQRIQQKLEPYAAQLALLDEIPGVDWTLAAVLIAELGVDMSVFQNVSHMASWAGVCPGNNESAGKRKSTRIPKGNVYLKTALVEAAHSAAKAKGAYLRDKFYRLKARRGYKRAAVAIAHKILVAIYHMLSQQVSYNDLGDLYLDKLNKHHLTRNLVHRLERLGYTVTLSLPEKAA

SEQ ID NO: 236438 - protein, 356 aa, unidentified
MSRDIKYIGMDVHKEAVVIAVLNSGGKLVMESIVETKASSILQFIHGLRGELHVTWEEGTWAAWLYDLLQPQVARVLVCDPRRNALLKEGSKSDKVDARKLADLLRTGMLRPVYHGEHGLRTLRELGRSYQTLSQDLNRVMNRIKALYRGWSIPCAGTQVYAPRYREEWLNKIEHAGVRRRAELLYQQLDGLQGLRRTLRPELLSESRKHKAAKLLRQIPCIGPIRAARLIALMQTPHRFRSKRQLWTYSGLGIETRDSAQYRYVQGQLQRSKKPQQIRGLNQNHNHEMKEIFKGAATRASCGVGPFHDFYVALLAKGMKPEMARLTLARKIAAIALTLWKKEERFDAGQLKPQAA

SEQ ID NO: 236439 - protein, 340 aa, unidentified
MGKRYIGIDLHRNRFTCCIRLENERTYVTEWELEDLGKFVKKLRPSDEVAVEITSNTRLFYDAVAPHVARVVVVNTSQFKVIRQSVKKTDAHDARALALYLSKDMLPEVRMKDKERGQLASLTQTRDTLVKLRTALKNKINNILSARGLNLAKEALGSEKKLGEVLELPFYEMVRIELRVIVEQIRSLNKSIAELEKTIGEEGSKLEGHKGLSSIKGIGKITGAILLSVIGDVNDFADEGRLASYFGIVPRVSNSNETEHSGRIHKRGTKLGRTALVQSALIAAKYSPYLKRFYERVKARRGAGKAIIALARKFLGVIYRTLKNKWVFEDFPNFVLAEAS

SEQ ID NO: 236440 - protein, 395 aa, unidentified
MQVMHPVCCGIDVHQKSIVCCILDGPLTSNEPKKYQTTFGTTTKELKAALDWLLEHQVTHVFFESTGQYWIPLFNIFSDSDLELVLANPQHIKNVPGRKTDVKDAEWIAQLGRCGLINQSYIPSQEVMQLRYLTRYRISIKQRLTQIKNHIHVILQRANIKITSYLSDIFSKTGQALLTLFIDGEVINEDNVESCIHGRIKASTRQLIEAMEGKLSTVDRFLIKECMEEYKLQKKISDELNKEINEYILEHFPEEYQLLLTIPGISDNCCATILAEIGPNVDAFKTDKKLASWAGMCPGSNESAGVKKSSHTTQGNKYLKQALVMSVLSVQRVKEETFSLFYQRISSRGSKMKAIIACGHKLLRIIYKILQSHQPYNSQKALGLRQQTNALSLTI

SEQ ID NO: 236441 - protein, 317 aa, unidentified
MSKHTMVCAGIDTGKRKLDAALKGGAERLQVNNAADGHAALARWLRRRRVKRVGIEASGGYEQDVVAELRRKGFVVVVFQPVQVRAYAMFHLQRAKNDKIDAALIAMCTADAKKIHAPPDPRLAPFAQDLTMLDQITDDIAGLKNRRESCRDRRIRQLWKEQIAQRKKLLKTELNRLVAAIRQYPDLAERLDLINSVDGIGLPTAVAILVRMPEIGRITREQAAALAGLAPYDDDSSDYVGVRHIAGGRERLRGALYCAALPASFRWNRQLIDLYRRLIAAGKGHKRALVACARKLLIFANTVVARGTPWVSRASPA

SEQ ID NO: 236442 - protein, 415 aa, unidentified
MKTYSELSHFGGLDWAKHHHHVCILDPQGQRVERFCFEHSGPGWEQFREQIRKYPALGIAIETSQGAVVEQLLGSGVTVYPVHPKAAKEYRKRQAPSGTKDDALDSWSLADALRMDGGGWRALSPQDPMIAELRLLCRDEAELIEQRTALVNQLQAALGEYYPAALEAFDDWTASYTWEFIARFPTPQELAGSTVHRRRVFLHTHKLWRPGTADQRLAIFARADQFCGGEAVTRAKSRLALSLVKLLQAVQKQLDEYRAAIEKLFAEHPDHDVFGSLPGVGEKLGPRLLGSIGADRGQYPDVQGLQCVAGSAPVSFESGQLRRVKIRWHCDRFLRHTVHLWAGCSLKTCTWAAAYYQAKRAAGQSHACALRCLAQRWLKILWKMWQTHTPYDPEYHARNQQRHGSWVLQLNPKKT

SEQ ID NO: 236443 - protein, 431 aa, unidentified
MEQKRHPYLSVGIDIGADFSLMAIALPTQEIIGKPYKILHSNNRSVQGAVERILSMGQAYELPVRIYMESTGIYHLPLYHRLKNAGLDVYVLNPLVTHANQNINIRNIHNDKLDARRIALLGLRPDLKTSIVPADDVAAVKALLREYHAMKKETSMYICRLKNQLRQIFPQYLPLFSKVNGKASLEVLSHYPSPSAVLSAGADALAKLIQEASGKGRTMAEKKAEAILSAARESLSFGHGNSGITFLIGHYVEMIRILDEKTAAILKQIKRSVQEQPDSLLARQTRLLESIPGAGFLTAVTIVCEIGDFRAFRRPKQLYSYFGLDPVVRQSGNSAGANLRISKRGSPYARRCFYILALQSVSLRKNGEPKNHVLRTYYLEKCKSKAKMTALGAIMHKLCNIVFAVLRDERPFVLISPQEHRQNYLSLPKAA

SEQ ID NO: 236444 - protein, 380 aa, unidentified
MTVPVQFVPRNYDVFAGLDVDKKSMAVSFTDHEQLKQALRLPYSAELLLSYVRKHFPGQRVAFVYEAGPTGFGLYDELVAAGHPCLVVAPSMVPTAPGQRVKTNRLDARKLSEGLRGGQLRSIHVPSTNYRELRHLVHLRDTHVGELRATKCRIKALLTYEGMVFPGNDQWSARVLRELHALPCSPALHFELDHLIGTLHFHFNAAATVQKEIRRYCQNDPELRQSISLLQSIPGIGWIVAAHLVARLGDWREIDNVRSIAGFLGLVSSEHSTGEKENRGAITRAGDSRLRNKLIQSAWVTIRKDPELREFYRRIYARHPQQGAARKAIVAVARKLTTRIYAVLKQQRPFVLREVSTAPLTAEETAGPRERLDGQQNEQP

SEQ ID NO: 236445 - protein, 409 aa, unidentified
METIRQRGCGLDVHQASVVACLLIHQVGRKVKKLIRTFGTTTRDLLALRDWLQSEGCTHVAMESTGVYWKPVYALLEGAFEIVVANARHIKNVPGRKTDVKDAEWIADLLCHGLLRSSFVPPKPIRELRDLLRYRRKLVESRGAERNRLLKLLETANIKLSSVATDVFGASGQLMLDALLEGVQTPQQMAELAKGRLREKIPQLQLALEGRLEEHHRFLLRLQRRRLQQVEADLAELEKHLTDKLQPYASQHTLLMEIPGVDRIVAATLIAELGIDMSVFGSAPRAACWTGICPGNDQSAGKRRSGRISQGNVHLKTALVEAASAAARAKGTYLREKFFRLKARRGYKRAAVGVAHKILIAAYHMLDKQVSYNDLGDAYLDKLSTKNLSRSLVQRLERLGFHVTLTAAA

SEQ ID NO: 236446 - protein, 344 aa, unidentified
MTTIDYIGLDVHKKSISFCAKAQDGRILDEGKIAAQHKDLNAWAKARPRPWVGALEATLFTGWIYDDLKPLAQDLKVAHPAMLKAIAASKKKNDRVDARKIADLLRCNLLPECYMAPSGIRELRRVLRYRNLVVRQSTRMKNRIAGLLMETGTIYNKERLHGKGYFHDLLGNLQETPASVRDLLKLSRKQLEFFETIQKRLLKGLREHGELKERVERLQTIRGIGEVGALTWALEIGEVHRFPSIGDACSYCGLTSAQRNSAGKEQRGPISKQRNKHLQTILIEAAKLAPRHNPQLAAVHERELQRGHGNRATLEVARKLVAYLMAVDKSGQPFQVRTGGAEQL

SEQ ID NO: 236447 - protein, 345 aa, unidentified
MEQISRIGMDTSKHIFQLHGVNTAEEPILRKKLRRKEMFAFLEKLAPTVIAIEACGASHHCARLLQSFGHSVKLIAPQLVKPYIKRGKNDAADAEALCEAMSRPTMRFVPVKTAEQQAGLMLVGVRDRLIRNRTQLSNAIRGYAGEFGLTAAKGKAHLAPLLERIHADESLPALARELFAAQAEEYAQLQAQIDEVDARLMAWHRADECSRRLSKIPGVGPIGAVLLTMKTPEPELFRSGRQFAAWIGLTPKDHSTAGKVRLGGITRAGDEGLRSVLVVGATTVIQHAQRGGRPSPWLTQLLKRKSPKLAAVALANKTARIAWKLMVTGENYAAKAAPAALAAAA

SEQ ID NO: 236448 - protein, 372 aa, unidentified
MHQDFYVVVEQVGGSNPKPPQRFRKEAFLHWAARLKQKSGAQVHAVYEACGFGFALQRKLSALSINCYVVCPQKLDEQNRRVKTDGLDAKALCLKLDRFVQGNRDALAIVRVPSEQEEQLRAIHRQREQLVKARKQLEAQGRSLMVNHGLEPVQNWWKPRTFTALPAPQWMKELLANSQPILVALQQKIVALTVQLQSAASSDQPRGLGKMTSVIIDREIGDWNRFSNRRQIASYTGLCPGEYSSGNTRLQSCVTKHGNPRLRAALVELAWRLVRFQPDYHPVRKWRQILAKGALATGAARKKAIVAVARQLAVDPWRIKTGRLRAEELGLIISKVRGNRKENTLKETIKTTLERGRCPASNLLRKPSGASA

SEQ ID NO: 236449 - protein, 413 aa, unidentified
MDVLHPRCCGLDVHKSSISACILLRDAGRVQKHQRRFGAMTQDLRELAEWLRQFGVTQVAMESSGVYWKPVWNILERQFTIVLANAQHIKNVPGRKTDQKDAEWIAQLLQYGLLRASYIPCEIIRDLRDLTRMRASLSQEASRISSRIQKVLEDANVKLASVATNALGKSGRAMLEDIIAGEDDPEHLASLALGHLRVKIPQLRLALEGKIRSHHRFLLRRLLDQIQFVEHEIALLDERLEDIGRQRPDLAQAVARWDTIPGIDRVAAWALLAEIGDNMAQFPTAEHLASWAALCPGNHESAGKRLRGTTRQGSPWLCRMACQCAWAAARTKNTYLSSQFRRLAARRGKKRAIIAVAHTLIVIGYHLQKNQSNYEDLGGNYFDRIHSDGLKRYLVKRLQQLGHKVTLVCLEAA

SEQ ID NO: 236450 - protein, 411 aa, unidentified
MDEPQQHNRSAAEIDCRRQPEGRLKGVNHTMSKNLLYLGLDVHAQTVAIAIAEANGEVRNYGSVSNDLGVLEKTMRRIKNAHPGCELRVCYEAGPTGFVIARRCAQLGIDCAVVAPSLIPSRAGDRVKTDRRDAVKLARLHRAGELTAVNVPNACDEAMRDLCRARTDAVQDLRRSRAQLKAFLLRNGYRYSGKSSWTEAHRRYLRELVLPHGAQRVVLEDSLRAITTAEERIERLEDQMEALLESWEMKPVVEALMGLRGFQIVGAMVLVSELGGAWRFDHPRQLMKYLGLVPTEDSSGPRRRQGGITKAGNSHARWLLIEAAQHYRLPPKISKELSKRQEHLSKEIKACSWKAQTRLHSRMMRLSARGKLKNKVTVAVARELAGFVWAIFRLMEPQMKSAAKTEAAVVP

SEQ ID NO: 236451 - protein, 327 aa, unidentified
METQVASQWVGIDVSKAKLDIALRPANKVLQVTNQESGWQELSEQLKKYKIELIIIESTGGMERGVAHKLQKEEFKVAVINPKRARDFAKASGRLAKTDKIDAEVLAHFGEALQPSPKPLASESQVALSDLVNRRSQLVEMLNSEQKRAHSVRSSTAKADIETNIQWLKQRIKGMDEQIEQLRQDNEESKKQYELLTSVPGVGRVTAVTLLSMLPELGELPLKKLSSLVGIAPMNCDSGQMRGKRRIIGGRARVRAVLYMSALVAIQHNPVIKAFYQKLLQAGKAKKVALIACAHKLLGFLHAIVKSQKPWRCPENIETKEEKLQAC

SEQ ID NO: 236452 - protein, 440 aa, unidentified
MAVRKREDEVFPNAAGIDVGASSHWVAVPRHVSDDSVREFGAMTDDLNAMADWLLKCGVDTVALESTGVYWIPVYEVLEQRGLKVWLVDARQMKYVPGRKSDVQDCQWLQKLMSLGFLRAAHRPGAQVCVLRTVARQREVLLTEQASWVQRMQKALVQMNIQLTEVLADVMGMTGQAIIRDIVAGQRDPKALARHRHSRVKASSEEIVQALTGNWRQEHLFVLTQALAMYDDIARHLVECDTKLHALLADLGQCQVNLGKAPRAGSKSRQEFDTRQTLANWAGVDLTRINGLGLTAATKILAEIGPDLSRFATVKHFCSWLGLCPGTKISGGKVLSSKTKRSVNRVRQALKMAAMSLAHSDSALGAFYRRLCARMDKPSANTAVAHKLARMVYFMLTRGEDFVDQGQQRYEEQQHQRSIAALKRRAKDLGFVISPVATTV

SEQ ID NO: 236453 - protein, 428 aa, unidentified
MDFMDISRIKEFRQFKKEIRGSEQYLIVGIDIGKVKHHAFLGTANGHTVQKGLIVKNNLSGFSYLMGRVQFHMDRAGFEDVVFGLEPTSVYHKPLAEFLIEQDHLVVYATNEAISKNRSLLDGRWDKNDTKCSANVADLLSQGKCQYYDLPDIKLRDLRNLLLLRKRLRKQLHSAKMRIRNNLVAQYFPEFDKLWKKCEEENLAIVRWCLAPAKIAAMKFEDFCCLVTRRNRGDRQKQRLFEIWDTASFSIGCFAGNGLELEAKVLVDTVKLIQTQIVEVNGAIEAICLQFEEYQYLLSIPGFGPYVSAVVLAAIGNAHRFENTSQLMRLAGFDLNAKRSGKKSATAVPVISKKGKADLRYAVYQAALIASSLTTHFAGYYHSLLEGRQREKGIRTKMRVKLAAKLLVIAWTLMKKKEAFNPDYIISH

SEQ ID NO: 236454 - protein, 451 aa, unidentified
MANSKTRADRIISRQLSHCTVEAAHLSAVGIDVHHDQLICCFQKLDPIAGELTSEHRSFGTTIPQLLEFAAWCRVRESSVILMESPGVLWFSPYRSLEDVGFDNDTLALVNARDVKAAVGRKTDAQDAKRLAEYARLGKFHKSFVPSRPFRDMRMVSRDIIRLSDDISRQKNRYNKNLNPVGCRATSVFSDVHGKAAGKILDAYIRGDRDFEEIVRSARKQLRATQQEILEAINFAMSDALRELLRSSYEHLQYLIARRDSQIALLERMQAPYQEYIDRLMTIPGVKELSARLLFCEFTNEQQSFPDAAHFASWLGLCPGNNKSAGKSSSGKTPKGNRWARKTLTEVAHGIGLMKRGALKALFQAFKERRGARRAVVAIAHKVAMIMFAMIWDGSEYVETTCSALRDTRVKRLLQTSKNLREQRTVITLSGQIVDKDTGELIGQLSVDAAT

SEQ ID NO: 236455 - protein, 341 aa, unidentified
MVEVSTVGIDLAKSVFQVHGSDRSGVVLFRKKLRRDQLLPFMATLPRSLVAMEACSSAHYWAREIAAVGHDTKLIPPAYVKPFVKRQKNDMADAEAICEAAQRPTMRFVQGKSAQAQASAVVFRTRDLLVRQRTQLINAIRGHLTEFGYVVRQGAGHVGKLVEIIADPQSDIPAEARPVLAIIAQSLEGLQAQIAQLDREIASRAKADPVAKRLMTIPGVGPVIATALVALAPAAGTFRRGRDFAAWLGLVPRQHSSGGKERLGRTTKMGERSLRRLLILGASSATKVAARNPEKASAWLVGMLARKPRMLVTVALANKMARIVWALMAHGGTYRAPAAAV

SEQ ID NO: 236456 - protein, 411 aa, unidentified
MSQMLVGIDMSLRSHHVHFMHGEGHTLADFSVSNDTEGADTLIHKLLKTAEKNQCENIKIGLEATDQYSWHIAHYLKSELKGYEPSFQSTVYMLNARKVSRFKKGYDTLPKNDRIDAWVIADHLRFGRLPHEMQETLQYDALRRLTRTRFHLMHEIARNKTYMMNQVFLKFSGLRQDNPFSNTFGATSVAVIEELDPETIAEMPVEELIEFLQEKGKNRFAEPEEIAKYLQKLARNSYRLDKMMADPINLSLSVILSTIRHIESQIKRLDQEIDRMMKGITQTLTSVKGIGPVYAAGLLAEIGDIKRFDDHHALAKYAGLVWTQYQSGEFEAENTSRMRTGNKYLRYYLVQAADAIRKYDTEYKAFYQKKYNEVTRHQHKRALVLTARKLVHLVHSLLRTNQLYMPQERSE

SEQ ID NO: 236457 - protein, 350 aa, unidentified
MKVIGCDFHPSYQQIAMLDESTGELSGRRLAHPTEAQEFYRGLREPVRVGMEAIGNALWFERLLTELGHEWWVGDAARIRAAAVRQQKTDARDAAHLLELMLAGRFPRLWVPSPAERDLRQLLLHRHKLVPMGTQVKNQLQHLALNQGVRRGHRLWSQAGRTRLGELVLPPWTARRRKDLLALLDTLEQSLAELDRAVQVEALARPDAQALMTQVGVGPVVSLAVVLTLGPIERFRRGKPVASYLGLIPREHSSGGRQRLGALSKQGNPFLRTLLVQAAHVAVRHDEELRRHYLRLAQRKNRAVATVAIARKLAVRLYWLLRRKAWETGKVGSTQGSPSHSVVEALKPTA

SEQ ID NO: 236458 - protein, 466 aa, unidentified
MGKPRVVPDEDHEVMYQRVAAVDVAKASGVVCLRTPDSKRPGRFTNRIWDSVPAMRARIAEVGRELLAHEVQMVTLESTSDYWRIWYYVLESLGLAVQLVSASQAKNLKGRPKTDKLDAMWLARLTQQGMLRPSFVPPAAIRRVRDFTRARQDLVAERTRCLQRLEKLLEDAMIKVTAVARDGMKAKSVVAMVAALIAGERDPRKLADLARGPLRAKREQLAEALDGMFDSHHGVIARALLDQVAFLDRQVTVMEDQAVAALAQVPESWGVDPDGQAGPQAGTSPGAPVLAAAHRLAEIPGISLWLAIVIIAEIGLTMAVFPTPAHLVSWMGLCRSAAQSGTRHGKGKPKKGNSYARAAAGQAATGAARTATFLGERHARIARRRGKAIAQVAVARSIMIIVWHLLNDPQARYHDLGPDYLASRINRDKKIRTHIRGLTALDLTAEDICAALGITAPDIPSGGHAA

SEQ ID NO: 236459 - protein, 356 aa, unidentified
MTSISHPSVPKIIIGVDTHKDEHVAVAVDKLGVRIGQRNLPTTYSGYTGLEHWARSLGEIDAFGVEGTGSYGAGLARFLRGQKHRVIEVNRPDRSTRRRLGKSDPTDAEMAARAVIAGVARDRPKSGVDKVEMIRMLKSTKDSAMKGRTQAINQMKALVVTAPVELRAKLRDMNTSQLVARCVRWRHGYLETTTAAAKYALGSLSRRHIQLTREIEALNAELARLTVAFAPALMEFSGIGPDTAATLLITAGSNPERLKSEAAFAALCGVSPVPASSGKTNRHRLNRGGDRQANAAIHRVVIVRLRYDNRSRVYLQRRMEEGKTKTEVIRCLKRYVAREVFSILHDIGKRHAFQNA

SEQ ID NO: 236460 - protein, 347 aa, unidentified
MVYVGIDLHRKRSHVSVVEQDGSQRLSRRLVNDREVFRELVGELGAEARFALEATYGWEWLAELLEDEGCELHLAHPLRTKAIASARVKTDAVDARTLAHLLRADLLPEAYIAPRELRDLRDLLRQRVVLTHMRSALKNRVHALIARQGVQRTHADLFGTGGRRFLDELQLRPDPRRRLETLLRLIGDFDREIDTLAHEIDARAKHDPRVDVLCQIHGIGRYLGMLIVAEIGEIDRFPSARHLCAWAGLTPTVRSSDAKARLGHISGLGSKALRWALVEAAQKAVQGGGPLRADFERIAKRRGRKIAKVAIARKILTLCFYGLRDGEIRCLKPPGRASALKVMAPSQ

SEQ ID NO: 236461 - protein, 345 aa, unidentified
MGSKLEQLLERPSRPFTPRAGPAWPARILQAGEFYHVKEQLVYCGVDIAKWYLDAAIGKEKRRLANDGSGHREFIKWMKQIDSKAHVVCEPSGGYERRFIRALVGARIKVSLVPANRVRAFARAAGILAKTDTIDARVLCAFGEAMQPQALTASKLAQEHLRELESQRRHLSRLLVMEQNRGARLSDSSVRVLNRRLIKQIQKQIEKIDLLIKEHIEGSQELSAKAQKLTAISGVGPRTAALLLAQMPELGQLNRREVAALVGVAPFNRDSGKLRGKRMIYGGRRYVRHGLYMAALVAARHNPILRPFYQRLRATGKPAKLALTATMRKLLIALNSSLKPDPIYA

SEQ ID NO: 236462 - protein, 342 aa, unidentified
MKEVNIVGLDLAKRVFHAHGTRADGSVVFRKKLSRGQVLAFFTALPACVVAMEACATAHYWAREIGKLGHEIRLLPPAYVKPFVKRQKNDAADAEAIVEAASRPSMRFVSPKTEGQQARSMIFRTRDLFVRQRTQLINAVRAHLAEHGFIAPQGIANLAALTEIIEDSNSGLELIVVETARLYLEQIDALSARIASLEKTLKSEAKRSESTARLMSMPGMGPVTAMAIEAFAPSMTAFRKGRDFAAWLGLVPKQHSSGGKQVLGRTSKMGQRDIRRLLIIGAMTVIRWACRKAPSENSWLARMLMRKPRMLVAIALANKMARSIWAMMTKNEDYRDSGLAAA

SEQ ID NO: 236463 - protein, 384 aa, unidentified
MGKLIERCAGIDIGKRFLVCCVMTGAAHEEPRSETRRFDTTVPGLKRLRNWFNEERVTDVVMESTGSYWIPVFNLLEGHVTVVLANPEEVKNRKGHKTDRKDAGHLADLLRHNHVKSSYIPAEPVRQLRDLTRRRVQLTQDATRERNRVQKLLEQVNVKIGSVLTDVFGVSGLHMLLALLDGRAAPEEIAGLARGSAKRKTPQLIEALEGNRMSDHVRFLIRGCLRHLACLEEEVEELDAEILRRMQLSTFQKAFTLLQTIPGVGQLSAATILAETGPDLDSFPTIEQMASWAGLCPGNRESAGIQKGPQTTHGNPYLCTALVQCAWAATRKRDSVFRSRFQRLAPRRGEKRAIIAVAHHMLIILYSLNLVNLQLQFCIRLAFT

SEQ ID NO: 236464 - protein, 348 aa, unidentified
MSQSNQYVGLDVSLKETSICVIDDADKIVWRGRVDSTPKAIASAVKQHAPHAVRIGLESGQLSSWLYHELKEAGLPVICVDARHAKAALSLKVNKTDANDALGLAQIMRVGWYREVTVKGLDCQAVRALLVARAQIVSQITTLKNCVRGILKTFGRVLPKGLRSQFPARVRAAIDGHPVLGAIIEPTLQVLEAARAQLLVYDRAVIQRARSDATARQLMSAPGVGTVVALAYITGVEDPARFKRSSSVAAYFGMTPRHYQSGEVDYAGRISKCGDGMVRSLLFEAAKVLLSRSARPSALKTWGEALGKRIGAKKATMAVARKLAVILHRMWTTGTTFQWNAEAASPAA

SEQ ID NO: 236465 - protein, 460 aa, unidentified
MRKPTEKQLSGRKRTGKSGFPLLNPDAAGIDVGAREHYVAVPADRDAQPVRCFGAFTEDLQRLAQWLLQCGIKTVAMEATGVYWIPLYQILESYGLAVKLVNARHVKHVPGRKSDVQDCQWLQQLESFGLLSGSFRPEAKICVLRSYMRQREMLIRQASRHIQQMQKALTQMNIKLHQVISDLSGDTGLRIVRAIVAGERDRLKLAALKDRRIKSEVALIAKALEGDYRAEHLFALKQALELYDYYQRKIAECDAEIYKEMKTLETRGSAAPLAKHKPRSSHNPLGFASQAELYRIMGVDLTRIDGVNENTAQLILSELGLDICQKWPTEAQFTSWLGLCPNHEISGGKLLKRGTRKVVNRVANALRMCAQSLLNSKSALGAYARRMRARKDTPVAITATAHKLARLIYRTLKYGQDYVDVGSDSYEAKYKAAVVKSLQKRAQSLGYQLVSCQTPGAVVP

SEQ ID NO: 236466 - protein, 343 aa, unidentified
MEHYAGLDVSVKETSICVVDGAGQVVREVKVASEPGAILGVLADEAFTLKRIGLEAGPLSQWLYGALAEADLPVICVETRHMKAALSAQINKSDRNDARGITQMMRVGLYRPVHVKTLASQKRRMLLTSRQLLQAKAHDIESDLRGTLRNFGLKVGPVSRGKFEARIRELVVDCPDLAAITGPLLIAWRALREQFAVLHRRLLAVVRDDAVCHRLMTVPGVGPVVALTFRATVDVPSRFANSKAVGAVFGLTPRQHQSGEVNRMCYISKCGDAMMRAMLFEAAQVMLTRTTKWSWLKAWGMKVARHRGMKRAIVALARRMAVVMHRMWVDGTEFRWTNLAEAA

SEQ ID NO: 236467 - protein, 339 aa, unidentified
MRLYAAIDLHSNNSVLVVLDAKDKVVYEKRHPNDLQTILAQLKPHKKNIQAIAVESTYNWYWLVDGLMAAGYDVKLVNTVAIKTYDGLKYSSDEHDARHLAHLLRLGILPTAYIYPKEERAVRDLLRKRSQLVRNRTMHILSIQNLVTRNSGKPITQGGIRKLDEKALDLYCEGNALRIMAIKSSLEILRCLDGQVALLERKVLEQARLKPEFKQITSIDGVGEIIGMTIMYEAGDLERFEKVGQFASYARCVESSRWSNGKKKGEGNRKNGNRYLSWAFIEAAHHAVHYNERIRKYYQRKKAKTNGVIACKAVAHKLARACYHVVRDQMAFDETRAFA

SEQ ID NO: 236468 - protein, 398 aa, unidentified
MKTAGLDVHKDSIFCAVFDGKRYSDVEVFETFSTAISSLGDYLRAEGVNQVAMESTSIYWVPVWNILSEMGFDLILVNPFLIKQLPGRKSDVKDAQWIAQLLYKDMLRGSFVPSEQIQELRSYTRAHSKLQQRITRMLIKMDNILVQSGIRLGSLVSDIGGKSMLAVIDALIAGETDTKSLIKLVYANRKNKENGRLAAALTGCMKEHHRFNLRMAKAEHDLLVNQAGEYLEKIDSICLHRFSRQQSLLKTIPGVSRVSSAVIIAETGADMKVFENSGKLSGWIGLRPKNDESAGKYKSTAITKGNKYLKPILVQIAWAASRSKGSYFKEKFNRLSIRKSAKKALIAIARKISVVVWNILTDLKPYNPALQAIYEPRKLEAKIRYHQREMERIAKLKP

SEQ ID NO: 236469 - protein, 354 aa, unidentified
MSRKTNILDFEGQVFNIGIDTHKSNWKVTVRQNSMELKKFSMNPEPLELLSYMSKHYPGGRYRSVYEAGFSGYWIHRSLSELGIDNIIINPSDVPTTHKEKDRKSDGVDSAKLSRELENGSLTGIYIPTMEQESIRALARLARQYSKRSTQVKTRITSFLDVNGVRLAEGLQYSYWSKNHIKWISELEFKLPVNRYILDKHLQELQHIRGMRLELLRKVRECSRNILTVRLLRSIPGIGLTVAFILYTELMDIRRFESEDPLASYIGLVPSTASTNDKEHNKGMTQRHSRYLRYILIEAAWIAVRRDPAMTLAFSKLTKRMSKTRAIIRIAKKLLKRIRWVWLHQKEYVTAIVE

SEQ ID NO: 236470 - protein, 451 aa, unidentified
MRDVVPVPSSPSVPSSPPVPTAVAAATADAAVFGTLRYFAGFDWATTKHDVAMVDGAGHVVWTWSFPDDAGGWAQLREKFQALGGPVGVAIETSRGAAVERLLTLGVTVYPMNPKAAERYRDRKAPSGIKDDGLDAWSFADALRTDGHGWRRLLAEDPATQELRILCRDEIGLIEQRTALLQQLQAALHEYYPAALEAFDDWAKPFTWAFVRQFPTPAELQRAGRRKQQNFLHKHKLYRPELADQRLEVFSRAAAFASPSAAVTRAKSLLADTLARQLQTLQQQIDEYRRRIEKLFDEHPDGKLFASLPGGGRRLAPRLLGEIGANRQVFPSAQALQAYGGTAPITLQSGKRLLNKFRRMCDKTLRHTLHLYADESRKCCAWAQAYYQQKREEGKRHAHALRCLAQRWLKIIWRCWQDGVCYDEALHTRNQVRHGSWVIALLPEELTAVSS

SEQ ID NO: 236471 - protein, 418 aa, unidentified
MSNEITWHCACGFRNPQNTIFTKEDITMVFIGIDAAKDKHDCHILTSEGEVLCDHFTFQNSREGFDQLLQLIRKCTEGTDDKIKAGLESTGHYSANLLSFLKAQGFEVAVLNPLSVNRLRAAGSLRRCKTDKNDSRYIAQILFTWNSNPCRDSSYHIPHLKSLTRARFRLVKEIQPLKNRYRRLIHLLFPEFQKFFCSIYISAALGLMQTLPSAKAIAECNILTLTRILSENSRGRFKRTKADALKLLAKESIGTYNPDDAFELKLTARRIQFLEAQKLEMETEIRSVMAEINSPITTITGIGDILGAAIIAEIGDIRCFSNPAKLLAFAGAEPSTYQSGNYTATRTPMVKHGSRYLRNALYLAVKAARLHSPSFAAYLARKKAQGKHEYVAMSHGMKKMTRIIFAVLSRNSPFTEPI

SEQ ID NO: 236472 - protein, 357 aa, unidentified
MKIVGCDLHARQQTIAMVDTETGEFTEKTLFPEGNVVREFYAALEGPVVVGIEATGAMQWFLELLEELGIECRVGHPAKIRAKETRKQKHDRRDARLILELLVEDRFPEIWMPSTEQRDLRTLLRDRHQWVKMRARLQHTLQAIALNHALRQGRALWSAAGQGALEALPLPPYTGQRRTELLSLYVELQKRIQELDKEVDVQARQRPHARRLLTHPGVGAVTALATEVFLGDPNRFATGNQVASYIGMIPCEHSSGKRQRLGKLSKEGNSLLRYLWTEATMHAVVKDPELKRFYRRKLIQKGMGKARIAAARKLGIRLWIMMRDQIDYEEFCRRGKLRQEGKAHAGMPDFNSGPALQ

SEQ ID NO: 236473 - protein, 334 aa, unidentified
MQNITLIGIDLGKHTFHVHAQDKNGHALLRKKFSRTQLTAFLSTCSTATVVMESCAGAHFMARHITQLGHQVKLISPQFVRPFVKSNKNDFIDAEAICEAASRPSMRFVTPRTEDQQAMAALHRVRDSLVRERVKTTNQMHAFLLEFGISMPRGTAVIRRLAAVLEEHSLPPYLTRLLMRLQQHYTYLSEQVEGLEQELKTHMADDEVTQRLLTIPGVGMITASLLATKLGDGKNYVGSRDFAASTGLVPRQYSTGGKNTLMGISKRGDKNLRRLLVQCARAFMQRLEHHPGRLAEWVKVQLTRHHSNVVACGLANKLARIAWAVTAHRTVFSQ

SEQ ID NO: 236474 - protein, 343 aa, unidentified
MDHYVGIDVSLDQSSVCVVDATGRIVREAKVASEPEALIGFLGGLDLRLARIGLEAGPLSQWLQAALVKAGFEAVLLETRHVKAALSAMIVKTDRKDARGIAQLLRMGWFRPVHCKSAPAQEVRVLLVARKQLQAKMRDVELSLRGLLRGFGLKVGEISKGQFAARVRTLVAGHTMLERIAEAMLQAREALRVEFGKLHRAMLAIVRGDEVCRRLMTVPGVGALVAVTFTSGVDAPERFARSKGVGAHFGLTPRKYQSGETDVTGAVSRVGDAMVRTALYEAAHILLTRAVRFSALKRWALEVAKRRGMKRTKVALARKLAVVLHRMWVDGTTFRWGREAAAA

SEQ ID NO: 236475 - protein, 318 aa, unidentified
MSSNPESFVGIDVAKAWLDVAWLNGATLRIDYTDEAVAGLVERLRSEPPTLVVMEATGGLETELASALVAAGLAVAVVNPRQVRDYAKACGRLAKTDRIDAMILAAFAAAIRPQVRELPDEHTRALSDLLARRRQLIEMRVQEKLRLPRASSVQRISLREHIAWLDERIDRLDVELTHALRSSPAWRDKDDLLKAIPGVGSLTRATMLGLLPELGTLSRRQIAALVGVAPFNRDSGKQQGQRVIWGGRAQVRRTLYMATVAAMRCNPVIRSFYEHLRTQGKPAKVALTACMRKLLVIMNAMLKHRSVWSPTLDTQHGC

SEQ ID NO: 236476 - protein, 344 aa, unidentified
MKIKLLGIDLAKNVFQLCALNQANKVLFNRAVRRTQLRSTIVKLEPTTIAMEACSSAHYWGRSFEAMGHKVLLIPAQHVTPFVRGGKSDARDALAICEAAQRPNIHLVPIKTVEQQDIQLLHRLRQRQVQHSTALANQIRSLGREYGVIFPTGIKPLISHLPETLEDGSNELSPVARHALADQYQCLLDTRQAMGMFLLQIEQLAAQYPAYDDLQLLPGIGPMTASAYIAAIGNGRQFKCGRQVGAWLGLAPRQYGTGGELKLGGITKSGDRHLRTLLIHGARAVITRGLKTRPELAQWVQPIIDRQGFNKGVVALANKLARISWVIVTTGEPFDMKQAFKPAS

SEQ ID NO: 236477 - protein, 405 aa, unidentified
MGARRRSPGPSHVLITPDHASNVVGIDPYKRTLTAMVIDPRGGILASEHFRVSGEGHRALEAWALQFGAVARWGIEGSASWGRHTAVFLADRGHDVRDVCANRTARQDRARQRGKSDVLDSERIAREVLAHPLLPKAFKRAGQDQGPDEQHQLLAIWHNQRRSILTSRQHLVGEAESLLCELPLELRDDLPSSKAVRPRLAALERRNRRRRYDAPTTLRLHMLDEYRAQIVALDREEKQVVAELKKLVQASGSTLTELWGLDTRSVAELLVETGDPRRFTEGGFARFNASAPLAASTAEGPGEPVRHRYNPGGNRRVNAILHRMAVTQLRCEPRAQRIYANARANGPHTKKEARRILKRHLSDVIYRCMIRDMAHSPTAPSLMSEPRAAAGQSRVARQGRAKRAA

SEQ ID NO: 236478 - protein, 416 aa, unidentified
MNEQLNVVCGADIHQRFLVATILCRDGRKWTKRFLMNVNGLLDFKAWLMSYGCQKVAVESTGRFWIPVHMILDGTVDVIVANAYKIKHTTKKKTDLKDSEWLAELCLNDMIEPSRIFPKEDRELRNLTRAREAYIRDLSKEKSRVHHVLESCSIKLSSVISDVFGKSGMHILNGLMNGVSIEDILKGIPDKRVRDKKAEELREALMGKLEVSAIILIRQSLQIINQFNMRIEELDQEIRSRIASKPMDLKIAMSIPGIGIVSAYTILAEIGNYLDFKTPEQLAMWAGIVPSVYQSADKLITGSITKQGSKHLRWILVQVAHAISHKNGGKLKKFFLKIRAKKGHLVAIVALARKVLCILYHLLVNQEMYEEDGLAARKDALILKKTDRQIPPIEEMIRYVVQAGYEVKKIKPGVGE

SEQ ID NO: 236479 - protein, 375 aa, unidentified
MSVCLLEKSTIVGVDVHKYSHTAVAMDCFGQEKAVLNFTNERLDDYVLWLKELSNGSKEDLIVALEDVNGYGFHIVEKLSEAGIAMRYVPAILTERDRKQSIHREKSDYEDAKRVGKVILTKFDETLPAKESIANDSERSVSANLDFLTAERRILVQEKTILKNQLHAMLHQLFGDNYGKGFPKVFHKEAIKCFRQTLTNYKSTNPIKTALAKSSLRRFARLALVEKQLKEIDESITDIASKSKACLALKENLHGCGLITAASIIAEVTTINRFSGKSKFARYSGIAPVSKSSGRHNRLYTSPFGNRKMNRALHTIALCQIACKGDDRGKVYFQKKLEEGKTKLWALRCLKRQISNKVFQTLKEQKRQEAISTNS

SEQ ID NO: 236480 - protein, 322 aa, unidentified
MRYIGIDVSKATFVVAYSSDKGGEIRTFNNTTAGIRQFIGTLPKDGSIHCVMEATGNYSALLLYMLNVAGITVSMENPLKVKNFAKALLSTVKTDKSDARLITLYGEKMNPRPFKVQGEAILRLRQKRTVIRQLTKQITAMSNLRGSLACLPVPDKGATHTVDETIKFLEKKRDRLQAELTDLVEVEVSRQLALLTTIKGIGITLATALIITTGGFTYFQNAKQVSRYLGICPTYEQSGTSVNIKGHINRNGDAYTRGLLYIAAWPASRFNAQCKETYTRLRQNGKSGKLAMIAVANKLIRQAFAVVAHDKEYIDGFVSNRP

SEQ ID NO: 236481 - protein, 353 aa, unidentified
MRRPKDKLIAGMDLHGNNVVIGVINQDGQRVAHRKVDCELKQVMEFLQPLKSQLQSAAVESTFNWYWLVDGLRQAGYPIDLANPAKIEQYSGMKHADDQHVAIFLAELQRLNILPKAHVYDPQLRPVRDLLRRRTNLVHQRTALLLSFKSLYARTHGESLDLSEAKKMEPKEAPKLYEHPANQLIAQVQAEHMQALEKSISRIEKGVLASAREIPLYEKLLTIPGIGRILGMTITMEVGDIGRFQTDGDFASYCRLVDARRLSNGKCKGDNNQKCGNKYLAWAFVEASNYARRFDEHCRRWYDRKAAKTSKVLATKALGCKLAKAAWHVMVGKCDYDPKRMFPELATKAMKIS

SEQ ID NO: 236482 - protein, 355 aa, unidentified
MSQETYIGMDVHQATISVAVMDARGKLIMECLLETKAATVVEFIQGLQGTLSLTFEKGTSATWLHDLLQPHVHKLVVCDPRKNALLKDGSKSDRIDARKLAELLRGNQLHSVYHGEHGVRTLKELGRSYQTLTKDITRVMSRIKALYRNWAIPCSGATVYAPRHRAEWLAKIPQPGVRLRAERLYQQLDLLQPVRQEARRDLLRESRQHHVVKLLRQVPSIGPIRAALLVALLQTPHRFRTKRQLWAYSGFAIETHDSGEYRYVRGKLQRNRERITVRGLNDNHNHDLKNLFKGAALSASTQPGPLHDFYTALVEKGMRPTMARLTLARKIAAITLTIWKKGASFDAKQLHRQAA

SEQ ID NO: 236483 - protein, 328 aa, unidentified
MNDVAVVYVGVDVSKDSLRFDAGDFFTGDVKNKPAAIRSALKRLAGKLPAGSVPHVCYESTGRYGWDLAAACAAAGIPSSILNPCKVRQYARAMSVSAKTDPVDARMIRLFAEHRKPPADEPVTAAQAEMRELAGLRSLLMKQLVAMIGAIESARTPTTKRIARENAKSLKRRIVRVDKRLRELREEDARMSGIHAKLIEIKGVGETTATQICAIVPELGTLGRRRAASLAGLAPHPKDSGTLHAPRHISGGRPAIRGALFMAALTASRYEDEVLGGIYKRMVDAGKPKKVALTCIMRKLFVRMDNLAAQWLRGQAGAESGPPAPATA

SEQ ID NO: 236484 - protein, 418 aa, unidentified
MLSLNVEGASFFVGIDWAAATHAVCVLDDHGRKIAAFTVAHSADGLSGLVRRLARIGAPDVMPIAIERPDGRLVDVLLEAGHPVVPVSPNAIKTWRESETGSGAKSDAGDAYVIADYLFCRARRLSVAVPYTPQTKALRTVIRTRDDLVDMRVSATNQLSALLDAHWPGAKAIFADIESPIALEFLTRYPSARHAQHVNAKRLATFCAKHGYSGRRSGEQLLQRLRAAPAGTLDETLCEAVRDAVIALVAVLKAVNAAVKDLGRSVTATLGEHPDSEIFTSLPRSGQINAAQMLAEWGDCRQAYDGPDAVAALAGATPVTKESGKHRAVHFRWACNKRFRQAITTFADNSRHASPWAAKVYADARARGLDHPHATRILARAWIRVIWRCWQDHVPYDPARHGNAIRLSQTRQNDLLAA

SEQ ID NO: 236485 - protein, 365 aa, unidentified
MGQGSGRIVAGLDVHKRSTRIAAVQGDRLVREVTVASDAEIVQAALLRLGVAACCYEAGPTGYGLYRHLNAHGVRCEVIAPGLVWRQPGDRIKTDPRDARRLAAQYQGGMLRAIHVLSPEQEALRDLVRAREDARHDRMRARGRLGKFLLRQAREMPTQSWSIQRRTWLGQQVFAEPAAQAAFDDYLTSVDLVDRRIDALERGLAEQALEGPYAELVARLRCLRGIDTLSAVGLAAEIGDFGRFASAEEFMSFVGLVPSEHSSGAKRTQGSITKAGNAHARRLLVEAAWNHRRRPGASYTIQRRRRDQHPLTVARALRAEQRLYKRWSRLRSRGKDERTIVVAIARELAGFAWATATDQPLQPTL

SEQ ID NO: 236486 - protein, 343 aa, unidentified
MKEIATIGLDLAKQVFQVHGADAQGATVFNRKLRRGEVRPFFEKLPRCVVAMEACASSHYWAREISALGHEVKILPAQYVKPFVMRGKTDAADAIAITEAMKRPDIRSVPVKTAVQQAATMTLRTRTFFVRQRANAVNALRGYMAEFGLVADRGVAHFGKLVAALSDRGDTHIPPAARLMLDEILAEIENLSGRIQRIDDRIAAHAKRDEDIRRLTAIPGVGTLTASTIQAQVPDPGCFKSARHFSAWLGLTPKQNSSGERQRSGSISRMGNAELRSLLYIGAMGVLTAARRWGTGSGWLRRLMNRRPLRVVAVALANKIARVVWALMTKGGSYHAPAELVEN

SEQ ID NO: 236487 - protein, 350 aa, unidentified
MLIVGCDYHPGFQQIAFVDTETGEFEERRLQHRGEAEKFYRDLAARGVKVRVGMEASGHARWFERLLAELQLELWIGDAAEIRAKRVRKQKTDRQDAQHILSLLVQDRFPRIWVADWENRDLRQLLWHRHRMVQTRTRIMNQLQAVALNEGLRCKKRLWGKKGRQQLEGLRLAPWATRRRRDLLELLDRLNPVIAELTHEIEQEVEKCPAAQRLMTHPGVGALTALAFVLVIGTAERFQCGKQIASYLGLVPAEDSSGERRRLGHISKQGSAILRFFLVEAAQVTVRSVPEWRSKFFHLAMRRGRKIAKVAMARRLAVHLFWMWRKQWDYQQLNEFGPYAGKPGTGVGVH

SEQ ID NO: 236488 - protein, 360 aa, unidentified
MQAQNSELSFKGQSIFVGIDVHLKSWTVTILTESLFHKTFTQPASHLVLHNYLTKHFPQATYYSVYEAGFCGFMPHYRLRELGIKNIVINPADVPTTQKEHLQKDDPTDSRKLARSLRSQELTSIYIPQLSSLGDRTLVRLRASLVSDMVRYKQRIKSLLYFYGISFPEEFKKPHTHWSSRFMKWLRESVELAHETDRQSLQILVQQAEQQRRLLLEVTKKIKALSSSQKYEKNIKLLRTVPGIGLITAITLLTQIEDIGRFPNTDHFAGYIGLVPTRHSSGENTRVGEMTFRGQKRLRKHLIESSWVAARLDPALLKCFNQYTMRMEKNKAIVKIARKVLNRIYFVLKNQMEYVPSVVK

SEQ ID NO: 236489 - protein, 368 aa, unidentified
MPRLAIKRQLRKHTQENPMTVTHYIGFDVHKKHVNFCAKAADGEIVEEGKLVAQRSVLRQWAAMRQEPWRGAMEATLFSGWIYDTLKPYGERLEMGHPAMMKAITAGKKKSDRIDARKIADLLRCNLLPSCYVATPEIRELRRLLRYRNLVVRESVRMQNKIAGLLMETGTPFQKEKLHGKKYFANLLKNLEEVPESVKDLLRLSRGAMEMFQATQKRLIQHLLANPTLSQRVERLASIPGVGEITALTWALEVGDPQRFSSSANVMSYCGLTAALRSSADKQQRGPISKQRNPWLQTALIEAAKLAPRWNPQLAALHARELERGHRNRATLAVARKLTAYLLAVDKSGQPFQLRPLAIGTPALDKAG

SEQ ID NO: 236490 - protein, 345 aa, unidentified
MERMYYIGLDVHKRKISYCVKDGAGKVCSEGSLTATRLELDVWMKTLPKPWTAAMEATMFTGWIYDQLMPHAAALKVAHPLMLRAIADATKKNDRIDAGKICDCLRCDFLPECYMASTAIRERRRTLRYRNLLVRQMVQMKIKISSLLMEAWVSYNKQRLHKAGYFRELLATNPDIDEGLGSLLRLCRETAVRLQTAESAMVRSLEHDSLLMDRLERLMTIPAVGPITALTWTLEVGDVQRFSSIKKAISYCGLCGAEKSSGSTVQRTPLSKQRNKHLQTTLIEAAKMAPRNSSDLAMLYDKEKRKGNANRATLAVARKLVVYLMAVDRGRRNFLVMEESARTAA

SEQ ID NO: 236491 - protein, 434 aa, unidentified
MPTHYTTLFVTLDIGKNVNWLAAYAGFDLKPVVPPLEVLSNRSGFERVTAEIDRLLGSGQYQQVVLGHEPTGIYHQGWARALAEHYAAHREGRATPPLEYRLINPLVSKRRREQTNNGRKRKSDKIDLLAMALCLRDGQGQPAFVPTAADLQFQLWSQTYCQLFVDQHRLGLRLLAQLDRLWPGAVVNLKRFRQMHPTLEPPVPLILSRPLERERVRAILAHCPNPHDFLALGQEGIQAFYRQHLGRCGPATAQLAFQVVSQALLPPPDIAQPLAGQIQADFQRYLVLEQQLHTLAEQTQTLVPGSPAEVLATIPGVSTFLAARYLAYLGQPQRFTSAAQVWAFAGFDPVIEQSGDFRRVGHISKKGSPGLRNTLYQIGFHTSQHLPAITRAKQAALKRGLGQVGATLHAAQKANRLCFHLLYHQLPFDPTRSR

SEQ ID NO: 236492 - protein, 429 aa, unidentified
MSYRIAGIDVHKKMLAVVVSDVEIESEYQFERRMFGSSPEQLRSLAAGLLEQEAEEVVMESTAPYWKPVWGALERYWKPLREKREGARRRSGTLHLAQAPSNRGPRGRKKDFPDAERLVKRLVARELTLRFVPDAEQRLWRTVTRRKYQLTRHRVRLQNQLESFLEEAHIKLSSLVSDLLGLSARRMLKALADGETNPAALAALADQRLRATPAQLCDALGACAELSPVYRRLLKMALEELRLIDEQIGQLDQEMANLLSQHQDAVQRLAEVPGLGVDSAQQIIAEVGPTAATFPSEKCLSSWVGACPGDDESAGVNYSHRSPKGNRHMRRLLHQAANAAARTKGSIFEIVYRRSVPRLGHNQAIGTIAHRQCRLIWLILHQGVRYEERGPAVTKRSKQLRTSKMLRQLRSLGYRIEPPNPQPSQAQVQ

SEQ ID NO: 236493 - protein, 315 aa, unidentified
MAMRVTLEKPIIGVDVAKNELVIYHDQYDRLEAIPNTKVAITQWLKALASSCAIAIEATNVYHVLFADAAHEAGCDVYMVDGYQLSHYRKGVNIRAKTDAQDARLLARYLKNELDELRPWIPASPLYRQLLSLFRRRAALVQARTGLVQSWTNEPFLRTAFANQVNSMKRFEALVEKKIRDVLQEAGLMRQVNRCMKVEGIGFLTAARLVTSFQRGEFSGANAFIAFLGLDLRVSKSGQSDGPRRLTKRGDPEARRLLHNAAMSGSRTPAWKPFYEEQRKRGFSTTQALVMLSRKLARVVFALLKNQSEYQTKAA

SEQ ID NO: 236494 - protein, 326 aa, unidentified
MTLSHLTDNTFVGIDVGGAGLDVAWHRGDSAHYANRPDAIATLVERLRAGPEVTRIVLEPTGGYEKALVKALRQAQLPVEIIHTTRFNAYRALVGVKAKSDTSDARLLASYAAAPDEVRGRKAGHVELPEDAIREELSELASRRDQLKHMIHAETCRLGTVRMAELRQAIMTHLEMLKVEDKQVHQMMLALVRQRLDLKRDQRLLKTIKGIGVKSALALLASVPELGRVDNKAAAALIGVAPFVRKSGTMTAPSRIHGGRAAVRSILYMAAVTASRHNPVLRPFYERLIAKGKPAKVALIAVLRRLVVFANAVIRSGQPWKGATTS

SEQ ID NO: 236495 - protein, 296 aa, unidentified
MMMSALRSSQSSGTDVEVVLGVDTHLDIHVAVALDDLGRRLGELRVPTTTKGYKKLLSWAENFGTLRCAGVEGTSSYGAGLARYLTSVGVAVAEVERPKRRHFRPNGNSDPLDAEAAARAVLLAGETAGAPKSADARVEMIRALRTARRSAVKARSQAANQLQALVLTAPDALRDRLRWLSTRKLVTTAWRFRPGTQPETPEAPTKLALRSVARRYEALCEEIAELDVQLDRLVAQAAPELLALPAVGTDHAATLLIVAGDNPQRLSSEASFASLCGASPVEASCGKVVRHRLNLK

SEQ ID NO: 236496 - protein, 411 aa, unidentified
MLLVGDDWAEDHHDIEIAAVDGRVLRVARVNEGMAGMARLHELIAEFLADDEGPERVVIGIETERGPWVRALVAAGYQVFAVNPKLAARHREVISISGAKDDKTDAHTLADMVRTRRHQLRPVEADSDLAEGVKVVTRAHQSMIQERTRHMLRLRAALRDYFPAALVAYQQGALTLTGADVLELLAQAPTPTAAADLSVDQILAALKRARRRRDLPAKAAAIQTALRTDHLGQSAIVTAAYAATVRSTVAILVTLNSEIDTLEGEVEAYFGRHPDVEIYRSQPGLGPILGARELAEFGDAPGRYTDAKARKNYAGTSPITRQSGKLKTVHARFIHNNRLVNALDLQASAATLHDHHVRAYYDELRGRGLGHHAALRQIANRLVGILHGCLKTHTPYNPETAWAHRTQTTAA

SEQ ID NO: 236497 - protein, 461 aa, unidentified
MSRKKPTGKQKGSAQKRVDWKALEIVHPDAAGIDVGGSEHWVAIGPDRDPEPVRRFGCFTADVREMGRWLVEKGVRSVAMQSTGVYWMPVFEVLEQQGLEVYLVNAQHTKNVPGRKSDVQECQWLLKLHAFGLLNNSFQPTDEIRIARTLWRQRSNLVAEASSVIQRMQKVLTEMNVQLCNVLSDVSGMSGMKIIGAILEGERDPWKLATFVEPEVKAKPEDIAKSLEGNWREELLFVLRQHVEFYRIYQQKITDCDLRLRKHLESLGSKVDLKTQPIGNRPKGKKNSKNAPGFDLRTELYRITGIDWTQINGIDVLTAQTVIAEAGADLSAFPSEKQFASWLGLCPTNEQSGGKILNRRTRKVVNRATVAFRNAALTLLRSQSYLGAQYRRLRTRLGAPKAITAMARKLACLFYRLIKHGQPYVDKGTEYYEAKYREQQIRSLAKRAQKLGLQLVIPKTA

SEQ ID NO: 236498 - protein, 371 aa, unidentified
MSELPAETRPARLRVEASPRPPGARKPETELGAVSTTAVPHPDSRSGPSPHLQGRVMDEQRTVFVGIDVSKDRLDVHLRPSGEAFCVPREGKGMDDLVIRLQGLSVALVVLEATGGFEATVAAALAGVGLPLCVVNPRQIRDFARAMGRLAKTDTLDAEVIALFAERVRPQARPLREPERVHLAELVGRRRQIIEMIGMETNRGRQAIDKPLARRLARHVAYLQKELDAIDHDIGDAIKHSPAWREAEALLKSVPCIGDVTARTLLAELPELGTVSRHQVAALVGVAPINRDSGLMRGRRAIAGGRTSVRAVLYMAALTATRRRSPFRAFYDQLTARGRPKKVALVAVMRKLLTILNAILRDHTPWRPLNA

SEQ ID NO: 236499 - protein, 343 aa, unidentified
MEYYAGIDVSLEASSVCVVDGAGKVFREGKVASEPEALVGWLLGLGVELTRVGLEAGPLSQWLYAGLKGAGLAVELLETRHVRAAFKTMPVKTDRKDARGIAELMRVGWFRPVHCKSLSSQETRAVMTARRLMKDKLHDVELSLRGLLRNFGLKVGKTTPRTFPGRIGELVAGHPVLEGLAEAMLTARAALMTQYNRLDRQVRAMAKASAAARLLMTTPGVGPVVALDFASAIDDPSRFKSSKPVGAYFGLSQRKYQSGQKEITGHISRIGDKQVRASLHEAAHVILTRSTKPSGLKQWAMQLARRAGMRRAKVALARRLAVTLHRMLVDGKPFDPTIGLRAA

SEQ ID NO: 236500 - protein, 354 aa, unidentified
MDGIKYTGLDVHKETISIAVMNSTGKLVMESIIETKASTILDCVQGIRGEVHVTFEEGTWSRWLYDLLKPHVANVVVCDPRKNALLKEGNKNDRVDARKLAELLRGGFLRPVYHGETGIRTLKEYSRSYLTISKDLARVMNRLKALYRGWGIPCEGRRVYSRRDRSNWLDQISEPGVRRRAEHFYQHMDALHALRQQVRHDLLAEGRKHSATKLLQLIPCIGPIRAALLVALIQTPHRFRTKRQLWTYSGLGIETHGSAEYSYVDGQLRRSKKLQLRGLNRNHNHELKAIFKGAAIYAGSHSGPFHDFYQVLIAKGMKPSMARLTLARKIAAITLIAWKKGEHFDAERLKTRTA

SEQ ID NO: 236501 - protein, 327 aa, unidentified
MERAYIGIDLHKAFFHVCAVNAAGARQWEQRWPTSEAGIAGLLTRCDGQSRIAVEASSPTWAFVDRIVDHVGAVQVVDTRKTRIKAGYAAKTDRLDAQRLADALRRDSVVGIYYPPAAIRDLRELARYRCHLARLQASLKQRIHALLLRQGVQTPRALFTHRGTQWLDALALDGWAGGQLRGLRQVLTDVRTQLVPVVSAIRTIAATDPIAIALDRRPGFGPIFSVTLRAEIGTMARFPDGPHLSSYAGLVPRVARSGARHWSGGITKTGSPWLRWTLIEAAIHQFRRQDDFGRWARRLAVKTGMLKARVAVARALCHEVFETWPRD

SEQ ID NO: 236502 - protein, 413 aa, unidentified
MNYNPCITIDVSQSKSHIQGFTHFNSTTKKPTNITQPKSMRHTKHGYNQILELINFIYSKTGTIPLIVFEYTGVYHKTLEKFLLKHGIKYHIVAPLRAAKSRKNKLRSVKTDKRDCLSLAKMFYNDDLGDFYHENEYYEELKHLNRFYENILLRQQELKVNFRELLAVIYPNFKISKSNPEGAFRNVYTKEALGFLKEFPHPDLVVNSTIDEIACKLTKYISRAHQRYLKSISEHLYNYCSNLISGCSSTSNRVSSLLFYIEQIEKYEDILQDTLDKIHLLVKDSYMFNLLMSIHCVNKILASRFICEIGDILRFKSYKAIIAFVGTDPQILQSGDNDGLHKHITKKGNKHLRTILYLIVQQMTKAKNIESSIKSFYKKKTQQGLRKLVALIACCNKLIRIIYYMSKTGTAFE

SEQ ID NO: 236503 - protein, 321 aa, unidentified
MDTPEHAAAAAIVVGIDVSKAALDVALRPGRDAWRCANDEAGIAELLDQLRPLGPSLIVLEATGGLERLVVAALALAGLPVAVVNPRQVRDFAKATGQLAKTDALDAAVLAHFAEAIRPEPRPLPDAQSQALAALVERRRQVVGMLTAERNRLQQALPPVRPKVAEHIAWLEQALKELDRELDQLLRASPVWRERDQLLRSVPGVGPTVSRTVLAHLPELGQGSVKHIATLVGLAPLNRDSGAWRGTRAIWGGRRQVRAALYMAALVGVRHNPVLRAFYGQLIARGKPKKVALTACMHKLLIILHAVLRDRTPWQPTPLAT

SEQ ID NO: 236504 - protein, 331 aa, unidentified
MYVGVDYHKRYSMITQMDEKGNIVDQLRLSNDPSSLTGFVDRLPEGSKIALEATGNWYYFYELLEEKSPEIYLAHPLKTRAIAEARIKTDKIDSTILAHLLRADLLPTSYIPPRSIRDIREILRYRASLVSLRTSIKNKVHAILSKNGIVFKYSDIFGKKSMCELKGLCLRRCYRQALDGYLRLVDVLNELIGEVTETIEGIVEEYPPAKLLTTIPGISYYSALLIIGEIGNVRRFPTARKLCSYAGLVPSVHSSGGKTRYGPITKQGSKWLRWILVEQSHHFIKGAERLENLFWRVSKNHGRNTARVAVAREMLKVIYYMLRDNRPFYRE

SEQ ID NO: 236505 - protein, 352 aa, unidentified
MDATTVAVDLAKDVFEVAVANRASRIVDRRRLTRRQFETFLDGLAAGTTVVMEACGTAHYWGRRGQARGLHVRLLPVQYVRPYVRRNKTDRTDVEGMLEAHRCAGIQAVPVKSVEQQALQALHRARTQWQAARTARINVLRGLLREQGHPMPTGARTVLARVIAVLDTAGDTLPGLLQTLIRTLVDEVRDLEARVATLDRQLAAVARTHPDAQRLQQVPGIGGATATAFVGAVSHIHAFRRGRDFASWLGLTPRESTTGMRRYLGRISKRGDGYLRCLLTHGARAVLLAAQRTARERPHRLTCLQQWAVALAARRGHNKTAIALANKLARILWAVWCRATDFHSPEAAPVAA

SEQ ID NO: 236506 - protein, 390 aa, unidentified
MVYVGIDVAKDTHECLIVNGDGVIVSQPFAIANNHVGFEHLFSKMESCHNDLSDIKVGLEATGHYSDNLLAFLVSKGLTTIVINPLHTNLYRKSLSLRKTKTDRIDAHSIVTLLRTETLKPYSPMSSHIRELKSLTRYRFSLVQDLAQIKSSYARLCVILFPELEKMVPTLHLISVYTMLAELPTAETIAACHLTHLENILSASSKGRYGKDKAVEIHKAAMESIGSHSDAKALELQQTIQRILCLEAQIEAVESKINPIIDSLQSPIMTVPGISYRMAAIIIAETENFTNFTHAEQVLAFAGLEPSVYQSGQLTSTHAKMVKRGSKYLRYALFNAAKYVCRWDPHFGAYLAKKRSEGKPYNVAVSHAAKKLVRVLFHLVKTNQSFISQA

SEQ ID NO: 236507 - protein, 402 aa, unidentified
MNAVGIDVSKGKSMVAIMRPFGEIVSAPFEIKHTASGINSLVELINSVEGESRIVMEHTGRYYEVLAHQLSEANLFVSAINPKLIKDFDNDSLRKVKSDKADAVKIARYALDKWQNLKQYNVMDELRNQLKTMNRQFGFYIKHKTAMKNNLIGILDQTYPGVNTYFDSPARSDGSQKWVDFASTYWHVDCVRKMSLNAFIDHYQNWCKRKKYNFSQSKAEEIYGKAKELVPVLPKDAITKLIIKQAVDQLNSASTTVESLRTLMNETASKLPEYPVVMAMKGVGTSLGPQLMAEIGDVSRFTHKSAITAFAGVDPGVNESGTYEQKSVPTSKRGSADLRKTLFQVMDVLIKTHPQDDPVYQFLDKKRAQGKPYYVYMTAGANKFLRIYYGRVKEYLSSLPES

SEQ ID NO: 236508 - protein, 340 aa, unidentified
MTASLLADNGFIGIDVGSSNLDVAWHGGGTARYANCPDGIAALVERLKQQPPTRIVLEPTGGYEKALVKALRRAQLPFELVHTSRFKAYRELRGVRAKSDRSDTRLLAAYAASPAEVRGRKADHVELPEDATREALAEFASRRDQLKHMIHAETCRLGMVRLDEVRKAILDHLETLRAEDKQLHKRMLELVRQREDLKRDQRLLSSIKGVGPKSALALLACVPELGRIDNKKIAALIGVAPFVHQSGTIVAPARIHGGRAAVRRILYMAAVAASTHNPVLRPFYERLIAKGKPAKLALIAVLRRLVVFANAVIRSGQPWRGATANTASSDCPSPEAACAA

SEQ ID NO: 236509 - protein, 340 aa, unidentified
MKLYGAIDLHSTNNVTVVIDEQDRVVYQKRLPNDLALILMELSVYQTELQGIVVESTYNWYWLVDGLMEQGYKVRLANTAAIQQYEGLKYTDDHSDARWLAHLLRLGVLPEGYIYPRADRPVRDLLRKRSQLVRQRTTNLLSIQNLVTRNTGESLSANQIKGLDVQQVDELLPNGDLALAVKANLSVMCCADEQTEIVERTVRDRIKLRPEFSFLKTVPGIGQILALTIMLETGDIRRFCSVGNFASYCRCVGSQKISNGKRKGKGNTKNGNKYLAWAFVEAANFAIRFNSKIKSFYQRKKAKTKGVVAIKAVAHKLCRACYYIMRDRVAFDLIKAFGQK

SEQ ID NO: 236510 - protein, 400 aa, unidentified
MIDTGGIDVYLGLDVGKGEHHATALTPAGKKAFDKRLPNNEPKLREVFTRLQAKHGTVLVVVDQPASIGALPLAVARDTGCRVAYLPGLTMRRIADLYPGEAKTDARDAFIIADAARSMPHTLRDLAPDDDTRAELEMLVGFDDDLAQEVTRTSNRLRGLLTQIHPSLERVLGPRLDHPAVRTLLERHGSPAQIRKAGRRRLVTLLRPQAPRMAERLVGDIFAALDEQTVTVPGTDAAILIIPSLARSLTAVHDQRKLLADRIAELLEAHPLSKVLTSMPGIGVRTAARILIDVGDASSFPTAGHLAAYAGLAPATRASGSSIRGEHPSRRGNKQLKRAFYLAAFASLREPPSRAYYDKKRAEGKHHVAALTCLARRRIDVLYAMLRNGTFYQAPTPSPA

SEQ ID NO: 236511 - protein, 388 aa, unidentified
MQSVVARPEALSAIRNDLGAIFVSLELSRSTWLITSLSPGGGEKMSKHSVRGGDVAGLLERFAQLQKKAQARTGRNFPIIVIQEAGLDGFWIHRVLQNEGIESHVVDPASVATSRRRRRAKTDRIDGEALLRTLLAYKRGEPRVCAMVKAPTPEEEDRRRLCRERKVLIAERVQHVNRIKGLLFCQGVSGYKPLRRDRRRRLDELRTGDSRPLSKHLKDQISRELDRLELLLEQIKATETERDAVLAAQKVATPSTAAMLLDFNGIGPEFTTVLWSEGLFRHFDNRRQVASYAGLAPTPWQSGSVDHEQGVSKAGNPRLRSTLIQLAWLWLRHQPQSALARWFKERVTRNGGRHKKTTIVALARKLLVALWKYVTAGVVIEGAVMKAS

SEQ ID NO: 236512 - protein, 345 aa, unidentified
MELYVGLDISQSMTHLCVVDSKGKRIWEGKCNTAAEAIAKTIRAHAPDVELIGMESGALSPYLWHELTATGLPVVCIEARHAHKTLSEQLNKTDKHDARGIAQLVRTNFFKEVKVKSMKSHQVRTLLGERAQLVGMRTDLKNQIRGALKTHGFVVSHSKEKGFKAKVGGIIKDSSMLAKMVAPLLRVLEAVEREVQGLDKLFRECAENHAVRRNLMTAPGVGPITAVAFTTAVDDPKRFRKSRSVGAYFGLTNRRDQSGERDISGRISCRGDNLVRSYLFEAAASVLSSRTKSWSALKSWGLRIAKRSCMNKARVAVARKLAVIMHQMWLTGKPFRWSETEAAAA

SEQ ID NO: 236513 - protein, 346 aa, unidentified
MGYFAGLDVSLEETAICIVDDAGLIVREARVASEPEALVAFFRACGMGMERVGLEACSLTAWLQQALSAAGLPAICIEARQAKAAMSAMPNKTDRNDARGIAQIMRTGWYRTVHVKSASCRSWRALLTARRMVLNKRRDIENGLRALLREVGLKVGTPSRKDFAARVRELAAADPVLSSMVKPLLSIIAVMTQEADRLTKHVLDEVRAEPICRRLMTVPGVGPLTALAFRATIDRPDRFRKSRDVGAHLGLTPRRYQSGETDVQGRISRCGDELARTALYEAAHSLLIRSSKWSTLRAWGMNVAKRRGMARARVAVARKLAVLMHRMWCDETEFRWGKQSGAPAAA

SEQ ID NO: 236514 - protein, 356 aa, unidentified
MEQLTTVGLDLAKDVIAACVLDVHGAVIERRVLRRGAFERWAEQLPSCKVAMEACGSAHHWGRWFAAHGHTALLIAAEFVVPFRKGGKNDTADAEAVAIAARQPTMRFIPIKTVDQQAILAWHSVREGWKEERTALLNRVRGLLAEFGIVIGRSSDRLLTALPGLTEDSRLPDAIRAMLLEAREQFVALHARLARCDAQIAAHARNSSAAQRASELLGVGPVTASALAATVPDAKVFKSGRQFGAWLGLTPRQHSSGGRTRLGRISLRGNVYLRTLLIQGARSTLQSAINAEPSRASRLQRWIIELYGRKGYHKTLIAIANKHARILWAMLAKDERYDAAAWQRHPMHELLLAGNA

SEQ ID NO: 236515 - protein, 412 aa, unidentified
MQTLVERGCGLDVHQATVVACLLIVCKDGKVQKQLRTFGTTTRELLRLREWLLSEGCTHLAMESTGVYWKPVYAILEGALQIVVANAQHVKKVPGRKTDVKDAEWIAELLCHGLLRSSFVPPQPIRELRDFTRYRRKLVESRSSERNRLLKVLETANIKLASVATDVFGTSGRLMLRALIEGKSTPQEMADLAKGLLRKKIPELELALEGKLEEHHRFLLKLQLDRLERVESDLAALEQRIQEKLQPYATQLALLQEIPGVERTLAAVIIAELGVDMSVFQSVSQLASWAGVCPGNNESAGKRKSSRIPKGNVYLKTALVEAANSAARAKGTYLRDKFYRLKARRGYKRAAVAIAHKILVSIYHMLSQNVSYNDLGDCYLDNLNKHHLTRNLVHRLERLGYSVTLTLQQEAA

SEQ ID NO: 236516 - protein, 338 aa, unidentified
MRTTYIGMDIHKNFIQAAAMDKDGTILKEQKFKSDINGIRRFVDGLDSEKIKAAIEATCTWYHVYETLNSLGVDTTLVNIRRTKVIAESKIKTDPLDARSIAHCLRTGFIATAYIPPKEIIEQRDILRHSISLRKDINRHKNKIHAILLRNGIKHKFSDLFGASGMKFLRDLKLKESEQYRLNSYLTIVETLLQERKQTQKKIETLCKSNEQAMLLTSIPGISYYSAMVIFTEIGEFSRFSNPKKLCNYAGLVPRTIQSGSHVYHEKILKECNQHIKWILVQSTHVHIRYCQSSSITRLYNRVMKKKGKAKATVAASRKMLTIIWHMLMKGERFKYSD

SEQ ID NO: 236517 - protein, 420 aa, unidentified
MEEVIEEAAEPVARVAALDIGKASLVACVRVPHESRPGRRCQEVRSFATTTPALLELRDWLVCQRVSLCVMEATSTYWKPPFYLLEDAVECWVVNARDVKNVPGRPKTDRLDAVWLCKLAERGMLRPSFIPPVWQRQLRDLCRYRRTLIQERTREKQRAEKLLEDTQIKLSSVISDIFGKSGRAMLEALIAGESDPYVLADLALGKMRGKKSVLQEALTGHFRDHHRYLLRMMLDRVDALTAQIEAITSRIDEVITPFAHQVAQLDEIPGVGTTGAQELIAEIGVDMARFPTAGHLVSWAKYAPRARQSAGKNKPGSTGKGNPWLAGTLGEAAIGAARTKTFLGARYHRLARRRGKQRALVAVGNSLLVIAWHLLSDPQAHFTDLGPNWHDRLAPLRRKRQLITELERLSGKKVLLQEAA

SEQ ID NO: 236518 - protein, 309 aa, unidentified
MKQSVVYIGIDVAKAHLDVAWQEQSRRFANDKCGQVALIKWLKQSAFPVQLICEASGGYEQALVESLEHTDITASVVQANRVRQYARAAGILAKTDKVDARVLAGFGAAMQPKPTPPLCPEQKRLRQYEAQRRHLSAVLVAEQNRLAQLSYAELRVLSRSLISKIKKQIATIDARINALIAQDKQLCQKAQKLTSITGVGARTAALVLAQMPELGQLNRRQAAALGGLAPFNRESGTLRGKRTIFGGRRALRSGLYMAAMVAARHNPILCSFYQRLRAKGKPHKLALTAVMRKLLLALNQNLKPITSPA

SEQ ID NO: 236519 - protein, 378 aa, unidentified
MSTETRVNESIASMTLLLAFELSERTWKLGFSTGLGQRPRIRAVIAGDLGRLTEEIARAKQRFGLAAVTPVISCYEAGRDGFWLHRYLVAHGVTNYVVDSSSIEVNRRARRAKTDRLDLGGLLNLLARFEAGDRRVWRVVRVPTVAEEDARHLSRAIETFTRDRTRAINRLKALLATHGVRIRIDRGFVEALETVRLWDGTPLPPGVRDRLCREWTHLQGVEAQRRELLGARARPLDTRSVSGRIREQLQTVRAIGPSGALVLATEIFAWRQIRNRRELGALVGLVPAPYQSGASSHDQGITRAGNTHVRRVMVQLAWGWLRFQPTSALSEWYQRRFGHGGARLRKIGIVALARKLLIALWRYIDAGVVPEGAILKPA

SEQ ID NO: 236520 - protein, 312 aa, unidentified
MTQFAIGIDVSKYRLDVAVRPQGPRFAVSNDAAGSAELIARTSPWTDAEFGLEASGGYEQGCLAALHAAGRKVRLFEASRVRAYARSRGQRAKSDEIDAGMIGDYAASLPPERRHAPPIKPDQLSELVTLRRQIVEQLTRLKNHVEHLRTTTVRALVEQQQAFLRAQLQEVDTELAAAAEAQEGWCERIRRLRTVPGIGTQTAILLLVELPELGQVDRCTIAALVGVAPFIDRSGQRDGPRHIAGGRKHLRNGLYMPTLTAIRYNPVIRACYQRLIGCGKAAKVAIVACMRRLVGILNAMLRDGRDWSPQCA

SEQ ID NO: 236521 - protein, 480 aa, unidentified
MNVKTRRTKKQVNVENQAINLLSKEELNKKIEVVEKELRSYTWRELETNGKFAKNDKLSFITDDMLIVGCDIGSENHYIRAIDVRGRELSRGAFEFSNTSEGFENAKAWVLALAAKNDKKQIVLGLEPTGHYWFALAAWMISNGISVVQVNPYAVKQSKEIEDNSQLKDDRKDPKLIANLVKDGNYGMPYLPEKVYADMRRLSMFRDQLTEDRIRNINRLHRELKIYFPEYMDAFGKIDGAFTLEVLKVSAIPSDITALGAEGIKNIWHNEKLRGRGYSRANEIVSYAEKSVGLTDGTDAGREAVKWYAEQILKLDEQLAVVESTLHEKCREIPCAENILEIKGVGENILAGILAEMGDISRFDDVKEIQKLSGMGLVACSSGKHKGQTKISHRGRKRLRYWLFQAAKSAVSHADEFKQLHEYYTTRTNNPLKKMQSLVVIACKILRVIYTILKTGTTYDPQKLLEDIKRPTASHAPMAA

SEQ ID NO: 236522 - protein, 459 aa, unidentified
METSESSRRQLAGLPLIRQNVAGIDLGSERHWVCAPTLDGRGREIADFGATTPELVRMAEWLKARQVESVAMESTGVYWIAPHEVLEGQSFKVLLVDTRQLARVPGRDKKTDPTDCEWIQRLHACGLLRGSFRPEEAVCMLRTLVRDKANLVAESGDWVRRMQKSLDQMNVRVHRAVSDIDGVTGMAILRAIAGGERDGQKLAKLRDPRCRKSEQEIAEQLSGHWREDHLFSLQQALKMYDAVQERIAAYEKEILRKLGEMERDELHGQTASPLPNANKAQAIRKRGQEAKRQALFRMSGVDVTQIDAIGVETVEVMLSEYGSDLSRFPSEKQFVSHVTLAPHVPTSGGKPVKKKKRNSASTRVAAALRMAALSLRHSQTALGAYYRKIAQRKGGDIAVFATARKLATLIFRLLRWGQPYVDEGAEAYENRYRQQRIGRLKLTAKQLGYQLAPIALDIT

SEQ ID NO: 236523 - protein, 452 aa, unidentified
MEREVKRLEEYRRLRKEIRSSQDYLVVGIDISKDIHNAFMRTPTGQTLYRRLTFHNSREGFDTLLLQVEAMRVQHGLKKVVFGMEPTANYHKPLGEFLINQEHEVVLVSPGAAKQNRALLDGRWNKHDGKDCANIADLICQGKCLYYEHPSSELRDLRNLLSLSRKIKKLEQGLRLRIRNHLVAQYFPELDQYCHWGANEGLALVRWCLDPALMAALSDDGLSQRLGTTGRTIAQRKRLTALKANAASSIGCQFGASVQFEGQSVVKLLKEVRQTIEDTREQIEEVCQKFTEYSYLLSIPGFGPTLSAMVLGAIGNPWRFQNGAQVLKMVGLDLSASQSGKFQGSAVLSKKGKAEIRYALYQGGLVASSRDKHFVAYFTNQQSGREKEKGIKTKKRVKLAAKMLMIAWTLMKKQQRFDPAYLGATEPITAHKTRNQENRGIPEVQPDADRRL

SEQ ID NO: 236524 - protein, 336 aa, unidentified
MNIKHFIGVDISKSTLDWAVCTAEGGIIYQSQSANSEEDIKATIKIIKALPNFEYLKSVCCMEHTGIYNVHLLSYLNKFHFPIWLENSLQIKRSGGVQRGKNDAIDAVRIAQYAFRFKDRIRVWQPPRQVIQQLAALSAVRHRLLIVRQQLQQPLNEQESFIESSLQKQLCKTCQASLKAINTDLEKIEKQVKEIRDKDDRLKELFEFITSVPGIGVVTASEVIVATNEFNNIAEPIKLACHAGVAPFEHQSGTSVRGKTSVTHHARKRLKSLFHLAAMSAVRVKGEIQDYYLRKVAEGKNKMLVLNAVRNKLIHRVCAVVHKKEKYDKNYVLTLV

SEQ ID NO: 236525 - protein, 350 aa, unidentified
MMIIGCDFHTRYQQIAMMDDATGELIERRLEHENGEAHAFYRGLQGAVRVGIEATGPMHWFERLLAELGHELWIGDSAKIRASEVRKQKTDERDAALILDLLLANRFPRIWVPSPAERDLRQLLWHRHKLVRLRTMLGNQLHFLAMGQGLCRKQKLFTKKGRGELEHLSLGPWSSRRRAELLRLLDQLGPSIAELDRAVLEEAQRREDAVRLMTHPGIGPVNALAFVLTIGPVTRFGRSKQVASYLGLNPSEHSSGGKRRLGAISKQGNTMVRWLLIEAAHHTVRFDPELRQDYQRLKFRRGSAVAKVAIARKLAVRMYWMLRSGADYAQLVRMQGSPGPTLVSTTTPLG

SEQ ID NO: 236526 - protein, 317 aa, unidentified
MKYVGIDVSKDKLDVYIRPDKKHFIVGNNEADLISLSKQLQEISPELIAIESTGGYENQAVEVLINAGLKVSLVNPLYVKNFAKSGGSKAKTDKLDSAIIAHYAEVYSPPLVVLSSKEEKELEELITRRKQLMDFRIAELNRLKKVKGEIAKDIEAHVDWLDNRVKEIDEQLNKSIENSPELKRKEELLTSVPGVGEVLSKTLLMHLPELGTLSNKKITSLVGLAPFNKDSGKHKGKMRIFGGRKTVRAAMYMPTWAAVRYNPVIKAFYEKLIAKGKKPKVALTACMHKLLHMLNSIIKNSNKWDENYFKSKELVLN

SEQ ID NO: 236527 - protein, 356 aa, unidentified
MTSNIKYIGMDVHKESISIAVRNSVGKVVMECVIETKASMILQFIDGLRGDLQVTFEEGTSAAWLYDLLKPHVTKLVVCDPRKNKSMREGNQNDKIDARRLAELLRLDHLTPVYHGEHGLRTLKELVRSYLTVTKDLARVMTRVKAIYRSWAIPCSGKQVYAQCHRAEWLAKIPEPGVHRRAEFYYQQLDALRVLRQEVRRDLLAESKKHKAWKRLCQIPSIGPIRAAVLLGILQTPHRFRSKRPLWNYGGLAIEMHSSADHRSVDGELQRSRKNVLVRGLNRNCNHDLKNLFKGAAAVASSKPGPFQEFYTALVAKGMRPEMARLTLARKIATIVLIVWKKGVCFDANHLKPQTA

SEQ ID NO: 236528 - protein, 343 aa, unidentified
MTVIIGVDPHKASHTAVAISGGEEELDCKKVRATCVQVDQLVAWAEPFQTRMWAIESAGGLGYLLAQQLVAAGERVVDVQPKLAARVRLLATGASNKNDPNDALSIAVAALRSSSLRQVEPVGHSEVLRLLAKRNTDIGNQRSRLVCRMHALIAELAVGGIAKEINASDVDRFLEDLTPVTPVEQVRYDLTLELLDDVRRLDSQLKASHKRIRRAVKASGTSLTELFGVGPIIAGMLIGYTGDVTRFANRDQYAAYNGTAPVEFSSGGRVVHRLSERGNRKLNHAIHMAVICQLRQPHSDGRIYFERRVAEGKTNKEAIRSLKRQVSNAVYRHLVADARRTRR

SEQ ID NO: 236529 - protein, 373 aa, unidentified
MPKYSTAFGMDVHLRSTTVCALDADTGEAVTRRFPGNPWGEIAGWMDGFPGPSLAAYESGYLGFAPQRELAGLGVECVVAAVSKIPRSAADSASKNDRNDAARMAKAILSHDISPVWVPSPEIEGLRDLAGAHDGATARLATAKQRLLAFLAKRGFVYGGTTPAGNPRKYWTYDFLRWLDKVRPEDDGGVRTLAALRNEVETAAEARADLLSEYRAAVDASPIAAEVAALQSIKGCAFALAAAFSAEVGDFTRFRSGRQVTAYFGLAPSQRSSGDSVRLGGISGAGNALVRKLAVEGSWCYAAARHQPKLMPRDTGVPLEIRMHGRKGSERLLRRREEMLARGMPAAKANAATAAELVRWLWALGMMCREGAE

SEQ ID NO: 236530 - protein, 325 aa, unidentified
MKSAQRPLNIGADVAKDEIVVACAQQSFTRRKIANTRCALRAWLKTLPAESRIGMESTSTYHEPLAELAHKLGFIVYVLNPKDVRHYAKGIGQRGKTDRVDAQLIARFIANEHPRLYPFLPPTPEQRQLDRLLKRRTKLTRIRGALRQSLKGLNGFSSELNSLVARLDALMKRIDAKVATLIEASPESQEACSRLQGIPGVGPIVGSGVLNSLQRVPFSNADAFVAFCGWDPRPDDSGRKSGRRRLSKRGSGQLRYLLYNAAMAASRTKAWRPLYERALARGLSRIEALVILARQIARTAWSIYTHKTQFDPQRISQPSSPITRP

SEQ ID NO: 236531 - protein, 370 aa, unidentified
MAQHGTDTIWVGMDVHQDSITAAVLFGQDNHPQIERLPGDLNAVRRLFRRLSKRGTPRSCYEASGAGYVLQRCLEHDGFHCEVIAPSLIPRKPGDRRKTDRLDALHLARHYRAGNLVSVTVPDNEQEEVRQLVRTRLAVQSHVVRLKHRIVRVLATHGHRFTGGKSNWTKKHRVWLRKLHRELKGPLATVLGFHLEHLEYIEAQKNALEAQIDRYARQEPWRRQVEALCCFRGVKTLTAMTILTELGDVRRFGKATGLMAYAGLVPSERSSGNVSRRGAITKTGSQELRRILVEASWHYRKRAGADLILKRRRMGQNPQVVATAVKAQHRLHKTFWKIASHRHPCTAVTAVARELCGFIWSALWTQTQEA

SEQ ID NO: 236532 - protein, 349 aa, unidentified
MTRFAGLDVSVRETAVCVVDDAGKVLAERKVASEPDELIELLRSIGGEYGRMGLEAGPLSQWLVSGLAEAGLPVVCVETRPMKALIEAQKVNKSDRNDARGIAQMMRVGLFKPVHVKTLASQERRMLLTSRKLLQKKLLDVEADLRGTLRNFGLKVGVVSPRGFEARVRALVEGFPRLAAIVEPVLAVRRTLGEQFAVLHKMLLGLVRQDPVCRRLMTAPGVGPVVALAYRATVDQPQRFLHSKAVGAHAGLTPKRHQSGETDYDVGISKSGDLMLRTLLYEAAQSLLTHSRGQWSWLKAWGLRVAQRRGMRRAAVAVARRLAVILHRMWVDETDFRWTRDNREAVLAA

SEQ ID NO: 236533 - protein, 421 aa, unidentified
MRKADTRKVKFVKDGTLIVAIDVGMEMNRGYCTTPDGRDIKPFKFDNTREGMDKLWGMIMASKNRFQCDEIIIGYESTGPYGEPLVHYLMKKPVMLVQVNPMHTKRVKEINDNSPLKTDDKDPRVIADIIRWGHSLSIVIPEGDAAYLRRLNNSRERHVRERTALLNQLQQLVFVLFPEFKKVMKDIKCQTPIYILQKYPTPEAISVLDKDVLGAEMKKQSRGKFREQHADMLITLAQNTIGIREGVSGLSLDIRHILVQLEMLRNLIAEIEGEMEIALGRIAYSAKLLSIKGLGVVSVAGIIGEIGDFKKFQTQAEIMKLAGLDLYEISSGKWKGRRKISKRGRGLLRKILYYAAIQTIRKNGILHEYYTRLTDRGMKRMMALVAVSRKLLGIIYAIVRDDSEYSVNFESIKRQVIKKAA

SEQ ID NO: 236534 - protein, 356 aa, unidentified
MTESTTLHLPLTIGLDLGSATTQVAVYGPDRKRIEERKISTTRRGLGGLLERFPGARVVMETSTASRWINSFAQELGHEVIIANSRCIPVITASIRKCDRNDARLLAELGQIQPHLLSPVQLREDRYQEVRTLLFAREQLVRQRAALVMFVRSEVKVLGHHLPSAGTNVFAKKCRPLIPAGLHSALSPVLDQIQSACVGIEAYEKRVEELSRTSFPETALLRQVHGIGPLIALAFVVTIGDPRRFAKSRIVGAYFGLVPRLNQSGMSNPRLGITKAGDRFMRSLLVSAATRILGPKGVDSDLRRYGERVLSTGGGRASGRARIAVARKLSVLLHRLLVTGEVYEPFRNSPEEATAA

SEQ ID NO: 236535 - protein, 464 aa, unidentified
MCRRLIKRKQLGLRARTLIFDYTKSLYSLGGSHCCCFFYLSGVTRMEIIYPVCCGVDVHKKTITSTIATTDKSNITHYLTETYSTLNFDLFNFRTWLTDHNCFHVCMESTGKYWIPIFNVLEKSEIYVMLTHPMYVRAIKGKKTDKKDSKWIANLFKHDLVKASFIPPPEIRALREIARYRYKLVCMRSSERNRFQDCMTVSNIGLASVLSDPFGKTSTDIMKHVLSSSVFDEEQCKKLIYKSAKKKTDLILEAVRDCKIESDQRFKMNEVTGHMDFLDHAILRTEVELFTRMQPFMPLVEHLAAQVPGISKLSAALIISEIGADMSVFESDKHFVSWAGLAPTNNQSAGKKKSVRISKAGQFLKPLLVQCALAAVKSKKVPYFAIKYHRIKKRRGHKKAIIAIARMLLTCVYHMILTGEAFNPSDFEDVSKPVVRKQVLTDETAIAFLAAQGYDVSSLVKLTV

SEQ ID NO: 236536 - protein, 310 aa, unidentified
MEELFVGIDVSKDRLDVHAYPTGETFAVARDGEGLEQLVEQLRRLAPRQVAVEATGGFETTTAAALAAAALPVVIVNPAQVRHFALSLGRRAKTDRVDAAMIARFLAMTRPEPRPIPDEEARMLGDLVARRRQIVTMIVAEKNRARRMTTPRLLRSIARLVAALEKELAAVDDDIDTGVRSSPAWLAREELLVSVPGIGPVIARTLISEIPELGSLDRRSVASLAGLAPFTRQSGQWKGKSMIAAGRAPVRAALFIAVMVASRFNPTIKAFHQRLRDAGKPKMVALIACARKLLTILNAILRDQKPWQNA

SEQ ID NO: 236537 - protein, 383 aa, unidentified
MENSAASILYVGLDVHKESIDIATAEPGREGEIRHIGQIGGDLVALDKALRRLIARGHRLHVVYEAGPCGFVIWRHLTARGISCEVVAPSSIPRAPGERIKTDRRDALLLARLARSGDLKAVRVPDIADEAMRDLVRSRDDAVREQRNARHRLKALLLRNGIGYEGKTSWTPAHLRWLASLKLPQPAQQIGFQEYLHSINESAARITRLEQALRDLLPTWALTPIVQALQAMRGVQLIAAITIVAELQDFMRFEHPRQLMAYLGLVPGEHSSGGKRRQHAITKAGNSAARRMLVEVAWHYRHDARVSPVIARRHDQLPKAVTDIAWKAQLRLTAKYKHLAARRMMKTKAVVAVARELAGFVWAIGREVQTSGWKGIPEAPSAH

SEQ ID NO: 236538 - protein, 351 aa, unidentified
MSRKSTNAIVATLGIDIGKNSFHAIGLNDRGAIVLKQKWTRLQIARRLANMPRCLIGMEACVGAHHLSRQLNALGHDARLMPAKYVRPYSKGQKNDYRDAEAIAEAVTRPTMKFVATKTVEQLDLQAMHRIRERLVGRRTSVINQIRAFLLERGIAVRKGAAPLRSALPNILATRSDVLSPRMLHLIEDLALDWRRLDERIDILTGEIAGLANQDAACTRLMSVPGIGPIISSAVVAAIGTGGVFSKGRDFGAWLGLVPKQMSTGDRTILGKISKRGNRYLRKLFVQAAWVVLIRPNSWERHGLKNWIEAAKKRLHHNVLAIALANKLARIAWGVLSGERNFEARVEPHVD

SEQ ID NO: 236539 - protein, 528 aa, unidentified
MWKAETRRTYDRKGLRYPTDLPDAEWALARPFIDVPQRGSGQRRVDLREGLNAVFYILGTGCQWRALPKDLPPRSTVHDYFVRWQCDGALGRLHHALYEQARARAGKEASPTTAIVDSQSVKGAERSYGATDGRVSVGSGPDIWIKRLPMAFAATPASLAETASATLFVALELSRSTWLVALHSPLTDKVSQHRLDGGDADGLLALIARKQGQAQEKLGQPVRVVCCFEAGYDGFWLHRWLCARGIENRVLDAASLLVDRRARRAKTDRLDAAGLLRTLMALERGEAQVCRVVRVPTPEQEDARRRSRERTRLVVERGQHTSRIKGLLMTQGIRDFEPTRRDWQARFEALRTPDGLPLAPCLRAELLRECRRLWLVMEMIAEVEAEQKAVAEEEDGPAARLAQLRGIGLAFATVLGNEVFFRDFRNRREVGGYLGLAPSPWQSGGVRRDQGIAKSGNPRARRTAIELAWLWLRHQPGSTLARWFHERVGSSKGRRRRIMLVAMARKLIVALWRYVTCGTVPEGAVLKI

SEQ ID NO: 236540 - protein, 317 aa, unidentified
MTYTSRFVGIDISKSSFDVCVLPEERFANFANDAAGIARFVTFLAQWEGVERLVLEPTGGYERGVVEGLLAVGLPVAKVNAKQIRQFARACGRLSKTDRIDAFVLADYARRMDTKVLEPSSPAHAMLIDLVSRYRQLSHMIVQEKNRREKLVNQDNARTRAWIEQTLAFLQQQRQAVVDAMAACLTSDEHLALKAEVLMSLKGIGLRTACSLLAGLPELGQMNKGQIAKLVGVAPINRDSGQMRGKRMISGGRKPIRDALYIAALPAIRFDPNMKAVFQRLKAKGKPGKVALVAVMRKMIVILNARMREHRATALDC

SEQ ID NO: 236541 - protein, 315 aa, unidentified
MNSKTFIGVDVSKHRLDFAVRPTGEIDAEANNPDGVLRLAQRLAELRPDLVVVEATGGYEQSLVIALAELHLPIVVANPRQVRDFAKATGQLAKNDTLDAMLLAQYAEAVRPCVRGLPDAHLRALRDVVNRRRQVVEMLVAEGNRLRETCDSAVRQDIQAHLEYLKQRCRTLEQELLDRVEADPLWHQRCDVLISVPGVGQVIAVTLLADLPELGQLTGKQITALVGLAPYSYDSGKRQGRRFIWGGRSAVRRALFMAAMSGIRWNPVLRVFYERLVARGKPKMVAIVACMRKLLIVLNAMIRTSSPWRGEAVVA

SEQ ID NO: 236542 - protein, 354 aa, unidentified
MIMIGADYHPAFQQIAFVDTETGELQERRLEQPEGAEKFYRELAAQGKRVRVGMEASGHARWFERLLAELNIELWIGDAAEIRRKREGKQKTDRQDAQHILRLLLKDDFPRIWVASWENRDLRQLLWHRHRMVQARTRMRNQLQAVALNEGLRCKKKLWREAGRKQLEAFRLAPWASRRRQDLLELLDRLNPTIAALSQAIEQEVEKCPEAQRLMTHPGVGPLTALAFVLIIERADRFQCGKQIASYLGLVPLEDSSGNRRRLGHITKQGNSLLRFLLVEAGQVTVRSLPEWRNKYVHLTMRRGRKIAKVAMARKLAVRLYWMMRQGWDYEQLKKFGSHSGQPGHRHGVKSNIE

SEQ ID NO: 236543 - protein, 478 aa, unidentified
MAERRIIGLDLGIASEHTARVLNGEGKVVAKRKAVPTTESLSALEGAALDGAPPGTMLEVVMEPTGPAWLPIAVFFISRGHRVFRVPSAKAHDMRRYFSRNAKSNSIDADALAKLAIIDPDGLRSLVLAGADEAALDRRVRACDRLTQEVSQHKKRIKDLVRQLLPITPLTADLGVADLELLEHWADPHDLVKVGKARLTKILAASSHGLQKDERAEEWLAAAHGALELYGEHPGVAFADLAAEVATEVRLVKALQAELASHEKAREERYRSVDPHELARSLPGIKAIGGPALIATMGRAARFPSAAHFRSFTGLAPKASETGNTDRKGQAMSKAGNSLLRTTLVRAADTARKQDPQLARIYYVQMAERGKSHLAANCVVAAHLAERAWLVLRRGTPYNVCDIDGTVVTPREAKAIIAERYTVTDEVRRRRRSAKGGKAPQKVLKERLKPHAQGVGRTRRPSPSNTPARSETDVKRTA

SEQ ID NO: 236544 - protein, 382 aa, unidentified
MRCAGLSPRNGLGEDRNHGGADMAQVRTWVGLDVHAAKVVAAIADSESGELAVQRMGGATAQVAEFCAGLPAPVRVAYEAGPTGFGLARELAARGIDCTVAAPGKIERPAQDRVKTDRRDAERLVRLLMIGGLHPVRVPTPAEEAMRDLVRAREDVRGDLMRARHRVAKLLLRHDLRFEGNNWTQRHLDWLGRVELPEPVAQSVLLDGIGSIDALLVRRESLESQMASLVEGSPWEQQVAQLRCLRGIDTLSALGLCAEVGDFERFARPAQLMSYLGLVPSENSSGEKRRQGSITKSGSRHARRLLVEAAWHYRRSPRKGRELRRRQEGQPQAVCAISWKAQQRLHRSWVRLDSERGKRRTLCAVAVARELAGFCWAVATVD

SEQ ID NO: 236545 - protein, 393 aa, unidentified
MEHFIGIDNSSTDHKIKIINNNGEILYSMTIDNNLKGFEKLNSKIINFPNSKIGFELPHGPLIDFLKSKKHKIFSINPLKIKRFKEVNIISGNKTDDIDALAIAEYMKINQKNIQSMKFNSSEIEKLKSLSVVHTNMTENHARHLNKLRFVVRQYFPLHDSLFGDFGGKVHLKLLLKYPTWDVLKKASEAEIKQFLLDSKYRNFVNIEKLITKIRKHGQIICSNVEYAFKISATSLCQQLLIIKETLKELEDKMVEITDNHKLGDKIKSLPGAGPILTGKILSIFGDNKDRFKKASDAQCLFGTAPKNYQSGSYHKVHMRRACDKQARAVLYKFAFSSLNYSQWAREYYDKQREKGKTNSVSVRALSNEWVKVIFSMWKNETMYDESRKLKVA

SEQ ID NO: 236546 - protein, 411 aa, unidentified
MRLFVGDDWAEDHHDVELMNEQGRVLARKRLPEGVAGMARLHELTGEQLGEDADDAEVIIGTETDRGPWVAALVAAGYTVYGVNPLQASRYRERHGVSGAKSDAGDSHMLADMVRTDSHQLRAVAGDSPGAGAVKVVARTHKTLIWERTRQVQRLRHQLREYFPAALAAFEDLDAPDVLELLARAPDPARAAKLTRAQISAALKRARRRDIPGKATVIMAALRGAQLGQPPAITAAYAAAVRSLIAVITTLNEQVKILQGQVGEHFGQHPDAEIYLSQPGPGPVVGARVLGEFGDDPHRYASGKARKNYAGTSPITRASGTKKVVMARFIRNDRLIDALMAQALSALGSSPGARAFYDAQRAAGVEHNAALRKLANRLVGILHGCLKTRTLYDEATAWPHREKTPQSDIAA

SEQ ID NO: 236547 - protein, 425 aa, unidentified
MNYKQNEKINQVKESTLVVGIDIGSTTQYARAFDWRGIELGKVFTFSNSREGFEAFKAWMQRLQDKYRKSDVIVGIEPTGHYWFDLGAYLEDEGILLVMVNPYAVKQTKELDDNSQSKNDRKDPKVIAKLVTEGRYSAPYTPDGVYADLRIMVANRKRLIREMTQIKNRFARWFAIYFPEYTDVFGDYEAQSSMLLLKKVCTPEAIVELGAEKINQIWRDAKLRAVGMKRATTLCETAKRSIGLKKGSSAARYEMKLLLEDYEYKKAQLDAVMEEIEKLCRKIPESEQMLAIKGIGVITVAGFLAEVGDVRRFESPRQIQKLAGLSLRENSSGKHKGQTTISKRGRSKLRAVLFNAAIPLIAKNPEFKSLHEYYTTRANNPLKKKQSVIAISCKLIRVFYAILANGVTYDAQKMLSDIHRQPQAA

SEQ ID NO: 236548 - protein, 377 aa, unidentified
MKSIKFVGLDVHAETIAVAVAEQDGEVRSLGVIPNRCESVRKLVKKLGAVEELRFCYEAGPTGYVLYWQLTALGAKCEVVAPTLVPVRTGDRVKTDRRDALKLARSYRAGELTAVWVPDAAHEALRDLVRAREAAKRDQLRARNRLTKFLLRHGKRPPEGVNLWTLSYMNWVRKEVHFEPLAQQVTLLDYLHEVEHMAARVTRLEQAIEEAVQLAPQQMREVIEALQALRGIAKVSAVTIVAELGELSRFGEARQLMAYSGTVSREHSSGESSKRGGITKTGNVHLRRIVVEAAWAYRHAPAVTACLRKRQERVSEEVKEIAWKAQHRLHGRYRKLAARGKNTGKVITAVGRELLGFIWAIGVKVEAEQRKALGQAA

SEQ ID NO: 236549 - protein, 340 aa, unidentified
MRLIGCDLHASQQSIAMLNRDTGEIVEQTLAHEGGAVREFYASIPPPVVVGIEATGSMGWFLRLMEELAIECRVGHPTAIRKAETRRQKHDRRDAALLLQLLAEDRFPAIWMPSTEYRDLRSLLLHRHQWVRMRTRVQNALHAIVLAHGVRRGHTLWNREGQALLASLPLPPHTADRRSELQALYQHFEAHIDRLDEQVKHVADERPRATLLMTHPGVGPVTALATEGFVGDPARFLDGKALASYVGMIPREYSSGTRQRLGALSKQGNPFLRFLWCEAAAHAVRRDPDLQRFYRRKVVQKGFAKARVAAARKLGIRLWIMLRDQIDYAEFCRRGLARQS

SEQ ID NO: 236550 - protein, 351 aa, unidentified
MLIIGVDYHPSFQQIAFLDQDTGECGERRLNHSDGEAEKFYRDLQQRGVRVRVGMEATGYSRWFERLLSELSVEVWIGDAAKIKTKRVRKQKTDRQDAQLLLKLLLENNFPRVWAPSPENRDLRQLLWHRHRLVQMRTRIMNQLQALAMNEGTRWKNRLWSEQGRSQLEKIPLAPWASRRRQDLLELLDRMNPTIAELTAAVEQEAKKRPEVLRLMTHPGVGPITALAFVIIIMTPDRFPCGKQIGSYVGLIPCEDSSAGRQRLGHISKQGNALLRFLLVEAAQAAVRYDPDWRRRYLHLAMRRERRIAKVAMARKVAVRLYWMWRNGWEYSQSVEFGSHAGQLATGHGVK

SEQ ID NO: 236551 - protein, 346 aa, unidentified
MRFYTNQHKFYCGIDLHARTMYLCILNQEGKIILHRDIKTNPDSFLKTIAPYREDIVVAVECIFTWYWLADFCNEEKIPFVLGHALYMKAIHGGKAKNDKVDSHKIAVLLRGGMMPMAYVYPSEMRSTRDLLRRRNHLARKRAELLAHVQNTNHQYNLPDTGKLAYKSKRKGVAERFQDISVQKNIELDLSLLDHYDQLLLRLEHELSLIAKVHDADSYFRLRSIPGIGRILGLVILYEIHDINRFSRVQDFVSYCRLVKSAKESGGKKLGTSGKKIGNAHLKWAFSEAAVLFLRKNTAAVKYRDKLSRKHGKAKSLTILAHKLARAVYYILKRKEVFQPDVFFVK

SEQ ID NO: 236552 - protein, 446 aa, unidentified
MSDRSGLSRGDRNRNARLARLRRLLPADHAIVGIDLADDKQAAVVTDHDSRVIARRRVNMRAWELGGLLDWALAVAARAGFASVTVACEPTGHRWRVLDQLAEERGLALVCVQPLLVYRAREGEDLTRDKSDPKDAVLIARLAAELRCYEPERADVVWARLRHLGARRNQLTTGATGQVNQIRDLLECAWPAVLGAAGSPFRSVSWCAALAVVLDRCAGDLARVRRLGPARFESAVRRELPRWGGQRPCLRIIRAVFAALSDPAGVVAHRPGALERAHLALGDWRDTRARLADTEARMAAVLDGLGLTALVTTIAGLTPVGAAAILAETGDLARFATARALVKHAGLCPRDNASGAHQGKTSISGRGRPALRVAAWRAVWAALPNNPVMAARFTYLTTREHNRLARQQARTACAAALLRWIHAVITQHTAWDPAIAAGTRPQQQAA

SEQ ID NO: 236553 - protein, 347 aa, unidentified
MVTFGGDCHKKTHTVVAVDENGRQLGERTVAATPSGHMEALSWARQWSQRQWALENCRHLSRVLERNLLNAGEAVVQVSPKLMGGARRSGRELGKSDPIDALAVARAALREPRLPVAQLEGKEREVKLLVDHREDLVGERTRIQNRLLWHLHEVEPGYQVVASGLLRAVVLAEVRTRLENHSGVVAEIALELVDRLAELTRSIKRLQRRIEVLMHELAPSLLSLAGCAGLSAAKLVAETADVSRFRSSAAFAMHNGTAPIPVWSGNHERHRLNRGGNRQLNVVLHRIAITQMRVGGQASDYIARRLSMGNSKTEAIRALRRQISDEVYRRLRQDHSRRSTALMAVAA

SEQ ID NO: 236554 - protein, 368 aa, unidentified
MPETSETFLSFIGVDLHKSTITLVAVDPAGEELNSLTCHTKCVERIEQWIYIQPKPCRLAVEAVGFCEWFIDRFRPCVARMDIADATALASLRGKRRKNDRNDAADVATRLARGDCPLGWIADEPLSQLRKLGRHWHCLSRTLSRVKHCMGSILLAANIAGPKLDAASAQKWLLAHGHLLKDVQREAFGNFLDIISLLERQRESLRRRIIAANRQPGFVQLVGLLKSVPGIDEIWGCIIAAEIGDFSRFPNADTLQFWTGLTPNNEESAGRTQSGHITKAGNATLRWALGKAAVTLCRSDARQESVRQRLIQRIGKPKANVAMARRLLGILFAMVRDGSIYQGQQPTGHEQRANQARMRQRRKECKAA

SEQ ID NO: 236555 - protein, 340 aa, unidentified
MTIVVGFDLHKTQITFDALNLVTGEVRRGRIPATPAAVHEWVSRFGDEEVHVAVEACTGWLFVCEALVEARAVPHLADPAETSARRGKKRRAKTDRADARHLRTLLCEGRLPEAWIPPEHVRRWRTRTRLRKTLIDERTAWLQRIRATLLHHGVSGAPDKLLSERGRDFLESLKLPPDASERIEVALQMIAAVDAQLAPLERSLRQLARRQPGCRALMRHYGIGELTAPTILCELGDVDRLSASRKAVRIAGLDVGIHRSDRRSRVGKLTKQGSPELRWALYESAQAACRPTSPDRADYLALKERGLTHTRASVTIARKLARRCFHTLRELGPEALAPPD

SEQ ID NO: 236556 - protein, 345 aa, unidentified
MQYDAGIDVSLEQSSVCVVDAAGKIVKEAKVTTDPHVLVTFFKGLGFPVTRIGLEAGPLSQWLYAGLTQAGFDVVLLETRHVKAALSAMVVKTDRKDARGIAQLIRMGWFRAVHVKSASAQEIRALLTARRLLLDKLRDVELSMRGILRGFGLKLGKVTQKGFETRVCELVANHPMLQQITRSMLLARATLQREHNTLHKALLKIVRRDNVCRQFMTVPSVGPIVAITYKTAVDDPHRIKKSKAVGPLFGLTPKRYQSGETDVIGGISRIGDAMVRAMLYEAANVLLSRTMRFSALKRWGLAVAKRRGMKRAKVAVARKIAVILHRMWIDGTSFRWSNEKAAAHA

SEQ ID NO: 236557 - protein, 400 aa, unidentified
MMTPDDIDVWVGLDVGKSAHHAHALDHDGNTLYDKPLKQDEKAIRTMLGKLSKHGRVLLVVDQPNTIGSLPLTVARNMGIAVAYLPGTAMRRTAQLLPGDAKTDRRDAHVIAWAALKLPETLRDAGPDDETLAALKLLAGHDEDLAHESTRHVNRLRSLLLQTHPRSERALKGERITRDATLALLERYGGPMGVKRAGIEDVKDWAKSNGLRAGRIIDDMFKAIGEQTVTVPGTLMAETIIPSIAHDIKTIRDRRREVGRQVEKLLEDHPLLTVLTSMPGIGVRTASNILLGIGGDIANFKSSAHLAAYAGISPVTGQSGTSIKGERPSRRGNKRLKNALWQTAFVASTKHPPSVAYYKRKREQGKHHNAAIICLARRRCDVIYSMLKNGTLYQEPALVA

SEQ ID NO: 236558 - protein, 323 aa, unidentified
MSTSSESPSRCYVGIDVSVEHLQVAVWPAEQGQSVVYDHAGVAELVGFLQPLKPTRIVVEATGTLEIPLVAALAAAELPVVVINPRQIRDFARALGVLAKTDRIDARVLARFAESVQPPPRLLPSEQQQAMQELVSRQRQLVEIRAAESNRLRRTRTKAVRHNLQIHLSWLDKEIQQIDRQIRQLITESPLWRQKDQLLQSVPGVGPKLSSVLVAHLPELGRLNRREIASLVGLAPFNHDSGQGRGKRFIGGGRSKVRCTLYMSSLAAAYHNPVIRSLRQRLEHQGKPFKVILTACMRKLLTILNAMVKNGTPWNSALCRISS

SEQ ID NO: 236559 - protein, 243 aa, unidentified
MDAREHAVLSRRVKRSQLAAAVASLPSCVIGMEACASAHHWGRAFEPFGHTVKLMSPQYVKPYVKTNKNDCRDAEAICEAVSRPTMRFVAIKTVDQADLQAVHRSRTLLIKTRTALINQIRGLLAEYGLVIAQSPEKVRPALVRFLDDAESGLTAFARETFAELYAQLVELEQRITKVNQRLDRLFNTHPVCRKLAAVPGIGPLTATALLATVGRPQAFHNGRHLAAWLGLVPRQYSSGASSA

SEQ ID NO: 236560 - protein, 347 aa, unidentified
MRFYTKQHQFYCGIDLHARTMYICILNHDGEILVPRDMKARPETFLKVIAPYREDMVVAVECLLTWYWLADLCAQQGLPFVLGHALYMKAIHGGKAQNDRIDARKIAVLLRGGMIPPAYVYPAEMRATRDLLRRRMHLMRKRAELLGHIQNTNSQYNLPEIGKKIAYKANRDGIAERFPDPAVQKSIEVDLALLDHYDRLLRDMELTVLKTAKQHDANTLYLLCTVPGIGEILSLVLLYEIHDIQRFPRVPDFVSYCRLVQCAKESAGKRYGTSGAKIGNAYLKWAFSAAAVLFLRTKPAGQKYLARLEKNHGTGKALTVLAHKLARAVYHMLKRETAFDMPMFLQS

SEQ ID NO: 236561 - protein, 372 aa, unidentified
MNYNTVYVGMDVHKESFSLCAYTIEVEKASHYQRTEADYKKVLNYLEFLRTIYGDDANFICGYEAGCFGYTLYHQLTANNVKCIILAPTTMLEQRSKKRIKTDRRDAEIIAKCLAQHNYSPVHIPTAKDEETKEFLRMRDDHKLALKKVKQQILAFCLRHNYRYDGKSHWTAAHLKWLKALTPEALYKEILDEYLLTYQTLSDKIERLDKRIEELATQDEYKEAVKKLCCFIGVKTHTALSVLVEVGDFKRFASAQHFASYLGLVPGEDSSGDDQNRLGITKAGNRHVRLLLTEASQCYARGQVGFKSKELKSRQSGNTPAVIAYADKANERLRRRYYKMVLNKYKKHNVAKTAIARELACFMWGMMTDNIA

SEQ ID NO: 236562 - protein, 379 aa, unidentified
MRHVCGLDVHKDSVFVCILNEKGVVFQEKFGVLTPELERMVGVIMEHGVTEVGMESTSVYWMPVWRVIDPYVEQKLVNPYFIRQLPGKKSDVKDAEWIATCILKGLVRGSHVPEERIQRLRQYDRRIFDLNDDIVHKLTRLDAALQRCNIRLSNYVSTTDCKSYGDVVDAIARGETSPDALLRCVHGRIVNRHGADVIRSALTGVVTPVDVDVIRQLREEIELARRHREECQRRMDGLCSEWFPEQYANLQTIPGVKARSATAIIAELGTDMSSFEDAAHLVSWAGLRPRNDESAGRIKARGITHGNKYLRKTLIECAWGASRTRGCFYSRFSHHQTVVRRKSRMKVQVAIARKMLSAIWFILHDGVAYRDFEGDANAA

SEQ ID NO: 236563 - protein, 344 aa, unidentified
MNVMIGVDPHKGSHTATMLDRDERELRRIKVRAGNGQVNELLAWADGDRPRMWAVESAAGMGYLLAQQLVAAGETVLDVPATLASRVRVLASGQSTKTDPNDARSVAVAALRAPSLAQVRAADHTAVCRLLVKHHTDLARWRNKLCCRLHALVAELTPGGISKEVVVNQARSLLDELTPTGAAAVERHRLALELVAEIEHLDTVLRASRTRITAAVAASETTLREVFGVGPIVAAMLIGYSGDPTRFTTAARYAAYTGAAPVEFSSGGRITHRLSRRGNRRLNHALHIAAITQVRNRHSVGRGFYERKLAEGHTPREAIRALKRRLSDIVWRHLVADAQRSTSR

SEQ ID NO: 236564 - protein, 394 aa, unidentified
MRFVGIDVGAERHVVASVDAAQAVGLKPTGFTEDVAGYHQLLTLLGPATDTLVAMEATGHYWKNVFAVLVAQGFAVALLNPLRTRRFAAEDLQRTKTDAIDALGIARFAAQKRPAASRLPDPATEELRERLRYRDRLSQDFGDRERQLHRLLDLGFPEFSRQVRDVGSELATAILRAYPTAAAFQGVTVRRLGGLRYAGGQKVGAALAATLLEAAAASVGQHHGAAYRVQVQDICEDLDVLRRRLRTLDRDIEGLLARHEIGTLLTTIEGIGPQTAARLVATFGDFSGMRSGAALACYVGVIPGLRQSGKRTASRASLTPIGAARLRAKLYMPVLSAVRYNPWLRAYYEGLIARGKLPKVALIAAMRKLLHAVYSVATHRRPFVPHVVAQEARP

SEQ ID NO: 236565 - protein, 342 aa, unidentified
MEKVSIIGIDLAKRVFQAHGAAADGSVVFRKKLSRSQFLVFLAAQPRCTVAMEACATAHGWGREIGRLGHEVRLIPPIYVKPFVKRQKNDVADAEAIAEAASRPTMRFVAVKSEEQQARSMIFRTRDLLVRQRTQLINALRGHLAEHGVVAPQGTAHVKRLADVIGDETAALPATVRQIGRLYLEQIDAFSGMIDELEKKLRAEAGQAAATRRLQTMPGVGPITAVAIESFAPPMETFRRGRDFAAWVGLVPRQNSTGGKQRLGRTAKMGQRDIRRLLIIGAMAVVNSAARHGAPEGSWLERMLAKKPKMLVAIALANKMARGIWAMMTKQEDYRHPEAVAA

SEQ ID NO: 236566 - protein, 411 aa, unidentified
MVKENFIYVGIDLHKETHTAVMIDCYNQKLGEITFPNRPADFPKLVAKVKKCNTDGKEVVYGLENAYGYGRALAVWLIDKGYLVKDVNTAISHRQAKHRGAMYRKSDSDDAEAIALATLNMLDKLPDACPNDAYWSLGQLVHRRDNIMKQRTRLVNQLHEQLCIAYPSYKSFFNDISRPTALYFWEHYPSKKYLKGKSVEDLRAELVPVSHNKCSTKTCEKILDAVASDKVKNNAYQDARDMVTLSIVSDLQHYDSQLAEVDKMLEQMYKMLGCTLTTIPGVNVITAVKILAEIGDIKRFSNANKLAQFAGIAPLHLSSSGKGKDVATKQGNRRLQATIYFLAIQMVQVSSKGTPRNSVVRAYYEKRKAEGKTSQQALICISRRLISIIYGMLKHGTEYRMPVVESAGENR

SEQ ID NO: 236567 - protein, 366 aa, unidentified
MKKTSTVRVNGNMIFKGHKLTIGLDLGDQWSCYCVLDEAGKIILEQKVATTPEAMKHTFGKIPQSLIAMETGTHSPWVSRLLTELGHKVIVAHAQKVQLITKSNRKDDRHDARTLARLARIDAELLGPVRHRSAQAQIHLTVIRARAELVRARTALVNAARGLVKSYGQRLPKCGTQQVSRELGVGLHAGLREVLEPLLKEIESLNERIKEYEVRMEKIAKESYPQVELLKQVKGVGTQIALTYVLTLDDPHRFPKSREVGCFLGLRPGRRDSGESQPQMHISKEGDRYLRTMLVQGAHYILGPFGEDSDLRRWGLKLAGRGGKNAKKRAVVAVARKLAVLLHRLWVSGEVYEPLRNSQKAMRAAA

SEQ ID NO: 236568 - protein, 346 aa, unidentified
MKKIFIGIDFSKEKFDVTLIKAEGVEERAERQHEVFDNKVSGFRRLLRWVKSATDEQDTDLWLFCGENTGGYSRALCNYLYGSGYDIWLENALSIRRSSALQRSKSDKADAGIIAEYAMRNYDQMRLYKPLDKNLERLREVFLYRHNLVKLKAGMTVRKGEKKLTQDKSDISRFMAMSSKHLISEFNKKIAECDMRIEKIISEDENLRRNFDIITSVPGVGTQNAVCLMVYTDNFCRFDFDSRKIACYYGVAPFGRQSGTSVNTPPHVSPFANKLIKALLTQAALASVHFCPQMAIYHHRLVEAGKKKPVALNNVKNKLLHVITAMVRKGEKYNPDHDYYAALNAA

SEQ ID NO: 236569 - protein, 413 aa, unidentified
MEVLYPHCAGLDVHKDTVVACVRHMVNGTVSREVRTFKTTTKELLALSEWLATEGCTHIAMEATGVYWKPVWHILNDGDFALVLANAAHVKNVPGRKTDVNDATWLADLLAHGLIRGSFVPDQQTQEMRDLLRTRKHLVREASRHIQRLQKTLEDANIKLDSVISDVMGLSGRRMIEALIAGQSDPEELAQLAHRRIKASPEELREALRGRVTRHHRFLLSLHLQQIDAVDAAIGAIDQEVDAQIEPFRTTVHLLTTIPGVDELSACVILAEIGRDMSRFPTAGHLISWAGLCPRNDESAGKRRSTRMRKGAAWLKTTLVQCAAAAARKKASYLQALFHRLRARRGAQKADQIEQGHRFALQGMDNVLVIDDVAVFAAWLRAPPAQAHQRRRAEKAFQPIVVKPHPQAMADQP

SEQ ID NO: 236570 - protein, 357 aa, unidentified
MTCGCSFSELTYDNSEKLGEITFENKPSEFHKLTRKVSRFLTEEKTAAYGLENGYGYGCALAVWLIEKGCMVKDVNTALSYAQRKSVPKYQKNDSYDAEAVALVLINMLDKLPDAVPADAYWTLSQLVNRRDNICSHQQRLKNQLYEQLCVAYPSYKQFFGDISRRTALYFWLRYPSQEHLKGKTAEELVAELRPISHNNCSIKRAGKILELVRMDGQTTREHQESRDAITRNITGDLEHYREQLEIVETAIETMLPSFNCTLMTMPGVDVTTAANMLSEIGDINRFPNANKLAKFAGICPINFSSAGKGKDMYPKQGNRRLQAIFYFLAIQMIQISTNGTPRNKVFREYYLKRVAE

SEQ ID NO: 236571 - protein, 411 aa, unidentified
MPNPVTTTRRTNGWWMSSFGVFLGLDVGKEAHHAVGLAPDGKRLHDGPLPNTEPKLKALFDKLAEHGTLLVVVDQPATIGALPVAVARAAGHQVAYLPGLAMRRIADLYPGRAKTDARDAFIIADAARSLPHTLRPVDVGDEALAELEVLVGFDDDLAGEATRLSNRIRGLLTGIHPALEHAIGPRVSHPAVLEILSRCGGPAGIAKAGRRKLTAIAKAHAPRIGERLVEAIMTALGEQTVTVPGTAAADTVLPRLADSLKTVLQQRKQVAEQVEGMLDAHPLAGVLTSMPGIGVRTAARILLEVGDASNFASSGHLAAYAGIAPVTRSSGTSIKGEHPARTGNRQLKRAFFLAAFAALADPVSRAYYDRKRAEGKKHNAALICLARRRCDVLYAMLRNGTHYRHPEPAAA

SEQ ID NO: 236572 - protein, 360 aa, unidentified
MEIGQTVTDHGVVGGVDTHKDLHVAAVVDELDRVLESRCFATTRHGYKQMLTWMRSFGQLRRIGVEATGTYGAGLLRYMQNAGVEVLEVTTPDTHDRRKRGKNDDLDAQNAAHAAFAGRRTVTPKSRDGMVESLRVLKACRKTAVAARRVALQMIHNTIVCAPDDLRETLRRMTRMQLIRTLAAWRPDLTDYRSVVSAYRIALKSLGRRYLELHDEIADLDTMIVAIVDELAPALVARNSIGHGSAAQLLVTAGDNAERLQSEASFAALCGASPVPASSGKTTRHRLNRGGDRAANSALHIIAIGRLRTDPRTKAYIAKRVAEGHSKLEAIRCLKRYIAREVFSLISQRKREINQGRNAA

SEQ ID NO: 236573 - protein, 388 aa, unidentified
MGTHQIIALDLGKFKTVACLMNTADRSHVFETIEMSPQAVHELLARHATADPRDTRVVFETCDCAGWVHDVCAALGLSAVVVSANSEAWRWQRVKRKTDRDDALKLARLCLLDQLTAVHVPDPKRRQVRRLILHRRSVVARRTMSRNAIRSIFSQQGIALARGNKQWTQAGIAQLKEYARPLGECADELDLWRGRLHVELQLIEATDAQLKAVDRKLDELQRDDQRVKLLQTVKGVGPRVAEAVVSHLGDPHRFKTASRVAGYAGLVPKQLESGQMSRRGHITRRGPALLRSMLVEAAWVVWRHNAWAKAFVDKVSRGSRARRHIAIVALARKLLVSLWAMLRDGTRWRDPDWKVGSKDRCAGGGGFSPPEDTGPNVAVSSMVMGALA

SEQ ID NO: 236574 - protein, 375 aa, unidentified
METIYIGVDFHARQQTICYLKTETGELVFHELRHQDKQKVRAFYAQFHGQVIVGLEASGYSPWFERMLEQLGCEVWLGHATEIRRRARWRQKNDRRDAELILDLMLHNEFPRLHRGAVQSREVLRMLRYRQKLIKIRTMSKNSLQAIALQAGLAKGSRLFTKAGQQELGTAEMTPVMQWQREHWWQLMEPLNQQLLETMVWFKAQSKGDVCVTRLRTHPGIGLLTSLCIVHTLQPVSRFRNTRKVAAYAGFDPVERSSAERKCFLGISKAGSRLLRYLLVEAAQTAVRKDEDLKRFYKRLAERRGRPKAKVAAARKLLIRTYIMLRDEIDYAEFRHRAVAARLARRGQGPSNVPEVLIGQPASAEGQGEPTSANK

SEQ ID NO: 236575 - protein, 411 aa, unidentified
MIKENYIYVGIDLHKETHTAVMIDCYNQKLGEITFPNRPADFPKLVTKVKKCNTDAKEVVYGLENAYGYGRPLAVWLIDKGYFVKDVNTAISHRQAKHRGAMYRKSDSDDAEAIALATLNMLDKLPDACPNDAYWSLGQLVHRRDNIMKQRTRLVNQLHEQLCIAYPSYKSFFNDISRPTALYFWEHYPSKKYLKGKSVEDLRAELVPVSHNKCSTKTCEKILDAVASDKVKNNAYQDARDMVTLSIVSDLQHYGSQLTEVDKMLEQMYKMLGCTLTTIPGVNVITAVKILAEIGDIKRLSNANKLAQFAGIAPLHLSSSGKGKDLATKQGNRRLQATIYFLAIQMVHISSKGTPRNPVVRAYYEKRKAEGKTSQQALICISRRLISIIYGMLKSGTEYRMPVVENAGENR

SEQ ID NO: 236576 - protein, 350 aa, unidentified
MTFVGCDLHTRQQHVAVLDTETGEMQERRLAHDDHAVEQFYGSLPRPVTVGIESTGYAQWFHALMQRQGHTLLVGDAARIRAMVVRKTKTDRRDAAHLVQLLSQDRFPIIWVPDPRVRDLRALVTHRMRLVRMRTMVKNGLHAIALNHRLAAGSALFTRRGRAQLQALTLPPHLTQRRDESLELLSWLDEHIDPLNGQIAAAAEADEQARRLMTHPGVGPLTALASVLVLGPVTRFPTSKHVVSYIGLAPAVAASAEKCRLGHITKQGNALLRYILGQAGQVAARSEPELRRLYLAVMHRHGRAKAKVAVARKLLVRLYIMSRDQIDYAEFRDRGRRPRAHPRAEATERA

SEQ ID NO: 236577 - protein, 371 aa, unidentified
MMNYIAVGCDVHEDNLLCRWAHNLDKPQERSFPNTNGGRRAITRFFQRAGEQAEDAKIAIAYEASYLGFSLYDEWTDAGFTCKVLAPTRITHSPSQRKRKTDSRDADRILELVRGHLFAGNSLPAIWIPDPQTRDDRELVRMRLDIGGKITTVKTQIHFLLKRTKCRKPRTVGKPWTKGHVEWLSSLTEPASKAPANARVILASLIRQWNMLEKECSILEQEIKALSLTPRYAHPAAELTKENGVGLLTAMVFLTEMGDLSRFRNRQQVGAYLGLVPTSHESGKHPDRKGHITHQGSPRVRHILCQAVWARVRTSPQTANVYERIVARNPKHKNIAVVAVMRRLAIKMWHVGREAQRAAGVFAIPAVSSAA

SEQ ID NO: 236578 - protein, 367 aa, unidentified
MKKQTSAATETQLKGKNIIDFTGKTIYVGIDVHLKDYQVAKVYNGLCLGNHRMASNSEGLIDHLRTHYPGAAFECVYESGAWGFTLQRQLTAAGIKCMVVHAADVSTTDKERKRKTDRVDALKLARMLASGELKAIHVPDETLQKQRNLIRYRKRLVGDLNRSKNRLKSLLKFQGISIPAPYEKNNWSRNFIKWVQQQVLPNDPLSDSVALMLEQINLLKQLLLKTEGKLRQLRKGKYEQQATLAMSVPGVGPTLAMLFLLEVGDIKRFHGFDALNDFIGLCPDTNSSGETHRDTGITTRRHNELRSALIEAAWQAIRIDPALLESYQLLTKRMKGAQAIVRIARKLLRRLRAVLLKQTAYEKGVVA

SEQ ID NO: 236579 - protein, 359 aa, unidentified
MRVVAGVDCHKSAHTAVFLNVVGQVVDRITFPTSEDGYERALALAERIGCIEWGVEGAGCYGYAFTVFARARGAKVLEVPGILTKRHRQHGSHRGKSDETDAQAIAEVVLRDVDRLPCFHPGVLQRALRLRYDRRDRLVRERTRAANRLRMAAVLIGVVELPRDITSRKAARRLSAIATALREEVALHPAVSAIVDDLQDAADEILRLTDKIRAVERTLKTLVADIATDLLSVHGISSVVAAGLIGHAGDLRNYRNAAAFAAKCGAAPVPCSSGRRIAVRVNTGGDRQLNRLLHVIGVAQVATKDHRGRQYYERKRTEGKTHPAAMRCLKRQLATVVYYRLAAIQQRLTGADNQQAQAA

SEQ ID NO: 236580 - protein, 397 aa, unidentified
MYIVGIDIAKRKHEAAVIDGEGTVIIKPFSFTNNCSGYNRLLAMLTKAKLPLDEVSFAMKATGHYWLALFTRLQKEGFRVQVIIPVQTNSIRSFYIRQVKTDPRDALLIAEVIRFGHFSESTLHPENIYELRELCRGRHAIVSMQADVKRKVVALLDQVFPEYETAFTNMFGDTSMAILQTCPTPKELSETPLEELCHLIEVSSHKRFRMAKAQELQALARNSFGFAMAGDVFSTMIRLYAKHLDFLKQQVREMDRKIAEIMETLDTPITTITGIGPTLGAYILSEIGDISRFSSAAKLAAYAGIDPTMRQSGEYNGVRNRMSKRGSPYLRHAIWLAASSAVLHDPALKLYFQKKRDEGKPYMASVGHACRKMVSIIYAVMRDNKAYTPYIPNEISA

SEQ ID NO: 236581 - protein, 312 aa, unidentified
MTEIICGVDVSSQALDVRIGRDGAEARTAATPEGVASLAAFCREHRVTLVVMEATGGYEKLVHALLWGHGIPAAIVNPRSVRRFAEAMGFLEKTDRIDAGVIAWYAEVKRIVAQEPPSAAQEHLRALVTRLRQLTELRTMQSNQRRLVGDPVVDGLFSDLMALFARQSRALEAKIAALIGSDPLWQELDACFRSVKGVADRTVARIMAEMPEIGTLSNKAAAKLAGLAPLAKDSGKSHGKRVTRGGRANLRNILFVIVVNVRQYNLDFAALHERLTKAGKAKKVIRIALARKLLVQLNAKARDARKQLAKAA

SEQ ID NO: 236582 - protein, 415 aa, unidentified
MDVVEERCAGADLSKADVKVCIRVPGTGKRVRYEVRTFSTMSDGLLELRDWLLENGITRIGMEATASYWKPMFYLLEATEGIEPWLLNAQHIKTVPGRKTDVKDCQWICRLVEHGLVRPSFVPPRDIRQLRDLTRYRTETSRDRARDVNRLAMFLEDAGIKLSSVVSDITGRSARAMLDALVAGERDPRVLADLALGSLQGKVPLLTRALTGSFSEHHAFMVASMLRAIDEADDRISCLSEEINRQLQPLRQQVDLLITIPGISLTLAQVLIAEVGVDMGRFATAGHLASWAGMCPGNKESGGRRLSGRTRHGDTWLKSALFMAGASASRSKNTYLGAQFRRLVPHRGAKRATLAVGHSILVAAWHILNDLVPYRDLGPDHFTNRLGKERQTRRLLAQLAALGLDVTVAQREEQT

SEQ ID NO: 236583 - protein, 419 aa, unidentified
MSFKIFKFNCCGLDIHKTWIFACIGITDSNKRTVYKQARFSSFTKGLQELCHWLAKYDCTDVCMESTGKYWIPVFNILEKNNIWVTLSHPKYTKPQKGNKTDRKDAKWICDLYMCGMVKPSFIPPADIRELRDLVRYRFKLTCMITGEKNRAHNCLTVSNLKLDDVFSDIFGRSSRSITEQILQHPGETFDVAPFVHGRCKTPIEEIQAAVDGAVSKEQAVKLRQCLNHIDELEMHKSEIEREIFRLSDKYEDILTLIRTVPGFDKNPMTAIQVLSEIGGDMSVFPTAKNLVSWAGCCPHNDQSNHKIKSTRISRAGSYFKPVLVQVANALIKSKKHPEFSTRYRRIKARRGHKKAIIAICRMILTAIWHILTDLKPYTAKGFLEPRPVSKEKVLTASQALNLLKQRGYVIKDEPIFIS

SEQ ID NO: 236584 - protein, 347 aa, unidentified
MNFYTQQHKHYCGIDLHARAMYVCILDEQGTKLVHKNLPTTPEAFLRLIAPYREDLVVGVECMFTWYWLADLCSQEGIAFVLGHALYMKAIHGGKAKNDKIEAHKIAVLLRGGMFPQAYVYPSEMRATRDLLRRRCHLARKRAELLAHIHNTNSQYNLPEIGKRLANKSNREDVADHFPDPSVRKAIEVDVALIDQYDQLLGEVELDLTRSAKAPDVQPFARLQSVPGIGQILALVILYEIQDIARFPRVQDFVSYCRLVKCAKESNGKRFGTSGKKIGNVHLRWAFAEAAVLFIRQSQPGKEYFAKLEHKHGKAKALTVLAHKLGRAVYYMLSREHAFDLKRFVTA

SEQ ID NO: 236585 - protein, 339 aa, unidentified
MDQVVTFGLDIAKSVFQAHGVNAAGEVIVRQRLTRSRLLAFFGKRPPCLIGIEACGSAHYWARELIRLGHEVRLIPPNYVKPYVKRQKNDMADAEAICEAVTRPSMRFVPVKSPDQQSVLVLHRTRSMLVRQRTQLSNAIRGHLSEFGLIAPKGRNGLQVLKEILEARDERVPAEALACLQMLYGQLELINEQILVSDRAILASARSTEVGRRLMEIPGVGPLLASALVATIPDPAAFKSGRNLAAWIGLVPRQNSSGGKERLGSITKQGDRYLRQMFVVGAVAVIRYAVRNGARRPWLVQLLARRTPKVAAVALANKNARMVWALMTSGERYRDPVAA

SEQ ID NO: 236586 - protein, 347 aa, unidentified
MLIIGCDFHPGFQQIAIFDKGTGEVEEKRLQHRAEAEEFYGSLAGQEVRVGMEACGHYPWFERLLAERGFELWFGDAAQVRASVVRKQKTDRRDAEHLMDLLREGRFPRIWVPSLEVRDVRQLLVHRHKQVQARTRTKNQLQAMALSHGVQKKHKLWTQAGRPELEQLPLLPYASERRRRLLQALDGLEVEIEELNRRVEEEVRKRPEAVRLMTHPGVGPVTALAMVLTLGPAERFASAKQVGSYFGLIPSEESSGGKQRLGRISKQGSSFLRFLLVEAGQTAARYDPQLKRFYKRLAVRKNRGVAKVAVARKLATRMYLMLRENWTYTQLNQAVMLASPSHSVAGE

SEQ ID NO: 236587 - protein, 383 aa, unidentified
MAMKDDANTRAIVGGVDTHKDLHVAAVVDEQDRVLETRSFATTRQGYRQMLAWMRSFGDLQRIGIESTGSYGAGLLRFMQNAGVTVLEVTAPDRQDRRKRGKNDDLDAQNAAHAAFAGKRTVTPRSRDGMIEALRVLVACRKTAVMARRIALQMIQNTIVAAPDGLRDLLRDMTRMQLVRTLAAWRPDLTSYREVEAAYRIAFKSLARRYLELHDEIADLDTMIAAIVDELAPNLVTRNSIGHTGAAQLLLTAGGNPDRMRSEASFAALCGVSPVPASSGKTIRHRLNRGGDRAANSALHIIAIGRLRTDQKTKDYVARRVAEGHSKLDAIRAIKRYLAREVFSLICRSQNPVSSRPKSISRTKRHRTPLLPAQKPAPHPNTI

SEQ ID NO: 236588 - protein, 396 aa, unidentified
MFFLGIDIGKNTHVASLLDNDGKSAFRAFSFANTTEGGESLLAKLSTLGIEPCDLVIGLEATGHYWLSVYSYLHDRGHKLHVINPIQTDGWRKGVEIRRRKTDAIDSILIAELVRYGDFVETQLPDEEALSLKNLTRFRSYLVDSIADLKRKIICVLDQVFPEYQSVFSDVFGKTSKEILLQFTSPADLESVSADTLAVLLSQLSRRKIGLKTAEKLTESAANSFGITFCRDSFTFQLRMLIEQMKFIESQVKDVEAEIESIMTNLRSPIMTIPGIGKVTAAVILGEIGSIDRFDTPAKLVAYAGIDATVRQSGEFDGANTRMSKRGSPYLRRALYQAAFIAATGRNPDPVLRAFYLKKLSEGKHHSVSVGAVSRKLCYIIHAVLKENRPFEVRNP

SEQ ID NO: 236589 - protein, 358 aa, unidentified
MQKYNISFKGQRIFIGIDVHKKNWDVAITPEIGIIKRHSQKASAKELFDFLKKHYPDGDYLAVYESGFSGFSTYYALKEVGVDCIVIHAADVPTTQYEEVMKTDRLDSIKLVKSLKAGLLKGIYIREKENIDDRSVIRIRKTIQKELSRYKIRVRHMLHSNGVPLPDRFEKPGSLWSRAFIKWLKEDVKLLSTSRNSLDLLIRQVETIRITLLEATNMMRNMSQTERYKRKFDLLTTIPGIGVTVAMCILTEVYDVRRFHNEREFAAYLGLIPTCHSSGDKVVHGEMTFRGNKQMGPMIIEAAWTTIYRDPGLGSLYLRYKERMKPQEAIVRIARKLSNVIFAILKNETEYIPYQTGK

SEQ ID NO: 236590 - protein, 377 aa, unidentified
MSEITRILMLVVRVGVDLAKNLIQVHAVDAAGRRLVSRALKRDQFAAWCQELPSGCLVAMEACSSAHHWGRRLRAMGLDARLIAAHFVTPYRMEGKSGKNDATDAAAICEAASRPSMRFVPIKTTEQQGIMSLHRVREGFKEERTACINRIRGVLTEYGVPLAKSPKALRIKLAEIVEDAQNELSVQARWVLLRAFEHWRELDEHMRWCDNQIGQHVRTNAQARQAAKVTGIGQIGASAFVAGVGDFKQFKNGRQFGAWLGIVPSQNSSGGKTSLGRITKRGDDYLRTLLIQGAKSAVMSAGKRDDPISRWLVQLTERVGWQKACVAMANKNARILWAVMTREQEFNPRHVSIKPQAKLPLARRSEPNSQHTAACAT

SEQ ID NO: 236591 - protein, 441 aa, unidentified
MQILFSRCCGIDVHKDSVTACVLIYAEGQEPEVRKKEFPAHFKSLGNLRFWLMAQKVTHVAMESTGVYWKPVWQALEGHFELILANPFQIKTVPGRKTDARDSQWIAELLAHGLIRPSFVPPRATRDLRDLTRYRVKLVQERNRVHNRIHKVLEDACIKLDTVASDILGATGRAIIQAIIDGQEHPDWLADKARGKLRGKRAELRLALRGRITDHHRLMLRELLEDLEFVERKISRLETEIATQVDHGKLDRLCSIPGVDLITGCTLLAELGSDMSVFNSPHHAASWAGLCPGNQESGGKRLSNRTRKGNQWLRRALCQAAWAATRKKNSYIAAFFYRKAGKHGMRKAIVATAHKLLIISFCILRDGTEYQELGDNFFDRLHPERTRNRLVRRLQRLGLEVVLQPRSDTPLALEPPDRSSARKRGRPCKCIERAIPCKHVP

SEQ ID NO: 236592 - protein, 406 aa, unidentified
MNMNAVGIDVSKRKSTVAILRPGGKVVVKPFDVPHLSADFQSLEKLIRELDGETRIVMECTGRYYEPVARELSQAGFFVSAVNPQIIRNFQGQDNPLRKVKTDKADSVKIARYTLDSWANLKQYSLMDELRSQLKTMNRQFDFYMKHKTAMKNNLIGLIDQTYPGANTYFDSPAREDGSQKWVDFIDTYWHVDCVRKMSLNAFTDHYQKWCSRRKYNFSKSKAEEIYGKAKELIPVLPKDTFTKRIVKQAINQLNAASQTVEQLRTLMNETASKLPEYPVVMAMKGVGPSLGPQLMAEIGDVTRFTHKGAITAFAGVDPGVNDSGDYSQKSVHASKHGSPVLRKTLFQIMDVLIKTKPDDAVYRFMDKKRSEGKPYYVYMTAGANKFLRIYYGRVKEYLSSLPESE

SEQ ID NO: 236593 - protein, 286 aa, unidentified
MCIIDQTGSIVKHKNIAATPEDFLGIIRKYRRDIVVAVECMFTWYWVADLCRDENIPFVLGHALYMKAIHGGKAKNDRIDAHKIAVLLRGGMMPMAYVYPSEMRATRDLLRRRNHLMRKRADLLAHIQNTNHQYNMPRFMKNICYKGNREGIAEQFSDECVRKSMEVNISLIDQYDQILKKLEYYIDKKAKVHDPEALFRLRSVPGIGHTLALIILYETHDIKRFPRVQDFVSYSRLVKPAKESAGKRYGHSGGKIGNAHLKWAFSEAAILMLREIPEVKKYKAKL

SEQ ID NO: 236594 - protein, 427 aa, unidentified
MPYKIAGIDVHKRMLHVVVSDVQVDGEYDFTRRVFGSLPEALRSLAAWLVEQQVQEVVMESTAQYWKPVWGTLERYWKPICQTREGALATSGTLHLAQALSNRGRRGRKKDFRDAERLVKRLVAHELVLSFVPDVEQRLWRTVVRTKYQLTRNRVQLQNRLEALLEEAHIKLSSLVSDLLGASARRMLHAIADGETNRETLAALADRGLRATQVQLQDALGVCQELNPVYRRLIRMVLDEVASIDKRIEQLNQEMANLLRPHEDQVKRLAEVPGLGVDSAQQVIAEVGATAATFPSEKHLSSWVGACPGDEESAEVNRSRRSPQGNRHMRRILNQAANAAAKLKGSIFEILYRRYVPRLGHNQTIGIIAHKLCRLVWKILHQGIQYEERGPEVKKASKQKRTRKMIQALRRLGYRIEPSASQSVIPA

SEQ ID NO: 236595 - protein, 342 aa, unidentified
MQITTIGLDIAKNVFQVHGIDAAEKVIVRKRLRRSQVLAFFKALPPCLIGMEACATAHYWARELTKLGHKVRLMPAKDVKAYVKRNKNDAADAEAICEAVRRPTMRFVQVKSAEQQGQLMQHRTRDLVMRQRTQLINALRAHLAELGIVAAKGDKGVKELLTILADEKDTRLPIDARASVIVLAAQLQAVQTLIGSIEKRIKAQHRSNQASKRLETIPGIGVIGATAIAATVADPTVFRSGRDFAAWIGLVPRQDSTGGKQKLGPISKQGDRYVRRILVVGAHSVLRRAKENPEKYPWLTQLLARRPFKVVAVALANKMARMAWALLAHGGTYRAPELAAAA

SEQ ID NO: 236596 - protein, 321 aa, unidentified
MQTVLGIDCAKAKFDAALLIGGKYKTKVFSNDARGFGELQTWLNQHGSGTVHACMEATGSYHEALALFLVEAGYAVSVMNPAQIKGFAQSVLTRTKTDRVDAKLIARFCLVSTPALWTPPAPEVRALQALVSRLEALNQMRTQEGNRLATAQPLIRGSIEKVIGLLDAEIAALKEQIRDHVDGHPGLREQARLLETIPGVGEATIAQLLAVVGDLARFKSARQLAAFLGLTPRQHQSGSSVRGKTRMAKMGHAQLRKALFFPAIVATRFNPLVRAFAQRLAQARKPKMAIVGAAMRKLVHIIFGVLKSGRPFDPTMHAACV

SEQ ID NO: 236597 - protein, 341 aa, unidentified
MSDLALVGIDLGKHTFHLHGQDKSGRELFRKKLSRQQMMRLFANLSACTVVMEACAGAHFVARELTAMGHQAKLISPQFVKPFVKGNKNDFVDAEAICEAASRPSMRFVSPKTEAQQTLSVLHRLRESLVGERTKAVNQMHGFLLEFGVSLPQGLAMMKRLASVLAEHELPVRLTVLLQRLHDHFVYLDEQIKALDKELVCQLADDDLGRRLLGIPCVGPITASLLAVEMGDGQQYGCSRDFAASVGLVPRQYSTGGKANLMGISKRGDKNLRRLLVQCSRVYMQRLEHQKGPLADWVRSLLTRRHSNVVACALANKLARIAWAIAANHTEYEAGPSTMAA

SEQ ID NO: 236598 - protein, 454 aa, unidentified
MSQRKKRTKKFQVKDLPAQLQHVNLNAAGIDVGSDRHFVAVPEGRDEVSVREFGAFTGDLIALADWLAQCGISTVAMEATGVYWIPLFEILERRGFEVKLVDARRVKNVSGRKSDVLDCQWLQQLHTYGLLAGAFRPADQHCILRGYMRQREMLVQASAMHIQHMQKALQQMNLLLHNVVSDITGVTGMKILKAIIAGERDPEVLVAHRDSRCRHSVATIAKSLVGNYREEHLFALSQAVALYETYQAMIEECEAAIARHLSSQPTCTEDAPPESQKRIQTKNYMRAKVDMRAQLFKLSGVDLFSISGLGADTLLTLAGEVGFDMTPWKSEKNFTSWLALCPGTRKSGGKILSSKTRRSSNRAAGAFRMAASTLGRSQTALGAFYRRIRARVGAPEAVTATARKIAVLYYSLLKNGTSYVETGQAAYEQKYQQRRLKGMQKQALALGYQLVPIN

SEQ ID NO: 236599 - protein, 350 aa, unidentified
MTKRSKERIAYVGIDLAKRSFHVYAADAAGRQVLSRKLTRKQLGAWVARLPACTIAMEACGSAHDWARRFRAHGHEVRLIAPQFVKPYVKSNKNDAADAEAICEAVQRPKMRFVAVKSVEQQDIQAIHRMRSLAVDQRTAQVNQVRGLLLEYGIEIAQGRAAVRGRLAEILEDADNGLSALFRAELHGLAEQLRHLDERVAYYDRRIGQLAQDNAQARTLMTVPGIGPMGATALLAAVGEDPRLFKHGRGLAAWLGLVPRQHSTGGRAQLLGISKRGDVYLRNLLIHGARAVLRHVEHKDDAVSRWARALKARRHGNIAAVALANKLARIAYAVLSTGQPYNPQAAASAA

SEQ ID NO: 236600 - protein, 401 aa, unidentified
MKRLSGGIDVGSESHHIIILDEEDNFLYNQKVSHQLSEFTESIKQFKQIEKQEGGKISFALEGKNGYSAPLDKILLNQGFTLYNVDNFKLKRFREAFAGEWRDDQRDSLMLSKMLKLKEHINSPKEKVFIKIEKPSLVTESLKLLSRHQQTLIDERVRLTNRLSKKLLEVCPQILKFGKLKNKKIIAILAKYPDFSKYKRITLCSLLKIRGIGKKGAFFLLKKLNNIEYMPGLTDIYQTIILSYAKRILELQEEIKNIDKKLDEIGEESKEVKHLKTIPGVATKLASRLIGEIGDIERFPSEKQLAVYCGVACVDNNSGKVTKAHAVYKANKICKHTLITMAGGSIRFSFQCRDYYLKKRAEGKSHNHTLRCLARQLIKVIYKMLTEDRDYIVRKELRKVA

SEQ ID NO: 236601 - protein, 453 aa, unidentified
MSSNKRRKLQICHPDAAGIDIGSREHWVAVPEDRDAETVRPFGTFTSDLHRLVDWLATCGVKTVAMESTGVYWVPLYEILEERGFEVLLVNAEHVRNVPGRKSDVKDCGWIQELHTYGLLRASFRPSAEIAVLRAYVRQRQMLVESAARHIQHMQKALMLMNIQVHHVLTDITGTTGMRIVRGLVAGQHDPNELAAYRDARCSASRDEIAAALTGNYKTEHVFALGQALSLYDAYQKHLQECDSRIEQQLAVLAKSTARPDQTLRKLGKGKREGKDAPKFDIRSPLHQITGGIDLTDVPGIASTTALNVIAEVGSDMGRWPTEKHFASWTNLAPGTTKTGGKLKTGRRPRAKNRVGYLLRQAAMSVGRTTSALGAFYRRLAARCGKAKAIVATARKLAVAIYHMLKEGRPFCDIGAGAYEASYRERRVRSLRSQAKALGFELHAAPEAAPAAT

SEQ ID NO: 236602 - protein, 391 aa, unidentified
MIFVGIDVAKDKHDCFILNSEGTVLADVFTIANNRIGFETLLSRIQSCSQGESKIKVGLEATGHYSYNLLGFLLDSGLTTYVINPLHTNLYRKSLSLRRTKTDRIDARTIAMMLMSDVDLKSYSNTAYHNEELKSLTRYRFDKVKERAKLKSSVARLVNILFPELEKLVSSLHIAVVYALLSTYPGASYIANANTEELAETLCTVSKGRYTKSKTAEIQVAAGVSIGSKMPAKSMELKHTIALIRELDKEISEVESAIDKITSQMDSPTFTIPGIGRHMGAMILAEVGDFSNFASADKLLAYAGLSPSSYQSGQLQNCYAHMEKRGSRYLRYALFNAAKYVCLWCPTFSAYLEKKRSEGKHYNVAISHAAKKLVRLIFAMQRSGKAFLADY

SEQ ID NO: 236603 - protein, 374 aa, unidentified
MKKDNTVKTGKKQERTIGMDLGDRSSRYCRLDSRGEVLVERSVATTKKGLRQVFGALARSRVAIEVGTHSPWVSRLLRELGHEVIVANARPSGRPVRFVVTGRRRVRLITQSSRKNDKLDARTLARLARIDPELLSPIRHRSEQAQAHLMVIRARAALVEARTQLVNAGRGLVKSFGERLHSCDADQMRPEVLAAMPEPLRGALEPLLAEVESLTGRIREYDAAIGKIAHTHYPETELLRQVKGVGPLIALTYILTLDDPQRFARSRDVGAYVGLRPRQRESGNSQPQLCISKEGDMYLRKLLVQGAHYILGPFGPDTDLRRWGLRLAERGGKNAKKRARVAVARKLAVLLHRLWVTGEVYAPLGYRQARAAAA

SEQ ID NO: 236604 - protein, 419 aa, unidentified
MDSSKTQKIKRINSRTMIVAVDIGKGFHAGYFRAPNGEERKPFLFFNSAKSFNEFWHSAQEFSRNHDLEEIVVGFESSGPYAEPLFHYLRKKPVTLVQVNPFHTKRVKELTGNSPNKTDRKDPRVIADVISLGHALTLVVPKGPSAHLRRLTQARERVIKRRTAALNQMQDLIFVIFPEFLKIMKGISTKTALYLIKNHPTAESIVALGLESLKTLIRTTSRGKLGPQRGEELFHASQSCVGVQEGKRSILLEIEYLISQISADNRFVASLEKQMEEHLEEIPYSHSILSLKGLGKVTVAGLIGEVGDFREFGTISEITKLAGLDLFEISSGKHRGQRRISKRGRPLMRKLLFYAAINVVKTNGILHKPYQEMLSRGMLKVKGLIAIARKLLRIVFALARDNTVYREDYCRNQHLKLAA

SEQ ID NO: 236605 - protein, 422 aa, unidentified
MLEETNDTEELIQRVAALDIGKAELVCCIRVPGQGKRGRRLQEVKSYPTMTRSLLVLADRLAELGVTRVVMEATSDYWKGPFYLLEAHGFEVWLVNAKDVKHLPGRPKTDRLDAVWLCKVAERQMLRPSFVPPPAIRRLRDLTRYRADLVAVRTAEKQRVEKLLEDAQIKLSVVASDIFGVSGRAMLAALIAGERDPKALAQLARRRLRAKLTQLEEAFTGHFSDHHAFLLQTMLGRIDQASDDIAELDRKIDEAIAPFAPAVDRLDEITGVGRTAAQVIIAEIGVDMRRFPTPGHLVSWAKFAPGVKESAGKTKGKATTGHGNPYLARVLGEAAVVAGRTNTFLGERYRRLARRRGAKRAIVAVGRSILIIVWHLLSDPQVRFHDLGPGFYQTRTDTERRKRNHVRQLEALGYKVTLQPAA

SEQ ID NO: 236606 - protein, 423 aa, unidentified
MNYKQNEKINQVKESTLVVGIDIGSTTQYARAFDWRGIELGKVFPFSNSREGFESFKAWMQHLQDKYKKLDAIVGIEPTGHYWFDLGAYLEDEGILLVMVNPYAVKQTKELDDNSQSKNDRKDPKVIAKLVTEGRYSAPYTPDGVYADLRIMVANRKRLIREMTQIKNRFARWFAIYFPEYTDVFGDYEAQSSMLLLKKVCTPEAIVELGAEKINQIWRDAKLRAVGMKRATTLCETAKRSIGLKKGSSAARYEMKLLLEDYEYKKAQLDAVMEEIEKLCRKIPESEQMLAIKGIGVITVAGFLAEVGDVRRFESPRQIQKLAGLSLRENSSGKHKGQTTISKRGRSKLRAVLFNAAIPLIAKNPEFKSLHEYYTTRANNPLKKKQSVIAISCKLIRVFYAILAKGVTYDAQKLISDIHRQAA

SEQ ID NO: 236607 - protein, 391 aa, unidentified
MVCVGIDVAKDKHDCCILDSDGMVRADCFTIPNNMDGFKQLLQTIRNCTKKSDKIKVGLEATGHYSYNILGFLLDNDLAVYVMNPLHTNLYRKSLSLRKTKTDRVDARTIATMLLSDVDLKSYTDIAYHNEELKSLTRYRFDKVQECAKLKQSVSRLATILFPELEGLVSSIHGTSIYALLSEYPGAKQISEVHLTKLTNLLTTASKGRYGKEKAIQIREAARASIGSVIPAKSLELKHTIKLIQELASEIDEIEDSIQKIIDELNPPILSIPGMGVNSAAVILAEIGDFSNFSSPDKILAYAGCSPSTYQSGKLTNCYAHMEKRGSRYLRYALYNATKYVCHWNPVFAEYLAKKRAEGKHYNVALSHATKKLVRLIYALQKSGKAYLVAA

SEQ ID NO: 236608 - protein, 340 aa, unidentified
MTVIIGIDPHKASHTAVAIGCDERQLAEIRVRATCEQTDRLLAWAEPLGDRTWAVESAGGLGHLLSQQLVGAGERVLDVPATLASRVRVLGTGRSNKNDPNDALSVAIAALRSPGLRSVEPANHREVLRLLAKRNHEIGRLRNIVVSRLHAALANLSPGGISKELNASDAVRLLNDFEPITAVEQTRYDLAHELLDDVERLDVQLKESHRRIKTAVKVSGTTLTELYGVGPILACELIGYTGDVHRFTTRDQFASYAGVAPIELSSGGRIVHRLSRRGNRQLNHAIHMVAICQIRQKDSEGRIYFEKKVAEGKTKREAIRSLKRHVSNAVYRQLLIDAQK

SEQ ID NO: 236609 - protein, 402 aa, unidentified
MDIEDIDVFIGIDVGKSEHWATALSRDGQKVLDRALPNDEERLRALYKKLADHGNLLVVVDQPATIGALAVAVAQDMGTAVGYLPGLSMRRIADLTPGRAKTDAKDAAVIAGAARSMPHTLRAVSTSDEDAAALSMLTGFDLDLARQVNQTANRIRGLYTQIHPALEAVVGPWLEHDAVLEVIAAWPTPADLKRAGKARIDARLKKHGCRRHAAWAGQIVSALEHQTVVVAGTDAAGTVLPHLARQLIALHAQRADIAAQVETLVEAHPLYQVLISMPGIGVRTAAVFLAETLGKTFDTGAQLASYSGLAPVTRRSGSSIRGEHVSHGGNKRLKRAMFLSAFASLRSDPVSQAYYQRKRDQGKRHNQAVLALAHRRILTLHAMIRNGALYDPQPATKLPAAA

SEQ ID NO: 236610 - protein, 426 aa, unidentified
MNCKLNEKINQVEESSLVVGIDIGSTTHYARAFDWRKVELAKVFKFSNTLEGFEALSGWMERIQGTRQKNKIIVGIEPTGHYWFALGQYLQSRGIKLVMVNPYAVKQSKELDDNNQTKNDAKDPSVIAKLVIDGRFSIPYVPKGAYADLRIMFKNRTRIAREIGAIRNHLARWFAIHFPEYKEVFRNYAAESSLQLLKVAATPSSIVALGAEGINKIWREAKIRAVGMKRATTLYEAAKKSIGQTQGTAAAEVEMKLLLEDYEAKMRQYASIMAALEKAVGRIPGAERLLAIKGIGLVTVAGFLAETGDLGRFESPKQIQKLAGLSLRENSSGKHKGETTISRRGRHGLRNVLFNAVIPLLATNNEFRSLHEYYTTRAVNPLRKKQSAIVLCGKLIRIFYVILVKNAVYDGQKMLADIHRNGNQAA

SEQ ID NO: 236611 - protein, 362 aa, unidentified
MTESTPIVAFDQHAATTVAAVLLPGQRTPVLHSLASDNPTILRFVARLRRQGPVQCCYEAGPCGFELQRALTNHGVACEVIAPALIPRRPGDRIKTDRRDAGQLAVLYRAGALTAIHIPSEQEEAARDLLRCREDIRADLLRAKHRLSKFLLRHGRRFTGTKKAWTRRHAAWLQAQRWLLPALEQTHRAYVRAVDEAVGRLKAVDLELRDLLTLEPLRSRVERLRCFRGIDDLTALTIAAELGDARRFPTAPSVMAFTGLVPSEHSSGTKKARGPITKTGNAHLRRVLVEAAWQYRHHPFAGPALHARQRGAPADIIQTAWQAQARLHRRYRRLAARGKPKQLIVTAIARELAGFLWAALTP

SEQ ID NO: 236612 - protein, 391 aa, unidentified
MSMYFIGIDISKYKHDCCIISAANQKVVSKVIIKNNKAGFNELLTIIHSLANPADIRIGFESTAHYALNLELFLENSLLTFMEVNPVLISEYKKSKTLRRTKTDSVDCESIARWLMTVEYKPHSKGFYHAYSLKSLTRLRDKLIRQRSFYLVKITNVLDHTFPEFKPFFNERLSKTALYLLENYGSAEKMARMNSASYEKLRSVSRGKFSPQQFLRLKELASNTVGVNNSIFDVELNSLLSLYKSLVKEIDTIEKEINKLIEEVHPHYMSVPGIGPLSAAVIYSEYGDISNFTNPGQMLAFAGIEPGINESGTESHGGKMVKRGSSQLRYTLINCCLPLIRFDMTFATYYAKKRGEGKPHRVAITHVAKKLIRVIYALESQDIDFNAQELR

SEQ ID NO: 236613 - protein, 443 aa, unidentified
MKQLPILDTRAAFCDVGSQTMHVSIAGGAPRVFGTVTGQLHELRDWLLSENVNSVAMEATGVYWLVLYSILEEAGLEVVMVNGRQTRNLPGRKTDMLDCQWGATLHAHGLLKPGFVPPAHIRRLQDYQRLRTDHIGLAASHVQHMQKALERMNIKLHHVISSLTGASGLAVVRAILDGQRAPEKLLALCHAQIRDNKAEQVTQALRGTWAPEHLFALKQALQSWEHYQGQIVECDQQIQTLLQDITIDDTPDAGMDHKTMTGTGKGRSVNAPQIPGLHQMLVKLCEGKDLTSLPAHTDYSVLQIISEVGTDLSKWHTEKHFTSWMGLSPGSHQSGKRHGSVKRSRNRVGRLFGVMARSLARSKDIALGAFYRRLAARRGGLVANIALARKLAVMFWRVMVKGLDYVENGLAAYEAKMQEAKQRTLRRLAKELGQTVSPIKNAV

SEQ ID NO: 236614 - protein, 461 aa, unidentified
MKKTQSTGPQKGSARAKVDWKALDVVHSEAAGIDVGGSEHWVAISPDRDPEPVRCFGCFTADLREMARWLIDRGVRSVAMQSTGVYWMPVFEVLEQNGLEVYLVNARHTKNLPGRKSDVQECQWLLKLHAFGLLNNSFQPTYEIRIARTLWRHRGNLVAEAGSAIQRMQKALTEMNIQLGNVLTDLSGVSGMKIIGAILEGERDPGALAALARPEVKATPEDIAKSLEGNWREELLFVLKQEVELYRFYQQKIIDCDRQLRQHLESLKSTVDLQAQPLGPKPKGKTRSRNAPQFDLRTELYRITGIDWTQINGMDVLTAQTVIAETGADLSAFPSEKQFTSWLGLCPTNEQSGGKILNRRTRKVVNRATGAFRNAAVTLIRSQSYLGAQYRRLRTRLGAPKAITAMARKLACLFYRLIKRGQQYVDKGTEYYEAKYREQQIRSLAKRAQKLGLQLVIPETA

SEQ ID NO: 236615 - protein, 411 aa, unidentified
MRRIRDRVAGLDVHRDSVVVCAQLFDGGEVHLNKGRFSTTSEGVAELAEWLAEREVTTVAMEATGVYWKPVYYGLEGLFEELWLCNAHHVKNVPGRKTDMADAEWLADVVAHGMVRPSLVPDEPIRELRDLTRYRKTQVDERGREVQRLEKVLQDAGIKLTSVASKVLTQSGRAMIEALISGERDPETLAELAKGKMRPKRPALQKALAGRFREHHATMCRRILEHIDFLDTTITELDQTIVERCRPFEPAIALLVTIVGWQRRTAEVFLAETGADMTRFATAQHLASWTRICPGNRESAGKRRPVTKKPGKTWLGRALLEAAQSAIRSKDSYFAAQYRRIALRRGPNKAAVAVAHSMVVTAWHMLTNGEHFVDPGGDYFQRRRDPERESRRLVHDLEELGYTVTLAPSAA

SEQ ID NO: 236616 - protein, 400 aa, unidentified
MLSIGIDVSKGKSTVCGMKPGGEIVYAPFEVQHTREGMLELVSLLRSSGEEVRAVLESTGSYHCPVVAALLENGIFVSVVNSLRMKRFCSQSIRKVKTDRIDAMQIALYGLAYWQELQPTKLPEDTYRELQLLARQYYQMTSLLIKAKVDFNAICDQVLPGMQELMSDHAGRHKLSDFVLRYHHTTHILEMGETRFRKDYCKWAEKKGYRNCERMAVLIFATAQNGIPVLPNAPSTQIVITEAIRVLHTVEASRDAILTQMQALAKTLPEYSLVREMPCIGDTLAPRLIAEIGDVRRFHSKRALIAYAGIDAPPYQSGKFCANNRHISKRGNRYLRKTGYEVMQSYVMHKPANDPIFMFIEKKRGEGKSGKLAMVAGLNKFLRVYYGKVTELYRSLPAIE

SEQ ID NO: 236617 - protein, 400 aa, unidentified
MERVHERCCALDVHKAQVTACVHVPDQRGVRSELCAEFSTMTADLLGLRDWLLGLGITHVAMEATGVYWKPVYYLLEDDFELSLVNAQHVKNVPGRKTDVQDAQWLCQLLEHGLLRSSFVPPKPIRELRDLTRYRKSLVWERAREANRLQKVLEDANIKLACIASRPLGASGKAMLRELCEGNNDPVALADLAKGKLRAKLPALRQALEGRFREHHALLVSHLLAHIEYLDETIGQLSSEVEERMRPFERQRELLCTIPGVAERTAEVIIAELGPDMDRFPSHRHAASWAAICPGHDESAGKRRSGKTRKGDSWLRTALIEAAQSAAGRTKDTYLHSQYLRVRRRRGHKKAIVAVAHSILVAAYYILRDEVPYQELGGDYFVRREDQERLTQRLVRQLSR

SEQ ID NO: 236618 - protein, 411 aa, unidentified
MEAIVERSCGLDVHQATVVACLLVGAADRKPRKTVRTFGTMTADLAQLRDWLRSEGCTHVGMESTGVYWMPVFAVLEGAFELVVGNAAHMKQVPGRKTDVKDSEWIADLLRHGLIRRSFVPPKELRELRDLLRYRRKLVDSQAAERNRLLRLLETANIKLATVATDVFGKSGRSMLRALIDGTSTPPEMANLAKGRLRKKLAALAPALEGRVEDHHRFLLAMQLERIEEVEATIQKLDERIDERLIPYEEQHKRLKQLPGVDRVVAAVIIAELGVDMSVFPTVRHAAAWAGVSPGNNESAGRRKGQSGRKGNVHLTSALVQAAMSASKTKGTYLKEKYWRLKARRGPGRAALAVGHKILIAAYHMLATKVDYRDLGPAYLDKLSVKATKNALVKRLERLGYNVTLEEVAAV

SEQ ID NO: 236619 - protein, 371 aa, unidentified
MEHTRFVGLDIHKERISITVAESGRCGAVDYLGEIAHDAGAIGKLCERLGRPGKPLAFCYEAGPCGYGVHRQLTNLGHRCDVVAPSLIPTKPGDRVKTDRRDATMLARLYRAGELTPVWVPDADHEAMRDLIRLRGVVRQVVTRARQHLQGFLLRHGRKHGRGTAWRMAYRRWLSTLAFEHPAQQIAFQDYVDAVMDAERRLQRVEEQIFNLLTEWALRPVVDALQAMRGIALINAVVLVAEVGDFTRFTNPRQLMAYFGLVPGERSSGETIRRGGITKTGNTHARRALVEGAWAYRMKARIGRHKVDRIEALPKAVRDIGWKAQVRLCARYRRLSARGKTANVVNVAIAREMVGFIWSIACTIQSAPKAV

SEQ ID NO: 236620 - protein, 321 aa, unidentified
MNKYSKIYGVDISKDVFDVVCSDDAHHQFDNTPKGFSSFLKAIAQGSLVVMEATGYYHYRLAQYLFKHGVVVSVVNPLSVKRFIQMKLAKVKTDKSDARAICEYGRVNDVPCYTALTDVQAECLQLFRLLDSYLKKRTATKNKLHGEETLGIPSKFVHQSLKRDLKHLDKEVKALEERLLLLVKQDQQHQLTLLKGIPGLGTKTALFLIVITDGFDKFETAGQLCSYVGITPTIRQSGSSVRGKSRISKVDNQKLRNLLFLCAFSACKHNKACREIYERIVAKGKSKKLALIAVANKLLKQAFAIAKSGLPYDEKFVSKLN

SEQ ID NO: 236621 - protein, 430 aa, unidentified
MEVIYSRACGVDVHKRFIVAVICFSDSAKPKYIHKRFSTFNNQLIKFRNWLIENDCQNVCMESTGKYYIPVYNALEGFISNVVVANPKWVKAIKGEKDDNKDAKWIADLFKLGLVRSSFIPEKDIRILRELTRYLFKLINTRSSEKNRFQNALTVGNCKVDMVFTDTFGKSASSIVNLILSDDDYTDEDILSKVHGRCKASPEDILSAVDGTNLNRHQKARINIVKKHMEYIDSLLDEIQLHINEMVAGYENYIQLLCTIPGINRKSAIIIISEIGIDMSQWSSHRKLTSWAGLAPGCNESAGKKKSVKISRAGVYLKPCLVQVAHAAVKDKKCEYYADKFNRISKRRGKKRAIIAVARKILIAVYHILKTGEIFNPSDMADIETTQKQRIEYIKNNLKNAYNQLSRTGLSEEEIINILLRKSSDSPHLE

SEQ ID NO: 236622 - protein, 351 aa, unidentified
METKVLIGVDPHKATNALAVLDEHGELLGRTEFPADRKGLEALERWAANFPRRKWAVEGANGLGRTLAHRLASAGENVVDVPPKLSARVRVLSIGHGRKNDELDATFAALAAWRNGRLARVRPDDGIDAIRLLSERREDLVCERTRVLNRLHGLLRDLLPGGVPGMLSANRAARILRRIRPRRNSRSAAEAVRRQLASDLLRDVRNLNKRISELDVRIREEVDGSSTSLTEVFGVGPILAAKIIGLVGDVSRFPSKGHFASYAGVAPVEVSSGEVTRHRLSLAGNRRLNHALHMIALNQVRYKGEGGVYYRKKIAEGKTHREAMRCLKRRVSDAVFKRLQADAAETMPMAI

SEQ ID NO: 236623 - protein, 424 aa, unidentified
MNSNWNEQPYFAALDWAKDHHDVIVVDRVGTIVADFQFAHTAPGWEQFNCQMQPFGKCPLTIETSVGMAVDQLLQRGYPLYPINPLAAKEYRRRKTPSGSKTDRHDAWSLADALRIDGQGWRPLHAQDEATAILRVLCRDEIGLIETRTALVNQLQATLGDYYPLALDSFDDWANPAAWAFVRTFPTPAELAQAGKRKWQNFLHQHKLWRPQTAPQRLELWAQGQQLNASAATVTAKSLLALSLVKVLDTLQRQIQEYRSRITQAFKKHPDHDIFGSLPGAKQTLAPRLLGLIGSRRELFPDPDSLMCQAGVSPVAYQTGKLRKARIRWACDHFLRHTIHLWVDQSRRKCDWAQTYYQAKKDNGHDHASALRCLGKRWLKVLWRMWQDHTPYDEAKHLRALQHHASFVWQALQNTPTIPQPACE

SEQ ID NO: 236624 - protein, 365 aa, unidentified
MQKISTMRTSGRKIFNGQLTIGLDLGDRSSSYCVLDEAGKILLEQKLPTTPEGMKQTFARMPRSRIAMETGTHSPWVSRLLKGLGHEVIVAHAQNVRLIVKSRRKDDRMDARTLARLVRIDPELLSPVQHRSAQAQLHLTEIRARAGLVSARTALVNAARGLVKSHGERLRKCGTQQVSREIAGGLSTGLREALEPLLREVESLNERIREYDRRIERMTKERYPETALLKQVKGVGDLIAATYVLTIEDPHRFRKSRDAGCFVGLQPGRRNSGDSEPQLHISKEGDRYLRTLLVQGAHYILGPFGEDSDLRRWGQKLAARGGKNGKKRAVVAVARKLAVLLHRLWVGGEVYEPLRNSQKMMNAAA

SEQ ID NO: 236625 - protein, 544 aa, unidentified
MFGSENYLALYTESTPHPALRATLSPLRGARALEISRSFSRGSGRRCREDNPRLRLTAVDEESASGSSGADLMRVSKTRRGQTPRWRNERRREDWTRAVIGTTVCCGPEVFSRSSTQSSISLGTAAYAFWALNRKEGVMEVVVEIGAGLDVHKKRIVACCLDGRSTPPKRIRRTFGTFFNQLQSLRDWLVTAGVTDVAMESTGVYWMPVYRVLEGHVRIILGNARLMANVPGRKTDESDAEWIAVLLRHGLIRPSFVPPKAIRELRQLTRCRRKLVQMRTTAQLRVDKLLQMANIKLSSVASDLFGVSCRKMLRALTDGITDPVVLSELSYSTLRNKRPQLIQALTGTLSVEDRQLLKIQLDLVDDLKRELGRVDELIQQKVIPYEAIVQLLDTVPGINRTIAQEILGEIGTDISIWPSQRHFSAWAGVCPGNRESAGVRRRARSREGDRYLKSILAQAATSAAHVRGSYCAARFRSLKFRLGERRAILALAHELALSIYFILLRQQPYREPLAADPRLVRDQRRRSLIKQLQKLGYEVTCSDL

SEQ ID NO: 236626 - protein, 323 aa, unidentified
MSKHSMVCAGIDTGKHKLDVALDGRSDQLAVDNTADGHKTLSAWLRQHQVKRVGIEASGGYEQAVVLQLRQDGFLVIVFQPAQVRAYAMFHLQLAKNDKIDAALIATCAAATRKIHAPPDPRLAPYAEHLTLIDQITEDIAHLKTRRASCRNARVRGVWNDEIRRLKQLRNAELKALVKAIRQHPDLAKRLDLIESVDGVGLSTAVAILVRMPEIGRVTREEVAALAGLAPYDNDSCSQIGARHIKGGRKRLRGSLYCAALPASFRWNAQLIALYQRLMARGKSHKTALIACARKLLTFVNTVVARGEPWTQKPIRLVHVKAT

SEQ ID NO: 236627 - protein, 331 aa, unidentified
MHFSQFIGVDISKDTLDAAIYPAKDKKMDFLHFDNTTRGLNEMLKWLKSRGIKPSEMVICAEHTGVYTNPLIDFTEKKGLSLSLNSPLDIKHSMGITRGKNDAIDAGRIAEYAHDHKDKLRLYQKPSEAIVKLKYLLTERYQYVRQRTAMLSFNKIMGKYETPEARSRNGSDIHHCETLILKVERQMLDIIIENPELKRNYDLVSSVKGVGLINAINIVVFTNNFKSFETPRQYACYIGVAPFGYTSGTSVKGKTQVSKICRTRQKAELSMAARSAIIYDPGLKRYYQRKMKEKGEGKDAHGVVLNAVKFKLILRMFAVVKSGQPYKILNY

SEQ ID NO: 236628 - protein, 411 aa, unidentified
MEAAVITAVGIDVSKSKSTVAVRRPGGEIALRPFEVHHTNSDLKKLASTLKKLGGDIRIVMEHTSTYWRPIALTLKEAGFFVSVVNALLIHDFSDNTIRKLKTDRADALKIANYALTFWDTLPPFNNEEETRLLLKMQSRANERITATATALRNGLIALADQTFPGVNIAFDPNTKNANGHEKWVDFFLRYWHKDCVCQYSMEAFTESYRGWCKRKNYKFRTDTAHKIYLLAQEGVATFPKCESTKMLITQACKSLNAVCEAKQSTQLEMQRLAAMLPEYEVVMQMEGAGPITGPALMAEIGDVRRFKNKKALVAFSGIDAPPFQSGAFESKSRHVSKRGSPHLRRTIFIVSNIILTRSNPENAVYCFMDKKRSEGKHYYVYTVAGSAKFLRVYYARVTEFLRSQPSPDAC

SEQ ID NO: 236629 - protein, 318 aa, unidentified
MNDFDFIGVDIAKDKFDVCLLSKSKTKTAIFENNKVGFKRFVTWAKMHAKTLWVCMEATGIYGEKLAEYLTDETIKVSVVNPMRIKHYGKALLTRNKNDVVDAKIIALYAQAMKPDEFTPRDAKQKEVKETVQLLDVLRMQRQQAKNQLESASCKSVKAELKKLIRSLDARIAAIEKKLKSKTEQNSELASMKKALMSIKGIGELTAHALIAHLPDIKLFNNAKQLAAYAGLSPRQHQSGTFAGRTKLSKIGNAKLRRALYMPALVAKNSNPYLKPFCQRLQSNGLKPKAIICAVMRKLLHIIFGMLKNKQEFNPALV

SEQ ID NO: 236630 - protein, 342 aa, unidentified
MDYYAGIDVSLKSSSTAVVNAQGEIVREAKVASDPISLIEWFRSCGLPMTRIGLEAGPWSQWLYAALKKAGFAVELLETRHVRNAFKTMAVKTDRKDARGIAELVRVGWYRPVHCKSLDAQETRVMLAARKLVDTKLGDVEMTLRGLLRNFGLKVGKTTPTRFADRIKELVSGHATLQIIAESLLAVHQVLLRELKSLEKRVRRIARDSADARLLMTATGVGPIIALTYAAGVDDPTRFKKSKTVGSYFGLAQKKYQSGETDITGRISKAGDASVRTALYQAAHIMLTRPVKASKLRTWALRLAKRVGMKKAKVALARKLAVVMHRMLVDGKPFNPALGAAA

SEQ ID NO: 236631 - protein, 425 aa, unidentified
MSVMVQVETTNQKKEGNKMISIGIDIAKEKFTVCALEQGSKIIWKPFDVHLNKTKVEEFLKKLDTLNEEVKIIMEATGKYHLPILYELKDKEYFVSVVNPLKMKQFCRVLNFRKAKNDNIDAIQIAEYGLMYWKELQEYKVDSESFRILKELNRSYQHYMDLRINQMNFIDQTISQTFPGIKKLIPHASGDFSKDKLLDFLEIWWHKDLVLEKPEEKFIEDFKNWAKEKRYHPNADKAKSIYKLAEESISIQPSNSSYIKTSIQEGIELIKHINQILHTVLSQMIEISEPLEEYQEAKKFSGISDKLAVQITAEFGDLSKFKNKKSLISFVGIDSPPYESGNFKADQRKITKRGNAILRKVGYQAMKCMMSAKDTENDIYLYMVKKEKDGKAKKICKFAGLNKFLRTYYAKVMASKQEKKLLKVA

SEQ ID NO: 236632 - protein, 476 aa, unidentified
MTTLRDNVTRVKRFRDLKATLRTDRTRLLVGLDIAQAEHVVHLRHAHTRVVTSALTIPNTTRGFTQLWARIQQAQRTTGCREVVCGLEPTGTYHQAVATFLEAQGADVVLLSSSVAYWNRRTQDGTWDKHDRKDAANCADLLEQGKVLFYSQPTGPLAELRHLVRCLRRARGELAACKARWRTTLRPALAPMGEPLPSRLWAEIPPGLQGWERVAPGRPAVPKGRLPLGLATACADLGAQVTAVQTRIAVLEAACTPVAERLPAYALLRTIPGIGPTVGAILLAEIGDIAWFTKFSQLRKLAGLDIVRVQSGQFAGQARISKCGRGLLRWALYHAAMGLARTATGRARLAALKAKRQGDRYAGFKAIVEVAAKQLRVVWGVWRSGVPYDPRRAGRSGSAADESRYHHTDIFPGESAARDCNVAAPHGDRGGTAARRSHSQEPGQSRVGRSRQRAGRMDPLRWGTRDHRGSGLGDGR

SEQ ID NO: 236633 - protein, 405 aa, unidentified
MPYILALDVSIGHSYSVLYKDDTCLFEDEIEHTQRGFHALLEEIQHLPERPLIVFEATGIYSRPVEKFFQDHHFSYCLLNPLEAKKQMEENTLRSWKTDKSDAHRLAQTHLKNQRQPKEVQSNFYLEMRDLARFYQEIEKKITRLRMDLHNCLQLTFPELEQFFSNRLTPYALTLIRLFPHPDFVLASTRTKIKNKLINETRKKISANRAEQKADQIIHYAQCAYPAVEKDSIHCQKTIYYAELLQDLLEQKEALATQMIKKAEGSPCFLLYQTFPGIGALTAALLLGELGDITRFKTHKQLNAFVGIDIRRYQSGKYTGQDRINKRGNPKARKIIFFTIRNMIRQQRAAPNHIVDYYYKLKKQPIPKKEKVATVACMNKLLKCMHAMVRAHTEYDYAYAVSVDH

SEQ ID NO: 236634 - protein, 348 aa, unidentified
MESVAGLDVGVKKSALCVVRRDASSVRLLGRHRTATDPSSIGNWLAAQGVVRVGLEAGAQSSWLARALEHRGFEVTVMEARRQRAFGAYSKVKTDERDARLIGEALATGLYTRVHVRSVWSQEVRALLGARLQLKRQIQQSRQFVRGHLRAAGVELGRVSGKKWLLAAEAAVAARGGILGLSLTAMLEACHALGERVSVLDKEIRRLVRQDAPCRRMMTAPGVGLLSALALRASLDDAARFARSAEVGPYLGLTPSRWQTGATDRRGAITKQGDSLVRAYLYEAATSLLERQKRDCPLRRWGLAQQDRLGKRRTRVAVARKLAVLMHKLWSSGETFDWNRGMEAKKIN

SEQ ID NO: 236635 - protein, 338 aa, unidentified
MKYSGIDLHSNNCVVVVSDECDRILVSRRVPNSLASVLQALEPQREDLVGVVVEATYNWYWLVDGLQAAGYRVHLANPAAIKRYEGLKRTGDEADAAYLAHLLRLGLLAQSYICPKPLRAMRDLSRKRMQLVRSCTQHILAVESIQARESGWRMNVKQVKQLDAQDVEAMAELLPEVKLALQANVAVIAELGKQIDKLERCLHQRVRLSEEFRLLKSAPGIGQTLATTIMLETGSVARFAQVGNFSSYCRCVDSERVSNGKKKGAGNVKNGNAYLAWAFIEAANFARRYCPEAKRFYERKKARTNNIVATKALAHKLARACYHMLREQKPFEVKRCFG

SEQ ID NO: 236636 - protein, 381 aa, unidentified
MLASTPASILMGWTAPDPAASQCAKMALSKDHQREGTVRMQVITIGLDIAKNVFQVHGVDNAGNAVLRRKVRRDQLIPLLRDMQPCLIGMEACATAHHWARELIALGHVVKLMPPAYVKAYVKRNKNDAADAEAICEAVTRPTMRFVAVKSADAQSILMLHRARHLLVRQRTAQISAMRAHLAEYGVVAPKGRAHVRGLIEALDKGDGPLPAMARQVLILLARTIEGLGAQIRKIEIELLAWYRTNQVCRRLSTIPGIGFITATALAATVVDAKVFRSGRQFAAWLGLVPKQHSSGGKDRMGGISKMGDRYLRHLLVVGATAVIRYTRRKATTVSTWANQLLERKPARLVTVAVANKVARIAWAVMAREENYRATPSMARG

SEQ ID NO: 236637 - protein, 578 aa, unidentified
MPTPLPVAPAVSVGVGFDTSRYGHHVTFLREDLQPACPPCEFAESRQGYERLLRLFDNVQQGLAAVHFHIRIDAAGQYATNLETFLHALPFPKTISVGEPARNQSYRKALFPKRKADPVESLCAARFALLEKPKPSPATAAPFHQLREVVQRLEGQCRQSTRLTNQLHNLLARVFPELGLVVADFQAHWVLQLLHRYPTPAQLARARLSSLTALPHLSEDKARQLQAVAADTVASFRGEVAEALVQQLVGQLRDSLAAEAKLHELMTTAYQALPAPNHISSIPGIGAATAAVLTAKMVHCDRFATPDHVVAYFGIFPEENASGIDREGHAKPGRHTHMSRKGNDLVRKYLWNAAKAAIRFNPAARALYKRLRARGTRGDVALGHCMRKLLHLVFAVWKTGKPFDPGHYPWEAGKAASPQANEKAAGHNQGGSPESSVVTAAAAKVTGQAAPDKAAVPAPSPAVTPETGGIDYAALRDQISMEQVLAQLGCLTRLKGSGAQRRGPCPIHGTTDTRHRCFSVNLGKKVFHCFHPGCGAHGNVLDLWAAARHLPLYEAARDLAATFQVPLVFLSGTGKRNP

SEQ ID NO: 236638 - protein, 350 aa, unidentified
MLIIGCDFHTRFQQIAMLDPQTGEVIERRLEHENGEARRFYAGLPTPARVGMEATGYAQWFERMLAEQGHQLWVGDAAEIRAAMVRKQKTDSRDACHILDLLLKDKFPRIWIPSSEERDVRQLLRHRYKLVCLRTSLKNQLHAMAMGHGICRKKKLWTAVGRKELQGLSLGPWASRRRQQLLDMLDQLEPVMDELDRAVTQEVEKRPAAVRLMTQPGVGPVTALAFVLTIGPVSRFQRSKQVVSYLGFNPREESSGGRQRLGSISKQGNTMLRYLLVEAAQTASIYDPELRRDYQRLKFRRGRGVAKVAIARKLAVRLYWKLREAAQPVPPAPLQGSPASPVVGESLSSS

SEQ ID NO: 236639 - protein, 353 aa, unidentified
MRYVGIDVHKNFCRFAMMDDSGNIVAEDRFPNTDEGIESFISRLEGFGAKVVIESTGNLWMKLYDVIEGRGLEAVLSNPYKTRLIAEARIKTDKLDARILAHLLRADLIPRCYVPSKEVREVRGLVRHRAKLSKTRTEIKNRIHALLDKHRLKAPCGELFSKEGLKWLKSLKLPSIDSAVLKSDLGVLKALDEQIGYVESKIASVAVKDPNVGLLITMPGIDFYSAMVLSSEMGSVERFSTDKKLVSWAGMAPSLRQSGDVLRVGRITKEGNKMVRWIMVQAALNAIRSDARLRAFYERYRLRKGHQNAIVAAAHEMLRIVWFMLKRKEPYRGENKRLSLRKHNRMCRLAMDG

SEQ ID NO: 236640 - protein, 338 aa, unidentified
MNNGLKLLGIDIGKNSFHLIGHDAGGHQVLRKCFNRNRLLQFAAQIEPCTIAMESCGGSHWLARKLASLGHRVKLIAPQHVKPYVTGNKNDFIDAEAICEAASRPRTHYVAAKTVEQQVLSVQHRLHESLVCHRTEAINRVHGFLLEFGIALPATKAAIAKVPELIDNSRSDLPLQLKRIMEHLLEDIRRLDAEIKACDVQIKQQLAQDDAGTRLMTIPGIGPITASALVADLGDASNFKTSRDLSAFLGLVPRQFSTGGRPVLLVISKRGDRRMRTLLVQGSRALMIRIDRREDALGQWVRNLLARKHPNKVACALANKLARIVWAVLRRGGTYNAS

SEQ ID NO: 236641 - protein, 361 aa, unidentified
MRIIGCDLHARQQTLAMLDSTTGEVVSRTLIHEGSEVREFYSRLPLPALVGIEATGSMHWFLNLMEELGIECRVGHPAKIRAAEPRKQKNDRRDAELILRLLAENRFPAIWLPAKELLDLRSLLLHRHQWVRMRTRVQNALQAIALANGLRRGSGLWSHDGQNKIALLPLWPHTAHRRNALQAMYQKMESEIERLTQQVAEQADHRCRARLLMTHPGVGPVTALATDVFLGDAKRFVDGKALASYVGLIPGEHSSGRRQRLGKVTKQGSPLLRFLWGEAGAHAVRRDPELKRFYRRKLVHKGLGKARVAVARKLGIRLWIMLRDEIDYQEFCRRGQKQQSGAACAGMPETANGANSHRPVD

SEQ ID NO: 236642 - protein, 408 aa, unidentified
MEVLHARCAGLDVHQATVVACVRRATRKAVRRETREFGTCTRELLALGEWLRTHEVTHVVMESTGVYWKPVWHVLAGSFELVLANATAVRTVPGRKSDVSDAAWLADLLAHGLVRPSFVPDAPTQELRGLTRTRTQLVREHTRHAQRVHKVLEDANLKLATVLSDVFGSAGRAVLAALVEGETDPARLAALVTTRVKAPPAALAEALRGTVTDYHRFELRLHLALMTQLDRAIAEVEERITHALAPFRLVVERLTTIPGISTTTAHILLAEIGRDMTRFATAGHLVSWAGLCPRLDESAGKRRSVRVRKGGRWLKTALVQAAWAAIKVRDSYVQAQYVRLKGRRGPKKAIIAVAASLLVAAYHMLRDATDYRDLGGHYFDRRDKRRVAARLVRRLTQLGYAVELRPAA

SEQ ID NO: 236643 - protein, 352 aa, unidentified
MDEKYVAMDVHKASVVIGVRNAAGKMISRATVETKAQTLKDYVRGLSGTIHLTFEEGTQSAWLYDLLRPLVAECIVCDPRRNKLLEDGNKSDEIDVDKLSELLYLGRLRPVYHGNHGTRALKELAHNYEALVKDQTRVKNRLKAIFRGRGISYEGEGIYDCQQTEPWLAKLSERGVRERARQLYQQLDQLAGWVATARRQMLAESRRHQAKKILQLIPTLGEISVAELIATVDTPHRFRSKRQFWTYCGLAVVRHTSADYHFEQGELRRRAKAGPSRGLHRNYNRRLKRIFKSAALTGSTKGPFKSYYQGLLGRGLSSELAQVTLARKIAAITLTLWKKGERFDPEKLVKPD

SEQ ID NO: 236644 - protein, 351 aa, unidentified
MNGGGIPRNYTIGIDLGKTVFHRVGLNLRGEIVARKKFSRKQRLHFTANLKVEWIGMEACGGAHFLGRALREQGHEVRLMPAQYVKPYVKTNNSDSIDAQAIAEAVGRPKMRFVPIKSADQLDLQSLHRVRERWVMRRTAVINQIRGLRLERGITLRKGRCHVDAALPGILEAASAKLSGALRVLLAQLKLELDHLQMRIDEADAVIKKTAGENEACRRLLAIPGIGPVTATAIIAAIGNGAAFKKGREFAAWLGIAPGEYTTGGKQKLLGISKRGNSYLQRLFVQGARAVLQPSAEQSSGLSAGLAQLTARTHRNVAAVALANKLARMAWAVLAKNEPYRPPMLAGAATA

SEQ ID NO: 236645 - protein, 385 aa, unidentified
MESTPGDTLLVEVTYDYMKALPHLLHYMWSSRMSYIIGCDAHKHYSQFAVYEGDQTRGKQVRVEHERGAIREFLSEFPEGTRVALESIGNWYWIVDEMEQAGCKPLLAHPAKAKAMMGNVNKTDKLDARGLAMLLRNGTLPTVWIAPSQVRDERELPRTRMALCKIRVALKNRIHASLSKYNLSVPTESDIFAPKWNSQLNQVIEQLPAETQKCLQQELELLDKVQGQIDAMEDRMKVCISLTPSMQLLKTVPGVGDILAIVIGTEIGLIERFSSAEQLASYAGTVPAVKSSGGKVRYGHTPKESNHYLKWAFVEAANGPAQYAKKPHWQHRHVTRLYERVKLRKGHSVAVGAVARHLAEATFWILNKNEPYREPTHQKVLPKQA

SEQ ID NO: 236646 - protein, 446 aa, unidentified
MSAVVGIDVGAYKHAAAVCRSGEREAERGVFRLSADRAGFDELDRWLERQGPVERVVLESSGHYYWPLASHLHRHGYGVAVVNPLQVKYFAKSRLQRSKSDPADARTLAAMGMSEEPRVKDPLLGAEAKEAARFWGGLVKEQAQVRQKLLRLVEIGFPELKECFEDPLCETALAVLREAPTARVASRKRVSTLADTTRPGDRRRLGENKARRLHELAERTVAPPELDAQMSFEVGMLIQQFDLLDKQIEIAEQRVAEVLDSELARRLQTIPGVGPALAASFIAEIGDIWRFDDFDQLASYAGVHPKELSSGTKGQNPETSWRMAKTGNAYLRSAALTVASCGDTLTEIRYTTLKDATTRLLQPPVFVSVSESVWEKGLPYTCKSVFCSYFSVFPDSVKVTLNACVRSFVTMYWVSATPSLWVLSVIVVPGAPSATTQTPRGMQNVS

SEQ ID NO: 236647 - protein, 399 aa, unidentified
MSRIWAGIDVGKGHHHGVALDVDGKTLLSRRVANDEPELLKLVGDVLDLADGREVTWAIDMTGGEPALLLALLVSHGQEVLYMPGRLVNRASDGYRGEGKTDARDAYVIADQARMRRDLRPIRPGDEAAIELKLLTGRRSDLVEDRTRAVNRLRGTLLSMFPALERALDVTNTGPLKLLTGYQTPAAIRRAGVARLTKWLANRKVRSARDLAEAAVEAAARQHTAVPGEKTIAKLVHTLAEEVMALNAHISEMDKLIEGRFREHELADIIVLSVPGIGATLGAEFLAAVGGDLDEFDSPDALAAFAGVAPAPRDSGKVSGNLHRPATYHRRLQRVFYTSALVSVRYDPNSRQFYDRKRAEGKRHVQAVLALARRRVNVIWALIRDRRCYEVTPPMDTAA

SEQ ID NO: 236648 - protein, 391 aa, unidentified
MVCVGIDVAKDKHDCCILGSDGTVRADCFTIPNNSDGFKRLLQTIQDCTQKSDKIKVGLEATGHYSYNILGFLLDNGLPTYVINPLHTNLYRKSLSLRKTKTDRVDARTIATMLLSDVDLKSYTDTAYHNEELKSLTRYRFDKVRERAKLKQSVSRLVTILFPELEKLVPSLHIASVYALLSEYPGAKQISEIHLTKLTNLLATASKGRYGKDKAIQIRDAARTSIGSVMPAKFLELKHTIKLIRELTSEIDEIEVSIQKIMDELNPPILSIPGVGIQSAAMILAEIGDFSNFESPDKILAYAGCSPSTYQSGKLTNCYAHMEKRGSRYLRYALYNATKYVCHWNPVFAEYLAKKRAEGKHYNVALSHATKKLVRLIYALQKSGKAYLVAA

SEQ ID NO: 236649 - protein, 339 aa, unidentified
MWYSGIDQHKRDSYLTTYGADGPAVKHARVPNTPLQLQRYFAQFPGPHQAVVESTGAWYWLADTLAALGVALVLAHATRLTAIAAAKVKTDQVDSDTLALLLRADLIPAAHMIRPEQRGPRDLMRTRLRLVEKCVSAQNSIGRLLEKFNVDTVGALAGCYQLQAACHTAQIQLLTEQIATLERALYPFLIPTADVQRLLWIPGLGKVNAFTIYTEVDGITRFPSARQFLSYCRLVPGAANSGGHTRHRSGSKAGNRYLKLAFSHAGIRAVQYNPEIRAFFKAKARKKPIRVARTLVALELARIVYHVLSTREDFNGQFKGKPLSHRKHATWPRRASPPA

SEQ ID NO: 236650 - protein, 344 aa, unidentified
MENYAGIDVSLELSSVCVVDAQGKILKEAKIASEPDALVDFFERLGFAVKRIGLEAGPLSQWLHAGLKGAGLEAVLLETRHVKAALSAMTVKTDRKDARGIAQLIRMGWFQPVHAKSVGAQEIRALLIARKQLLGRLIDVELSIRGILRGFGLKVGPVTRRSFEARILELVAGQATLERIASAMLSARSALRAEYGRLHKAVLAIVRDDAVCRRLMTVPGVGPLVAVTYKSAIDDPHRIVKSKAAGALFGLTPKKYQSGEKDVTGGITLAGDETVRTALYEAANVLLSRITRFSKLKRWGMDVAKRRGSKRAKVALARKLAVILHRIWIDGTTYRWTDAGSIAA

SEQ ID NO: 236651 - protein, 330 aa, unidentified
MTHYVGIDVSKAKLDVAWLKDIDKVKVKTKVFANEAADFNKLIDWLKANINPNLTDIHVTLEATGIYHENIAYYLHEQGLNVSIINPAFVRSYADSLGSRHKTDKKDSILLARYAYTAKPDLWTPPPAEARHLKSLLSRLDALQEDLQRELNRQEKADATDTAPIVKASIEQMINALKIAIAKLNDDINDHIDKHPNLKQDQQLLESIKGVGPVVSKQMVSLMHNKHFTKASQVAAFLGLVPKHVESGQFKGKSRLAKNGSSDIRAKLFMAAIVSKQWNPDIKAQYDRLLARGKCKMQAICAAMRKLVHICFGVIKHQMPYQPQVTQIAT

SEQ ID NO: 236652 - protein, 319 aa, unidentified
MAEEVYVGIDVSKAELVVAARPGGERMTLTNDRAGIKRLVGRLGELKPRLVVVEATGGLQRQVVAALWTAGIAVAAVNPSWVRNFAKGRGLRAKTDRKDAELLALYAERERPQVRPPADAETQALQELVMRREQLVEMLVAEEHRLTHALGPVRKELRHHISYLEGRLKQIAEDIDKTVRRSAGWRRKSEIVRSVPGFGKVFCSMVLAKVPELGALNRKQIGALVGVAPVPDDSGTRHGRRAIAGGRFEVRNKLYMCALVASRANPVLKEFYQRLVARGKPKKLALVAVMRKLIVTLNAMLKTNRMWRPPCLAVSVREN

SEQ ID NO: 236653 - protein, 352 aa, unidentified
MITIGVDAHKRVHVAVAVDDAGREVARWSGPNSPTGWRQLGVWGTTLGPECRWGIEGAWNYGRGLAQDLIVAGATVYAVNPRWTAQQRQRARKPGKNDRLDARAVAVLVWREAATLPAVTPDDETVVLDVLVTERDGAVAEATRLRNQVHQLPLQRDPEYHTHLPSLRTSAGVAAAARYTATAPGPLAQHRAGAVRRLAERLQLALAQPKALAAQIAGLAAERFAPLTPICGVRLRTAGALAGILGPGRRFATDAQRAAYAGVAPLEASSAERVRHRLSRGGNRRLNAILYRIVLTQSRHAPAAQAYLARRVSEGKTRREAVRALKRFVVRAIWRRWQECLAPFTTLAQLAA

SEQ ID NO: 236654 - protein, 429 aa, unidentified
MPMIQSTQSPTVLVAIDIAKLRHEVLVEAPGWKSRKRLTLLNTAIEFRRFADYLNSLQLPVRVAFEATGNYHRPLAHFLRTQGFDLVLIPSLAVARTREAMHNSWDKNDPKDAQVLLHLLKTGVTQRYHDPLANQVQDLQELSLTHAQVSLEKTRTQHRLLTHYLPLYFPEIERYYYSSRSEWLLDLLHAFPTPASITRLNTEEFVKKAWPIVGRKVAKQRLLEEIYGTAQSSIGLPVTEDSEAVAMFRLVLSEMKHLCQLRHQLEERAALHLQDNADFQRLQKVPGIGPILALTILAEAGDLRRFQHHRQFLKFCGLDLSTQQSGQFRGLTRLSKYGNARLRCAFWMAATIAVRQTENSFRDKFERYLRKNPASADRKRMAYVAVAAKMARVTYGIIKSGTEYRRFHEAAAPSGRADSARAVEADRTS

SEQ ID NO: 236655 - protein, 338 aa, unidentified
MIVIGVDVHKHSLTAVAVDELGRAVAERTSAVTAEPLVEWARALEAERLWALEDCRHVTRGLERALLAAGERLVRVPPRLTAPQRRRGRTRGKSDAIDALAIARAALQQPDLDRPRAGEETLRELKLLVDHRDDLVAERRRCQQRLRWHLHELEPSLAVPLGALDRSIWLERLGRRLARREQTTQVRIARDLLGRCRNLTRSVLELERELQARTCAIAPALLQLPGCGALSAAKLLSEIGPIERFGSDAQLARHAGVAPLEASSGKQRRHRLDRGGNRQLNCALHRIAVTQGRVHAPARAYLERKQNEGKSRREAIRCLKRQLARTVYNTLKAESALT

SEQ ID NO: 236656 - protein, 366 aa, unidentified
MKKTSTVGVKGNVIFKGHKLTIGLDLGDRWSCYCVLDEAGEILLEQKVATTPEAMKQIFEKIPRGLIALETGTHSPWVSRLLRELGHKVIVAHAQKVQLISKSKRKDDRHDARTLARLARIDPELLGPVRHRSAQAQIHLTVIRARAELVRARTCLVNAARGLVKSYGQRLPKCGTQQVSRELAAGLKAELREVLEPLLQEVESLNERIQEYDARMEKIAQESYPHVELLKQVKGVGTQIALTYVLTLEDPHRFAKSREVGCFLGLRPGRRNSGESQPQMHISKEGDRYLRTMLVQGAHYILGPFGADSDLRRWGLKLAARGGKNAKKRAVVAVARKLAVLLHRLWVTGEVYEPLHNSHKEMRAVA

SEQ ID NO: 236657 - protein, 322 aa, unidentified
MNYVGIDISKTSFDVAIEKNNRYYYYKFSNDRAGFKELLKTINEEDSWCVMEASGPYYLKLAWYLREHSIAVSVINPLVIRRFCQMRLIRAKTDKKDAAMIAEYGKTEKPEPWKEEDAYVMELKQMQAYVDILEKTRTGLINQLEAFDQSPVPSVTVRKGLVKMIGQAEKQMKETEKQMDAIVTKYHGEMMEQVKSVPGIGKKTGLLLVVVSGGFSKFENAKQLSSYLGLSPRIYLSGTSVKGKARICKMGMSRVRAMLYVCSWSAIKCNKACKELYERLVAKGKSKRLALIAVANKLLKQVFAVATKGIMYDENYLQKTCF

SEQ ID NO: 236658 - protein, 409 aa, unidentified
MHMQILHERCCGLDVHKKSITACIITPEGKKIRTFGTMTADILELVDWIKQNKCSCVAMESTGVYWKPIYNLLEVEQIETLVVNARHIKAVPGRKTDVKDAEWIAELLQYGLLKGSYIPSREQRELQELIRYRRSLIDERSREVNRLQKILEGANIKLSSVATDILGKSGRKMLEQIINSDKPDPKIIAQSAKGKLRNKIPLLEKALHGLIGHHQKMILSVQLRHIDFLDQQIEELNLEIERRMRPFEDCLELLDTIPGVGRRIAEQIIAEIGVDMSRFPSSKHLASWAGIAPGNNESAGKRKSGRTTKGNKHLRSTLVEAARSASRTKNTYLSAQYRRLAARRGSNRACIAVAHTILTIVYHILKKKQPYQELGADYFEKRKESKIVNNLIRKLERLGYSISIKKKSA

SEQ ID NO: 236659 - protein, 385 aa, unidentified
MSICSVIFWVGLDVHKDSITAAVFRGRDPEPLRVDRIPNDPKRIRRYFERLQRDGEARACYEASGAGYVLQRMLLEWGISCELAAPSLIPRRPGERRKTDRRDAIKIARDFRDDRLVLIHIPTEEEERVRDLVRCRETFQREILKSRHYILKFLRRRGFIYREGTHWTTRHMNWIRQVLKPGELAEEDRVVLGEYLALLEYKLQRRDDLDRRIEALALTPRYKPVVDRICCFRGFKTQAAMVLAAELGDLRRFESPRQLMAYLGLVPSEHSSGERRRLGGITKAGNTRVRHVLVQAAWHYRRRPTVGTALRRRQQDQDPAVIAHAWKCQHRLYKLYHRLAARKPKQVAATAVAREMVGFLWAVLHDLDINQLQLESPNPEVSRAA

SEQ ID NO: 236660 - protein, 482 aa, unidentified
MKKRTIYTNQSQELLRLFEQVGNSAKVMCVPIDYAKKDHVVMFCNGDGDIVRKPFSVKNSAEGLKYLIDQVTRSCRHRRIRKEHVFFGGEDANSYAENFANALRSKGWLVAHVNAHDAKKQRQNLQASTDRLDLMGIATMLLNRRANCSPAQTGIYRNLRTLVRHRKKLVVMKTEVRNRVHAVVDRLFPGFLSEKKTSITPFSNSSLYLMENSFSAQQIRRRKHSTLVNILKRYGTAAPEGAAAKLRTYAAQVLTTQNQYAATLQLSLAHHIKLYRCLLDNTEQLEKEIALPLAQSQGAFLTSIKGIGIVLAAGVTAEIGSPFEQKPLNNLTSYSGIIPRVKQSGGPNAQAHTGRVSKRSNHLLKDSVVQSAFHIGHFGPKELSLDYKRRKAAGQHADFGMGRRFLRMAMSLMKTSQIYLPPPLRNEQLRAQERAGYYLAVWPQLRDKWNKVDALKVAFAKHNPLGQWRHIVQELYGIKLKL

SEQ ID NO: 236661 - protein, 331 aa, unidentified
MNYSHFVGLDVGKKTFDASLMSADEKELSHKSFDNTPTGIQSLLDWIAGYHLSLSKLLFCAENMGSYVTELSVSSVSMGFSLALVCPLTIKKSIGLQRGKNDRIDAKRIANYAVLHYRKLELYKLPDKDLVRLRGWIIIRDNLVKQKVSSIKLLETFSWMAKLADVTESISFLEQQLKSIKERILEVEEDMEQLIAASTSLYTNYLLLRSIKGIGIINAIVLLCVTDNFQRFDNPRKFACYCGVAPFEHTSGISIRGKTQTSSLANKEVKVYLTRAAITAISWDPQMKAYYKRKIAEGKHKASVINAVRAKIIARSFAVIRRQTPFVTLAV

SEQ ID NO: 236662 - protein, 396 aa, unidentified
MWTLGIDVAKRRHHATLLDEDGKVVFRNRAFAHSREGVGGLLERLAETGQSPKGIRIGMEATGHYWMVLFQELTKAGYAVVVINPIVTAARRNVTIRGSKTDSVDSVLIAKVLREESPKVSAIPEQDVAALRNLTRLRFECAQAATAEKQRLVALLDLVFPEYAEHFSDLFGATSREVLASFPTAQDLAKVDIRRLTRALREASRGRLGRDHAERLKAAARNSFAFTSNHEAFALEVRFLVERINLLIDQIAQLDRRLGALLPDDQELLRTVPGLGPVWAPTVLAEVLPVFHPELQHGAKKFVAAAGLDVRLHESGESKGKGRMSKRGSKYLRTAAIEAAQVAVFTKKDPLFRAVYNRHTERGKHHLVALSHVAHKLLHVVFSVLKNRQPYRPVLT

SEQ ID NO: 236663 - protein, 341 aa, unidentified
MDHFAGLDVSVKDTSVCIVDGAGKIVREVKVASEPDALLRLLTAPAYRFKRIGLEAGPLSQWLFSALGEANLPVICVETRHMRAVLKAQINKTDRNDARGIAQMMRVGLYRPVHVKTLRSQKLRMLLTHRKLLQSKAIAIENDLRGTLRNFGLKVGTAGRTRFETRIKELVEDLPDLAVLVEPLLVVRRVLREQIAVLHRRLLTIVRDDEVCRRLMTTPGVGPVVALTYRATVDVPARFRKSKSVGAVFGLTCSRNQSGERDRPGAISRCGDEMMRTMLYEAAQSMLRSTRWSWLKAWAMQIAKRRGIKRAIVALARRLAVIMHRIWVDGTEFRWTREVTA

SEQ ID NO: 236664 - protein, 422 aa, unidentified
MLEETQETEEIIQRVAALDIGKAELTCCVRVPSPDAPGKRLQEVRAYQTMTRWLLVMADRLAELGVTRVVMEATSDYWRGAFYLLEAHGFETWLVNARDVKHLPGRPKTDTLDAVWLCKLAERQMLRPSFVPPPAIRQLRDVARYRADLVAVRTAEKQRVEKLLEDAQIKLSVVASDIFGVSGRAMLAALVAGERDPKILAQLARARLRAKLGLLVEAFSGFFTDQHAFLLAKMLARVDQLDADLADLDAKLGELIAPLAGAVERLDEIPGVGQVAAHLLLAELGTDMTRFPTAGHLVSWAKFAPGVTESAGKPKGSGSTGHGNPYLARVLGEAAVAAGKTDSFLGERYRRIARRRGAKKAIVAVGRSILVIAWHLLSDPEARFHDLGVGFYDTRVGPEPAKRNHVRQLEALGYKVTLHPAA

SEQ ID NO: 236665 - protein, 322 aa, unidentified
MRYIGIDVSKATFVVAYSSDKGGEIRTFNNTTAGIRQFIGTLPKDGSIHCVMEATGNYSALLLYMLNVAGITVSMENPLKVKNFAKALLSTVKTDKSDARLITLYGEKMNPRPFKVQGEAILRLRQKRTVIRQLTKQITAMSNLRGSLACLPVPDKGATHTVDETIKFLEKKRDRLQAELTDLVEVEFSRQLALLTTIKGIGITLATALIITTGGFTYFQNAKQVSRYLGICPTYEQSGTSVNIKGHINRNGDAYTRGLLYIAAWPASRFNAQCKETYTRLRQNGKPGKLAMIAVANKLVRQAFAVVTHDKEYVDGFVSNRP

SEQ ID NO: 236666 - protein, 347 aa, unidentified
MLIIGCDFHPGFQQVAIFDNRTGEIQEKRLQHRAEAEQFYRSLAGQEVLVGMEACGHYPWFEGLLQELGMELWFGDAAKVRASVVRKQKTDRRDAEHLLDLLRQDRFPRIWVPSLEVRDVRQLLVHRHKQVQARTRTKNQLQAMALSHGVQKKRKLWTKAGRAELEQLPLLAYAAQRRKKLLEALDELDVEISELDRRVAEEARERPEAVRLMTHPGVGSVTALAMVLTLGPAERFGSGKQVGSYFGLIPSEESSGGKQRLGKISKQGSSFLRFLLVEAGQTAARYDPQLKRFYRRLAVRKNRSVAKVAVARKLATRLYLMLREQWTYAQLSQAVMQVSPSHSVAGE

SEQ ID NO: 236667 - protein, 346 aa, unidentified
MGKLITDLSSVTTVGLDLAKHVFQVHCVDASGRVVVAKAIRRKHLLEFFASLPRCLVGLEASGSAHHWARELITLGHEVRMMPPAYVKPYIRRQKNDASDAAAICEAVTRPSMRFVGVRSLENQATLMHHKTREMLVSQRTQLLNALRGHLTEVGVIAAQGPRHGHELAELIEACDETIPFEVCEALAPLAVQLRNLDEAIARLDRTIAKMAQKDETARRLMSIPGFGPITASAMAATIQDTSGFASPREFAAFLGLTPKQNSSGGKQKLGRISKMGNRNLRKLLVVGAHAVLFHRKPHTDPLRMWAKKLIEKKPFKLVAVALANKMARIAFAIMRGRTVYREIPA

SEQ ID NO: 236668 - protein, 425 aa, unidentified
MNSNTNHKINQVSEDTMVIGIDIAKKKHFACAMDDRGRILQKSFPFFQSGAGFDQLDKRIQSLQIQHQKSEVIVGFEPTGHYWMNLAAYLVGQRIRFVMVNPMHVNRTKELDDNLQTKNDQKDARVIASLIRDGRFNYTRTLEGVEAELRNGASLRSKIQEDLTAIKNRMVRWTDLYFPEFHHIFKSFGKNACAVLEMTPLPIDLYRKSDEDLIYLYKSVEGLQCLSFSKIKKLKSMAKQSIGLTEGLEMARFEMGTLISQFKALSKQLETLSSRLNELAQQMTDYEFVLSVDGLGENTVVELLSETGSLSLYEHPRQLIKLAGLTLRENSSGQHKGQKKISKRGRRKLRAILFRVILPLIQHNIAFKSLYHYYTTRTVNPLKKKEAMVVLCGKLLKILHALCVKRMHFNASLMMRDLHCLQEAA

SEQ ID NO: 236669 - protein, 410 aa, unidentified
MEVLYPHCAGLDVHKDMVVACLRHVVDGTIKREVRTVKTTTKALLDLSQWLASEGCTHIVMEATGVYWKPVWHILEDGDFDLALANAAHVKTVPGRKTDVNDATWLADLLAHGLVRGSFVPNAQTQEMRGLLRTRKQLVRERTSHVQRLQKTLEDANIKLDSVISDVMGVSGRTMIEALIAGETDPNTLAALAHRRIRAPAEELCEALRGRVTKHHRFLLRLHLQQIDIFDAAIVAIDQEVDANVEPFRAAITILTTIPGVSDLSARTIVAEIGTDMSRFPTDGHLISWAGLCPRNDESAGKRRSNRMRKGAPWLKTTLIQCAWSAIRKKASYLQAQFHRLRARRGAKKAIAAVAASILTAIYHMLTNGTLYQDLGADHFDRRGKTAQTKRLVAKLQNLGYAVQITPLAA

SEQ ID NO: 236670 - protein, 428 aa, unidentified
MKKNSTYKLEAITPETLIVGIDIAKKLQWARFTDYRGLEIGKALKFKNNKNGFETIITSIKALCKLKKLDKVIVGMEPTGHYWKPLANYLILNEITVVMVNPYHTKRAKELDDNSPTKSDKKDALTIARLIRDGRYYEVYMPQDVFAELRVLSNARVSLMKRHNAIRNTITAILDEYFPEYATVFKHPLKGKASLQILKSCPFPSLILELGTEGVLGEIRKAVKKTVGLKKARQLVEAAKESVGVTYGAASAKMRLGLLLEELELLTKQLGQIEEAMEEALADTGIKETILSIPGIGIVTAAGFLGEIGDPLRFKHPRQISRMAGFNLVEDSSGKNVSGTTISKRGRKNLRNVLYQMARTMVAVNTEMKELYQYLKTRPNNPLKGKQALVVISKKAVTIIYNLVKKQMAYEAELALGDYRRNQIQQVA

SEQ ID NO: 236671 - protein, 389 aa, unidentified
MTIYVGIDIAKYEHVASIFDPSSGELILDSLHFDNNLKGFKLLLSKLKSLHDSDVVIAFESTAHYHQNLFNFLTDQKYKCYLINPYLTSRFRSVSLRNAKNDNIDSRAIAQFISLKHKDLLNEEFMMNELKELCIHRDDLIKQSSALKIKLLTYLDRVFPELESIVDKQGIHSKAVRAILKDYPTAKAISYTRIDHLIKLASDASKNRFPSDKVRKIKEAAKTSVGFDSLALALKIRQTIQSLEALEKQIDEVENSISSLPTVMDSPLNKLKGINSIEIAYILSAIISITRFSSYSKLVAYAGLDPIIRQSGTWQASRTRMSKRGNKLLRYALIWTANNMRKHDSAFKDYYEKKKSEGKSHYNALGHCAAKLCRYIFFILNNPDLDFVM

SEQ ID NO: 236672 - protein, 394 aa, unidentified
MYFVGIDISKYKHDCFIGTEAGEVIKDTFTFDNNRTGFDQFFSILDGLGPKNEIKIGLEDTGHYMNNLMKHLSVKGYSFILLNPIIVSRFRHSETLRRTKTDKVDAKLIAQVIASKDFSSYPLQAYHFPDLKTLTRLRDRLIKQRSLYLVMLTNQLDLSFPEFKEFFDGRLKSKTAQFILTKYGISSRIANMNSQSFELLRKVSYGKFSYAKFANLKELAKNTIGCSSEIDEMLFALTINLYQLLDKTITEVESKITEIMEKLDSPTASIPGIGTMSAATIIAEYGDVSRFANDGQMLAYAGLDSGRYQSGTSDFPGRMVKHGSGYLRQALMNVAETCMMHVPSFYDYYLKKRNEGKSHRVALSHIARKLVRLIYKLETSHTHFDLSVFNSQHQ

SEQ ID NO: 236673 - protein, 360 aa, unidentified
METLVERCAGLDVHKDSVTACVRVPDGHGGRQVETRRFTTTTAGLGLLAEWLASFGVTRVGMESTGCYWKPVWQLLEDQLECWLLNAAHLHNVPGRKTDVADAAWIAQLVEHGLVRPSFVPPRPIRELRELTRYRKTQIQERTREVQRLDKVLQDAGIKLSSVATDIIGVSGRAMLEALVAGTHDPQVLAALAKGRLRTKLPALRAALAGRFRTDHHGLLVAQILAHIDYLDETIALLSARIQQVIAPFAEQVALLDTIPGIDRRAAEVIVAEIGPDMGQFPTAAHLASWAGVCPGNNESAGKHRSGRTRRGSKWLGGCLSEVAKAASRTKGTYLNAQYHRLRGRRGPGKAPWPSPIRCW

SEQ ID NO: 236674 - protein, 310 aa, unidentified
MNDTVGIDISKATLDAFRVSDGRREQFYNDAAGLKKLKKWLGKTPVRVIYEPTGPYHRDLEQALASTSHGLVKVNPTRARRFAQATGQTAKTDRVDAELLARMGAVLNLEASPARSETLMEIKELHVARVGLIKDRTACRNRLGTARCKVIISQLNARYRQIKAQIAQIDAELVRYVKADPELARRYEILLSIPGIGQVAAIALIVEMPELGSMNAKEVASLAGLAPITRQSGMWKGKARISGGRQTIRTMLFMPALIATRFNAPLRQIHEALIGAGKPWKVSITAVMRKLVILANALVRDDRIWAEARA

SEQ ID NO: 236675 - protein, 391 aa, unidentified
MIYIGIDVAKDKHDCFITNSDSEVLFKAFTIANNLDGFNDLYQKIESVMDDVTKVKVGLEATGHYSYNLLGYLIDKGLPTYVINPLHTNLYRKSLSLRQTKTDKVDARTIASMLMSDVNLKSYSDTFYHNEELKSLTRYRFDKVKERAKLKTSVSRLVCILFPELEKLVPTLHMASVYALLSEFPSAKHVATAHLTRLTNLLSESSKGRYGKDTAITFRDAARASIGSNMPAKSLELKHTIKLIQELDSEIDEIENEIKIIMDEINSPILSIPGINYRMGAMIIAEIGDFNRFDSPDKILAYAGFSPSTYQSGQLDGAYAHMEKRGSRYLRYALYNATKYVCHWDPIFAAYLAKKRAEGKHYNVAISHAVKKLVRVIYHLEKTKQQYIKVA

SEQ ID NO: 236676 - protein, 342 aa, unidentified
MEELYYIGLDLHKKIIAYCIKTASGVIVSRGTVAATRSALLEWVKSLPQPWVAAMEATMFTGWVYDFLKPHAKQLFVAHPEMLKAITAAKKKNDRADAEKICDLLRVDLLPLCYMAPEEMRELRRILRYRNHVVRMATTVKNKMSGLLMEVGAEYSKKRLHGHTYFKNLLETVEDVPSSVKELLNLSRAGVELFAAVQKKLLAALRENELIRERVRRLMTIPGVGEVTALTWTLEIGDPDRFSIRQAISYCGLCSAQKESAGKEIRGPISKKRNKHLQAVLIEAAKLAPHWNPRLAEIHERELTKGNRNRATLAVARKLVTYLLTVDKTGKDFVLTREADAA

SEQ ID NO: 236677 - protein, 354 aa, unidentified
MTKEETSMKFYTQNHAHYCGIDLHARSMYICILNQDGDILVHRNTSTSPEHFLKVVAPYREDLVVAAECIFTWYWLADLCQREGIQFVLGHALYMKAIHGGKAKNDKIDSHKIAVLLRGGTLAQAYVYPPELRATRDLLRRRNHLVNKRAELLTHIQNTNSQYNLAPFCKKIDRKSNRVGIVDHFDDPSVQRSMALDLALIDTYDQELQSLELYIARSAKAYDANTYYRLRSVPGIGKILALVILYEVHDIERFAKVGNFLSYARLVKCAKESAGKRYGTSGGKIGNVHLRWAFGEAACLFLRNNPEGKRLHEKLVKKHGKAKALSILAQKLGRAVYFMLKRKQAFDMNRFFSR

SEQ ID NO: 236678 - protein, 494 aa, unidentified
MATRRATTDTQTQPRSAYRRRKARARARAARAHEAEERRVEGLPVTQAHAAGIDVGSRSHWVCVGAGAGDPAACVREFPAHTAGLHQLLDYLRQHHVTTVALESTGVYWIPLYELLESNGFEVLLVDPSYTKQVKGRPKTDRLDCQWIYRLHSVGLLAAAFRPDEKTCQLRSYLRQRANLIRYAGQHIQHMEKALEQMNLKLREIISDITGVTGQAILRAILKGTRDPQKLARLRNQKCKASEAEIAQALHGSYRDEHLFALRQAYEAWQFYQKQLDQVEEQIQQQLARMKQDRALPPLKPRPRTSGRKPNQPRFDVRTALYYVVGIDLTEIEGIAELTALTIISEIGPDVSKFATVKHFCSWLGLCPQLKKTGGRVKSSRTRPGVNRAAVAFRLAANSLYASKGALGAFLRRQKGRLGAPQAVTATAHKLARIVYLALKHGLAYVRQNQQEYAAKVREQQIKGVQRRARQLGLEVIETQPSTSTAAQTAAVPC

SEQ ID NO: 236679 - protein, 341 aa, unidentified
MKQYVGLDISMEETSMCILDDAGKVMFEGSVGISPDAIAKVLRKRAAHAERIVFETGALSNWLWHELKALAFPVICLDARHANAVLSTRMNKSDKNDAKGLAEMARMGWYREVSVKSVENRQLRSVLAARAKLVELRRDLDNQMRGLCKGVGILLGKGGAGGLAAKITSVLVDNPELADIFDPPLQAQACLTKQIDKFDKQLLDLARGDQTVQRLMTVPGIGPLTALSFVATVDDPARFKSSSDVGAYLGLTPRRYQSGEIDHNGRISKRGNTFVRTYLYEAANVLLTVVRRGSALKRWGVKLVKRIGAKKAKIAVARKMAVVLHTIWTDGTEFQAENSPA

SEQ ID NO: 236680 - protein, 411 aa, unidentified
MNAIDKHPSENPKNFVATIGLDWADQKHDVWIRPREGKPEHQIIEHTPEALHEWVAKLRTRFPQGQIALALETSRGAVVYALMVYEFIVLYPINPKALCSYREAFKVSGAKDDLTDSRLVEDMLSKNLEQLRPLKPQDEHTRTLAGLTEKRRQLVNHRTGAVNECHAELKCYYPLARNILGDLTTTTAAEFLLKWPDLASLKKAGTAKLRKFFYGQNCRSEERMRERELLLEKAQPLTEDRAVIVPCQLKVKALAALIRDLNQAIEEMDTLIEKEMDQHQDAFIFRSFPAAGPVLGPRVLVAFGSDRDRFGSAQEVAQFYGIAPVKKASGKTQVIGMRYRCPKFGKQSFHEHAACVVKNEPWASEYYQMLRAKGKGHHMAIRATSFKLIRIYFRCWKSRTKYDGALYLESL

SEQ ID NO: 236681 - protein, 319 aa, unidentified
MAAEIFIGIDVARASLEVAVRPAGEQWQVDNHTAGIAELLVQLRALRPTLIVLEATGGLELPVLGVLGSAGLPVVAVNPRQVRDFAKATGKLAKTDAIDAQVLAHFADAVRPAVRPLADAATQALSALVARRRQLVEMLTAEENRRASAAAAIRPDIQEHISWLRKRLRGIDNELSQALRSSPLWREQEDLLRSVPGIGPVVTVTLLADLPELGVLGRKQIGALVGVAPLNRDSGILRGKRSVWGGRSTVRAALYMAALVGTRHNPVLHALYIRLLAAGKTKKVALTACMHKLLTIVNALLKHRTRWATPTSLGVASMG

SEQ ID NO: 236682 - protein, 357 aa, unidentified
MDKFIGFDIDHKHTVACVVQAGQPDRYTKLRTDVAQLREWLKMERGPGERLHLTFEVSGLSGHLHDGLVDVVDRLEVSNPTKLTWIYRTAKKNDRIDARKQAVLLSMNELPRVHMPCEGVREWRRTIQHRRNLVNTMTQTKNRIRSLLKSQGLKQAHRGTWWNTTNRTWMRQEAEHGDAPWRDVLGDLLDMLELQQQQLQRVTRRLDAYLDELPGAWLLMTIPGVGPRTVEAVLAYTDDVRRFRRGKQYGAYFGVTPRLDESGSRRRTGHISKQGPSVVRWLIVESAWRAVRYSPALRAFHERVMHGQKQRNKIAIVATARKLLTIMRAMLMTGETFNESLVSEQVVLAQRSRECVA

SEQ ID NO: 236683 - protein, 345 aa, unidentified
MPIVGGLDIHRKQITFDYLDTATGEVRRGQITPADRAHLRAWLARFAGRDDVAFALEGCTGWRYVAEELAAAGVTAHVAEPADTAFARGRKRHAKTDKTDSRHLRVLLEQGRLPECWIPPAQILECRALLEAYHDLRREHTAWIERIHAVFFCQGAPRLGEGALRTERGLAALRQAAAIHLSPAGQLQVATALDMLAAVEARMDTLRQQLLHAARHLAGARALQARLYGVGPLGGLAMTCWLGGAGRFSSARKAVRFAGLDVTVYSSDGKRSPGHLSRQGPEILRWVAYEAGKTHARAPAPGHDYYAQVKDRQDGKIAALAQARKLIRQACHILAELGDDALTAA

SEQ ID NO: 236684 - protein, 348 aa, unidentified
MSQSHYIGLDVSARTVNLCVVDHDGRVVHERKLSSNPDEIAQHIVSLPFPIARVGLEAGMLSQYIFGRLVEDAVPVICVETRHMKAALSAQLNKTDRHDARGIAQMMRVGLFKPVHVKSPTSQRLRTILTARQLLRNKLQDVENEIRGLIRNFGYHLGKVTARDFEPRVRELIADTDLYVVADALLLARRSLREQFSRLDDLLVRLARQDDVTRRFMTVPGVGPLVALTFRATVDVPSRFARSRTVGAHFGLTPRKQQSGEVDRSGRISRWGDDMMRSLLYEAAQVLLTRVKRWSALKAWAAQVSRRRGHKKAIIALARKIAVILHRMWVDGTEFDWGKKPEATSPAA

SEQ ID NO: 236685 - protein, 387 aa, unidentified
MTAVMIGIDPAKRSHAMAVLDGKEAQLAALQVVNDAEGYREMIRLAKRWPQRTWAVEGATGVGVQLAQRLVAAGETVLDVPPKLCTRAWIFDIGHGRKNDPTDARTVAVVALRTADLRHVVVDDEMVALRLMSERRRDLVRSRTATVNRLHQLLMELLPAGAARNLTAAKAKELLATVRPRDVAGKTRRQLAVDLIDDVIVLDRKLKDLLARMKTMVQATGTTITDIKGVGVATAALILGEVGDVRRFPSNDHFATYNGTAPLEVSSGEVDRHRLSRSGNRQLNHALHIVALSAARHDPKSKAYLAKKVAAGKGKKGAVRCLKRRLSDAVYQHLVADQLARAQRSPGGQSGTSLQSSATGSHPDTGTSEQPHSGLHKQRTARLPTAS

SEQ ID NO: 236686 - protein, 427 aa, unidentified
MNEPKYKPTLCVGADVHKDEIVLRAVDKAQGHEVLERFRVTNNLPGAQSAAATIAQVAADLCYTRIEIGWEATGMLWIPFHRYLSTAPLLHPFELELVCFNPKLVAKFKDGLVLRSPKNDDRDAFDVSARIRFGELPVTYVPGDFWQGLRRLTRYRYCLSKALSQEKMRFQSYAFLKWSDWKRVKPFSNLFGATSAALLTEFTVAELQEMTHDQLVDLITRRGRGRFTDPTTTARLVRQALRTSYPIDPRMDEMITASLAAMWDHIRYLDRAMKRLDQHIARYIDPIPNPIITIKGLGAVITAGILAEIVVILRFEEHRHLAQYMGLTWRKSSSAGFVSQNTRMTKVGNVYLRYYFIQGANLLRQHNLEYKAYYWRKYQEVSKYQHKRSLVLTARKLVRLVHALLTKNVPYVRPRMTDPGQEDDGLQ

SEQ ID NO: 236687 - protein, 379 aa, unidentified
MEHCIFVGCDVHVKTLLLRVAVDKGEAQTHRYRNNRAGREALLKKLGQGARAVGGARVLLAYETSSLGYVLYDEVVGAGFECYVIATTKMPRTWKHVLEKTDERDAQLLLDLLRSHMLAGTVLASVWVPTHQQRDDREMVRARLDIVDKLTRVKTQVRSLLCRYDLRCPADAGKGWTQKFLAWLDSLVGSSTLGYGASVRLGVLLAEFKMLKGELDYVDEQMKALASTERHGCQVAALREEKGVGLVTALTFLVEMGDLERFSNRRQVGSYLGLVPRCHESGESSERKGHITRHGPPRVRRVLGQAVGHWVRWSPEAKARYERMIGERPEDKKRLKRIAKVAMMRRLGIRLWQRGLEAGREGAPPPTQDVVTRFCTPAG

SEQ ID NO: 236688 - protein, 427 aa, unidentified
MDFTQNERLKQINEQTLIIGIDIAKHKHVARAIDDRGIDLSKRLIFPNSQEGFKLLLEWAKDLSAQTSRPNLLIGMEPTGHYWMNLAYFLKSHGERPVVVNPMKVKKSKELDDDSPTKNDTKDAKVIAQVMRAGRYHEPTLPEGLYADLREGVKLFDIIQEDLSSIKAQIHNVLDRYFPEFLTVFKKWDGKTALYLLKCGYLPKDIQQKTEDDLLKEVKTSVTKNIGIERMRQLKKAAASSIGLTVGLRMAREELRYLVDQYEVLNARLEALKGELEELVRSVPGAISMMDIKGVGPMTVVGFFAEIGDLSNYRDPRQIIKLAGLNLMMNQSGKHKGQTTITKRGRRRLRTILYQVARPLAFHNKGFKALHNYYKHRRNNPLKGKQSYVALGRKLIKILFAMGTRKCAFSEERMLRDIPHITEVQAA

SEQ ID NO: 236689 - protein, 317 aa, unidentified
MIHLGIDIAKLKFDIALLNQGKFKTKVFANDASGINACLKWLGTHAAEPVHACLEATGSYGEALACALHDAGHTVSVLNPARTKAYAQSLGLRQKTDAVDAKMLAHFVQTQQPAVWTPPPPELRALQALLRRLDALIEMRTQEKNRLGVAEPTVSASITQHLDYLETQIDALKAQIDNHIDQHPGLKQQQDLLDSIPGIGAATSAWLIGELNLTRFDSARQAAAFVGLTPRKDTSGTSVRGKPRLCKLGNSLLRKLLYFPAITAMTHNPLVRTLCLRLKAKGKHNMAIIAAAMRKLIHIAFGVLKSGKPFDPTLADT

SEQ ID NO: 236690 - protein, 418 aa, unidentified
MKVVFPTCCGVDVHKSFLVATIIKTPKESLQPSYQKKRFSTFNSDLNRFADWLHENDCLDVCMESTGKYWVPVFNILEKRGIRVTIANPKWVKAVKGNKDDTKDSKWIGDLFRIGLVKSSFIPNKDIRILRELTRYRYKLTSMKSSEKNRFQNAFTVCNVALDSVVSDMFGKSATAITDYLTSDEDFDPQHCVSLLHRSLKKKAEDVLSSIEGYEITLEQKCRIGIVRDHLHYIEKLIERVDICINTMVEKYDGAISLLRTIPGIDRSSAITVISEIGVDMAQFGSSKRLCCWAGLTPGNNESAGKKKSVRISRAGVYLKPVLVQAAHAAVKDKLNPYYALKYERIAKRRGKKRAIVAIARMILTAIYSMLSTGEIWNPVDLFKVDMPEHLKEQQLQKAMKQAVRFLEAQGLTVLDSA

SEQ ID NO: 236691 - protein, 476 aa, unidentified
MAALQKADEKLNRQQRKDLVRRLWSSNPGLDVVHRNAAGIDVGNEEHYVAIAPTQDEVPVQRFNCFTAELIRMAVWLKGRGVQTVAMQSTGVYWIPLYDILEEHGIEVYLVNARDTKNLPGRKTDVQESQWLLKLHTYGLLRNSFRPASEIRVLRAYWRQRDQHVKTAGQCVQRIQKALTQMNLQLANVISDLSGKTGLQILRAVVNGERDPAKLADFRDPRIKASREDIIASLRGNWRTELLFQVKQELARYDFCQTQIAECDRELEQQLQSLPELRAGEEKSGTKETPRPPKKRKRRKDGNIPRFDLHHELQRISGVDLTRIDGIDVMTGQTVISEVGLDMSRWPSENHFASWLGLCPSNELSGGRILKKRTRKVVNRAATAFRMAASTLRTSQSYLGAKFRRLRSRLGPPKAITAMARTLAILFYRMLKFGQDYLDRGTEFYEQRQRDQQLQYLQKKAAQLGFQVVALPETPK

SEQ ID NO: 236692 - protein, 351 aa, unidentified
MNSIDYIGFDIHKKTISFCAKAQDGRILDEGTIPARRSDLSAWAKRRSRPWWGAMEATLFTGWVYDHLKPLAQELKVAHPAMLKAIAASKKKNDKVDARKIADLLRCDLLPECYMAPSGVRELRRVLRYRNLVVRQATRMKNRIAGLLMETGTLYNKERLHGKAYFSELLGSLREIPASVIELLKLSRAQLEFFATIQLRLVKGLRADAGLGERVERLQSIRSVGEILALTWALEIGEVRRFPSIADAVSYCGLTSAQRNSAGKEQRGPISKQRNKHLQTILIEAAKLAPRYNPQLAAVHERELQRGDRNQATLAVARKLVAYLMAVDKSGQPFQVRVSAGAESKDEQPVG

SEQ ID NO: 236693 - protein, 422 aa, unidentified
MFKIILNNCCGLDVHKSRIYACIGITDTHSRTEYYEANFSSFPKDLRKLSEWLHKYNCVDVCMESSGKYWIPVFNVLEETCKVTLAHPKYTKPQKGNKTDRKDARWICDLFMCGMIKPSFIPPPAIRHLRDLVRYRVKLTNTLTGEKNRAQNCLTVSNLKLDDVFSDVFGKSARSITEYILAHPGEKFDVAPFVDKRCKTPLDVIQDAVDGAVSPEQAVKLRECLDHIDQLIAHRERIEKEILSIAEPFSPQLTLIRTVPGLNRDPMTAIVILSEIGSDMSVFPSAKNLVSWAGCCPRNDRSAKHVKSTRISQAGSCLKPLLVQVANALINSKDHPEFVERYRRIKSHRGHKKAIIAICKMLLTAIWNILTSGEAYNPAGYLLQTPRPTDEKKTLTQKQALELLRLRGFIITDDSSPQAVTA

SEQ ID NO: 236694 - protein, 355 aa, unidentified
MKYYTSTTEFNCGIDLHARQMYVCVMDRDGKKLVHTNVKNNDFEFFLKLVAPYRHDLTVCCECTFGWYWLADACQAAGLTFVLAHALYLKAIHGGKNKNDRIDSEKLAHLLRTNLIPPAYVYPADKRPLRALLRQRLFFVWQRSDLLARIQSHQLAHNRPPIKQTRRNRDPWEAQLLAHEAHPLRQLALQNELAMIRHYDQHITALEEQLHRLTKERLPRQYALIQTVPGIGEHLGLTILYEIGDIERFPTVKDFVSYCRLVKGTVASAGKIKGLRGAKLGNPYLRWAFGEAAVIAKRDPHRIGPLAQRLEARMNGNKFKANTVLALKLARAAYFMLKNNTVFDPERLAMALAKD

SEQ ID NO: 236695 - protein, 392 aa, unidentified
MVVSVGIDVSKDKHDCFIVSSEGEVLADAFIIPNTMDGFHYLLQRIRHCTAPQDKIKVGLEATGHYSYNLLGFLLDNGLTTYVLNPLRTNLYRKSLSLRKTKTDRVDARTIASMLLSDAGLKPYTDTAYHNEELKSLTRYRFDKVKERAKLKSSIARLVCILFPELEKLVPSLHIASVYALLEAFPGAKQVANTHLTRLKALLETASNGHYKRDMALKIRNAAKNSIGSQMPAKSLELQHTIRLIRELDLEIDEIEEQIQSIMDELHSPITTIPGLGFRMAAMILAEVGDFTRFDSPDKLLAYAGMSPSTYQSGQLKNCYPHMEKRGSRYLRYALYNATKYVCHWDPAFADYLAKKRAEGKHYNIAISHAAKKLVRLIFAMEKSRQPYCSAA

SEQ ID NO: 236696 - protein, 321 aa, unidentified
MRFIGIDAAKATFDIALPLPDGKYRTKAKLPNSAKGFNELLAWRAKHAPNAAVGMEATGIYHEALARTLVEAGVVVHVANPARVKAFGQAEGIRTKTDRSDAKLIARFFEAQRSEKLHPYVPPTPSEVKLRALVRRRDDLQEMLQMERNRLDVADISVQQGIKDVIQTLEEQIKQVQKAIEDHIDNDPDLRQRHHLLTSIPGVGNTSSAQLLAMLGDLSKYSDVRQVVAHAGLNPAQRQSGNYEGKSRISRVGDANFRKKLYMPALTGKTYNPRLKSFADRLSAKGKPFKVVMCAVMRKLIHLVWGVLKSGRPFEPDGALA

SEQ ID NO: 236697 - protein, 311 aa, unidentified
MKTSVVHYVGIDVAKAELVGATGKLNAVFARDPAGLDRLVQWLHELGPGAHVVLEVSGGYEREVVAHVQAHAIAVSVVNAGWVRNFARSQGRLAKTDRIDARVLVDFAAANAPRLSAPVSPAQQKLTDLVRARQQLVTVRSLLQNQLEHTREPLARRSQQELAALTTTRIVRLEKAIAALIAQTPPLQARAQKLTAVRGIGLTTAALLLAELPELGTLNKTEAAALAGLAPRNHDSGLHRGQRHIAGGRPAVRTGLWMPTLVATQHNPILKAFYQRLRAKGKPAKVALTATARKLLIHLNSLLKTPSLSPC

SEQ ID NO: 236698 - protein, 311 aa, unidentified
MYYIGIDVSKKDLSVFNGKDLNFINKEGLKSFKKYLKKKYHLSEIAIIFEPTGIYSQYLKEFCAENSIKAYIVNPKQSHNFARALGIRPKNDKIDARTLYKFHKLIDLKDIKVPKIDQEAKTLSSYLVSYEFAVKQRVSLSNHLESLRDKRLIALIKKDLKRAKMLEDKIFNDIKEYVSKNQNLKEDYQRLLTISGVGEKTAIGLLTLFKTYQGTNRAQITALAGLDPVRRESGTSVKYRVKISKNGKGIYRKIFYLPTVCATVHNQKIRVFYQRLLAHHKTKKLAVIASMRKMLLIAHAMYRDKTEYVTV

SEQ ID NO: 236699 - protein, 322 aa, unidentified
MQKRKEESIEFDQVVSRGCGIDVHKEVIVLTIRGEGLREETFTYSTFTEELEKMRDMLKEKQITHIAMESTGVYWKPLYNILESDFEIILVNARHIKNVPGRKTDKKDSKWIAKLLLSGLLSGSFIPPRHIRELRDLTRYRKKITGQIASEKNRIQKILEDANIKLSSVVSDMSGAVATKIIKAILDGVEDVKELVKFRHGKMQATEEELAASLKGNLTEHHKFMLSTIKKSMEEKEGLLKILDERIDKLLESEKIDIDSKLLQTIPGVGEIAAAGIIAEIGTNMEQFPDEQHLASWAGMSPGNNESAGKKKVVEQLTETSI

SEQ ID NO: 236700 - protein, 375 aa, unidentified
MDQHSRAFVGIDTSKLRNAVAVAEDGRDGDVRYLGEIDTTEAATRKLVAKLAAKYRQLTFCYEAGPTGYGLYRLIRKLGHDCIVAAPSLIPKKPGDRVKTNRRDAVGLAKLSRAGELTAVWVPDERHEAMRDLSRAREAARKDLKGKRQQVSSFMLRLGRHYPGKKTWGPAHMNWLMLQKLEHREQRIALEELLGAVRQESERVERLEQAIRDAVPEWSLAEVVTALQAMRGIDLVAAVTVLAEIGDLSRFQNPRELMGYLGLVPSESSTGDTVNRGGITKAGNGRARRILVEAAWSYRYPPRVSREKQMKVAAAPRAVREIAWKAQMRLCGRFRSLTRKGKRPTVVATAIARELSAFIWAINREVVGSHATANQ

SEQ ID NO: 236701 - protein, 433 aa, unidentified
MLKLNYMSTLFVGIDVSSKTNAVYAMDFEENKYISSSFGNNQPGADQLVTMIAECMQKHKNLDTLLIVLESTSVYSVHISNFLSTSEVLMPYKPYVFCVNPKATSNYRKSYIGMEKTDPTDAYLIADFGRVGRTKKLEPWRGGQFIALKRLTRHRMHLSECITREKTYMVSNLYLKFSELQLLEGDDKPFGSLYGATSSAVLTEFLSPQEIIDMPEEDLLTFLAQKSRNRISDISKTSDLLRKAARDSYRLDKCMYEPLNISLASSFNCIHAYQKEIKLIEQAIEKCINGMNPNALIILRSIPGIGPVWASGILSEIGDITAFHSSDALAKYAGLYWPKGDSGDFTSEDNKMSKAGNPYLRYYLGEAANSVRKHIPEYADFYARKYAEVTKHQHKRALALTSRKFVRLVFGLLAKNQLYTGEKLDTEHNIESN

SEQ ID NO: 236702 - protein, 430 aa, unidentified
MKSNTQNAKIEAITEKTLVLGIDVGSEMHYARAFDYRGIEYSKKPFKFSNTEAGFATFKEWILDLKERHEKDKVVPGMEPTGHYWFNLGKFLQDNEMKPVLVNPHHVKKSKELDDNNPTKNDRKDPKVIAGLVREGRYMIPYLPEGVYADLRTASNIRFQLQAELTRIQNRISRWFNIYFPEYKTVYGKPDAKSGMLILKAAPLPEDILTLGIDGVNQIWRDAKLRAVGKARAKTLIEAAEHSVGSKEGAVSARMEIRMLLEDYESRNIRLQEVMALIEGLVKQIPMAEKLLEIKGVGIRTVSGFLAEVGDISRFNNPKELQKLAGLALVENSSGKHKGETTISRRGRKRLRYLLFEVAMSLVAKNPEFRELHNYYTTRRLNPLKKMQSLMAIAAKLIRVFYAMLTKGVDYDPKKMVSDIKRPAVYIQAA

SEQ ID NO: 236703 - protein, 312 aa, unidentified
MITQPEVFIGIDVSKKTLDVCGYPDKYKAQFSNDAAGHQQLLEAMRKVQPTLIVMEATGGLEFEATALLVTSELPVAVINPRNARDFAKAVGLLAKTDQVDAWALARFASAVRPEQREIKSEALRGLEEVLTRRRQLVDMVTAESNRKGQASAKMAKEIEEHISWLKQRIKNADLDLGNAVKASPAWKAKADVLISVPGIGSVATFTLLAELPELGTLDRREICALVGVCPFNRDSGTLRGKRSIWGGRASVRAVLYMAALVATRYNPVIKQFYQKLLDAGKIKKVALVACMRKLLVILNSMVRNNTLWASC

SEQ ID NO: 236704 - protein, 395 aa, unidentified
MTIAGFDNAPTPPIFFDHATTIVGVVELSKKTWVVGGYIPGLERRPLKRVNNHAAGLLDVLVAWRKKAEQAGRTIARIVVAFEAGRDGFWLPRWLQANEIEAYVIHPSSIPVPRGARAKTDRLDTAMLLRAFSAWLRGDTDACRMVAIPSREQEDLRRPSRERAELVTERTRLINRMRSLLTLHGLSQVNPNTPATRRNLAQLRTAEGEPLPPNTFAELERMFERLELIKKQIKAIEDDYIHPARQCVLEREESGLAEQAQKARRQLATIAGVGAATAATLVSEVFTRNFAHRRALARFVGLTGTPDESGSRRRDRGLMKAGSARVRHTMIQLAWRMLYHQPNATLVQWYRERVARANSAGRKTFIVALARKLVIALWRFVQTGELPNGMHLARA

SEQ ID NO: 236705 - protein, 338 aa, unidentified
MSLYAGIDLHASNSYLAVIDETDELVVARRYRNELRLICKGLEPYREELVGIAVESTFNWYWLVDGLQESDYRVHLVNTLAAQQYQGLKYTDDKTDARWLAHMLRLGILPTGWIYPQKERAVRDLLRKRSKLVRQRTASRLGLRNVLERTTARRLSTNALKQVTQDDLFGWIEDPNVRLSIAASLAMIEAASEQIERIETTILEQAVLQDSYRILITIPGVGPVIASTIQYETGDLSRFAAVGNYVSYCRLVKAERSSNQRIKGQGLRKNGNPYLSWAFHEAAHFAVRFQPKARRWYEKKRAKTCALVAIRALAHKLARAAYFMMRDQVAYEPARLFG

SEQ ID NO: 236706 - protein, 343 aa, unidentified
MQAVTTVGLDIAKSAFQVHGTDADGVVVLRQQLRRSRVLGFFKKLSPCLVGIEACASSHHWSRELQALGHTVRLMPPAYVKPYVKRQKNDAADAEAICEAVRRPNMRFVATKTPDQQACLMLHRTRHLFIRQQTALINAIRAHFAEFGIVASVGRNGIKELLDVVAGPDDGRLPMIARQCLAALGDQLQRLKAQILEFDRRINAWHRSSETSRRLDDLPGVGPALATALVASVPDPEAFRSGRDFSAWIGLVPKQNSSGGKERLGNITRQGDRYLRSLFCAGALAVIRYAKIHGTRYRPWLAKLLERRPTKVAAIALANKIARMAWAMMARGTSYREPVALAR

SEQ ID NO: 236707 - protein, 350 aa, unidentified
MRRPKDKLIAGIDLHGNNLVIGVINQDGKRITHRKLDCELEQVEEFLRPLKPQLQSMAVESTFNWYWLVDGLQAHGYPIDLANPAQIEQYSGIKHADDKHDAFHLAELQRLNILPQAHIYDAELRPVRDLLRRRTNLVHQRTALMLSFKSLYTRTTGQPMPLQQLKSLEPKQGKELYEHPANQLMAQVQLEHIEALARSISRMEKAVLACARELPLYAKLLSLPGVGKVLGLTITMEVGDIGRFPTDGDFASYCRAVDSRRLSNGKQKGENNQKCGNKYLAWAFVEAAHFARRSDEHCRRWYDRKQAKTGTVIATKALACKLAKAAWHIMTKQTDYDARRMFPELATQRK

SEQ ID NO: 236708 - protein, 419 aa, unidentified
MKEVDRFAAYVGIDWADTKHDVCVQAAGDSTMESSILQHTPEAIAAWADSMRQRYGGQPVAICLELDKGPLVYALREYDFFVLFPVNPLTLARFREAFATSGAKDDPSDARLQLELLLKHRDRLRPLNPSSPTLQMLEQLVEYRRRLVGDKVRLVSRLISILKNYYPQVLDWFEYRDTRLFCDFLTRWPTLDALQRARRSTLERFFYERRVRSAALIERRIEGIKAARPLTTDESIIAPNRLLTQAIVAQLRDVLAAIAQFDEEITQCARSHPDFELFHALPGAGEALVPRLMVAFGDQCERYASAADIQKFAGIAPVTERSGKQWSVHWRWRCPKFLRQTFIEWANKSIHHSFWAQAFYQQKRERGQSHQAAIRALAFKWIRIVFRCWQDRRLYDESTYLSALQERGSPLIQNLANST

SEQ ID NO: 236709 - protein, 358 aa, unidentified
MRYVGIDLHKNQFTAYDSSTGRYRNYGSNTVGIMSFIRDCKDTNTGEQIVVGVESTGNTRYFKRLLEAERIQVKVINTMKFKVITESVKKTDKHDASTIAEFLGKDMLPEAWLCSEYSERLRRLLNVRKTLVKAIVTTKNQIHGMLTAYGYEDKKSSLQSKRGRHMIMNTLASTEIGLVVQLLMDTIESLSENVKNIEKKIEELVEGDTSIELLMSIPGCGRITAWTIRAYTDDMNRFKSAQQYAAYVGVVPYVHNSNTLIRHGRITKHGPEPLRTAFVQLVMGINRMRALHNYRIMKRYRFIKENKGSGKAIIATARKLTHIVWHILTNHEPFNPDLQLRSSWESNRHMQFEEKRFA

SEQ ID NO: 236710 - protein, 423 aa, unidentified
MTKLCSTPAGAVLVAIDMSKNRQEVLIERPEGGRRRRMTVMATKEDYDGFAEQLAAIGRPIVVGFEATGNYHRTLAHRLLTAGFELRLISSVALARTREALHNGWDKNDSKDAQVILHMLRIGATQRYVDPLAAGINDLQELSKTHEVVSKMKTQTWHRILTHYLPLYFPEIARFAGNSRSDWFLALIERFPTPASITALDREAFSAEAWPLIGRKVSKARLINDVYETACSSAALPVPEDSVAITMFRMVIAQGRCLIHQRDQIERLAHARLAEHVDYQLLRNIPGIGPINALTILAEAGDLRRFNHHRQFLKFCGLDLATCQSGTFRGRTKLSKYGNARLRRTFWMAAQVAARQRDNSFRDKLGRYVSGHADDADRRRKAMTALTAKMARVAHAVIKTGTEYRPFLERSDARWKDPSLQVP

SEQ ID NO: 236711 - protein, 345 aa, unidentified
MPIVGGLDIHRKQITFDYLDTETGEVKRGQVTPADRAHLRAWLARFAGRGDVAFALEGCTGWRYVAEELAAVGVAAHVAEPADTAALRGRKRHAKTDKTDSRHLRELLAEGRLPECWIPPSLILECRALLETYHDLRAEHTAWVQRIHAVFFHQGAPALGEAALRTARDLQALRASAAAHLSPAGQLQVATALEMTGALEARLAVLRHELLDAARHLTGAKVLAERLYGVGPATALAMTCWLGGAGRFSSSRKAVRFAGLDVTVWSSDRKGPPGRLSRQGPPVLRWAVYEAGKTHARASAPDHRYYAAVKDRQDGKRAAISEARKLLRQACHILAELGDDALTAA

SEQ ID NO: 236712 - protein, 348 aa, unidentified
MLHVGLDLCRARVDVSVLDPMGGRVLTTTASPDAGGLASLAQRVSVLPGAGEVRAAIESMTGARFVRDALQGIGWEVLVADAARVKGLAPLACKTDRIDAWVLAELSRRDLVPAIWLPPMGVRAERERARWRMHLVKHRSMLKHRIHSTLMTFGVPAKVSDLFGVTGREALARLGLPEPWASDVSACLRLIDILDGEIDDCERDLRRLGADHRYVPRLMTVPGIAWVLGYTIAAEIGDIARFPTATKLVGYTGLCPYVHQSGGKDHRGPVTKAGPKYLRWALIEATTHACTHPAYRTRYQRTKTRLGRQRGPSVARVELARDLAHAIWHMLTKNQDFAPAGAVNDLVA

SEQ ID NO: 236713 - protein, 353 aa, unidentified
MEYYVGCDSHRRYSVFVVMDEKGRAAAPVRVEHDRSKLREFLQSLPPRSKVAIESSGGWYWLVDEIEAAGLTPQLAHAYDAKQRMASRNKTDKFDARGLALELLTGTLPAIWIPPADVRDLRGLIRTRLALRAQSTQVKNRVSAAINRYGLKEPNEDHDLFAHRCRSSLNRYIQSLPSATQQATKQELALLDEINNHVGDLEKQIDKQVGPLKEMRLLRTVPGIGRILGATILLEVGNVDRFPSAAHMASYAGLVPVVHSSGGKTWQGRVPKNANLFLKWAFVEAANCIVAQQRRLNGTHALVLYQRLKAAKGHGKAAVAVARHLAEASWWVLSKQQPYREPKQARISSSTHG

SEQ ID NO: 236714 - protein, 410 aa, unidentified
MEVFYPNCAGLDVHKETVVACSRQVVGRKASREVRTFKTTTSDLLALSEWLSALGCTHIAMEATGVYWKPVWHILSDGDFALTLANAAHVKNVPGRKTDVNDATWLADLLAHGLIRGSFVPDEQTLEQRGLLRTRKQLIRERTSHVQRLQKTLEEANIKLDSVISDIVGTSGRAMIEALVAGETDPAQLARLANSRIRASATTLQEALRGRVRNHHRFLMRLHLEQIDALDRAIAEIDREVEANLDPFRALIPVLTSIPGIGDLAARVMLAEIGTDMSRFPTAGHLVSWAGLCPKNDESAGKRHSTRMRKGAPWLKTTLFQCAWAGARTKGSYLQAQFHRQRAKNGAKKAIGAVAASMLTAAYHMIKNGTFYEDLGANHFERRTKPAQIKRLLAKLQALGYEAQIAPVPA

SEQ ID NO: 236715 - protein, 345 aa, unidentified
MNQYKRIAIDTSKAVFTLHGIDQQDRPVLRINLRRVQFIPFFAKLPTTEIAMEACGGAHHWARELIALGHKIRLIPPQYVKPYVKRAKNDRNDAEAICEAAGRPGMHFVPVKSVTQQAQGMVLKVRESLVGQRTLLVNTLRGHAAEFGVIAGKGLSKIGPLLAAIEQEATIPAEAKDMAALLGQQITDIDARIKEIDVKLVAAHKANAVSQRLATIPGVGPITALTLAIEIDPAAFESGRHLAAWVGLTPKEHSTGGKQRMGGISRAGNERLRVLLVTGATSVIKAAMQPGSQQMTDWLRGMLQRKPRKVVAVALANKMARVAWALMTRGEVYRRSTTTTGVAVA

SEQ ID NO: 236716 - protein, 331 aa, unidentified
MNLVSTLGIDLAKSTFSLHGVDLNGEVVLRRTLSRAKLSELVAQLPPCLIGMEACSGAHEWARRFAASGHTVKLMAAKFVAPYRKSGKNDGNDAEAICEAVARPNMRFVPVKSLEQQSDLTLHRVRQGFVEERTATLNRLRGLLAEFGHVLPLRAVEVRRQVPQLLGKLPTRVAACARDLLEHAARLEAKTLEYEHEIRTHVRSNALARRAQTRMGIGPITASALVATVGNGRDFKNGRQFAAWLGLVPRQYSTGGKTRLGHITKRGDSYLRTLLVMGARAVLQRAASTDPLSRWARAVRERRGYHRACIAIAAKNARVAWALLAREPVAA

SEQ ID NO: 236717 - protein, 322 aa, unidentified
MNKYKKIYGVDISKDSFDVVDNEGNHDQYGNQAKGFSKFKKILDAESLVVMEATGYYHFSLAQFLSASGISCSVVNPLSVKRFIQMKLDKVKTDKADAAAICAYAQFTDVSIYNPLNDTQAECLQLYSLLEHYEKKRTAIKNKLHGEETLGKPSKAVYHSLNRVLKVLKVEITLMEQRLVELVKQEHSLQVKLLKSIPGIGIKTALFLIVVTDGFSKFETASQLCSYAGITPTERRSGTSIRGRSRISKVGNKRLRHLLFMCSFSACKYNQACRCQYERIVTKGKSEKLALLAVSNKLLRQSFAIAKSGIPYDATYRSALKN

SEQ ID NO: 236718 - protein, 332 aa, unidentified
MFIGIDVHKRYSQVAVLDENGEIVEEVRVENANLDDFAQQYAGSKAALEATTNYYHIHDTLSEYLDVTVANPGELKLISDSDKKTDRVDAKQLARMVRLGSVPESYVPTDEIRQARALVRGRQKLVENRTEYANKIHGLLSDHGITQKVKPLSVKGREFLVELSLPAPWDALLESYLELIQVLTEQMESLEAEIEERAGSLKETQLLMTIPGVSYFTALTIYAELGEIDRFDRAKEVVSYVGLNPIIRESGDSRFEGSISKRGSGRVRWLLVQASYSAVHTCEDEYLSRFYNRLARKKNSKTAIVATARKLLVSMYHMLDREEVYDPPGVSA

SEQ ID NO: 236719 - protein, 349 aa, unidentified
MALTIVEEARSVTGGVDTHAGTHVAAALDPVGGLLGVREFPATAAGYSRLLGWLGGFGTVCLVGIEGTGSYGAGLARHITAAGIRVVEVDRADRQDRRRQGKSDPLDAVSAARAAQSGRARGAPKGRDGAVEAIRTLMVARRSAAGERTRTINQARALVLTGPDDLRTRFARHTPAALITGLASLRPRTGDVAGHATRIALRELGRRARFLDGQLQRLDELIVPLVTAHAPGLLALYGVGPRTAALLLITAGDHPGRLRSEAAWAHLCAAAPIPASSGKVTRHRLNPGGDRQANHALWRIVFTRLGSDPRTRAYAERRTAEGKSKAEIIRCLKRYVAREVYPHLRPAGG

SEQ ID NO: 236720 - protein, 328 aa, unidentified
MTRGIFVGVDVSKDRLDVAFRPSGEKLIVPNDRRGITRGITRLVRTISRLTPECVVLEASGGYERRLLERLAEEELPVALVNPRNIREFARASGRLAKTDAIDAAVLAHFAEVMKPEVRRLPDPETRKLRALITRRNQIVRMMTAEQNRQLQALESVRAGLSAIIRCLKKQIAVLDKQLAALIRATPGFRQKAELLRSAPGVGPVVSATLIAHLSELGTLNRKKIAALVGVAPFNRDSGRLKGKRAIWGGRGDVRAMLNMSTLAAVRLNPSLHAFHSRLRSAGKSPKMALTACMRKLVVMLNAMLKVGSRCSEERTRSVKLIAAPAPT

SEQ ID NO: 236721 - protein, 334 aa, unidentified
MNNVSLIGIDLGKNSFHVHCQDATGRALNRKKFTRTKLFEFLANSPSTTVVMEACAGAHYMARKISELGHTPKLISPQFVRPFVKSNKNDFVDAEAICEAASRPSMRFVVPRTESQQEILALHRVRESLVRDKVKTTNQMHAFLLEFGISMPKGLAMLRRLSVVLAENNLPPYLEKLLMKLQSHYLYLVEQIRDIEHELELAAKQDDTTQRLMSIPSVGPITASILMANLGNGQQYKRSRDFAAATGLVPKQYSTGGRPTLLGISKRGNKNLRRLLVQCARVYILHLEHQSGYLAEWVKNQLSKKHSCVVACALANKLARIAWAITTKQSTYMA

SEQ ID NO: 236722 - protein, 462 aa, unidentified
MRRRDESETWENRREQLEGLPIIRRNVAGIDLGSERHWVCAPTPNAQGREITSFGATTPELIRMAGWLKERHVESVAMESTGIYWIAPHEVLEAQGLQVLLVDTRQLARVPGRDKKTDPTDCEWIQRLHSCGLLRGSFRPEEAVCMLRTLVRDKANLVAESGDWVRRMQKNLDQMNVRVHRAVSDIDGVTGMAILRAIVEGERDAQKLAKLRDRRCSKTEEEIAEQLSGHWREDHLFSLQQALKMYDAVQERIAAYEKEILGKLGDMERDEHHEQTAPPLPNPNKAKTIKHRGQEAKRQALYRMSGVDATHIDAIGVETVEVVLSEYGPDLSRFPTEQQFVSHVTLAPRVPKSGGKPVKKKKRNSASTRVAAALRMAALSLRHSQTALGAYYRKMAQRRSGDIAVFATARKLAILIYRLLRWGQTYVDEGAEAYEDRYRQRRIGHLTATAKQLGYQLIPVNA

SEQ ID NO: 236723 - protein, 347 aa, unidentified
MDKIIRIGMDTSKNVFELHGVNAAEQPVLRKRLRRDQLLAFFKQLPATVIGMEACGGAHQWARVLRELGHEARLMAPQFVKPYVKRNKNDAADAEALCEAMSRPTMRFVAVKSAEQQAALMLIGVRDQLVGRRTQIANAIRGYAAEFGLVAAKGLNQIDPLLARVAGDEALPALARELFEVQGRAYAHIQGQIKALEAKLMAWHRDNATSQRVAGIPGIGPISGVLLTIKAPRPAAFRSGRYFAAWIGLTPKDHSTAGKQRLGGITRAGDESLRAALVAGATAVIQHARRRKGGAADPWLRALLERKSPKLAAVALANKNARIAWKLMTSGESYDPSRRRAAPAPTA

SEQ ID NO: 236724 - protein, 338 aa, unidentified
MTIVTIGIDLAKNIFAVHGVNAAGKPELVRSDVRRAKLLALIANLPPCLIGMEACSGAHYWAREFGKLGHTVRIMAPKFVAPYRMGGKNGKNDAADAAAICEAVTRPNMRFVPIKTIDQQGKLFIHRAHQGYVAQRTALINRIRGILSELGIVLPLAYKTFYQGVHQTLEELPGYCNLVIAELISELDHVQERVVQSERQIQQLAKDDTLAQRLMQLRGIGPATATAIVASIGNGHDFKNGRQFSAWLGLVPRQNSSGGKTKLGRITKEGDSYLRRLLVLGARALLASAVGKNDPVSRWALQIRERRGYGRALVAIAAKNARMCWAMLHLQDEFRTPV

SEQ ID NO: 236725 - protein, 402 aa, unidentified
MTYDYVIGMDACKYFHHACVLDIDGTQVLSKRINQNEQSLRALFSAFSAYDHKVLVVVDQPNNIGRLTVAVAQDIGIDVRYLPGLAMRQLSRIHAGNAKTDIRDAYIIAHAAKNLPESLRSADRVEEAFLQLKVLNGIDEDLARSYTRLINQIRSALVGCYPQFEQALRGQIIHRKWVLHLLARYGGPTKIKRLGKAKAAAFARRYKARNPEPVLDAIFAAISEQTVTIAGAHYAEMGVAMSAKDALLKLEHRQQIEKEVIELINDIPHTQFLLSMPGIGPKTAAQILMTAGDMSDFPSAGHLASYAGLSPRTNQSGTSIMSNSLNRAGNKKLKNALWQSSFASIRFHERSRQFYERKRREGKRHNAAVVALARRRLNVLYAMMRNHEHYHDPAPSQEDLAA

SEQ ID NO: 236726 - protein, 376 aa, unidentified
MGWTPPPSNGIGVPKWKCQSNHLTRMGASAVNITTVGIDLAKNVFQVHAVDVRGKLVLRKQLKRDQVSRCFVNLPPCLIGMEACASSHYWGRMLEGFGHTVRLMAPQFVKPYVKTNKNDMADAEAICEAVARPNMRFVPIKSVEQQAVLSLHRVRQGFVKARTAQANQIRGLLGEMGLVIPQGIRFIAQRVPGILEDASNGLPLAFRQLIERLTNHLKELKEQVDAIQSQIVAWDRGCELSQKLQKIPGIGPLTATALIATIADVHSFKNGRQMSAWLGLVPRQKSSGGKPTLLGISKRGDAYLRTLLIHGARAAIHAAKRRPEGRENSWLAKLLARRHDNIAAVALANKNARTVWALLAHGRDFDPAYVPVSAVA

SEQ ID NO: 236727 - protein, 345 aa, unidentified
MKLLLRQAVGIDVAQNELVVALGRMDEAFLVDIYAHKTFSNSASGFEGLVDWVSSRTEPGIGLRFVMEATGVYHEQLAHFLAGKGLEVSVVVPNKISNFFRTLEVKTVTDKTASETLTRFGLERKLDSWKPPHSLYRRIRHLTRERDQVIADRTVAKNQLHAELAGFEPLASSVKRINQKIALLDKQVKEITTELMALVKRDEEIYRQVRLMSSLPGIGLLTAATILGETNGFELIRNKRQLTSYAGLDVREKQSGTSIRSKPTISKKGNSYLRKAMHLPALAAIRTDERFKAIFTRLVGKHGIKMKAVVAVQRKLLEMTYVLFKHNSTYDKSYLHNSPLPQETL

SEQ ID NO: 236728 - protein, 365 aa, unidentified
MTIVDAVRPVTGGVDARLDLNVAPGPVTGGVDTHLDLNVAAALDPVGGLLGVAEFPTTLAGHRELLGWLSGFGPVARVGVEGTGSYGAGVARFLRASGVEIVEVDRPNRQARRRSGKSDPLDAVEAARAALSGRASGAAKSRDGNVEAIRALVVAKRSARSAKIQALNQIRHLSFTAPEQLRQRLAGVSRHHLAAHAAGLRPATGAGADPVITATKTALRILGRRVLALDEEKAGIDALLSALVTQTAPQLLAVFGVGVDTAAALLVTAGDNPGRLRSEAAWAHLCGTAPIPASSGKVTRYRLNRGGDRQANCALWGIVITRLGNDPRTKAYMTRRLAEGRSKPEVIRVLKRYVAREVYHRLPRP

SEQ ID NO: 236729 - protein, 349 aa, unidentified
MNKKIVKQVAGIDVAQKELVVTLGRMYEDWTPELYSHKIFPSTEKGFTALEAWVEQQAGSTAGVRFVMEATGVYHESLAYFLAKKGYALSIVLPNKISNYSRTLEVKTVTDKTASEAIARFGLERKLDDWTPPKGIFKKIRQLTRERDQLVQTRTMAKNQLHAEQSEAEPLKSSIARVKKQIAFLDKQEQEINTELVALTKQDESVKKTLALLRSLPGVGLLTAATVLGETNGFELIRNKRQLTSYAGLDVQEKQSGTSIKGKPRISKRGNRYLRKAMHLPALAAIRHDERFKAVFARLVAKHGIKMKAAVAVQRKLLEMMYILYKTNQPYDKAYLKQRVPGEVKQGLD

SEQ ID NO: 236730 - protein, 331 aa, unidentified
MRFYTQQHPFYCGIDLHARTMYLCILDQAGETLLHRNMPATPEALLKAIAPYREQIVLAAECMFTWYWLADCCAEHGISFVLGHALYMKAIHGGKAKNDRIDAHKIAVLLRGGMLPQAYVYPAEMRATRDLLRRRMHLARKRGELLAHVQNTNSQYNLPAIGKKIAYKANRDGIAERFADPAVQKSIEVDLALITYYDELLRDVELTIVKTAKHHDANTLYLLQTVPGIGKILSLVLLYEMHDIARFPRVQDFASYCRLVKCAKESAGKRSGTSGSKIGNAHLKWAFSEAAVLFLRDNPAGQKLLTRLEKKHSKGKALTILAHKLARAVYY

SEQ ID NO: 236731 - protein, 371 aa, unidentified
MGESSKKLFVGLDVHKDTIAVAYALEDRGAEVVSLGMIGTRQYDIDKLIRKLESKGVPLVFAYEAGPCGYWLYRYLTRCGLNCLVVAPSLIPRKAGDRVKTDRRDAVTLARLLRSGDLSSIYVPTVDDEAIRDLSRAREDAVRDLKRSKVRLKAFLLRQDIRYEGRATWNPAHLRWLAQVVCPTPAQQIVFQEYVHTVTEQTERVRRLDAELHTAVKTWRLSPVVEAVQALRGVEFTGAVTLMAEVGDVTRFDTPRKLMSYLGLTPSEYSSGPQRRQGGITKAGNGHARRALVEGAWAYRYPAKVSRHLQLRLEKVPAEARAIAWKAQLRLCKRYRVLSARGKHVNQVVVAIAREMAAFAWAIARTVTIAA

SEQ ID NO: 236732 - protein, 406 aa, unidentified
MDKEADQASTTVCPRARIGASLLAQTAIPHNLQEVNEMIYIGLDVHKSYCVATAIDKRGKEIGIHRFPTDKRAIEAYINYLPKAEKQAVVEASTMMYPVYRVLEEAGVKTKVANPLKVKAIASAKIKTDKIDSKTLAHLLRAKLIPECYIPSNAVRELRKLCRHRVSLNKQRTHTKNSIHALLAEQDVKHSFSDLFGSGGRAFLDSLRLSKETQIILNTQLAVLDVLNKQIEEVSKHIAETALIDKNAKLLMSIPGIGYYTALTIVSEIGDIKRFESDKQLCSWAGLVPSTYQSGQHTYHGRITKQGNKMVRWVLVQATQQTVRYENPLTKHFEKVRARKDRNKAIVATARKMLMIMYAMLSKQEAYWYADEGLIKRKEEHTRLTAQIYLKRPFKKRVIGTSQSLS

SEQ ID NO: 236733 - protein, 346 aa, unidentified
MTQYKRIGIDTSKAVFTLHGIDQRDQPTLRINLRRSQMISFFRKLPPTEVAMEACCGAHYWARELTALGHAVLLIPPQYVKPYVKRGKNDRNDAEAICEAAGRPGMHFVPAKSLSQQAQGMVLKVRDTLIGQRTLLVNTLRGHASEFGVVAGKGVGRVGSLLAAIEQDATIPAEARDMIALLGQQIEHLDIKIKALEARLNAAHKANAVSRRLATIPGLGPVTALTLATEIDPAAFASGRHMAAWIGLTPKEHSTGGKQRLVGISRAGNERLRSLLVVCATSVIKAATMPASKQMTSWLRGLLQRKPRKVAAVALANKIARVAWAVMTYGTVYRRSPTNVEVSYAA

SEQ ID NO: 236734 - protein, 412 aa, unidentified
MKQIRDKVAGLDVHRDSVVAATRIVQPDRTVTITKASFSTTSKGLGELAAWLSEAGPTCVVMEATGVYWKPVYYVLEGLFDELWLCNAAHVKNVPGRKSDLSDAEWLADVAAHGMVRPSFVPPPEIRELRDLTRYRKAQVDARGKEIQRLEKVLQDAGIKLTSVASTVWSQSSRAMIEALIAGERDPKVLAQMAKSRLRSKLPQLEEAFSGRFSEHHAFMCKEIIGHIDHLDVSIAKLNAEIARHVAPFEAAITLLCSIPGISRTTAEVLIAEMGTDMSRFPTAAHLCAWAGVAPASHESAGKHRPAGTRHGAPWLRRTLVPAAQAAARTKGSYFSAHYARIARRRGHNKAVVAVANSIVAVAWHLLRNGALYEDPGADYFERRNDPAREAQRLQRRIEALGYEVTLSEKAA

SEQ ID NO: 236735 - protein, 306 aa, unidentified
MKEEVVYCGIDLAKDQLDVVLEHKHWQVSNQKAAINRLVKQLRKRAGIHVICEASGGYEQLLVCALQQAGVALSVVQPNRVRQFARATGILAKTDRIDASVLVRFGQALKPAATKALPEPVRQLRQLDRQRGHLRDVLTAEQNRLLQLRDLELRSLQSALIRQLSEQIALIDQRIKTLIAQDQILCLKAQKLTSFAGVGARTASLLLARMPELGQLNRRQVAALAGVAPFKRDSGTMRGKRYIFGGRRHLRRGLYMAALTAVRHNHILRPFYQRLTQAGKPPKLALTAVMRKLLIALNSALAPQCA

SEQ ID NO: 236736 - protein, 375 aa, unidentified
MKEKLRFLGLDVHAETIAAAIAEPDGEVRSLGTIPNRLESVRKLLKKLGPVEKLRACYEAGPTGYVLYWQLAELGVQCEVIAPSLVPVKAGDRVKTDRRDAEKLARSYRSGDLTAIWVPDEGSEALRDLVRAREAAKQDQLRARHRLNKFLLRSGQRPPAGVRAWTHLHLIWVSQIRFAQVAQESTRLDYLHEVEHMRERVVRLEQAIVEAVKLASPILQEVIHDLQALRGIAHISAVTIAAELGRVSRFAGARELMGYCGTVPSENSSGKRTRRGSITKTGNAHLRRIVVEAAWSYDRPPAIWAGLRKRQQTASEEAKEIAWKAQHRLHKRYARLAAKGKDKRKIVTAVGRELLGFIWAIGTRAEAEAAQRVAA

SEQ ID NO: 236737 - protein, 345 aa, unidentified
MKIIRVGVDLAKNVFQVHGVDAREKPVWQRSLRRNQWLAELSRRVAPGAEIGMEACAGAHHWARELRSRGYRVKLIAPQFVKPYVKSNKSDRNDAEAICEAMSRPSMRFVEVKSVEQQDIQAVHRVRSELIKQRTSKANQIRGLVGEYGLVAPLRLSSLRGAIPQWLEEAENGLSDRFRRLLTGLSEDLRRLDERIKALDEEIASIIRDTPQAQRLLQLRGVGPMIATALVAAVGSGAPFRRGRDFAVSVGLTPKHHGTGGKERVLGISKRGDAYLRQLLVHGARSAARTAKGKDDPLSRWIQGLLARRHPNVVSVALANKTARVAWAMLRHGTDYDRSLAAAAK

SEQ ID NO: 236738 - protein, 340 aa, unidentified
MSEITTIGLDLAKHVFQVHGVDASGATVLRKQLRRGQVVAFFATLPRCLVGLEACATAHYWARELQAVGHEVRLMPAQYVKAYVKRNKNDAADAEAICEAVGRPSMRFVALKTAEQQAALLLHRGWERLVRQRTSLVNALRAHLAEFGVIAPQGLRNVARLIAIVRDASDTRLPDLARQVLRVLATQLEQVAATVAAIEQQLTTWHRNNPMSQRLASIPGIGPIIATALAATIVEPVGFASGREFAAWLGLVPRQHSTGGKARLGGISKRGNRYLRRLLINGASANLLRSKATNADPWVIGLRRRRPSLVVAVAWANKTARIAWAVMRREASYRHRSAAA

SEQ ID NO: 236739 - protein, 367 aa, unidentified
MESIGGVGMDVHKETIVVAVVDGAGPARDVGTIPNEPTAVTRLVRQLGGMGHWAYEAGPCGYDLYRQLTAQHVRCSVVAPTLIPVRVGDRVKTDRRDARKLAQLLRSGELTAVWVPSEATEALRDLVRQRHAAQQDAVRARHRLLKFLLRQGQRPPTGVAVNSLAWWSWLGTVPYAQAAHTRVHAEYLGEVHHQRARVAALDQALATAVATAPAPLPAVITGLQALHGIGLLTAATLTLEIGRFDRFPSPRQLMGYCGLVPREHSSGGHTHRGAITKTGNALCRHVLIEAAWHARQAARPGKHVTARLAGLPPALRPIARRARTRLPQRFTRLSLRGKPPTQVVTAVARELLGFVWALGVALEHAAD

SEQ ID NO: 236740 - protein, 342 aa, unidentified
METIIRIEMDTSKNVFQLHGVNASEQPVLRRRLRRSQIVEFMGKLSPTTVGIEAGGAAHYWARTFAGMGHEVRIMAPQLVKPYVKRGKNDAADAEALCEAMSRPTMRFVSMKTAEQQADLMLVSIRDRLIRSRTQLTNAIRGYAAEFGLITTLGSKKVVPFVRHVADDLSLPELARVLFSELSDELVQIEARIKKIDVQLIARHRRDELSQRLTQIPGIGVIGATMLALKIPDPTNFKSARHFSAWIGLTPRDHSTAGKTRLGTITKAGDEILRSLLVVGATAVIRHIRRGRGKHWPWLQRLLERKPPKLAAIALANKLARIAWKLTTSGQGYRPTHLTVAA

SEQ ID NO: 236741 - protein, 372 aa, unidentified
MANKVRSWAGLDVHAAKVVACVVDAESGEMTVHRLPGETEKVVAFCAGLPGPSRVAYEAGPTGFGLARALHAAGVGCVIAAPGKIERPAQDRVKTDQRDAERLVRLLMIDALHPVRLPGLEEEALRDLVRAREDLRGDLMRARNRLGKLLLRYDVRYEGTWDRWTARHRAWLAKVELPERGAQATLLDYLGAIDALVIRREQIETTIGELAPASPWARDIARLRCLRGIDTLTAVGLCAEVGDFQRFERPAQLMSYLGLVPSEKSTGEARRQGAITKSGSSLARWLLIEAAWHYRHPPRLGAKLNRRQQDQPAAVIAISWKTQQRLYQLWRRLDTKTRQTPPTRRGRDRPAPRRVLLGDRQRRPTHQLTHTD

SEQ ID NO: 236742 - protein, 424 aa, unidentified
MKSTKLTPAVQLDQVLDICVDVSKSKLNVYFELGDQAIDDEWANTTRQIEKKLHACRRLARAHGFKSLRVICEPSGGYQDKLLRTARRLGHLTAYVNGEAVAKFRVVESNDAGKTDLKDPHIISTLARLNKVLRHRDLPEEYELLRKCGFLYERADRALMAVRGRMHRVLMELFCDFSFSKEFLYGNSGRALISKYRCNPYRIVRAGRTRFERAMRRRAPRIWQRSIERLWDDATSSARHQLTPAYVDLLEFELSQLWEEFLLYEQRKATLEKRLTSLLRRLRQKDPSLPAPTPGVISAKNLARLIGETGPLSDFTSWRMLMRYAGLNIQMRQSGQYRGQYRISKKGRPLLRKILGQVIFPLVRRTGLYGDYFRSKRLSMPGQKAMTAVMRHFLRKLHGWYRSGQAFNAERYFTSAASYERQAA

SEQ ID NO: 236743 - protein, 473 aa, unidentified
MRKVSRRGVAAGRAEGKSLCARLAPSSGAQGSNGIQRRKRRPRMDKQEREFRLRGPGDQVKEGGRLMRFAGIDVGAERHMVAVVGEQGEVLCRSSPFGEEASGYAHLFELLGPPESCLLALEATGHYWRNLFVALLAKGYAVAVLNPLRTRRFAEEELQRTKTDAIDALGIARFAAQKRPPAAQLPDVATEELRELSRLRDRLQEDFASRLRQLHRAVDLGFPEFTRHVRTLESQLAATILSRYPTAESFRGVSVKALARIVYDGSHKIGEELARALIEAAAKSVGSFHSEPYRLRIKYLCEDLDVLRHRLKDLARDIEHKIDDHEVGKLLTTIDGVGPLTAACLIAELGDPARFRSAGAIASYVGVAPRLRQSGKKRFSGSPTIPFGNARLRKALWMVVLNAVRCNPWLRQYYERLRAAGKPGKVAVIAAMRKLLAAVWSVATHRRAFIPYLLPNGATAGVPTGPGSAYERR

SEQ ID NO: 236744 - protein, 372 aa, unidentified
MGHHSEAFIGIDTSKLRNAVAIAEGGRGGEVRFLGEFPATEAAVRKLVAKLAAKYRRLTFCYEAGPTGYWLYRLIKSLGHKCVVVAPSLIPKKPGDRVKTNRRDATSLAKLSRAGELTAVWVPDERHEAMRDLSRARQAAKKDQQGKRQQISSLMLRLGRIYPGKKTWGPAHMNWLMAQKLEHREQRIAFEELLEGMRQEEERVQRLEEAIRDAVPEWSLAEVATALQAVRGIDLIAAVAVLAELGDLSRFRNPRELMGYLGLVPSESSTGDAVKRGGITKAGNGRARRILVEAAWSYRYPPRVSREKQPKVAAAPRRVREIAWKAQARLCGRFRSLERKGKRRTVIATAIARELSAFIWAINREIMGGRQA

SEQ ID NO: 236745 - protein, 342 aa, unidentified
MFYAALDVSLRSVAICIIDEAGKVRLERSVPSDVPDIVRCFNEFGQPIHQVGLEAGTLTQHLTYGLTDAGFDVVCMEARQVNAALSAMRNKTDKNDARGIAQLLRSGWYSRVHVKSVESHYTRALLTSRKVMQRKCLDLENEIRGLLKVFGVKLPIRLRGGTFEEAVRGTIENDPALSHALLPMLEARQMLLETFLELDRRVRKAANQDAITTRFMSVPGVGYVTALSFKAAVDDPTRFKSSRTVGAHFGLTPRRFQSGEKDNPGRISHAGDTDVRATLYAAAIAMLMRSIAWSSLKAWGVRLMKTKGRRRAIVAVARKIAVLLHRMWIDGTEFRFGSEAAA

SEQ ID NO: 236746 - protein, 355 aa, unidentified
MNSIKYVGLDVHRDTISVAVLNAEGKLVMQSVIATHATTVLDFLHGLRGTLYITFEEGTHSAWLYDLLVRRVAHLVVCNPRKNALLKAGSKSDSIDARKLAELLRAGLLSPVYHGQNSTAAVKHLGSSYAALTEDTTRIMGRLKALYRGQAIACAGQKPYGTRHRDEWLAQLTDSGLQRRARRLYQELDLLQQLRREARRDLILECRKHSEAKLLRTVPWLGPIRVALLIGRVQTPHRFRTKRQFWAYCGLALETRSSADYQMVDGQLERRKKPVFIRGLNRNHNHDLKNLFKSAATTASGSDGPFRPFYENLLKKGMRSEMARLTLARKIAAITLHVWKKGEAFDAEYLKSQAA

SEQ ID NO: 236747 - protein, 416 aa, unidentified
MKSLKQGIIQDKEVFIMRVVFGIDVSKASSEVAILVNGEKVHGYTMPNDAIGFAHLLNDLKTVQQPEIIFEATGVYSRRLQVFLEDSGYAYTRLNPLEAKKQLDSLRVRKTDKIDAEKLAQSQFVLNRKPTYVQKEVYQNLHDLSRFYQNLTEDIVRTKNRLHKVLQVTFPELEELLSAPTGEQYWKLVIAFPSRNFVLNLSEGELIDVISQSTSKRISDKRIAYLIDKLTQLAKQSYCAVKKNSPMIEEVRYYAKELLRLTEQRQVVLDEMVSLAQPLPEYDILCSIPGIAEATATSIIGELGDSRRFQSANQINAFIGIDLRHYESGNFLAKEHITKRGNPYARKILYKCIHNIAAASHTNPCHIADFYDKRKRQSQIASTKPHTIAAVHRLIRTMYYLITHNKLYDYTVTQSH

SEQ ID NO: 236748 - protein, 339 aa, unidentified
MKYTPIGVDIAKHLIQVHFINEYTGEVVDKQLRSKDFLAFFSNREPCLIGMEACGGSQYWARELEKLGHKVRLMQGRFVKAFVMGNKNDVMDARAIWMAVQQPGKAIAVKTEEQQSVLVLHRSRRQLVKFRTAQINALHGTLLEFGETIHKGRAAMDRELPAALERMKTKLPPYLITVLEDQYNRLSELDSLINGLEKQLNSVAHQNETCKRLMEILGVGPLIATAAVATMGEASAFKSGREFAAYVGLVPKQTGSGGKVRLLGISKRGDTYLRTLFIHGARAAALLVKEPGPWITELKKRRPTSVAVVAMANKLARTVWAIAAHDHKYDKNHVSIRPY

SEQ ID NO: 236749 - protein, 330 aa, unidentified
MCERIRTRVARETKQRAEIVSCYEAGYDGFWLHRLLEAHGIRNYVIDPASLQVDRRARRAKTDRVDVERLLRSLMAYLRGEPKVWSVVRVPSVAEEDDRRLHRERGRLINERIQHVNRIKGLLAIHGIYDYQPLRRDRAQRLEQLHTANGRTLPPRLKAEILRELQRLELVIGMIKTIEAERDAIALVNTETERRGAKKIQHLAKIKSIGPEFATTLVGEVFYRSFDNRKQLASYVGLTPTHFQSGAMSRDQGISKAGNAKARTVMIELAWLWLRHQPDSPLSVWFRDRVGKLKGRIRRIAIVAVARKLLIALWRYLETGLVPKGAALKV

SEQ ID NO: 236750 - protein, 306 aa, unidentified
MSHKNYGGIDVAKKDIVIGIFGQEQTKTEANTAKGHAKAVAYLKKHNVDLVVLESTGGLEVPLANALHAAGMRVVIANPQRTHKYAGSFSPSKSDHLDAKMLADYAQALDARKLADDMCYVPPSEEVLVLEALVKRRGQLVTMRTMEKNRLKQTHVSQQASVRALIEHLSEQIAALDKEIDKNNRDGFGGKGEILKDVPGVGKITCATILSMLPELGRVQHKRAALLVGVVPPSLQSGEKEGKRGCVGGRMAVRNALYMAALTATRKEPKIQIFFERLINRGKAFKVAINACMHKLLRILKLLLMN

SEQ ID NO: 236751 - protein, 338 aa, unidentified
MITLLAIDLAKNVFQLHGVDSRGKPLLRKRIGRKDLVRELAQQPGGCEVAMEACGGAHFWGRKCRELGLNPKIIQAKFVKPFVKSNKNDAIDAEAIAEAAQRPSMRFVPVKEVWQQELQHLHRIRRQMVKQRTALRNEIRGIALEYGVAISPGEKRLREAMAQLREDESLPPVLRRWVERVREQEQSLGQSIDELDRELERIAESRDDTRRLQTIPGVGPLTATAVVASMGSPSNFKNGREFAASLGLVPRQHSSGGQNQLLGISKRGDRYLRTLLIHGARSVVIQPSRPQDDRVRRWGQEKARKLGINRAAVAMANKNARMIHAVLSGGKSYESRAG

SEQ ID NO: 236752 - protein, 374 aa, unidentified
MGCQAGGEAASLTTMITDDKTETNKSYETIKLGIDAHAKWYYVARQLDGATPQPVQKMDFHGLLRFVVRQKDLAREVHTCYEAGAFGYHLHRKLEALGVSNLVVQPQDWDERGKGVKTDRIDALALCQRLDRYVRGNRKAFSVVRVPSEEEERERAFSRQRQQLVRERQRLQAMGRSLLAMQGIHVRGKWWKGQTWAAICREAPAWVVERLEVFMKLIEPVEVEERKLTEGIQKVGRKSRIPKGVGPLSFEVLRREVGDWSRFNNRREVSSYTGLCPREHSSGGKRRGGSVNKSGNPRVRAMLVEMVWRMMRWQPGYHALRKWMAVLGDASRSAAVRKKAIVAVARQLAVDLWRLFTGQTTAEKLGLIYLPEAS

SEQ ID NO: 236753 - protein, 351 aa, unidentified
MEKPIKQCVGIDVSKDTLVVSYGVMDGNFDIRILSNASLPNKQSGFTRLLKWSETLNASQGDIVYLLESTGVYHQQFALYLHDNRCKVVVILPNKAKAFMRTLPVKTVNDKVSAQMLAQLGLEKKLDQWQPPAPVYRELNQLTRERDQLMDEQTQIKNQLHAEQSGAWPNKQSIKRMKSRLGLLAKQIDQIENEIAELVKKDPWLQQKIDTVCTIPGVGLITAVTVIAETNGFNLIRNKKQLVSYAGLDIITKDSGTSVRSKPRISHRGNKYLRKCLHFPALTAIRHTHSMKTLFTRLVDKHGIKMKGAVAVQRKLLILIYVLWKKNEPFDNNYHLKIKEPRVIGALHELA

SEQ ID NO: 236754 - protein, 466 aa, unidentified
MGKPRVVPDEDHEVVYERVAAVDVAKASGVVCLRTPDSKRPGRFTNRIWDDVPAMRAQIAALGRELAGHGVQMVTLESTSDYWRIWYYVFESIGLAVQLVSASQAKNLKGRPKTDKLDAMWLARLTQWGMLRPSFVPPAAIRRVRDFTRARTDLVAERTRCLQRLEKLLEDAMIKITAVAADGMKAKSVVAMVAALIDGQRDPHVLADLARGPLRAKKDALAEALDGLFDSHHGVIARALLDQVAFLDRQVTAMEEQAIAALAAVPESWGVDPGGQTGPGCGTAPGSPVLAAAHRLAEIPGLSLWLAIVIIAEIGLNMTCFPTPAHLVSWLGLCRSASQSGARAGKGKPKKGNSYARAAAGQAATGAARTATFLGERYSRIARRRGKPIAQTAVARSIMIIAWHLLNDPQARYHDLGPDYLASRVNRDKKIRTHLRGLNALDVTAHDICAALGITAPDIPSGGQAA

SEQ ID NO: 236755 - protein, 412 aa, unidentified
MEDILTTVMGLDVHRDSIVACFVKGEAGQTPEKETRTFGTLIPEMQKLREWVVETECRNVAMESTGIYWIPIYEMLETCFNGEIRLLVVNARHMKNVPGRKTDMKDAEWIATLLRAGLLKGSFVPEKAFRKLRHLTRYRKAIVHDVTSQKNRIDKFLQSSGFRFTAFLSDAFGASGRNIIRHLMEHGSIDREALDKCLKTQTRKRMDEILVALNGTLSEHQRSFLRMAFEHLESLESHRKEVEGAIARETLKHQRALELLCSIPGIDVTAGASILAEIGSDMSAFPDSEHICSWAGLSPGNTESAGKRKSAHINKGNPYLKSMLCEVAWVVAGKRDHYLSGWYWRIKQRKGAKRATIALARKLLSMIYAMLKSGNPYDESCFEARRKLSERKRASRMIHELQKMGYKVEPVV

SEQ ID NO: 236756 - protein, 359 aa, unidentified
MKAQVNQIDFTGQNIYAGFDVHKKSWKVTIMAEDTFYKTFTQPPNPEVLVNYLKSNFPGGNYYSAYEAGFCGYWIHDKLTSFGIKSMVVNPADIPTTHKERVQKEDKRDSRKIAKSLSSGTLTPIYTTTIQSQRNRSLLRTRAMLVKDMARYKNRIKSFLFFYGISIDDAYAQSKKHWTKRFISWLESLDIDGETGKEALQVLISECKNLRASILKVTRQVRELSQTAIYQEQVILLKSIPGIGLLTAMTILTELETVNRFSNLDKMCGYIGLVPSTKSSGEKEKSGDITSRGHGVLRAAIIESSWVAIKNDPSLMKCYISYIKRMDSNKAIIKIAKKLLSRIRFVLANKTPYRCLIEK

SEQ ID NO: 236757 - protein, 451 aa, unidentified
MKGMKKSKSPDKSTVNLPLVNANAAGIDVGDTIHAVAVPADRDPIAVRTFGTMTCDLEAIAAWLQACHVDTVAMESTGVYWKPLFSLLIQSGFEVYLVNAKQVRNVSGRKNDEDDARWIQKLHSCGLLQSSYLPDSEQEGLRTLVRHRRTLLLDRSRCVLRMQKALEMMNVKLHTLIRDITGKTGTLIIEAIVQGNRTPEHFLTCIAPNIRADRATILKSLQGNWREEQLYLLADCYACYQFYTERIASCDKVIEQQLQQYQHQLFPETEPKPEMISTKKANRNKPEFNTCNYLKSIHGVDVMAIYGISDIAALELLAETGTDMSKWPSAKHFVSWLNLCPNNKISGGKLISSTLMKKKPNAASQAFRNAANAIQRSDNWLADYFRRMKAKGGNRYAMLATANKMATIYYKMLSCQQEFKPVDLVSYQQKYRQTKIFYLERKLNDLKKQAA

SEQ ID NO: 236758 - protein, 347 aa, unidentified
MRFYTRTHKHYCGIDLHARTMYVCVLSGEGEVLLHRNLRCDPEGFLLAIGPFREDLVVAVECIFTWYWLADLCAREGIAFVLGHALYMRAIHGAKAKNDRVDARKTAGLLRGGLMPQAYVYPAEMRATRDLMRRRLHFVRHRGQLLAHIQNTHHQYNRPTPGKRITYRSNRDGIGEGFEDVSTRESLAADLALVDHFEVVIGDLEASVVRRARIHDPQAFQRLRSVPGIGKVLALTILYEIHDIRRFERVGQFASYSRLVKCQKSSAGKVQGSSGAKIGNAHLKWAFSEAAVLFLAKCPEGKKLFARIERKHGKGKALSILAHKLGRAVYFMLARERAFDLERFLRS

SEQ ID NO: 236759 - protein, 348 aa, unidentified
MRFYSQPHAYYCGIDLHTRTLSLCLLDAAGAIRLEATLPPDRDRLRAALEPFRDGLVVGCECLFAWYWLADWCAEQGIPFVLGHALYLRAVHGGKTKTDAVDAAKLARLLRGGTFAEAYVYPNAMRATRDLLRRRTYLVRQRATLIAHLQTTFLQYNLPAPQKKLAYAANRADLDLSVFPDPSTRSMLEADLAVAAALDAQVKRLEAELVRTAKVHDPQTFARLRSVPGIGPVLALIMLYEVQSIHRFEHEGQFLSYARLVGGVRESAGKSKGTGGRKIGNAHLKWAFGEAACLMLRESGKAKTWVARKERKVGKPRALGALACRIGRTVYHLWRKQASFDAAKFLAS

SEQ ID NO: 236760 - protein, 357 aa, unidentified
MSHTTERGVLLPKVTIGLDLGDKTSRTYEVDAGGRCLREATVPTTPAGLTHYFRGRERCRVVLEVGTHSPWVSRTLEALGHDVIVGNPSAMYARGHRRKRNDRLDARFLARQGRADVELLAPIQHRGAGAQQDLAALRARDQLVQARTKLINHVRGAVKSLGSRLSACTAEVFAKRAAPELPETLRPALTPLLEIIAALTQRIAAADRQVAAVVQARYPEAQHLQQPKGVGPLTALGFVLLIEDPRRFQRSRQVGAYFGLVPRLDESSDSSPQLRISKAGDALGRRLLVSAAQYILGPFGPECDLRRSGLAIAARGGKNAKKRAVVAVARKLAVLLHRLWVSGAAYDPDYVLKRRAA

SEQ ID NO: 236761 - protein, 318 aa, unidentified
MVDHSIITAGIDTAKDKLDVAVRGMDRVVTFENSNAGFKRLAEHLTAEGVGRVGIEATGGYERGVTRHLQKAGFEAVLLQPLQVRAFAKMRLQRAKNDRIDARLIADCTHLLDAHNKMPPEPRFDALADHLTFIEQLEADIVRIQTRLEHIHDARLRRMYVDDIKRLEKRVAAERRRLEAEARAHADLATRLDLVRSVPGIGAPTALALVVRMPELGRVSREEAASIAGLAPFVHQSGKFEGQTHIGGGRGRLRRPIYLAAFPAASHWNTALVALYKRLRARGRCHQAALVACTRKLLIYANAVVARGTPWEDRTASA

SEQ ID NO: 236762 - protein, 402 aa, unidentified
MLPKRACIALDVSKGNSHMQAFYSAGFKATDVMIIQHDKNGFNTLDELIKKIERETGDTVAIVFESTGSYSKPLEHFLWSIHKKYYLVPPLLSAKVRKSDIRPTKTDAIDCETIANVYYLKNLKEADRLSKTSLRLKNYSSYYLFYVNREVETKIKYRQYLDIVYPKIDEYFDVMALSFIEFIKNNPDPNKLIKRSHEDIYKRFQKFSYCGEIKSKARATSMKRYLSEAMITIDSDNPEITILADVAKVLLEDLNHLENMLNEIIVLAMKTEEYKYIVTIPGLSKNTAARISAEIAGIDRFSSASKFVAYIGIDPTVCQSGKLTGEHLNITHKGNQRLRCLLYLVCVGSLKNRSDYNPIRDFIIKKKNDGLAPKAAIVAGCNKLARIIYAVCSKREVFSIQQ

SEQ ID NO: 236763 - protein, 397 aa, unidentified
MYIVGIDIAKRKHEAAVIDGEGTVIIKPFSFTNNCSGYNRLLAMLTKAKLPLDEVSFAMEATGHYWLALFTRLQKEGFRVQVINPVQTNSIRSFYIRQAKTDPRDALLIAEVIRFGHFSESTLHPENIYELRELCRGRHAIVSMQADVKRKVVALLDQVFPEYETAFTNMFGDTSMAILQTCPTPKELSEMPLEELCHLIEVSSHKRFRMAKAQELQELARSSFGFAMAGDVFSTMIRLYAKHLDFLKQQVREMDRKIAEIMDSLDTPITTITGIGPTLGAYILSEIGDISRFSSAAKLAAYAGIDPTMRQSGEYNGVRNRMSKRGSPYLRHAIWLAASSAVLHDPALKLYFQKKRDEGKPYMASVGHACRKMVSIIYAVMRDNKTYTPHIPNEISA

SEQ ID NO: 236764 - protein, 358 aa, unidentified
MRIIGCDLHARQQTVAMLDTDSGELVEKTLQHDGEELRKFYSGLSRPVLVGIEATGSMQWFLELMEELGIECRVGDPAKIRAAEPRKQKNDRRDAQLLLKLLVENRFPTIWMPSTEQRDLRALLRHRHQWVRLRSRIQHTLQSMALNHGLRRGHALWNQAGQHALWTLPLAPHASERRKALMKLYPCLQESIDELDRQVSRQVDQHPPARRLMTHPGVGPVTALATEVFLGDPLRFTDGKAVASYMGMIPREHSSGGRQRLGAMSKQGNTLLRYLWCEAAMHAVERDPELKRFYRRKLVQKGPGKARVASARKLGIRLWIMLREQIDYEEFCRRGKARRESGSVRAGMPDRNSGPGEA

SEQ ID NO: 236765 - protein, 419 aa, unidentified
MENSKTKKIKFINRKTMIAALDIGKCFHYAYFRSPNGRDIKPFPFCNSKNDFSKFWTRLCQFKREQDLEDVVIGFESSGPYAEPLFHYLTKKPVKLVQINPMHSKRVKELTGNSPNKTDKKDPRVIADVISLGHALTLVVPEGAAAQLRRLTHARERALKKRTAAINQLQDLVFIIFPEFLAVMKGIATETAFHLIKRYPGPESIVSLGLESLAAEIRRVSRGKLKRERAEELFNAARESVGINEGKGGILLEIEHLLFQIRSDNKFISDLEKEMKERLEEIPYSRSLLSIRGVGIVTVAGLIGEVGDFRKFNTISEVMKLAGLDLYEVSSGKHKGRLRISKRGRPLIRKLLFFASINIVKSNGIMNKPYQRMLDRGMLKMKALVAISRKLLGLIFALVRDNTEYIENYDNVHHFKLAA

SEQ ID NO: 236766 - protein, 322 aa, unidentified
MEQFSFFAGIDVSKLWLDIAVFRPGYGIVYQTRIDNNVKTIRSFLKNLKKQFKAEITDYMFCMEHTGKYGHAFLNASLVEQAKVWLELPIQIKRSQGLVRGKTDRWDAARIAQYAHRFADKAAFWKPADKIIQDLKELQVKRNKLVKAHAQLTQESKNDPFFKKPLLALKQGIKAIEFKMEQLVVQNESANQQYELLKTVPGIGKQTAMALIIVTNGFTRLTETKKLSCYAGLAPFPYSSGSSVKGRTKVSKMGDRKLKVLLNLSAWNAIRSITAFKDYFNRKVSEGKHKMSVINAVRNKLIALALAVIKRNSPFEKTYPFS

SEQ ID NO: 236767 - protein, 312 aa, unidentified
MLDEKQYVGIDASKLRFDGYVHPCGKRMSSGSSADAIDELVRQLADLNPTAVALEASGGYERRLADCLHAAGLEVHILPPARVRGYARAMGQVAKTDAIDAVMIAQYLAATHHRLTPYAPDPARARLSALAAHRRRLLAEKTGLASQLDTIDEPIVRDMILARQKALVQDVTTLDKAIKKLLVTTPDLGQRYKRLCQVTGVGPVFATALLADLPELGHVSPKVAAALLGVAPHARQSGASCRPGRCSGGRKHLRDIAYMGALSAIKVKDPVLEPFYKRLRAKGKPFKLAMVATIRKLITILNAIARTDPIFQ

SEQ ID NO: 236768 - protein, 349 aa, unidentified
MRVLKQVLGVDVAQKELVVTLGVLNEDLSIDFLLHRVFHNKETGFVALLKWLKKHTDESIKLQVVMEATGVYHQKFAYYLDDNNISLCIVLPNKISSYLRTLETKTITDKTCSEAIAHFGLSRKLDNWTRPNKTYKVLQQLTRERDQLVFERTTIKNQIHAEESESEPNSSSVKRFNARIKFINKQEKEIKKEIDKWLNSDERIKGQVEKITTIPGIGQLTAVTILAETNGFELIRNKKQLTSYAGFDVKEKQSGTSVKGKPKISKRGNRYLRKCMHLPSLSAVKYNETYKDLYARIVSKSGVKMKALIAVQRKMLELTYVIFKNNTVFEQDYEAKKRVLLLGEDTLTS

SEQ ID NO: 236769 - protein, 418 aa, unidentified
MTRRDDSRIIRIVHPICCGLDVHKESVSACVIFPDDKGEEQCDVKVFGTFTDDLMRLRDWLAAHNCPVVAMESTGVYWRPVHNVLEDSVQVVLVNARDMHNVPGRKTDIGDSRWIAGLLRHGLLKSSFIPTQDVRQWRDLTRLRKKYVHTVGDYRKRTHKLFESANIKIDSVVSDLFGVTGRNLMQLLVADRKLTLSDIQTCVRGKLKGKEAELFRSIQGFFTDHHRFVLKMILETIATLEAQIEALDLQIRCAMKEHEALLDRMKQAPGIADVASREILAEIGPTLDSFRKDTALVAWSGLCPGNNESAGKRKSGKSPVRKHHLKTIMIEVAWAAIKKKDSYFKDKYYRLKARRGAKRAIVAIAHRILLGIYHVIKDGADFRDLGGDYLTLRNKSQKVFHLRKQALAMGFDLVPQTV

SEQ ID NO: 236770 - protein, 330 aa, unidentified
MNYSHFVGLDVGKKSFDACLVSLDKELSHHTFPNTPGGIEELLHRVKQRGVEVETALFCAENMGSYVIDLCLSSYQFHFPLALECPLTIKRSIGLQRGKNDRIDARRIVRYACLHYRKLRLYQLPDKDLVRLRNWMVIRDNLVKQKVSSRKLLELPRETSGLADLVTAMTFLEKQLSLLKEKISYVEQEMEKIISSNIALLTNYQLLTSIKGIGPINAIVLLCVTGNFHRFSDPRKFACYCGVAPFEHSSGTSIRGKTKTSNLANREVKVYLTRAAITAISWDPQIKAYYKRKTGEGKHKASVINAVRAKIIARCFAVIKRKTPFVTLRA

SEQ ID NO: 236771 - protein, 349 aa, unidentified
MLADGVDYVIGVDTHRDQHTLAVVVAPTGAVLAQTVVRATGRGYAQALRFAESHAGGVRAWAIEGAGHYGAGLTRYLGDRGETVLEVGRQARTERRLRGKDDPLDAIRAARTGLAAETLTLPRAGQRQEALRVLLLSRRSAVDVRRVALVQLRSVIVTAPEQLRDELRQLPVTKLIQRCSRFRRSGSRTPDELAIVLALRSLARRIEAATAEADELEREILKHVRALVPELLDEPGVGPIVAAQLIVTWSHKDRVRSEAAFARLAGVAPLPASSGQTIRHRLSRGGDRQLNRALHTVILHRRQHDPATRDYITRRIAEGKSARDATRILKRYLARHLYRVMQKATPLMT

SEQ ID NO: 236772 - protein, 347 aa, unidentified
MIEVEFGDFNHGSHGDPDDQDEHGQVVKRAQIDSEPEALIAFLRDLPFTIEAIGLEAGPLSQWLHRGLGEAGFELVLMETRQVKAVLKAMPVKTDRRDAEGIARLLRMGWFRPVHCKSVSAQEMRALLSARKAVQKAALDIEQSLRGVLRNFGMKLGPVGKGKGRYESRVRELVAGNAALEAAASAILDARMVLRDRLSALVRRVLELARQDDACRLMMTMPGVGAVVALTVRSAIDDPARFRSSRDVGPWVGLTPRREQSGERDVTGRITKAGDAALRTALFNAATVMMHNARPCWLKAWGMQVARRRGSKRATVAVARRIGVVLHRMWLDGTDFRPQRKPVPTTA

SEQ ID NO: 236773 - protein, 341 aa, unidentified
MGEVITIGLDLAKSVFQAHGADGAGGVVFRKKLRRDQLLAFFANQPRCLVAMEACASAHYWAREIGALGHDIRLIPPAYVKPFVKRQKNDMADAEAICEAAQRPTMRFVAPKSAEAQGSAVVFRTRDLLVRQRTQLINALRGHLAEFGFVVRQGAAHSARLMQVVEDPKADLPAEARPVLAIIVESLQALQDKIAKLDAEIAARAKRDPVARRLMTIPGVGPVVATALAALAPPASTFRRGRDFAAWVGLTPRQHSSGGKERLGRTSKMGERSLRRLLILGASSAARVSGRARAPVNPWLESMLARKPRMLVTVALANKMARIVWALMAHGGTYRAPAMAV

SEQ ID NO: 236774 - protein, 232 aa, unidentified
MFAGIDVASERHMLARLDAQGVPLGKPVPFTEDREGYDALLRLLGPPPVLVAMEATGHYWKNLYAVLVAAEHNVVLLNPLKTRRFQDSALERTKTDAIDAVGIARFAFEKRPETTQLHDAAAEALRELVRFKSAAAFAAYVGVVPGLKQSGKNGSRRAACAPMGNARLRRALWMPVVGAVRRNAWLKPFYDGLIARGKPPKLALVAAMRKLLHAAYSVTKNRKPFTIKLAET

SEQ ID NO: 236775 - protein, 328 aa, unidentified
MNYCGIDVGSKSLDVVVRKKGKSLKNITFKNTLTGHEAILKLLRKHNVTRVGIEATGYYHLDLALVLDEASDIDVMIINPRASKNFAKAMMQRIKTDAIDADLLAQFVERMDFVKWKSPAGDVFAIRACGRRLISLGKEKTKAKNQLHAFTMTKRTPRFIIEDIYLSIQQLEAQIENIIKHALRLIKESETLRSRYQRLITIKGVADRTAIKLLGELGVLALDMSAKQWVAHAGLFPRLFQSGSSVNKKTGIGKIGNRYIREALYMSALSATQHDPHVRGFYLHMIEDNGLTKLQAICAVMRKLLLAMHGMLHNDKPFDPLRFYCLKS

SEQ ID NO: 236776 - protein, 376 aa, unidentified
MNEKLRFLGLDVHAETIAVAVAEPNGEVRSLGMIANREDSIRKFIRKLGSPEHLRACYEAGPTGFVLYWQLTQLGVKCDVVAPSLVPKKPGDRVKTDRRDALKLARSHRSDDLTAVWVPDEGSEALRDLVRAREAAKQDQLRAKHRLTKFLLRTGQRPPLGVKAWTEKYVEWVQQVRYTHPAQEATLLDCLNEVQHMEERVKRLEQSIVEVIQLAPAPMQEVVRGLQAWRGIAHISAVTIAVELGNITSRFESARDLMGYRGAFPSEDSTGKRIRRGGITKSGNAHLRRIVVESAWSYRHRPAIGARLRRRQEGLPAEITEIAWKAQNRLHKRYMTLMARGKEQRKTMTAIARELLGFIWAIGIKAEAACKQQMAA

SEQ ID NO: 236777 - protein, 447 aa, unidentified
MKTNSEKLKNDFLLVNKNAAGIDIGSREHYVAVPSDRSEKPVRSFQTFTSDLHSLANWLKECKIDTVAMESTGVYWIPVFQILEEKGFKVYLVNARHVKNVPGRKSDVSDCQWIQRLHSFGLLSASFQPDAMTRELRAYLRQRDGLVRYATAHIQHMQKSLTQMNILLHNVISDITGESGMAIIRAIINGERDPDELVKLCRKGLKNPPDVIKKSLEGNYLNEHIFTLTQAVAQYDFYQKQILECENKINELLAKFPDREIKDKKDDALRKKKNKKNMINPEIKEHLKRATGIDLTQIDGFNTLTAITIISEVGLDMSKWKTEKHFTSWLGLAPENKISGGKILKSGTKKIKSRASRALRQAAQTLVRSQSYLGAYYRKMRYRLGAGKANVATARKLAVLFYNLMKHGIEFKDFGIDYFENKFKERNIANLKKRALDLGFTLIQSPS

SEQ ID NO: 236778 - protein, 344 aa, unidentified
MQITTIGLDLAKSVFQVHGIDTTGQVVVRRSLRRSQMLAFFAKLPSCLVGMEACGTSHYWARELIKLGHEVRLMPPAYVKPYVKRGKTDAADAEAVCEAVTRPTMRFVPVKSPEQQAALSMHRTRDLLVKQRTQSINMIRGLLAEFGIDIPKGLERALLMARQIVDGKTPEVPIEAAKIIGTLSQQALDTHVRLHEIDRDLAVWLRGNDVARRLMTIPGIGPVGATALAASVTNPHQFRSGRQFAAWVGLTPLQKSSGGKERLGRISKMGDKYLRKLLIVGMTSLVRRARHNRATIDPRLADLLARKPTRVATVAMANKTARIIWAIMTRGETYRAGHRPALAA

SEQ ID NO: 236779 - protein, 418 aa, unidentified
MKEDESARGTRRYVALDIHKHYSVIAAVDREGRVVLHAVRVEHADLEGWLKKKLQSGDHVVFESTTNAWHVYDLLEPLVERVVVANPIKVKQIASARVKTDVRDTLILARLLAANLVPDVWVPPAHVREMRQLLSQRRQLVETHTQIVNRMHSVAHRHHLKHERGKRFNEKNTVWQKDKRLSKTEQFQLELEMENRAYTEKQIGRISKEVAKMSHQKPWAEGMTYLMQLPGFGVITAMTVLAAIGEIERFGSAKHLASYSGLAGGVEQSGTHLVEKGITKEGRKELRWAMVEVAQRAVKSDPRWTGKFQELHKRMHRNQAIVAVARQLLELVWHVLTRRQPYRYFSQERIAYKYLTWAWQMDEAARDGLSRQQFARYYLMRLGIGHDLTRIALNPKYPRKLASEAELLALQPELKHIE

SEQ ID NO: 236780 - protein, 414 aa, unidentified
MELLHERCAGLDIGKKNLTACVRTPSPKRKSSRHQEIRTFATTTNALLELRDWLVAERVSLVVMEATGDYWRAAFYLLEDDLNVMLVNAAHAKGLPGRKTDVCDAAWLCQLGECGLLRPSFVPPEPIRQLRDLTRYRTTLTAERSREAQRLEKELEDAGIKLSSVATDILGVSGRAMLAALIDGERDPQVLAELAKARMRPKIPQLEQALTGNFGEHHAFLCRLHLQRIDQLSAAIEELSARIEDQIRPFARQLQRLATIPGVGQSVAEVIVAETGADMSHFHTAAHLTSWAGVCPGHHESAGKRRSGKTRHGNRWLTGALGTAAMAAARTKDTTYLGARYQRLAHRLGKKKAIVAVEHSILIAVWHMLTDDVDYTDLGGDYFARLDPERAMRRIVRQANALGFTVLFEPIQAA

SEQ ID NO: 236781 - protein, 354 aa, unidentified
MPIVGGLDIHRKQITFDYLDTVTGQVCRGQVAPADRAHLRAWLARFADCEDVAFAVEGCAGWRYVAEELAAAGVAAHLAEPADTAFARGRKRHAKTDKTDARHLRMLLAEGRLPECWIPPGHILECRALLETYNDLRREHTAWVQRIHAVLFHQGAPALGAGTLRTGPGVAALQAAAAEHLSPAGQLQVATALEVLEALEARLDTVRHQLLAAARQLRGARVLAARLYGVGPFAALALTCWLAGEGRFSSSRKAVRFAGLDITVYSSDRKGPPGRLSRQGPPVLRWAVYEAGKTHAAVSRCRPPGQADGLIRLSGRIPASRGRPINHLVAGAAPKAPRTQVRLAAPGPAPGRHH

SEQ ID NO: 236782 - protein, 324 aa, unidentified
MIDGMLGIDVSKNTLDVSLSSCNKVRARSFPNSSDGWRHLLDWLISQKIRRVHACLESTGRYSLGVACLLYEMGHVVSIVNPAQIRDFARTKLGRNKTDGVDASRIREYCELFKPQPWAPPSEAHRRLGELQTIRAGVVAGLTEWNNRKNSGMDDATAQSLADATISHFTSQLGAVDEAIAKTIDNDSELRCKRDLLLSISGVGETLAGVVLTELPGPDVLRSGAEVVAYAGLNPRRHQSGTSIDRVTRISKIGNAVLRAALYMPAMSAMRYNPAIVALAARLKSQGRLKPMQIVVAAMRKLLVLCFGVLKTGKRFDPALAMGC

SEQ ID NO: 236783 - protein, 413 aa, unidentified
MLQVIHERCAGLDVHKKTVVAGVLVTEQDGQVRQEVRTFGTTTGEILAMAEWLKSFQVDSVAMESTGVYWVPIYNLLEESFKLLVVNAQHMKAVPGRKTDVNDAEWIGQLHRHGLLKGSFVPPKPQRQLQELVRHRTNVVERRSQSVNELQKVLETGNIKLASVVSEITGVSAMEMVSGLIEGKQAPGVLAEMARGRLRDKKPQLAAALTGRLEEHHRFILSQLLADISFCEEQILELDLKIRVQMKEYEEVIQRLDEIPGVNRRIAEVLIAEVGTDTSRFGDAAHVVSWAGMCPGNNQSGSKRRTARVRQGNKSLKRVLVEAAHAAGRKKDSYFSSQYHRLAARRGKKRAKVAVGRSILETAFHMIQRKSTYKDLGSDYFDRRNPERLAKRLADRIGKLGFKVTYEPLDKAA

SEQ ID NO: 236784 - protein, 386 aa, unidentified
MKKVDDLSRSLAAFDQDSSMVVVIELSNASWLVAGAVPGVERRPLKKLEPDAQALEQLLVRWRAEAEAVGRQIDRTIVAYEAGRDGFWLARWLRVRGFETHIIHPTSVAVSREHRRSKTDRLDSIMLMRVFFGWLRGERGHCSMVGIPTMEEEDAKRPSRERECLVGERTRIINSVKAGLLRLGIRDFNPALRRSVKQLETLVTPEGTPVPPNTLDEMRRDLARLAVVRQQIETIEADREARLEQAPATRSNAMTLLLTRIVGVGVETADMLVQEILSRPLRDRRAVARYAGLTGSPDESGARRREKGLAKAGNARVRRGLIQLAWRFLMFQKGSGLAQWYRSRTEGAVPAKRKTMIVALARKLLIAFWRLATTGIVPEGVVMRAA

SEQ ID NO: 236785 - protein, 350 aa, unidentified
MSNVNSYIGVDLHKKTCFITVMNQAGRIKKQTEISTDTDKVAKFFAKHTDASVAVESTMNWIPFYENLESLGCSVVLSNPLQTKAIAAARIKNDKVDSKILADLLRTNLLPTAYLSACLAQADIQPREIRDLKELVRQRVNYVEIRTRIKNKIHSVLFKNNLKHDFTCLYGQAGMIWLKELKLRDIYRQEMDRYLTTLDLLDKQIAEMSDQIMATAKTDYDCKLLMTIPGVSYFTALVVKSEIGDINRFASAGKLCAYAGLIPSTYASAEKIRHGRISKRGSKWLRKALIDSVTSGSKHPSRLGFFYRQLKKNKGTGKAKVATARKLATIIFAMLTDKQPFREFAPVKQR

SEQ ID NO: 236786 - protein, 430 aa, unidentified
MKQFELLHSLFVGIDVSMKENVVHAMPFSPEDHPGHAHLRFSAPNTPAGSAEIVEKVGDFLKFYPDVTQVVIALEATSVYSFHLATFLSVAQFNGHIPAIVYSVNPKEIHAYKKTFTDVGKDDYVDAMVIADYARSNKIRSRPWKGPELLGLRILTRLRFHIARLIGILKNSTGNSIYLECSGFMTGENPFCNVWTATCQQLLTTFQGPDEILNLSDEELLNFITEKGHGRFSHPLDVVKKVKKAARNSYRLDKRVYEPLTSGLSVSFFIIHSLEAAIKKLDKSIETIAKSFSSDSYRILLSIDGVGPVIAGGLLAEIGDIKRFETDDDLAKYMGLTWRGKQSGQSESPVKHMSKAGDVYLRYYVLLATGQIINYSAKYREAYERIRSRKTLFPYRAALNLVARKIVRLIFTLLDRHQLYSDNKVMVTLE

SEQ ID NO: 236787 - protein, 353 aa, unidentified
MHTHQQSTEPVATIGLDIGKNTFHLVGLDRRGAIAMRIKVSRNQLVRRLVNLPPCLIGLEAGSGSHHIARQIQSLGHDVRLIPAQYVKPFLKGHKNDYRDAEAIAEAVQRPTMNFVAIKTPEQSDLLSLHRVRSRLVRQRTAIINQIRGFLIERGITVRQGPGPLRKVLPEVLSSPPEALSPRLLHLISELDQDWRHLDDRLEVLSGEIESLSENDAACQRLMTVPGIGPIISSAVVAAIGTGSGFKQGRDFAAWLGLVPKQESTGDRTKLGRISKRGNKYLRTLFVQAAHVVLERRPAAAMRALWPWIAQASKRLAHRNLLAIALANKLARIAWAVLARGRDYEPRITPNAA

SEQ ID NO: 236788 - protein, 454 aa, unidentified
MSKSNRTDTPLRAARAQISNPEITVHAMYRSAIGIDVHLNLLVCHQKQVAGHREQSESRDFNTDRASIDAFAAWCRECNPDIILMESTGSLWQSPYEALERAGFTSEQLALINARDAKAAAGRKTDRKDASRLASLARTGNFKKSFVPEKAFRLQRVISRDLQKNRNDISRTSNRFGKSLNLTGCRPTTVFSDIRGGKAASLILMAKLRDDPHLFDVIKQNSRRLRASPEQIMQALDFEIEPMMKEQILALRKKIDQLEEYDRSTFERLRQLQAPYEKDIQLLITITGIQERSARMIYAELCPDLKEHFPTSEQFASWLGICPGDNTSAGKQKSGKCPKGNKHLRRTLIEAARGLAVGGTAALKEKFQVLKMRRGYRRAMVAFAHLLARIIYSVLTHQKGFEPYLSTAFRDALIERAKNGVKQLLKLKGTKYVIADGLVVETKTGAILGAVVSS

SEQ ID NO: 236789 - protein, 413 aa, unidentified
MDKIYDICCGIDVHKKLIVACLNHKRKKELREFGATTRELMELAEWLQKNECEIVAMESTGSYWKPLYNIMESYGLHAIVVNPAHMKAVPGRKTDVKDAEWIAELLQHGLLQPSYIPSKDQRELRKLVQYRKSLVGERTRELNRLQKMLEGANIKLSGTVTNINGKSARKILEYILSGNEIDEKKYDEMYEEKLIAHNLKASKEQILDDLKGFMSPLQRRMLKELLQHLDELNVHIENLNDEIDNFMKPEEKQASQVIQDVTGIGNTSAQTIIAVIGTDMERFPSDRHISSWAGLCPGDNVSAKKRKSGKIRKGNALLKSTLVLCAHAAVRHKSSYFHAQFKRISTHRGKKRAYVAVAHSILIAIYHILKDGVKYQDLGAEYYNQFNAERKIHAYLKKLKALGWEPPKEAVPA

SEQ ID NO: 236790 - protein, 346 aa, unidentified
MRMIGCDFHPSWQQVCWVDTDTGETAEQELVHTPGEVEKFYGRWAAPARVGMESTGNCQWFVELLTGLGHEVWIGDAAKIRACDPRRQKHDRRDARLLLRLLMEERFPRIWVPSNQQRDDRQLLLHRDKLVRIRVQVKNGLQHLALNRGVQKQRRLWSAAGQKALSAMVLPPWASRRREDLLKLLATWDQQIAQLDQAVSEAAHKNEQAQLLMTQPGVGPITSLAFVLTMGDVKRFPRGKQVASYLGLIPREYSSGGGQRLGSISKQGNRFLRMLWVEAAQMAVRCDPQFRSEYVHRCHSKPKGVAKVAAARKLAIRLYWMLRTQTQYPEIVRVESSSRVPLASAS

SEQ ID NO: 236791 - protein, 335 aa, unidentified
MHYLYYVGLDVSKETFDASLVAFEDANEMAHRKFANSRKGICSCLHWVEKRHGILLDDMIFCAEDVGSYISEMAVCASDRTLTFNFSLISPLVIKYSMGIARGKTDRVDARRIAEYAITHYRKIALYLPAEKELCQLRTWLILRAHLAKQRVAKLVLLEKLDYKEKFADVSIQRSMLQEEIAYAETHMKTIEREMQELITADSNICRNYKLLTSIKGVGPITAIVMLCSTLNFTKITDHRKFACYCGLAPFEHSSGISVRGGCHTSSMANRDIKVQLNRSALIAIRCDPQLKAYYERKVAEGKHKFSVLNAVRAKITARCFAVVRRGTPYVALQI

SEQ ID NO: 236792 - protein, 412 aa, unidentified
MEVVYERCCGIDVHKRSVVACRICRDEAGGIEKEIRRFGTMTDDLLALADWLAAHQVSHVAMESTGSYWKPVWNVLEGEFELLLVNPQHVKALSGNKTDVKDAGRLADFLRHGLLKASFVPNRAQRELRELTRFRTSLVQERAAEVNRLQKVLEGANIKLASVASNILGKSGREMLEALLAGESAPQEMAELARGRLREKIPQLERALAGRFGPHQRFMVAQQLAHIDFLDERIGEVSKEIGGRLRPFEQEIAKRLDVIPGVASAVTEVVLAEVGPDVSRFASADCLTSWAGICPGNNESAGKRKSGKTRKGNQALCTVLVQAAQAASMKTGSYLQAQFLRLAARLGRKKAIIALSRQILVIIYHLLRHPTSVFSEKGAHYLREDQLERTRRHHVRRLEALGFTVVLQPTAA

SEQ ID NO: 236793 - protein, 385 aa, unidentified
MQTLNDLSQSRIVLKQDSTLIAVIEMSLSSWLVAGLVPGVERQPLKKLAVDESVLLKLLHRWGEEAEKTGRRIERIAVAFEAGRDGFWLARWLRARGIEAHVIHASSAAVSREHRRPKTDRLDTELLKRVFLGWLRGERDHCKMVTIPTIKDEDAKRPNRERESLVGEQTRIVNRMKAALSRLGIRGFNPKLKKAAARLEDLRTPEDEPIPPNTLAELRRDMERRRLISDQIRQIEDARLERLERMPNDGSHAMVRLLARVIGVGIETADMLVQEVLSRTMRDRRAVARYAGLTGAPDESGAKRREKGLARSGNARVRRGMIQLAWRFLMYQKDSTLAQWFRARTENARGTRKTMIVALARKLLIALWRLVTTGEVPAGVVLRAA

SEQ ID NO: 236794 - protein, 345 aa, unidentified
MEVKLEQLLERPDRPLTPRAGPAWPARILEAGVIYHVKEQLVYLGVDVAKDYLDAQFEKEKRRFANDAIGHRALIRWVKQMGDQVQLICEPSGGYERRLVQRLVQAQIRVSLVPANRVRQFARAAGILAKTDSIDARVLCAFGEAMRPLTLSASRLEQEQLRELDSQRRHLSRLLIMEQNRNARLSDTSVCRLNDSLVNLIKKQIEKVDLLIEQHIEASAELSAKAKKLTAIIGIGLRTAALLLAQMPELGQLNRGQVAALAGVAPFNRDSGKWRGKRAIYGGRRFLRHGLYMAALVAARHNPILRAFYQRLRAAGKPPKLALTAVMRKLLIVLNSALKNDVRYA

SEQ ID NO: 236795 - protein, 348 aa, unidentified
MSQLLSTVTVIGIDIGKNSFHVVGLDGHGAPVLRQKWSRGQVEARLANMPPCLIGMEACVGAHHLSRKLKTLGHDARLMPAKYVRPYSKGQKNDFRDAEAIAEAVQRPTMKFVATKTSEQLDLQALHRVRERLVSQRTGVINQIRAFLLERGVAIRQGFRFLRAELPRILAAPPEVLSSRMVRIIEGLAEDWRRLDERIDCLSGEITALARQDVGCERLVSVPGIGPIISSAMVAAIGTGEAFSKGRDFAAWLGLVPKQFSTGDRIILGKISKRGNRYLRVLFVQAAWVVLIKPQSWERHGLKRWIEAAKKRLHRNVLAIALANKLARIAWSVLARSRIFEASKLQAV

SEQ ID NO: 236796 - protein, 454 aa, unidentified
MCLEDRPVLEPNAAGIDIGAREIFVAVPPGRDAHPVRACATFTEDLEQLADWLVACGVTTVAMESTGVYWIPLYYILESRNLKVCLVNARHMKNVPGRRTDWHECQWLQYLHSVGLLRGAFRPEADVTAVRTIMRHRTELVQMSSQHVLHMHKALTQMNLQIHHVIDDITGLTGLAIVDAILAGQRDPVELAKLRNWRIKADEETMRKSLVGNWRDEHLFTLRQSRELYRTYQQQMVKCDQQIEKLVGGFEPRVDPEEKPLPPDRKRYRGAKKRAKKNGQPDTGFNLRTEAYKLFGVDVTQIPGLETMALPLFGEVGRDMSKWPTADHFASWQGLCPDNDISGGRVLWKGTRKVRNRAGQMFRQAAYSLHHSLTPMGDYLRRMKTRLGPAAATTATAHKIAVIFYTMVKNQVEYDETIWATRDVKRQQRIEARLKRQANQLGYQLVRLEEKPAA

SEQ ID NO: 236797 - protein, 317 aa, unidentified
MNTNQSAFHIGVDVGKYQLDFFCHETGDYFQVANSPDGIRKVLKQLAPLSVSRLVVEATGRHEQALVLAASRQKIPVVIAQPIAVRRFAGALGILAKTDKLDSRVIAQYAAMIAPPVRKLPDDKTRKLRDLGKRRQQVIGMLTMEKNRLQIMPAFLRADIRNSIKALKRQQAKLDQQILQLSEQVEAWRRQREIMESMPGVGVTVSTTLLSDLQELGTLNQKQIAALVGVAPMNRDSGRMRGRRRIRGGRAQVRTVLFMATLSAIQHNPVIKAFYQRLLKNGKHKKVAIVACMRKMIVLLNAMVRDETYWGEMKNVA

SEQ ID NO: 236798 - protein, 474 aa, unidentified
MSKKTGQREIPGGQGPVPAKRKRNKQPEQPRQAEFEPNAAGIDIGAREIFVAVPADRDADPVRKGATFTEDLHQMAEWLVGCGITTAAMESTGVYWIPVYDVLEQHGIKPCLVNPRNMKNVPGKRTDFHECQWIQHLHSLGLLGSAFRPEAEVCAVRSLMRHRNDLVMMASEHTQHMQKALTQMNVQFQHVISDITGLTGLAILDAIVAGERDPAVLARLRDPRVKADPETIRKSLEGNWRPEHILALKQRLSLYRSHRELINECDQEIEKLITAFEPKVDPDEKPLPPDRKQKQRKRKKKSGDPKFDMREEAYKLFGVDLTQTPGLMNLVFMLFSEVGRDMSRWPTAAHFVSWLGLCPDNDISGGKVLWRGARRTKNRAGTLFRLAAHSLHRDQTPMGDYLRRMKAKLGPAAATTATAHKIAIIFYTMVSKQVEYDASLWAERDQMREKRIDARLQKQAAQRGYKLVPLEVAA

SEQ ID NO: 236799 - protein, 312 aa, unidentified
MDATVVGIDVAKDRLDVCVRPSGESFVVARTGAGIEELAERLRKLAPRIVAVEATGGFETIVAAGLAAAALPIVVVNPAQVRAFAQALGRRAKTDPIDAAVIAHFVEATKAVPRPLPDETTRLLADLIARRRQIVEMMGAEAQRERRLTNKRLKKSIVRLRKALEKELAELDGEIDDHVRGSPVWAEKEDLLASVPGVGPIIARTLIAELPELGSLDRRKVAALVGLAPWTRQSGQWRGKSFIGGGRKSVRNALFMAAMVAARHNPILKRFRDKLVAAGKPKLVAIIAVARKLLIILNAILRDKTPWQPKTA

SEQ ID NO: 236800 - protein, 477 aa, unidentified
MQEKKHIGLDLGVKSKSKVYIVDQAGEKVRPGFYIQTNPQGLDYMMKQALKGTSNKASLDLIMEPTNVAWFKVAVYIRREHPQVKVYRVKSEKVQDLRKFYRKYTKTDSLDARALAKMPVVDFDSLEEVYIRPKDILALNTRCKQRARLVEEATAKRNSISDQIELGFPHLVDCFSSKFTTPFIRFCERYANPFKVRRLGKEKLLKILIKLGFRKDVSTLAENIYQRTEEACILLGNEDNIIDYDDFQDRIRSEFRIFKALQKEIDKVTKKVQGLYEKCYPEKRLNSIPGIADVLGAVITSTIGNADRFSSARSLVGYMGYYPKEDSSGLSSKKGLRMTKAGPNIAKGSLYLAANTGRLIDPQLGKTYYEQMVVRGNPHTKAVCRVVTALIPRILRVMKEDRDYVICDLEGNPISKKEGRKIVKEQFFVPEEVRQRLSNRKRMPLNKKGRTKPQYVRGSKAPQIRVDSSRRIAFSLN

SEQ ID NO: 236801 - protein, 402 aa, unidentified
MNAVGIDVSKGKSTVAIMRPFGEVVASPFEVAHTDSELSKLADLLKSLDGETKTVMECTGSYHLPVAYALHEAELFVSTVNPMLTHNYDNNSIRKSRNDKTDAIKIANYALTNWVELAEYIPSEDVRQMLKTFSRQYNKYGKLKTMLKNNLISLLDQTFPGVNELFTSPPRKSDGHEKWLDFAAQFWHCKCVYSLTQKAFIERYRKWCRRNGYNFSEAKAEDVYIESLGHIFVMPMNETTKLLVTHAIAQINVISETIAVIAGEMKRLASLLPEYPVVMEFRGTGDILGPQLIAEIGDIYRYLKKSSLVCFAGLEPVENQSGQFQGNEKISKQGSPHLRKTLFQVMDCLLKHAPKDNPIFQFLDRKRAEGKHYYSYMNAGATKFLRVYYSRVKHHLDNYYEE

SEQ ID NO: 236802 - protein, 347 aa, unidentified
MRFYTRQHRHYCGVDLHARSMYVCVLNGEGTVLVSKNIAAEPAPFLELVAPYREDLVVAAECMFTWYWLADLCEREGVVFVLGHALYMKAIHGGKAKNDRIDAHKIAALLRGGMLPQAYVYPRELRATRDLMRRRNYLMRHRAELLAHIQNTNSQYNLPAFGARLAKPHLRRQAAEHFVEPSVRKSVAVDVSLVDHYDRELPALERYIEESAQGHDPVTLALIRTVPGMGKVLGLSILYEIADIARFLRVQQFLSYGRLVKPTKSSAGKVLGHSGKKIGNAHLKWAFSEAAVCFLRGNKPGQALRRRLAAKHGKGKSLAIIAAKLARAVYFMLKRRTAFDADRFFAH

SEQ ID NO: 236803 - protein, 312 aa, unidentified
MNKVICGVDVSKDWLDAFIRPSGVFERFSNDAAGIGALAEFCREHGVELVVMEASGGYERAAFLLLWELGIACALANPRHVRRFAEAMGFLEKTDRIDAAMIAHYAEAKRLSALPPPKAAQLRLSALMTRLSQVTRDLIVQKQRRSAARDGSIVASLNEVIALLVRQSRTLEGEIASMIDDDPLWASLNRAFRSIKGVADRTVARLMAELPEIGRISNKAIAKLAGLAPIANDSGKRSGPRPVRGGRSGPRGILFLVATIAARHDPHMAAFQQRLQSAGKPKMVIRIALARKLLVILNAKARDARREFEYAT

SEQ ID NO: 236804 - protein, 424 aa, unidentified
MKFKMQDKQNQLIERISDKHLVVGVDIAQELHVARAVNFRGIVVGDPLTFENNEDGFARLLQWINQLITKKGFDSTIVGMEPTGHYWINLSKWLFAQDIEAVTVNPHLVKKNKENRDNTQSKSDKKDALVIADMVKNGYYSFIRPTSEAFEKLRVLMSNRDMTVKRLVSTINQINRWVDIVFPELRQVFKDIKGKGAIATLRLFPTPNELRSMKAPDIVKGWKTQMKRQPGLKKAHQLIELAKHSVGTRQALDAYKLHLEQLIEEFDLATAQLERVEKEVTDVLKRIPYARKLLAIKGISEIALAGILGEAGDLSGFAHGNSLLRHAGLHLAEASSGKWKGQIVLSKRGRSRLRRFLYLATMSLVMNNPDFKELHANNVKVKKMKKMKSIMKLVHKLARVLVGMAQKNESYRPHKVQPIAQMAA

SEQ ID NO: 236805 - protein, 346 aa, unidentified
MKQISTIGLDLAKNVFQVHGADAEGSPIFNRKLRRAEVLRFFEKLPPCLVGLEACGGSHYWAREIAALGHDVRLIPPIYVKPFVKRGKTDAADAEAISEAVTRKTMRFVPIKSAEQQAAAMVLKTRALLVRQQTQAINALRAHLSELGVIAATGTSKVAALIEILRDEEDVRLPKAARLALAEIADQIEALTRQIDKLERGIVAEAKRDEDMRRLTTIPGVGAITAASVKALVPDPDGFKSGRHFAAWLGLTPKPHSSGGKERLGGISKMGNPTLRSLLVCGATSILRRVKGNDKAPQWLIGLLARRPFKVVAIALANKMARIIWALLTKGGTYRNTDAANGAASA

SEQ ID NO: 236806 - protein, 398 aa, unidentified
MTESSDYESVQVFIGVDAGKDTHHAVTVNRSGKRLFDKALPNDENKLRSLISDLKQHGQILLVVDQPATIGALPVAVARSEGVLVGYLSGLAMRRIADLHAGEAKTDARDAAIIAEAARTLPHALRTLKLADEQIAELSMLCGFDDDLAAQTTQVSNRIRGLLTQIHPALERVLGPRLDHPAVLDLLQRYPSPDKLASLGEKKLATQLCKLAPRLGKRLAADITRALTEQTVVVPGTNAAVVVLPRLALQLITLRKQRDEVALEVEQRVLAHPLYPVLTSMPGVGVRTAARLLTEVACRAFASAAHLAAYAGLAPVTRRSGSSIRGEHPSRRGNKTLKRALFLSAFSALRDPISRAYYTRKMSQGKRHNQALIALARRRCDVLFAMMRDGTFYTPAAS

SEQ ID NO: 236807 - protein, 353 aa, unidentified
MLIIGCDFHPGFQQIAIFDNQTGAYEERRLSHRAEAEQFYRSLAGQEVRVGMEACGHYPWFERLLAELGFELWLGDAAKIRASVVRQQKTDRRDAEHLQMLMREDRFPRIWVPSLEERDVRQLLVHRHKQVQARTRTKNQLHALAMSQGVQKKWKLWTAAGRAELESLELLPYAAQRRRQLLHRLDALEAEIAALNRQVEEEVKGRPAAVKLMTHPGVGPVTALAMVLTLGPAERFRDGRKVGSYFGLIPSEYSSGGRQRLGHISKQGSSFVRFLLVEAGQSAARKDAELGRFYRRLGARKHRALAKVAVARKLAVRLYLMLREDWTYAQLCRAVVQASPSHSVAASKSRPLE

SEQ ID NO: 236808 - protein, 341 aa, unidentified
MHQATIIGIDLAKRTFQAHGATSDGKVAFRKKLSRSQLLAFLTQQPRCVVAMEACATAHEWGRAARELGHEVRLIPPAYVKPFVKRQKNDAADAEAIAEAASRPTMRFVAVKSEAQQARAMVFRTRDLLIRQRTQLINALRGHLAEHGIVAPQGPANLKLLADAISDMKISLVPIVRDLGLLYLEQIKGLGEKIAALDRTLRRESKSATTACLQTMPGVGPITAVAIEAFAPAMTTFKRGRDFAAWVGLVPIQHSTGGKQRLGRTSKMGQRDIRRLLITGAMTIVRWASRKGAREGSWLARMMARKPRMLVAMALANKMARAVWAMLTKQENYRDPAAALA

SEQ ID NO: 236809 - protein, 357 aa, unidentified
MPSITPDHAAIFDVAGGVDTHQDTHTAAVIDLVGRVLGTQQFPATATGYAALLAWMRGFGQLLRVGIEGTGAYGAGLTHLLREEGVDVIEVDRPNRKTRRFQGKSDPIDAIQAAKTALAGERTGTPKHRDGRVEALRNLRVARRSAVDQRADVQRQIKALIVTAPDQLRASLRGLAVKELIAACANLRPDRADVASPATATSIALQSLARRHQQLSVEIADLDELLEPLVAAINPALVAANGVGTEVAGQLLVTTGENHDRLASEAAFAMLCGVAPIPASSGKTTRHRLNRGGDRHANAALWRVVLCRLRWDPRTRAYADRRTKDGLSKKEIIRCLKRYVARELYQIITSNDLELAA

SEQ ID NO: 236810 - protein, 387 aa, unidentified
MSKTSDRSEVPAAVHTRITAIFVSLELSRKVWLVTSLSPGGGEKMSKHSVPAGDVAALLLHFAELKRKVQARTGDSFSIVTIQEAGLDGFWLHRLLESEGVESHVVDPASIAAPRRRRNAKTDRLDGEALLRALLAFKRGEPRVCAMDVPPTPEEEDRRRLSRERKTLVAERVEHVNRIKGLLFSQGVSDFEPIERDRRKRLNDLRTGDGRSIPIHLKSAIARELDRLELLIDQIKTVKAERDKLLAEQRPGAIPSPGAMLLPFKGIGSEVASVLWSEALYRHFNNRRQVASYAGLAPTPWQSGSVSHEQGVSKAGNPRLRSALIELAWLWLQNQPQSALSLWFKRRIANGRGKKTTIVALARKLLVALWKYIAFGVVIDGAVMKNA

SEQ ID NO: 236811 - protein, 361 aa, unidentified
MNTIAKKREKKKLVQVDFTGKACWVGVDVHKLTYAVAILGEDGQRLEFTTAAGPKKLLLQLLKMGMAIKALTYESGPCGYGLAWACQEMNIPVLVVAPSRVPRPVSKTGKTGRLDSMKLVEFLAREMLKGIAIPSREEFALREIERVRQRFVKQRRQIRQSIRAFLLRNGLEEPSGLDKWGITPLQALREMPLSLNLRFSLDSYLEEHTTILASLAKITKQLEKATIELGHGERIKNLRTIPGVGPTIAHTFTSEIFRPERFKRAEDICAYVGLAPMTSHSGSGKEKAWLRQVGQNYLRSILVESAWRLVAVEETYRDFYNRIRSKTGLAQKGIAAVARKLLVLIWRISIEMRPYRPATVL

SEQ ID NO: 236812 - protein, 410 aa, unidentified
MAYKVAGIDVHKKVLMVVVLNIDDPESEPPRRRFGTTTSELRNLSGWLRQQGVQQAVMESTAQYWKPVWYELEPYMKLQLAQAFSNRAPRGRKPDFRDAERLVRRLLAGELTLSFVPEPEQRTWRTMTRARVQLTEDKSRLHSQLECLLEEMRIKLSSVVSDLLGVSGYRILRALADGETDPKKLAALADDRLQCSEKQLIDALNGSPQPVHLQLLALYLDRHQMLVEQIAKLDRLIAGALKHHQEAVARLALAPGLGVDSAQQIIAEVGVDAGTFPTAGHLSAWVGTCPGRNESAEENHSSRSAKGNKYLRRILNQAAHAAVKTKGSHFQAVFRRLLPRLGYKAAIWAVAHRLCRLVWKMLHAAVPYVEQGSEPDARTKRRRARNLLRALRKLGYEANLKPTTTACTAQ

SEQ ID NO: 236813 - protein, 365 aa, unidentified
MKHSNRSRAVLKPRTPGSVESLTIGIDLGDRRSHICVIDGAGETVREEDISTGPHSFEVYFKTMPRAVVALEVGMHSRWASRVLQECGPDVIVANPAKVKLISSNDRKNDRVDARSLARLARVDRRLLFPIRHRSEDAQAALSVLRARDSLVRARTRIINCVRGLVKPTGVRLPASNAEGFCSRVNEHIPTTLRPAVALVLEEIQELTDKIAVYDQYVDHLVATRFLHARLLQQVPGVGSLTALAFVLTPDDPWRFPKSRQVGCYLGLRPRQDQSGDRDPQLGISKGGDEFLRRLLVNAAHYILGHFGPDCDLRRWGMKIAERGGRKAKKRAVAAVARKLSVLLHRLWVTGEVYDPFYRSRGVAA

SEQ ID NO: 236814 - protein, 315 aa, unidentified
MIIGIDVSKSSFDSAWAVSGKASHKVYDYSDKGIAKLLSDTPATSHYVMEATGVYHSKLALTLHEAGRVVTVVNPLVIKRFCQMQLTRVKSDKADAEKIRQYGEQSNLTVWKPSADEIDALRQAHGWLDDLIRDRTRLLNRQEAHQHQAKPNNFVTRQMRGAYTRLTNQIVLCEGQLSVIVKKCFPELYEHLVSIPSIGKKTAIELIVITEAFSKFAEVKGLSAYTGISPTTYSSGSSIKCKGVIAKMGNGRIRQLLYLCSLTAMRSNKDCKALYERMKVAGKPGKVIQVAIAHKLLRQAFAVATKGVYYAENPA

SEQ ID NO: 236815 - protein, 391 aa, unidentified
MEARVVNNLSPAAAHDGAVRCLLAIELSKKSWVVAVNTPLSDKISLYKLKPCDWKQLLQLIERIRKRVSEELKKPVEVISCYEAGYDGFWLHRLLEAQGVRNHVIDPASLQVDRRARRAKTDGIDVGKLLRSLMAYLRGEPKVWSVVRVPTVIEEDNRRLHRERSRLINERIQHVNRIKGLLAIHGIYDYEPMHPERIQRLERLRTADRHTLPLHLKAEILRELQRLELVLGMIQTIETERDAIASAKSKSQQTTSAKKIKDLVKLKSIGPEFATVLVGEVLYRTFNNRKQIGSYVGLTPSPFQSGSTSRDQGISKAGNTKARTTMIELAWLWLRNQPDSRLSVWFRERVGNRKGRIKRIAIVAMARKLLIALWRYLETGVVPEGAVLKSK

SEQ ID NO: 236816 - protein, 329 aa, unidentified
MDEDVYYERCAGMDVHKKFIMVCLRIGRKSEVRSYGTLTHEIRELVAWLKANGCQMAAMESSGSYWKPIYNIFEQESLPVMVCNAQHIKNVPGRKTDVNDAQWIAKCLSHGNLNPSFVPDREQRELREMTRFRKSQIEERARNINRLQKFLEGANIKLSSLVSDIEGKSATMLLELIIGKPDITVNDVVNCMHGNMKSTAEELFRSLEGYMTPIQRELFAHIMAVIREQTAQIEKTDAMIQRSLSAEYKAAVKALDPIPGIGRISAEQIVAETGTDMSHFRNQHSLSKWAGVCPGNNKSAGRRISGKTKPGNKTLRSTLTQSAQAAKKK

SEQ ID NO: 236817 - protein, 416 aa, unidentified
MSGKREIACGVDVHNEFIVATILSSDGFKLQARFETCLEDLLKFKNWLKENGCHKVALESTGNYWLPIYHILEGSVNFILANAYQIKHIPGRKTDSLDSEWLAELCLKNLITPSRIFTKDHRELRSLTRARESLIKIRTKIKNRVTHELEAACIKLSSVIADVFGKSGRHIVDGLLNGMDLEKILESIPSGRVRKNKEEIRGIIQANLSSSQIFLLRSHLNMIDAVTKQIEEIDAKISDQITLRNEDMRIALSMPGMGFISASTILAEIGDFRDLSSANKLAAYCGLVPSVYQSAGKLINGHITKHGSLHIRRIIIEVAHAIILTKKLSKLKKFFLRIKARRGAKIGIVALARKVLCILYHLLVRRELYQDDLLSKPRCIKNPRLHPKTAMDLDEMIRTIIKAGYEVKKNECLESG

SEQ ID NO: 236818 - protein, 328 aa, unidentified
MTDQYIGIDLHKAFFQACAVTPGGERLWEGRFPRTAAGLEALTARCTPRTALAVEASTPTWHFADALVGAVGDLRIVDPLKTKLKAGYAAKTDRLDARRLADALRRDSVVGIYYPPLAIRELRELCRTRHALVQVRTALINRLRAQLLRQGITDARRLAKTRDDGWLAELSLPPRAAAGVARLRQVLRVVRTEAAQAEAEVRAASETDPIAITVQQVRGIGPVLAVMIRAEIADIHRFPTAGQLASYAGLVPRVDASAGRMRYGRITRRGSPWLRWALIEAAIHGTTRSDRIGRWGRGLAVRKGALKARVALARVLCEEIHRLWSAVV

SEQ ID NO: 236819 - protein, 347 aa, unidentified
MKKIIIGIDISKEKIDASAIDVRNSLLGVLKLDYQAFENRPMGFRRMLVWAKHLIKGVTLEEVMFCCETTGGYDRCLCDYLFAKGLDIWRESSLQIKKSIGLRKGKDDKADSLTIAEYAMRHMDKAVYYVSPSETVRELKALLLYRRKLEQEKTSKKVRVAELKATAAKSKSVSFILRDAQKSIRALEKSIKECEKQILALYDRDEELKRSYDHLTSIKGISIVNATAMIAYTNNFKNITTSRKLASYYGIAPFREKSGTSVDKKAQVKCYSSSMLRAYLTQAAQWTIKEHGIYRDYYLRMSAKGKCHGIILNNIKNKLLHLSVSLIANDMDYEENHEFLRVQRMAQ

SEQ ID NO: 236820 - protein, 415 aa, unidentified
MALKIVYKICCGIDVHKTFVVACIASTNDKGVTSYESHRFSTYTSGLKTLLQWLLDRDCKDVCMESTGKYWIPVYNILESDCSIVLAHPKYVKAIRGKKTDKKDAKWIADLFKHDLVAGSFMPPADIRQLRDLMRYRFKLTCFKSSEKNRLQNCLTVSNIQLGNVVSDTFGKSAQAILDKILENPADTSFDLEPLVFKSLKKKLPELRDAIDGYITPEQAGKLKVIKAHYENLESRKAELEELILALAAPYQQELTILQTAPGISSPFTAIGIISEIGTNMEAFPSAKHLCSWAGLTPTNNESAGKKKSVRVSKAGCYIKPLLVQCANAVVKSTKHPEMRNRYLRLKKRRGHKKAIIAIARMLLTALYHMLKNGENYNAELYQKSDLLPVDREITVEQALMIARNQGYKIKSATA

SEQ ID NO: 236821 - protein, 408 aa, unidentified
MIYCGIDWAEKTHDVALVDDTGAVVAKRHITDDATGYKLLLELLAEHGDTEEAPIPVAIETSRGLLVAILRTGKRKVYAINPMAAARYRDRHSVSRKKSDPGDALVLANILRTDMHAHRPLPDDSDLGRAIAVLARAQQDSLWNRQQLANQLRSLLREYYPAVLEAVATWTNGLCRPETREVLKTAPTPTWAARLTRSQLQAALKRAGRKRGIEAEADRLRDIFRGDWAHQPPLVEEALGKQMLALLVQLEAPCTAADQLAEAVEEAFPRHPDAEILLSFPGLGTQLGARILAEIGDDRTRFADARGLKAYAGSSPVTRASGKKSSITRRWVKNDRLNHAGYLWAFSSLRASAGANDHYRRRREQGDWHAAAQRNLFNRMIGQLYHCLQHRALFDEQTAFPDRLAVAA

SEQ ID NO: 236822 - protein, 354 aa, unidentified
MSQTPNTAIAVIGIDIGKNSFHVVGHDARGAIALRQKWSRGQVEARFANMPPCLIGMEACVGAHHLSRKLASLGHDARLMPAKYVRPYSKGQKNDFNDADAIAEAVQRPTMKFVATKTAEQLDLQALHRVRERLVSQRTGIINQIRAFMLERGIAVRQGIGFLRTELPTILATRTDALSPRMLRVIEELAGDWRRLDQRIEGLTGEIAALAHQDQACSRLMTVPGIGPIISSAMVAAIGTGDVFSKGRDFGAWLGLVPKQISTGDRTILGKISKRGNRYLRVLFVQAAWVVLVKIKDWERYGLKSWIEAAKKRLHHNVLAIALANKLARIAWAVLAKGRAFELTRTDDASVRPA

SEQ ID NO: 236823 - protein, 348 aa, unidentified
MKIIGYDFHTRYQQIAMMDEATGELIERRLDHENGEAQAFYRDLQGPVRVGIEATGPIRWFERLLAELGHELWIGDSAKIRASEIRKQKTDERDALLILDLLLAKRFPKIWVPTPAERDLRQLLWHRHKLVCLRTMLGNQLHALALSEGLCRKKKLFTKKGRVELLHLGLGPWASRRREELLKLLDQLEPAIAELDRAVMEQAQRREDAVLLMTHPGIGPVTSLAFVLAIGPITRFARSKKIASYLGLNPSEESSGGRRRLGAISKQGNTMVRWLLIEAVSAAVRKDPALRQDYQRLKFRRGHAVAKVAIARKLAVRMYWMLRSGADYAQLVRRQGSPGNVLVDVSLP

SEQ ID NO: 236824 - protein, 401 aa, unidentified
MNAVGIDVSKGKSMVSIMRPFGEIVSEPFEVKHTSSEIKALIALINSVDGESRIVMEHTGRYYEVLAHQLAEANLFVSTINAKLIKDFDNDSLRKVKSDKADSIKIARYALDKWTGLKQYSLMDEIRNQLKIMNRQFGFYVKQKTAMKNNLIGILDQTYPGANTYFDSPARNDGSQKWVDFIDTYWHVDCIRNMSLNAFTEHYKKWCKRKKYNYSQSKAVEIYENAKEVVPVLPKDEITKLIIKQAISQLNNASATVESLRQLMNETASKLPEYPVVMSMKGVGPSLGPQLMAEIGDVTRFSHKAAITAFAGVDPGVNESGTYAQKSVPTTKRGSSELRRTLFLVMDALIKSMPQDDPVYQFLDKKRLQGKPYYVYMTAGANKFLRIYYGRVKEYLSKLEK

SEQ ID NO: 236825 - protein, 408 aa, unidentified
MNTLYVGIDVSSKSNVVYLMLPNGDKHSNFSVANSHEGSTQLVKRILSALTSHSLDTVLIGLEATSVYGDNLVYFLREDATLAPFNRKIHVLNPKQVKKFHDAYNDLPKNDYVDSFVIADCLRFGRINKEVYMGEYRYKALQNLTRARFFAVQNLVKEKQRFMNVLFKKYSTMTQEKVFSDAFSTTALAVYDEFESAEALANMDLHELTDFIIEKGKNRFPDPDAVAKAIQKAARSSYRLPKTVNDSVNQVLSISITSMKALESQIKEFDKAIIALMELLPNVLISIPGIGPVYSAGIMAEIGDINRFDNQASLAKYAGLAWKQHQSGGFEAEVTRLIPSGNRFLKYYLCEAAFSLVRCDKKYSDFYHLKYKEVNRCQHKRALALTARKFVRLVFRLLKDNRLYCPAK

SEQ ID NO: 236826 - protein, 359 aa, unidentified
MENKVNENLDFTGQNIYIGLDTHLKSWKATIRVEDTFFKTFSQDPDSEKLSNYLKKKFPGANYFSAYEASFSGFSAHRELNELGIKNIVVNPADIPTTDKERKQKEDARDSRKIAEQLAASKLTGIFVPDIEIEGDRAMLRFRRTLTKEIARNKNRVKSFLYYHGKTIPEQFADKKYWSKRFTKWLRELELPSESARTTLTEMVGIVEFLRKKQYRILKEIKELSQTENYKKNTELLISVPGIGLITAMSFLTEIEDVARFNNLDKFCSFVGLVPMTNSSGDHEAVGNITKRQNKILRSLIVESSWVAIKNDPALMLAYQKLAKRMKPAKAIIRIAKKILNRMRYVLREQKIYEYAIVK

SEQ ID NO: 236827 - protein, 408 aa, unidentified
MRLFVGDDWAEDHHDVEVMNEAGKVLAKKRLPEGVAGMSQLHGLIGRHVPEGADDAEVVIGIETDRGPWVAALIAAGYTVYPANPLLASRYRERHAVSGAKSDGGDAHMLADMVRTDSHQLRPAAGDSPEVEGVKVVARMHKTMIWERTRAVQRLRHQLREYFPAALEAFDDLDAPDALELLGKAPDPARAARLTRAQVAAALKRARRHHVPDKTDAILAALRAEHLGQPAALTAAYAATVRSLIAVLLTLNEQVKILEAQVKEHFGRHPDAEIYLSQPGMGAVLGARVLAEFGDDPGRYADAKARRNYAGTSPITRASGKKKVVAARFVRNNRLIDALMAWAFTSMLASPGARAFYDEQRAKGLEHNDALRRLANRLVGILHGCLNTRTLYDEGTAWDHREELTTAA

SEQ ID NO: 236828 - protein, 325 aa, unidentified
MTWSILGVDIAKKSFQVCLLQADKKYNRTCRNETKGFATLDKWLAKHEVGRLHICMEATGRYWEELALHLHQTGYTVSVVNPACIHNYAKSKLTRNKTDKLDAKVIAEYCETQQPAAWTPPGPEVRELQALVRHVDALQNMRTQEINRLAARVPSSTVRDNLQAHITFLDEQIADLEQQVQAHIDHYPGLKKQRDLLDSIPGIGVVTAAKLLGENIQAFSSTRALAAYAGLNPQLGDSGSSVRRKPHLSKIGNSGLRKALYFPAISAKNHNPVIKAFCERLMERGKLTMVVIGAAMRKLLCLALGVLKSGQPFDPNYAQRRATAI

SEQ ID NO: 236829 - protein, 339 aa, unidentified
MKVTTVGFDLAKNIFHVHGVTAIGEVAFNRPLRRAQVLAFFGRLSPCLIGIEACASSHHRGRELAKLGHTVRLMPPMYVKPCVKRGKSDAVDAEAICKAVTRPTMRFVEIKSEDQQALLSLHRARDFVVRQRTQLINMLRSLAAEFGIAIARGVARAIDFAKGIIEGKQPGLPELARDVLRVLSRQLVDLHNRLGWYEITMRIQARLSRQAQLLQTIPGVGPVTASAVAATIGSGRQFRSGREFAAWLGLTPRNHSSGGKERLGKITKMGDRYLRQLIVVGMTSRVRQVANHPERADPWLTKLLQRKPVRLATVAMANKTARIMWAVLTRDAPCKPHAA

SEQ ID NO: 236830 - protein, 432 aa, unidentified
MKRIRINAAGIDIGAKQIFVSIKNGEVRVFDTFTSGFREAVEYLIANKIETLAMEATGVYWVILYDMLKDAGLDVWLVDGRQTKQVPGRKTDVKDCQWIQELHGYGLLNRCFIPDAQIKEVRTYQRLREDHLRSSAMHINHMQKALTEMNIRLKEVLSQIHGASGMAIIRAILDGQRDPYKLLNLCHGSLKNRKSDLILKSLEGFYHESGLFALRQAYEGYQFYQGQIIECDKEQEKLLSKINEDDFKFHEKEKRKPIRHNKPNIDHLGTHLLKIFEGKDATVLPGITDYGWLQLYGETGSDLSKWPTEKHFTSWLGLAPGQHQSGKMNKSRSKKHRPKAGQLFRQLSQSLIESKKIALGSFGRKIKNKKGAGVAIKATARKLAVLYWKLMVRGMEYTEKGIAAYQEKVKLQQERWLHKTANKLGYQLIESS

SEQ ID NO: 236831 - protein, 356 aa, unidentified
MQTQVTKKIDFKGKDLYIGLDVHKKSWSVTILVEGMEHRTFTQPPDPLALYTYLQRMFPGGTYYSAYEAGFCGYGIHRALNDLGIKNIVINAADIPTSQKDQIHKLDPVDSRKIARALEKGLLRAIHIFDRDREELRSLNRTRFYLMRDLRRSKNRIKSFLQYYGIPIPPEYDNNLWTLKYIAWLKQIQMKTSSGQDAFSNLISSYEYHREQILALSRQIRIRMREYDNELYNLLKTVSGIGPLTSSALITELGDINRFPHINHLSSFVGLVPRVKQSGETSYNAGMTFRCNEYLRTLLIESSWQAIRLDPALMQYYHQHVINNKGQKVIIKVARKLLNRIRYVMKNRQPYVTGVA

SEQ ID NO: 236832 - protein, 392 aa, unidentified
MKSIFVGIDVSKHSFTACALDTTANKLFFFSASMDNRGLSKLLSALNPYPQNAILIAMESSGLYHIPLFASLSARNFKTLLLNPLLISNYSKLSLRKTKTDKKDAFAIASFLLNYHKLLYKKLRSQPLQQLKELTRERENITSQIAKLKNDIEKLLAVTFPELPQHINPFSKSILNLLCSYPSSHAIKNCPIETINSFLNPTKGRKPLISAQKIVSLAKNSIAPQNKAKEFILSQKISTLIFFSKKLNEIDTIIYELAQRLIADELKILTSVKGIGKVTAIQFLAEIGSISYFESPKKLIAFMGIDPTVYESGQFKGKSRLSKRGNKHLRRIIWLMAHKIVRFNSVFKKYFQKRLSQGLPFKKAIFAVAHKLVRVLYALLTKKMFFNPTHSL

SEQ ID NO: 236833 - protein, 458 aa, unidentified
MSDFFFGIDASKGYSNFVMLDSSKRCVENDFQLDDTFEGHQKLYSILSEFCIRHPKSNIFAAVESTGGYENNWFDALVRFQTHLPIRTARLNPCGVYNNSKAGLNRNVTDKISAENVAKYMIAHPEKVRYQQQDPLASLRRQWGFIKMLKKQKTQMLNQLESNLYTANPEILAYCKDHTPAWVLSLLQRYPTASKLAKAKKSSVSLIPYVTPKKAKKLVETAKQSVASATDETTSQIIKALVQQIRQLSKTIDAHTKAMADKCSIPEVELLKTFIGIGNDSAVGLILEIGSIERFKRAKHLASFFGLHPVYKKSGDGSWGFHMSKKGRRVPRQILYMVAMVAIQSNPLIREIYEKHTEKGMEKKAALGVCMHKIIRIIYGMLKHNQPFDPEIDRANRKKQNAPDEKKVGLDKSRRYQAYDVKAPISRRQAKKREERKQSQSDNIAKYGIKAPVPVLET

SEQ ID NO: 236834 - protein, 277 aa, unidentified
MAEVCTIGLDLAKHVFQAHGADASGAVLFRKKLRRAQVLSFFATQPPGTVAMEACGSAHHWAREIGKLGHAVRLIPPAYVKPFVKRQKNDAADAQAICEAAQRPTMRFVAPKSEQAQAAALVFRARDLLVRQRTQIINALRGHLAEFGIVVAQGPAHVSSLVRAVEDPAEPVPEIARAILSVLIEMLHTLDGRISLLDREIAQRAKEDVTARRLMTIPGVGPITATALTALAPPAETFKRGRDFAAWIGLTPLQHSTGGKQKLGPPRRWASELYVAC

SEQ ID NO: 236835 - protein, 342 aa, unidentified
MEHYAGIDVSLECSSVCVVDAKGKIVREAKVASEPQALIAWFGSLGFGLERIGLEAGPLSQWLFAGMKAAGLAVELLETRHVRKAFEAMPVKSDRNDARGIAQLMRLGWFRPVHCKSMSAQETRSLLTARKLVQSKLHDVENSLRGILRGFGLKVGKTTGQTFAGRIEELVAGHPHLQTIAKALLAVRTVLRTEFAAFEKQTRRMVRSDMQARLLMSVPAVGPIVALTYASAIDDPARFKSSKQAGAHFGLTPKKHQSGETNYTGRISKIGDASVRTVLYEAANVMLTKPVKGCSQLKSWAMRIKRRAGTNKAKVALARRLAVIMHRMLADGTPFNAAAAAA

SEQ ID NO: 236836 - protein, 379 aa, unidentified
MNMNAVGIDVSKGKSMVAILRSYGEIISKPFEVKHTVSGIRSLIEQIQSIDGESRIVMEHTGRYYEPLVRELSKADLFCICHKSQTHQRFGDNSLRKVKSDKADAVKIARYTLDSWTELRQYSLMDEIRNQLKTMNRQFDFYMKHKTAMKNNLISILDQTYPGANTYFDSPAREDGSQKWVDFSATYWHVDCVRKLSLNAFIDHYQKWCKRRKYNFSRSKAVEIYEASKELVSILPKDDLTKLIIKQAVEQLNTASQTVEQLRTMMNEAASKLPEYPVVMAMKGVGKSLGPQLMAEIGDVSRFTHKGAITAFAGVDPGVNESGSYEQKSVPASKRGSSTLRKTLFQVMDVLIKNKAHRMILSTCLWIRNEHKESLITST

SEQ ID NO: 236837 - protein, 414 aa, unidentified
MEDGSGGFPCLKFYYTTGGESMRLRFCGIDIAKNSFHAALIDDQGQPLWSRSFPMSFEGFRDFWRALRPRGSSVRSLQLGMESSGSYYLNLFSFLQAQGLDVRLINPLLVSNFAKLSLRKTKTDKRDAVTIAEFLRTNAQSLPQAHPAVDELRALARERENISAQIVALKNEIKRYLGIVFPEILGLLNPFTASSLRLLAAFPSKEAFLQASPQALLQILAGASRGRKSTLSSQLLIDTARTSIGLASPDLEAILRSKIRILERLQAELEEMTDRLVQRCRDQVPGPLMILDSIDGLSTTTVSHFLAETHGRSFSTPQKLIAYAGLDPTIYESGQWKGRGHISKRGNKSLRRVLFLMAVAVIRVNPIFKEVYLKKRSEGKRYKQAVLVVAHKLLRVIHALLRHQVPFNPAHQSL

SEQ ID NO: 236838 - protein, 315 aa, unidentified
MSLETRIAVGIDVSKRYLDVFHAGAEIHHQFANEPKGIVALIAWLGTMPAFDLVVLEASGGYEMVCWQALCAASISTARVNPKRPRDFARAAGILAKTDRLDARVLARYGAVMQVQPTQPKSADLQEMEDWLIRRKQLVDMRVAESNRRRMAPKAIQKRIDLHLRQLQREIDRIDQTLAERVQQTPAGQAKIALLDELKGVGPNTCAWLIAGVPELGQLNRRQIAALIGVAPVAHESGQYKGKRRIHGGRSSVRTALYLATLSAVRHDARMKAFYQRLVEAGKPKKVALVASMRKLLTIINAIFRTGEAYRVAST

SEQ ID NO: 236839 - protein, 344 aa, unidentified
MKKVLIGIDFSKEKFDVAIIVKSTSTQEHALFDNKVSGYRKMIKWINSVVEDIPCSSWLFCGETTGGYSRMMSDWLYAQGYDVWIENALVIKRTFPLKRLKNDTVDAFMIAEYALRFEDRVQLYEPLSQALTELREIFLYRHHLVRHRCSFEVRRIEKRFTQQKSANKNVISQSARHIITEINKEIAKCDEKIKEYIESDDQLSSIFAIVTSMPGVGTINAVSLMVYTNNFTKFAYNPRKIACYYGIAPFGRDSGTSVHTDPRVGFIANKMLKSLLTQAALASVRTCPQIAKYYQRLIERGKKPMVALNNVKNKMIAIITAMVRTGCMYQPDNICLATQSVNVK

SEQ ID NO: 236840 - protein, 367 aa, unidentified
MSKNTSKKNSLPAADLSACTTVAVDLAKSVFQVAGEDQLGQVIYEKRIRSREAFITFLQQLPAGIAVLMETGPGAQAWGRMLLKQGNQPRILPARHVANHRSGPKNDRNDVLAILRAGRDQHIHAVPVKTEASQEMQALHRVRQRYVREHTAMGNQMRGLLLEYGVSIPQGKAAIDREIGRLLENPGPLVPELLRELISELLEEWKTLDGRIEVITGRVKKAAQENETTQRLMTVRGIGPILSSAIVAKQTEPERFANARDFAAYFGTVPEQHSSGNTVRLGKMAKRGDAYIRSLSIQGAHAVLRQLDPNSEQPDDRRLQRWLSRHGQRGAAVRLANRNLRIIWVLLQSKDVYRRQPKDPREAAMAQ

SEQ ID NO: 236841 - protein, 411 aa, unidentified
MRRAKKRGPGPSHLLITPDHAGNVVGIDPHKRTLTATVVDARGGILGSEHFRVSGEGHRELEAWARQFGPIARWGIEGSASWGRHTAVFLTGRGHDVRDVCANRTPRSDRARQRGKSDTLDSERIAREVLAHALLPKAFKRAGQDQGPDEQHQLLALWHNRRRSILASRQHLVNEAEHLLCELPLALREELPDTKAVRPRLAALARRNRRRRYDAPTRLRLQLLDGYRAQITALDRDEKQVVAELEMLVRQTGSTLPELCGLSTRSVAELLVETGDPRRFTEGGFGRFNGSAPLAASTGEGPGEPVRHRYNPGGNRRINAILHRMAVTQLRCEPRAQRIYANARAASHTKKEARPILKRHPSDVVYRRMIRDLPAASPAQPLLAAQPRADTARSQGGPSGPSISEPRSGIP

SEQ ID NO: 236842 - protein, 361 aa, unidentified
MCQSEVVADLRQWRPPVEQISRIGMDTSKHFFQLHGVNAAEKVVLRKKLRRKEMVAFFKALAPTVIGIEACGAAHYLARLLGSFGHEVKLIAPQLVKPYVKRGKNDGADAEALCEAMSRPSMRFVPVKTAEQQAALMMVGLRDRLIRNCTQLSNAIRGYAAEFGFSAAKGKAHLVPLLERIQADESVPVLARELFTAQAEEYARLQAQIDAVDGKLLAWHKADESSRRLVKIPGVGPIGAVLLMLKTPAPELFRSGRQFAAWIGLTPKDHSTAGKVRLGGITRAGDEALRSVLVVGATSVIQHVRRGGRGSPWIVNLLKRKPPKLAAVALANKMARVAWKLMVTGERYAAKSAPAALANAT

SEQ ID NO: 236843 - protein, 402 aa, unidentified
MNAVGIDVSKGKSMVAIMRPFGEIVSAPFEIKHTASGINSLVELINSVEGESRIVMEHTGRYYEVLAHQLSEANLFVSAINPKLIKDFDNDSLRKVKSDKADAVKIARYTLDKWQNLKQYNVMDELRNQLKTMNRQFGFYIKHKTAMKNNLIGILDQTYPGVNTYFDSPARSDGSQKWVDFASTYWHVDCVRKMSLNSFIDHYQNWCKRKKYNFSQSKAEEIYGKAKELVPVLSKDAITKLIIKQAVDQLNSASTTVESLRTLMNETASKLPEYPVVMAMKGVGTSLGPQLIAEIGDVSRFTHKSAITAFAGVDPGVNESGSYEVYKRQTSKRGSSELRKTLFQVMDALIKTKPQDDPVYRFLDKKRAQGKPYYVYMTAGANKFLRIYYGRVKEYLATLPES

SEQ ID NO: 236844 - protein, 393 aa, unidentified
MYLVGIDIGKLKHSFCLLEKETGEILVEPVFFKNNRDGFNALLSSFKHLPQKDILIGMEDTGHYNLALLKFLLDRNYQVALINPVATNLTRKMQGGISKNDKLDTLTICDVLSSNQRVKSYRISKYSSFDLYEQKQLTREHHNLKEEENQLSNRLQKCIDVVFPEFNSLFKSKYGIVYMNILKEFGSADAIAHADIRTLRKCFDTGRGKHISLTAQELKEAARNSIGFPSSSEATQIKHLVARIELIKEQIAEIDKKIEEFSIQNNSPILSIPGISHFSGTSILAELGDIHNYSKPSQIIKFAGVAPLTYESSQFTAQHTAITKKGCKYLRKTLYQIITPVIQYNPVFRKFYLLKIAQGKGHRCAQGHCVRKLMRVIYHLLSTGTQFDPALLR

SEQ ID NO: 236845 - protein, 363 aa, unidentified
MEVAGRFIGIDLGKRTYEMCIVDQKGKITRTGGKTDFAGIDKLCEKLNADDAVAIEACNLAFRIERAIRKSVGCKVCIMNAGRLAVIYMSTRKTDKEDSMKLAKLLKNHDEDELPIVTPPSDEEWERRKLLSEYRSLKCQRTKEINKLHAIFEHNGYTQFVRKDMSSEKNRDNILPLLKGYEKEEAERLIERLTLLEKQIAQLLQKINAEVEKDEKIQKVMTVPGIGPITALAYVAYVGDVKRFDNAHQVSNFIGFVPKVDNSCTICRSGHTTKQGNPLLRSLLVQAAWASVKSKNGGALRDKYKYMAETRCIGKGKSIVTIARKLGELLYLILKTDQEYKPQKFITPEIRISKLAEEALEYS

SEQ ID NO: 236846 - protein, 342 aa, unidentified
MNRSIGVDLHKSAFTVCYYESEEKHEFKTYQVNRMNLGYFKNTLKKTDELAVESTGNTAFFVREIQNKVKRVRIVNPFQFKVISSSVKKTDEKDAFTIAKFLHKDLIPEVRQRTEEDSQIASLIGTRDKFVKLRTALKNKIHNILNAQGIVTKREMFTSEKSFERVLALKINSSCQFEIGIIATQIKSLNDAVDKIGEELKNRAQNLPGHKNLISIKGISDTGATIFLNTIGNINDFKDEKHLASYFGIVPRVWVSNQTTHHGRITKLGNKIARTALVQSTLVAIRYSPYLRAFYDKIKSRRGAGKAIIATSRKLLGIIYNTLKNNWVFEDFTKFKLVPCAG

SEQ ID NO: 236847 - protein, 400 aa, unidentified
MLSIGIDVSKGKSTVCGMKPGGEIVYAPFEVQHTREGMSELVLLLHNSGEEVRAVLESTGSYHCPVVAALLENGIFVSVVNSLRMKRFCSQSIRKVKTDRIDAMQIALYGLAYWQELQPTKLPEDTYRELQLLARQYYQMTSLLIKAKVDFNALCDQVLPGMQELMSDHAGRHKLSDFVLRYRHTTHILEMGETRFRKDYCKWAEKKGYRNCERMAALIFATAQNGIPVLPNAPSTQIVITEAIRVLHTVEASRDAILTQMQALAKTLPEYSLVREMPCIGDTLAPRLIAEIGDVRRFHSKRALIAYAGIDAPPYQSGKFCANNRHISKRGNRYLRKTGYEVMQSYVMHKPANDPIFTFIEKKRSEGKSGKLAMVAGLNKFLRVYYGKVTELYRSLPAIE

SEQ ID NO: 236848 - protein, 386 aa, unidentified
MQAPTVSTPIMDHISTIFVAIELSQKTWLVTVHSPDKDKISRHKVQGGDHASLLALIDRVRDRAARTLGAVPAAASCYEAGYDGFWLHRLLMAAGITNYVFDPSSIAVDQRARRVKTDRIDGEKMLRTLMAYLRGEPRVVRIVRVPTPEQEDARRCTRERHRLTKEQTAHTNRLKALLRLHGFAVGNPRRRDWLTWLAAQRDWQGQAVPPRILTEIEHEHARLMLVRKQLEALAQAPAAADLTPAVAEMTRRSELLLRLKSLGPAFATTLTQEVFYKDFHNRREVASYFGLAPSPWQSGGTDRDQGISKAGNPRARCSAVELSWLWLRHQPDSELSQWFRQRTLNASKRTKRIAIVALARKLMVVLWRFLTTGLVPAGAVLKSAEA

SEQ ID NO: 236849 - protein, 330 aa, unidentified
MMGSKSRMQGKVLSEPNAMLAVYAGIDVCKEWLDVYVHPVGQSFRVTNDGCGLRRLKRQLQSLAVRRVIMEATSKYHRAAQRSLHEAGLHVAVVNPLRARLFAEACGQLAKTDKIDARLLALMGVALDPSETAPASLAIELLQEMVGARSAASAERTALINRLATFKSPFLRAELNRRLKALQSHIVRLEAEIGRLISADPVLARRYTILMSVPGIGPATAATLLAGLLEMGTLNAKQAAMLTGLAPVAHDSGPHVGRRAIKGGRKGVRNALYMAALSASRYNNDLAVFASRLRNAGKPAKIVLVAVMRKLVVMANALITQDRTWSPIAP

SEQ ID NO: 236850 - protein, 340 aa, unidentified
MNHYVGIDVSLEASSLCVVDANGKIAREGKVASEPDALIAWLRRLKLELTRIGLEAGPLSQWLFAAMRQAGLAVELLETRHVHTALETMPVKSDRNDARGIAQLMRLGWFRPVHCKSMAAQETRALLTARKLLQTKLHDLELSLRGILRGFGLKVGPTTPARFAERIRELVAGHPSLEVIADGLLAARGALRREFDRFEKQVRDAARCDTRARLLMSIPGVGAIVSLTFTAAIDDPARFKSSKQVGAYFGLTPTKYQSGETDIDGRISKIGDAWVRAALYEGAHIILTKPLKGCTALKSWAMKIARRSGMKKAKVALTRKLAVIMHRMLADGTSFRNAAA

SEQ ID NO: 236851 - protein, 402 aa, unidentified
MVVNEVAGRGLAHNIRGLPAGRPCWPIRHLWEAPVFTERTSVGLDVHARSVAAAAIDAVTGELVRAKLTPSHEHIRSWLGGLPGPVAVAYEAGPTGFGLCRALRANGIRCEVIAASKVARPAGDRVKTDAKDALLLARLLRVDELTSVSVPTAEQEAARDLVRAREDCRTDLMRARNRLSKLLLRHGIVYSDGAAWTDKHQRWLRRDAFGQLTATATRSVFDADYETVLVITARRDRLDTQIEAMAADSEFAPLVRRLCCLRGISTLTGFALAVEIGDWTRFTGASIGSFIGLVPTEHSSGASRAQGRITKTGNGHVRRLLVEAAWHHRTRYVIGKTMQDRWDRAPAAARARGDAGNRRLHQRWVKFIDRKKQANTASTAIARELAGWCWSLAVLDEPAAIS

SEQ ID NO: 236852 - protein, 363 aa, unidentified
MHESTTVTVGLDVHARSIRLAAVRADELLEERTLPYDEEAVERVLSRWPGARCCYEAGPTGFGLYRHLVERGIDCAVVAPGLVPQRPGDRVKTDQRDARKLARLLAGGLLEPIHVPSPQLEAARDLMRAREDARLDRMRDRHRLSKFCLRHGRRLPTSSWTVVRRKWLSEQRFEFVAEQLTFDTYLHALDLVDARIEALERAIRETAEQEPWRALVAQLRCLRGVDTLTALALVAEIGDFGRFRRAEELMAFVGLVPSEHSSGEHRRQGSITKVGNSHGRRLLVEAAWHARRRPKVGYELARRQRGQDAVVIERAWRCQQRLYQRWQRMAGRGKPHQKIVVACARELAGFVWAIATEQPLRST

SEQ ID NO: 236853 - protein, 328 aa, unidentified
MSKHPITIMKKSIATVYVGVDVAKATLQVHLQGRQFEVANTPAGHKKLSQQLHKVPHTQVVCEATGGYEQGLVEALHQAHLPVSVVNPAQVRAAAQAQGQRAKSDRIDAALLTDYGQRFQPKPTPPVSAVQRQLVALTLWLQQLITAQATAKTQAEHHQAPFVRVQHQALLAHYQTQIQAIETELQKLLQQDTALAQRVETLDAIKGIGQRTALIVLAHFPELGQLNRQQVAALAGLAPWTRESGTMKGKCCIGGGRPEVRLALYMASLSAVKSNPILREFYLRLRGKGKLAKVALTAVMRKLLVYMNHELKAWATPPQPKSEVQQKP

SEQ ID NO: 236854 - protein, 368 aa, unidentified
MKKRSTMRGPSSQVRKRRHSASTVGLDLGDRSSRYCVLNEHGDVVMERSLATTTKGLDQAFGSVARCRIALEVGTHSPWVGRHLAKLGHEVIVANARRVRLISESTRKDDKLDAKTLARLARIDPQLLSPIRHRSEQAQADLIMIRARAALVEARTALINSVRGLTKSYGERLPSCASYQVGEELAGSLSDPLQAVLSPLLAEVESLTERIREYDQKLEELARQRYPEVGLLKQVQGVGTLIALTFVLTVEDPHRFRRSREAGCYAGLRPKRRESGQSRPQLGISKEGDPYLRKLLVQGAHCILGRFGQDSDLRRWGLKLAARGGKNAKKRALVAVARKLAVLLHKLWISGERYEPLRAGNQSQTAAA

SEQ ID NO: 236855 - protein, 336 aa, unidentified
MIHVGVDLHQRFCYVTAMKATGEVIVHESVANQAESLQRLLRSLPEPAQVVVEACGFWPAFQRCIRSEAARVVMVHPQRVKAIASARLKNDKVDSATLAHLSRCDLLPEVWMADPATQQMRLQVRLRIALGRQRARSKNLLQGVLHQEGMRRPVSDVFGRQGRQWLRQIGLSPAARVAVDTHLRVIEVLDQLIAEQERALARQATEDARARWLQTVPGVGAYSAMVILAEIGDIARFRDKKSLASYAGLVPRVRESAGKRSYGGISRAGSETLRWILLQVAQVAARHSPAACAWYQRLRRRKRPQVAKVALARKLLNCMWALLHHGVCYDDQIFAA

SEQ ID NO: 236856 - protein, 322 aa, unidentified
MAMLSFGGIDVSKDRLDITVLPDEQCSSVSNDAAGWAELVEQLRGSSITAIGVEASGGYERGVVRALLAAGMSVRQINPFKLRQFAKASGTLAKNDRLDARMIASFVAVMPTRPAQRQAPMIEQLAAMLTVRRQLSEQKVATENASRLLEGAMLQRLSRRRIAGLTADIDLLDQRMVEIVTADGALAHRFRLLNSMPGVGAVLACTLIALLPELGQMSRKQVAALVGLAPYDFDSGKLKGRRCIWGGRARVRHVLYMAALSASNWNPGLKAFHDRLEATGKKPKVVIVAVMRKMITTLNAMLRDGTTWVDRYSDRRSASTAR

SEQ ID NO: 236857 - protein, 435 aa, unidentified
MSLGTTVPHAERSHMKQHVSEAFAAFVGLDWADAKHDVCLQAAGTAQREFLSLEHSPEAINAWVQTLRTRFNGQPVAVCLELNKGPIVSALRNYDFLVLFPVNPLTVAKYREAFTPSRAKDDPTDAELQVELLLKHRDKLTPLSPQSPAMRALAQLVEHRRRLVGDKVRCTNRLTSTLKNYFPQVLQWFPEKDTAIFCDFLSRWPTLKAAQLARRTTLEGFFRAHHVRSTDLIATRIEAIKSARALTTDDGVIAPNVLLVHALVAQLRVTLQAIADFDKVIAHRAQDHPDFPLFDALPGAGAVFAPRLLVAFGEQRERFTSADELQKYAGMAPVTERSGKKSWVHWRLQCPKFLRQTFVEWAAESTRHSFWAQVYYQQQREKGKAHQAAVRALAFKWIRILYRCWQERTPYDESIYLQALKRRNAPLLHNLANLS

SEQ ID NO: 236858 - protein, 454 aa, unidentified
MSRNRAYKRTVVKRVDIEALRERAVKWGGAGTTVGLDVGKDEIVACVRWPNGEFERPWSIRNPSEIDEFLELLNMVQSVADSLTIGLESTGTYGEAVRRALTTAGFEVHRVSGKATSDYHEIFDGVPSQHDGKDAAVIAELTAFGKGTAWPYQADSENLAAVKHQVARAETYRKQQVEWTGRLEGLLARHWPELTALLPLGSVTLLQMVIHYQSPARVAADAEAAQRLARWGGAKLQESKIAQVIESGRTTRGVPVAEPQAAWLGEVASNILSARRHVRDAEGQLGKLLAAEPVLCRYTAIGAATLGVIWAYVGDPRDYSSGGAFLKALGLNLKERSSGRRQGELAITKRGPSAPRRWIFFWALRALQREEIQPWYTEFTRVGRKSSADGKGEHRKLKGVVALMRKLCRGLRHAMVHQEEFDYGKLFDQSKKPRRRRRRNRRRSGIAHTTAAGT

SEQ ID NO: 236859 - protein, 415 aa, unidentified
MDDEVYYERCAGIDVHKKLLVVCLRIGRKTEIREFGTLTHEIREIVAWLKGNGCQMAAMESTGSYWKPLYNIFEQEGLPAMICNAYHIKNVPGRKTDVGDAQWIARCLSQGLLNPSFIPEREQRELRDMTRFRKSQIEERSRNINRLQKFLEGANIKIGSWLSDVEGKSATALLELVIGKPDFTVDDVADRMHGNMKSTAEELYLSLEGSITPSQREFFAHIMSVIKEQTAQIEKTDSMIQRSLSENYKVAVEALDAIPGIGRVSAEQIIAETGIDMSRFRNQHSLSKWAGVCPGNNESAGKRKSGRTPPGNKTLKSTLTQCAKTAKNNKKSFFSAQYSRLVSHRGKNRATMAVAHSLLIAIYFVLNGCVYEDLGADYYMQFNREKKINSHVKQLSKLGVDIPDDILRNAIEMVC

SEQ ID NO: 236860 - protein, 417 aa, unidentified
MPVVYARCCGLDVHKKTVVACVLLTELDGRVRKDVRTFGTMTTDLLALSDWLCELGVSHVAMESTGVYWRPVFNLLEDDKRTVVLVNPQHLKAVPGRKTDVKDSEWLADLLRHGLVQPSFIPPAPIRALRELTRHRKALVQQRTQEVNRLQKLLEGANIKLGAVASDILGKSGRGMLDALAHGEQDPQTLAELARGRLRGKLPDLRRALHGQVQASHRVLLQQVRAHLDLLAAAIAHLQHEIAQRLEPSHEAVTLLQTIPGVGEIAASVLVAEVGTDLQRFPSAKHRASWAGVCPGNKQSAGKRLGGKTTGGNVWLKAVLSEVAWANARNPTSYLGAQFRRLAHRRGVYKALVAVAHSVLVIVYHVLTTNQPYHELGADYFDHLHQTPLERHHVRRLEQLGYTVSLTPQPNPPPSAG

SEQ ID NO: 236861 - protein, 430 aa, unidentified
MKSNTQNAKIEAITEKTLVLGIDVGSETHYARAFDYRGIEYSKKPFKFSNTEAGFVTFKEWILDLKERHEKDKVVPGMEPTGHYWFNLGKFLQDNEMKPVLVNPHHVKKSKELDDNNPTKNDRKDPKVIAGLVREGRYMIPYLPDGVYADLRTASNIRFQLQAELTRIQNRISRWFNIYFPEYKTVYGKPDAKSGMLILKAAPLPEDILTLGIDGVNQIWRDAKLRAVGKARAKTLIEAAEHSVGSKEGAVSARMEIRMLLEDYESRNIRLQEVMGLIEGLVNQIPMAEKLLEIKGVGIKTVSGFLAEVGDIRRFNDPKELQKLAGLALVENSSGKHKGKTTISRRGRKRLRYLLFEVAMSLVAKNPEFRELHNYYTTRRLNPLKKMQSLMAIAAKLLRVFYAILTKGVGYDPKKMVNDIRRPAAYAQAA

SEQ ID NO: 236862 - protein, 334 aa, unidentified
MEQITTVGIDLAKSVFSLRGVDGMGRVVLRKTVRRDQLEQVVAGLAPCLIGMEACSGAHEWARRFERHGHTVRLMAPKFVIPYRKSGKNDGNDAEAICEAVSRPSMRFVPVKSVEQQALLALHRVRQGFVVERTATINRLRGLMAEFGVVMALRAVTVRRQAALAAEALPELARRMVAELLEQLRLLDERIGAHDRELAAQARLSEAAQRLMKIRGIGPTTALAIVATVGNAREFDNGRQFAAWLGLVPGQYSTGGKARLGRITKRGDAYLRNLLVYGARSVLHTAGAHRDRISRWALELQGRCGYHRTLVAIANKNARIAWALLAKGEVLRPE

SEQ ID NO: 236863 - protein, 428 aa, unidentified
MNKSEAKETEEYAALIGLDWASEKHDICLWDAATGEVRQRVVDHTPEALAEWLGELQAQYPGRRVAVCLEQSRGALMYALMGHAFLDLYPINPVTLARYREAFAPSRAKDDPGDARLLSEILRLHREKLAVWKPDDEQTRTLGFLNEERRKAVNLRTKLVLRLQSALKLYFPQALQWAGTDLAAPMACDWLLKWPALEAVQRARPQTVRAFFYAHNCRSAGHIESVLAALPAAKPLTQDAAVLAVQPLTVQMLAKQLRLLHGSIAAYERQIHALFRQHPDAFLFESLPGAGEILAPRLLSAFGTDRARHPTAQDMQTYAGVAPVIERSGKSCWTHWRWNCPKFLRQTFHEYAKNSIPYSAWARAYYEQQKQRGKGHNAAIRSLAFKWIRIIHRCWQTRTPYDEGLYLQALAQRGSPLVALLAAPAREA

SEQ ID NO: 236864 - protein, 346 aa, unidentified
MNVNHYIGFDVHKKSVSYCVKAADGTILEEGKIPATRAGLRGWAEKRTQPWKGAMESTLFSGWIYDILQPHAGELAMGHPAMMKAIGAAKKKSDKLDARKISDLVRCNLLPECWVAPAGIRELRRVLRYRNLVVGQAVQMKNKINGLLMESGAEYNRRQLHGKEYFAELMETLEEVPESVKELLRESRATLEMFQAGQAKLLKRLQQDARLKQRLEILKSIRGVGTVTALTWALEIGDPQRFGSIARAQSYCGLTSALEESAGKQQRGPISKQCNHHLQTILIEAAKLAPRWNPQLARVHEQAMQKGHRNQATLEVARKLVAYLLAVDKSGKAFQAAVEPKEDVAA

SEQ ID NO: 236865 - protein, 335 aa, unidentified
MTYIGIDVSKDTFVVAYSPDKNSKTKTFKNTTKGIHEFIRTISKEEHHCVMEATGNYSALLVYLLSEAGITTSLENPLKVKNFARAMLSTVKTDEIDARLIALYGEKMQPAPYKLRSDAILTLKQKRTVIRQLKKQLIATRNLKGSMEVLPFFDAKCKKSIDKTIAFLEKQIKDLEEDLASLAKSEYKKQMDLLTSVKGIGITLAAALIMATGGFTYFDNAKQLTRHLGLSPTYQQSGTSVNFKGHINRNGDSSLRSQLYVAAFASLRCNTECRACYDRLRSNGKPGKVAVIAVANKLIRQAFAVVTQEKPYVDGYISSKKVTPAFFQSVSGWKI

SEQ ID NO: 236866 - protein, 358 aa, unidentified
MKDLTTSPIVVGGVDTHKEVHVAAVVDAHDVVLGAESFSTTRAGYRALLRWMRTFGDLTRVGVECTGSYGAGLMRHLNAAGIDVLEVTAGDRSDRRRRGKDDTIDAEQAAHAAFAGVRTVTPRAHNGMVESLRALKIARSSAINARRVALQLIHATIISAPEELRDQLRNMTRMQLIRTLATWRPDLSGYRDPVTATKISLKSLARRYLELHDEIADLQVPMHALVDELAPDLLARVGIGYESAAQLIITAGDNPERLISEGSFAMLCGAAPLPASSGMTTRHRLNRGGDRAANSALHMIAISRWRIDPTTQAYVARKKTEQHSNSEILRCLKRYIAREVYYLLRNQHRALHQIAQAA

SEQ ID NO: 236867 - protein, 354 aa, unidentified
MIIIGCDYHPAFQQIAFVDTETGELQERRLEHAEEAEKFYRALGLQGMKVRLGMEASGQARWFERLLAELNFELWIGDATEIARKRERKQKTDRQDAQHILKLMLKDDFPRIWVPSWENRDLRQLLWHRHRMVQARTRMMNQLQAVALNEGLRCKKKLWREAGRKQLEAFRLAPWASRRRHDLLELLDRLNPTIAELSQAIEQEVEKCPEAQRLMTHPGVGPLTALAFVLIIERADRFQCGKQIASYLGLVPLEDSSGNRRRLGHITKQGNSLLRFLLVEAAQVTVRSLPAWRNKYVHLTMRRGRKIAKVAMARKLAVRLYWMMRKEWDYEQVKKFGSHAGQPGHRDGVKSNIE

SEQ ID NO: 236868 - protein, 341 aa, unidentified
MKQYVGLDVSMEETNVCVLDDAGMVVFVGSTPSRPEALTKLLRAQAQHAERIALETGSLSSWLWCELKAVGFPVVCLDARHANTALSMRINKTDRNDARGLAELVRIGWYREAKVKSMESRQVRAVLAARSKLVDLRRDLENQMRGLLKSLGFVIGKAGVRVLPSRIAALLREAPHLRPLIDPLMAAHSILAKQVAKYDAQIRELAKANQTVRRLMTVPGVGPVTALAFVSTVDDPHRFARAADVGAYLGLTPRRYQSGELDRNGRISKRGDRLARYYLFEAANVLLTVVRRPSSLKSWATKLAKRVGPKKAKVAVARKLAVILHCIWTDGTKFDWGRTTA

SEQ ID NO: 236869 - protein, 408 aa, unidentified
MNTLYVGIDVSSKSNVVYLMLPNGDKHSNFSVANSHEGSTQLVKRILSAMTSCSLDTVLIGLEATSVYGDNLVYFLREDAALARFNSKIHVLNPKQVKKFHDTYNDLPKNDYVDSFVIADCLRFGRINKEVYMGDYRYKALQNLTRARFFAVQNLVKEKQRFMNVLFKKYSTMTQEKVFSDTFSTTALAVYDEFESAEALANMDLHELTAFIMEKGKNRFPNPNAVAKAIQKAARSSYRLPKTVNDSVNQVLSISITSIKALEAQIKEFDKAIATQMELLPNVLISIPGIGPVFSAGIMAEIGDINRFHNQAQLAKYAGLAWKQHQSGDFEAQTTRLINSGNRFLKYYLCEAAFSLVRCDKEYSDFYHLKYKEVNRYQHKRALALTARKFVRLVFRLLKDNRLYCPAK

SEQ ID NO: 236870 - protein, 355 aa, unidentified
MSQEKYIGMDVHQATISVAVMDGRGKLIMECILETKAGTILGFIRGLQGSLSVTFEEGTSAAWLHDLLKPHIAHLVVCDPRKNALLKDGSKSDRIDARKLADLLRLNRLNPVYHGEHGVRTLKELGRSYLSITQDSTRVMSRIKALYRSWAIPCSGTTVYAPRHRAEWLAKIVEPGVRRRAERLHQQLDLLQPVRQQARRDLLLESHKHQGVRLLRQIPAIGPIRAALLVALLQTPDRFRTKRQLWAYSGFALETHDSGEYRSVRGKLRRNRERMTVRGLSDNHNPDLKNLFKGAAISASSRPGPLYDFYAALLEKGMRPTMARLTLARKIATITLTIWKKGVDFDAKELHRQAA

SEQ ID NO: 236871 - protein, 324 aa, unidentified
MSDAIVGIDVSKETLDAYCARGQRRQGRTFANSPDGWKLVRTWLKAMGSKQAHVCMEATGRHSLGVALALHEAGHVVSVVNPAQIRDFARTKLGRNKTDKVDAALIREYGELFKPEPWTPPSPAMRRLCELQTMRAGIIRSRAEWKNRMGSGLGDSIAIELAAATIDHFTTQLEAIDRAISETIDQDAELHDRRDLLISVIGVGDTLAALLMAKMPEPGVLRRSGEIVAYAGLNPSHHRSGTSIDRPTRISKIGNAELRSALYMPALSAMRFNPAIAALVARLKSAGRLKPKQIVVAAMRKLLVLCFGVLKTGKRFDPAIAMSA

SEQ ID NO: 236872 - protein, 316 aa, unidentified
MKTEVFVGIDVSKQHLDVAVRPQSRHFIIPNDDRGLKQLLKRLTALKPQLIVLEASGGYEWLATAALAEAQLPVALVNPLAVRQFAGATGKLAKTDKIDAQVLAHFAEAVRPEPRPLPDQEQQLLKAALQRRVQMVKMIGQEKNRLEKTFIPALRQDIQAHLAWLQQRLEQLDRDLNDQIRRSPLWRDRDRLLQTIPGIGPAVSRAVMAQLPEAGRLPGKKAAALVGVAPYNRDSGRFRGKRMIRGGRSYLRRMLYMAAVVAARWNPVIRTFYQRLLAAGKPKKLALTACMRKLVLILNAMLKNNQPWNQFINQVP

SEQ ID NO: 236873 - protein, 346 aa, unidentified
MVVGVDVHKQSHAVALLDERGTSLGSLSIPNSVAGAERLLAWLDEHDARQAPVGIENAAGYGRLLCAVLASAGSEVLNVPAWRTHRDRHEQGRGKTDPGDALAIAQVVLRKRAELGPALEPELIRALALLEGLRRQSVYARTQAIQRLRAIWTQLDPEGEAQVVHCQRQRELRKLKRIELGAGIAERAATRCIRELAHEIERLNKRIDELERELSQLLHKHGNPLADLPGAGPVVTVALIAHSGDVRRFKSKAAYARFCGVAPIRCGSGRTADHHRLDRGGNRQLNAALHRIALVQARVDPRAQTFLARKRAEGKTPREARRALKRQLANVVYRRLHAWAETSLPA

SEQ ID NO: 236874 - protein, 369 aa, unidentified
MSDTKTLVNTVADKLFIGLDLHKNTSTFVIKDKEGNVVNSAKVLTDKNDVSRYINAIKRNNGGKELSLVVEPVSQWYYYADLIESLGVDVHLAHPMEVKAIAHSHIKMDKIDASVLADLLRTNFLPEAYFSPAEVRGWKEQCRFRASVINLRVQVKNKIHAILFKHSLKHNFSDLFGKGGRRWLAGLELNEPFKTNLNKYLGLIDYLTGEIETAEERITDTVINCPQAKLLISIPGISYCSALTIMAEIGNINRFLSVKHLQSYAGLIPSTYNSGDKQIHGKITKRGSKWLRWIMIEAAYHQMNCKRISGFGSYYNTLKKRKGSKTAAVATARKLLAVVWRLLKDNRPYEVIDPRCRKFEAVGLKNIVS

SEQ ID NO: 236875 - protein, 312 aa, unidentified
MITQPEVFIGIDVSKKTLDVCGYPDKYKAQFSNDAAGHQQLLEAMRKVQPTLIVMEATGGLEFEATALLVTSELPVAVINPRNARDFAKAVGLLAKTDQVDAWALARFASAVRPEQREIKSEALQGLEEVLTRRRQLVDMVTAESNRKGQASAKMAKEIEEHISWLKQRIKNADLDLGNAVKASPAWKAKADVLISVPGIGSVATFTLLAELPELGTLDRREICALVGVCPFNRDSGTLRGKRSIWGGRASVRAVLYMAALVATRYNPVIKQFYQKLLDAGKLKKVALVACMRKLLVILNSMVRNNTLWASC

SEQ ID NO: 236876 - protein, 383 aa, unidentified
MRIVCGLDVHKDSVFVCILNEKGEKFESKYGVLTPELEELHQLLLTHEVKEVTMESTSIYWHPIWRVLGDIECLKLVNPYFIKQLPGRKSDVRDAAWIAECTMKDLIHGSFVPNATVQRMRQYNRRIFDLNKEKVYKLTKLDALLHRCNIRISNYVSSIDSKSYKEVVRLLSEGIVDAERLMEAIHGRTVNRVGKDVIKAALTGIVNEVDIDLIRLYREELQIDDKHLKECQNKLTEICRNEFPKEFENLQTIPGVKERSATSILSELGADMKMFLTASALVSWCGLKPRNEESAGKIKSRRITHGNKYIRKTMIECAWGASRTQDCFYSNFSYIQTKVRRKNAMKVKVAIARKMLVAIWHVLGENVPYYDYKKPKAIADGNS

SEQ ID NO: 236877 - protein, 405 aa, unidentified
MTDIEQHDSVEVFVGVDVGKGTHHAVALDRKGKRLLDSALPNDETKLRALIGRLKEYGKILLVVDQPATVGALPVAVAGAEGVLVAYLPGLAMRRIADLHAGEAKTDARDAYIIAEAARSMPHTLRSLKIADSHVAELTMLCGFDEDLAAQITATSNRIRGLLTQIHPALERVVGPHLDHPAMLDLLERYPSPAQLSSLSQKQLATRLLKLAPRMGKTWATEIVQALAEQTVVVAGTQAASIVLPRLALQLAALRKQRDEVAKEVERLVLAHPLHPVLTSMPGVGVRTAARLLVDVATRAFASAAHLAAYAGLAPVTRRSGSSIRGELPSRRGNKQLKRAMFLSAFAALRDPISRAYYTRKISQGKRHNQALIALARRRCDVLFAMLRDGTLYSPPRPEISLTTT

SEQ ID NO: 236878 - protein, 427 aa, unidentified
MKDSTLARLAEFSQLKKEIRGSDRHLIVGIDVAKEKHHAFFGTATGKSFLRRLIFDNNREGFETLLQRAQVIITQEGLDKVVFGVESTADYHKPLAEFLINNGLTVVLISNEAAKENRKTLDGRWDKNDTKDSANVADLISQGKFLYYDLPAPLIRDLRNLLSLKRKLKAYEHSVRMRIRNHLVSQFFPELDKYYGHREQENLAIVKWCLNPRQIAAMDFREFFQMVTSRDRGSIQRQRLQAIQEAARISIGCEVGESVAFEAKILVTSLERIRESIVEADSKIAEACRQLPGYESIVSIPGIGPAVAAVVLAAISDPHRFTSAKQVLKLAGLDLSASRSGKNAANVTPKLSKKGKAPLRYALYQAAVIATSRNKNFIEYFSKLLVGREREQGIKTKMRVKVAAKMLVIAWTLMKKGGTFQGEYLLN

SEQ ID NO: 236879 - protein, 316 aa, unidentified
MTNDSTLTAGIDTSKLKLDVAVPGLGRSWSLANSSDGWATLAERLAEIGVERVGIEASGGYERGVIDVLRAAGFDVRLLQPMQVRFFARMRLRRAKNDRLDAEIIARCAELIDRTSFEPDGDLRRLADHLTYVEQIEEDIARLKIRREHHHDPRLLALDEEDIARLKARRRQEIAFVAAALRDRPDHARRLDLLISIPGIGERTALTLVIRMPELGHLDREQIAMLAGLAPLDDDSGTRSGARHVAGGRARVRKALFCAAFPAAMRWNPALVDLYRRLTARGKPFHLAIVACARKLLVFANAVIHRGTPWVAERAI

SEQ ID NO: 236880 - protein, 370 aa, unidentified
MNHVTSIGLDVHARSVTAAAFDPMTGEITARRFGNDPSEIAGWILGFEAPKAVYESGVTGFHLCRELRALGVDCVIGAVSKMQKPASNKQVKNDRADAQFLARLLSTHNVTEVFVPDTETEAMQDLTRALEDAREDLIRGKQRLTKFLLRHGWVFDGTREDGSRVGYWTKAHWRWIREVELGDMASQETLDYYISEVRHLEGQKKELEKLISIHAGGTRWKPRVDALCCLKGIDAMTATSLVVEAGVFSRFDSASAFAAWLGLVPSEHSSGETEHRGRITRAGNKHARKLLVEASWHYVNALPTRKAPRPGTEVPLHIENHAARGTKRLVERRRELHRRGKKPVIANCATARELACWVWAIGRMCEGTLD

SEQ ID NO: 236881 - protein, 319 aa, unidentified
METAPVTLWVAMDVAKETLEIGCSTPDAVRVRRVANAPAGFRELLKALPPRAHTAVVLEATGGYERNVIAELLEAGYRVALVNPRQVRDFAKGWGILAKTDRIDARVIALFAQHVQPRMLREMPEQQRELADLVTRRRQLLDLRTRESNRWAQTSAKAARKSIQQVLNLLDGQIHKLDKAIAELIDSDDDWKAKSELLQSTPGLGRVTAATLLAELPELGELNRQQIAALVGLAPFNDDSGQHQGQRHITGGRAAVRCVLYMATLVATKHNPTLKAFAQRLQKSGKKFKVVQTACMRKLLVILNTMLKNKTSWNPAFDA

SEQ ID NO: 236882 - protein, 350 aa, unidentified
MVVVGADVHKRSHTFVAVDAVGKQVGQVTVPAVTEGHRKALAWARERFGDELVWAIEDCRHMSARLERDLLASGQKVVRVPPKMMAEQRRVARTRGKSDPIDALAVARAYLREPSLPVASHDEASRELKLLVDRRETLVAQRTATINSLLWRVHELDPAHAPKARSLDLAKHQQALRAWLVTLEGVVAELALEELDDVIALTARANAYAKRITDLTAQAAPTLLAMPGVGPLTAAKLVGESAGAARFHSEAAFARHAGVAPIPVWSGNTAGRVRMTRSGNRQLNAALHRIAITQVRLQGSLGKAYYEKKKAEGMSNREALRCLKRRLARTVFHHLTTDQTATATGLATAA

SEQ ID NO: 236883 - protein, 355 aa, unidentified
MGEVSTVGIDLAKSVFQVHGADRSGTIVFRKKLRRDQVLPFFSTLPRCVVAMEACASAHYWAREIAAVGHDTKLIPPAYVKPFVKRQKNDMADAEAICEAAQRPTMRFVQGKSAEAQASGVIFRTRDLLVRQRTQLINALRGHLTEFGYIVRQGVGHVSKLVEIVADPSSDIPAEARSVLAVIAGSLQALQSQIALLDREIASRAKADPVAKRLMTIPGIGPVIATALVALAPAASTFRRGRDFAAWLGLVPRQHSSGGKERLGRTTKMGERSLRRLLILGASSTTKVAARNPDKAGAWLAGMLARKPRMLVTVAMANKMARIVWALMRTADPTELRPRRCSRRGLRRQGRKEGQ

SEQ ID NO: 236884 - protein, 454 aa, unidentified
MDWDSLPPLNVNAAGLDIGATEIYACVPVGRDPQPVRRFDAFTVDLQSLAAWLAACRIDTVAMEATGVYWIPVYEILEASGFEVYLVNARHVKNVAARKSDVSDCQWIQRLHTYGLLRASFRPPEEIAALRSLVRHRDTLIHYRAAHIQHMQKALQLMNVKLTHVISDITGVTGMTIIRAIVAGERNPKVLAQYRDPACKKSQAEITKALEGHYKAEHVFVLRQALELYDFYDQQIQACDREIESRYQASAPRDPEGQPPTTAPNPRQRRPRKGQAHFDLTSSLYQMVGVDLTRIDGIDALTAQTLISEIGLDMGKWRTVKHFTSWLGLAPNPKKSGGKVLATHIRRTQNRAAQALRIAAQTLARNKSALGGFYRRMRAKHGAAQAVVATAHKLARIVYHMLKYRQDYHDLGTDYYEQQYKERVVRTLKRKAADLGFRLEPVLTPQVSKKLFEK

SEQ ID NO: 236885 - protein, 346 aa, unidentified
MTIVEATRTVVGGIDTHSRVHVAAALDEVGGLLGSESFAADPPGYAALLSWFESFGTITKVGVEGTGSYGAGVCRFLMKAGVEVVEVDRQNRQARRNAGKSDPLDAVEAARAAQSGKASGRAKSRDGWVEALRVLLVAKRSARSARVKALTQMRAVTYSSPDELRTKLEGLSISVFVSTCQGLRASRTQDRVLAATKASLSSLAHRVADLEAEIDELDERITPLVRSNAPKLLAIGGVGIDTAASLLVAAGDNPERLRSEAAWAHLCGVSPLEASSGKVTRHRLNRGGDRQANCALWHIVITRLASDPDTQAYMERRVKEGRSKREVVRVLKRYVAREVYRALPRG

SEQ ID NO: 236886 - protein, 355 aa, unidentified
MTSTKYIGLDVHKESISIAVLNSAGKAVMECVIETKASTILQFIHGLGGDVHLTFEEGTWAGWLYDLLKAHVTELVVCNPRKNALLKEGSKSDRIDARKLAELLYMSKLSSVYHGEHGLRMLKELSRSYLTITKDLGRVMNRLKALYRGWAIPCAGTQVYAPHYRSEWLAKIHEAGVRRRAELYYQQLDALRLVRQQARKELLAETRKHRVTKLLRQIPGIGPLRAAHLVALMQTPHRFRTKRQLWTYSGLGLETHDSAQYRVVEQQLQRSKKPVTLRGLNNNHNHDLKDIFKGAAMRASTAAGPLRDFYEALLAKGRKPTMARLTLARKIAAITLIVWKKEVRFDANYLKQQAA

SEQ ID NO: 236887 - protein, 410 aa, unidentified
MRRISNRVAGLDVHRDSVTACVEIFDGVEVSVIKERFSTTVKGVRGLGEWLADADVELVVMESTGVYWKPVFYGLEGRFDDMWLVNAHHVKNVPGRKTDMSDAEWLADVAAHGMVRASMVPEPEIRALRELTRYRKTQIVARGVEMQRLEKVLQDAGIKLTSVASKVWSKSSRAMIEMLISGQVDPEVLAELAKGRMRPKIPALVEALEGRWGRQHSVVAKAIIAHIDFLDTTIDELSDEIVEATCPFDDLVRLWSTIPGVSTRTAEMMVAEIGADMGRFPSAKHLAAWAGLAPASHESAGKRRPAGTRQGSRHLQGALVEAARAAARTKGTFLSERYKRIARRRGPNKAAVAIAHSMLVAAYHMAITGEIYRDLGSGYYDNRKDPKAKVNRHVKELQAAGYTVNLTPAA

SEQ ID NO: 236888 - protein, 346 aa, unidentified
MRHLAVDLGGKESQVCTRDSDAKILEERRVPTSRLPAFLMVQPLSRVILETGAEAFAIADAALLAGHEVRVVPATLVRSLGVGARGIKTDRRDAQVLSEVSCRIDLPSVHVPSQRSREWKSMCGMRQALVDSRTKMVNTVRGWMRGRITHVALGTVSTFPRRVREEQEEDLPTYVERQLQAIEQLTLSIKAFDKEFAAIAEADPVCRRLMTAPGVGPLVSVRFVSTVDNLARFPDPHALESYLGLTPGEDSSSERKRITGITKAGNTRTRWILVQAAWTILRTRPGDPMAQWASKIAAKKGKKTAVIALARKLAGILFAMWRDASEYNPTKGATAPAVKTYVLKRL

SEQ ID NO: 236889 - protein, 339 aa, unidentified
MKYTPVGVGIAKHVIQIHFINEHTDEVVDKQLRRQDFLTFFGNREPCLIGMEACGGSQHWARELTKLGHKVRLLQARFVKAFVMGNKNDVMDARAIWMAVQQPGKEIAVKTEEQQSVLVLHRTRMQLVKFRTAQINALHGTLLEFGETIHKGRAAMEREFPEALERMKERLPPYLIMVLENQYNRLNELDSLIEDIEKQLTSVARQNETCKRLLDIPGVGPLIATAAVATMGEASAFKSGREFAAYVGLVPKQTGSGGKVRLLGISKRGDTYLRTLFIHGARAVALVAKEPGPWITELKKRRPASVAIVAMANKLARTVWAITAHDRKYDRNHVSIRPY

SEQ ID NO: 236890 - protein, 391 aa, unidentified
MVYVGIDVAKDKHDCFIMSSDGEVLHDVFTIPNSKDGFNDLFQKIRATSVILSKIKVGLEATGHYSYNLLGFLLDKGLTTFVINPLHTALYRKSLSLRKTKTDKVDARTIAAMLASDVNLKSYTDTAYHNEELKSLTRYRFDKVKERAKLRSSVSRLISILFPELEALVPTLHLVSVYALLSEYPGAHQIADVHLTVLKNLLHAASKGRYGRDMAVVIRDAARQSIGSRMPAKSLELRHTIKLIGELDSEIEEIETVIKAIMDEIGSPILTIPGISYRMGAMILAEVGDFSRFDSPDKILAYAGLSPSTYQSGQLTSTYSHMEKRGSRYLRYALFNAAKFVCHWEPTFAVYLAKKRAEGKHYNVAVSHAAKKLVRLIFALEKSGQTFSKAA

SEQ ID NO: 236891 - protein, 481 aa, unidentified
MAKRKVSSFQRLQSGKLNPRDYKELQRRLQAEDPGLMVVHGNAAGIDVGAQSHFAAVPPGRSEQPIREFGSWTAALHEMAAWLICCKIDTVAVQATGVYWLGLCDVLEKAGLKIWVVNAHGTKNLPGRKTDVQECEWLRKLHTYGLLRDSYRPPESIREIRDLWRLRERWVQEIGRALQQMQKSLTAMNLQLTNTVSDIGGVTGLAIIRAIVGGERDSRKLAKLRDPRVRASEDEIAHSLEGTWREAQLFELGQVVEHYDFLAKKIVELDKLLQQKMKTMPTREPVVVEQGTQAEAEQAVWKRKRKKPSKNAPKFGLEKELERVLGVDLTLIDGVHVLIAQTVYAEVGPDLSAFPSEAHFAAWLGLAPMRSVSGGKLIRHERKKMTNRLSLALRMGAETLENSKTYLGARFRNIKGRRGPAKAVKAMARYLACLIYRMMTKGQTWIDRGEAAYEAQRSVRELQFLTRKARALGMNLVPAKV

SEQ ID NO: 236892 - protein, 309 aa, unidentified
MSKSVVHVGVDVAKADLQAATATQNQRYLNSPQGHRQFIAWLRRLGIVHVVLEATGGYERALVKALQAQAITVSVVNPRQVRDFARAQGRLAKTDRIDARVLVDYAAALAPKPTPAQSPAQIRLTELVRARGQLIASRGVQHNQLEHVTEPLVRRCLREIVDALDTRIARLEKAIAQLIAQTPELDVKARQLVSVQGIGSTTAALLLAYLPELGSLSKAEAAALAGLAPRNHDSGRFRGQRHIAGGRHDVRTGLWMPTLVAAQHNPILKAFYQHLIARGKPAKVALTATARKLLIYLNSLLKNLQLTPC

SEQ ID NO: 236893 - protein, 415 aa, unidentified
MELLHERCAALDIGKKDLKACVRTPSVSRRKRSRSQEIRTFATTTNALLELRDWLVAERVTLVVLEATGDYWRGAFYLLEDDLNVILVNAAHAKGLPGRKTDVCDASWLCQLGECGLLRASFVPPEPIRQLRDLTRYRTTLIAERTREAQRLEKELEDAGIKLSSVATDILGVSGRAMLAALIAGEDDAVALAELAKGRMRPKIPQLVQALTGNFGAHHAFLCRLHLERIDQLSATIEELSTRIEEQMRPFSHKLDRLATIPGVARAVAEVIVAETGGDMSRFPSPGHLASWAGVCPGHHESAGKRKSGRTRHGDRWLCGALGTAAMAAARTKDTTYLGARYRRLVPRLGKKKAIVAVEHSILTAAWHMLTDDVDYHDLGGDYFARLDPERAMRRIVRQANALGYTVRFDPIHAA

SEQ ID NO: 236894 - protein, 325 aa, unidentified
MKNSDYAFSTFIGIDVAKNKLDIFEQKSQTLTVVGNNKHEISAWIKTLAETAQTIVIMEATGGYESLLVELLHQRNVFLAVVNPRQVRDFAKGVGCDAKTDMIDARVLARFGQVVQPSPQAAQSDEQLKLKALVERRRQLVDLVNQEQNRLLQTRDNDIRKSIETVLKELKKQLKAIDEQIATAVDADPLNSRRVEILQSVKGLGPVTVSTFVAELPELGQLNRQEVAKLVGVAPMNNDSGQSSGKRKAAGGRSTVRRTLYMATLVATRFNTQIRTFYQRLVAKGKPKKVALTAAMRKLLTILNTLVRTDQLWIDPALRSKETAS

SEQ ID NO: 236895 - protein, 343 aa, unidentified
MDKVYVGLDLGSSSFQQAALNHEGVKIMNRSFPTSEANLGSAFANLPGEIHVHLEAGELAPLAASIIAPLVKRIVCSHPKENAWIAKDGDKCDRVDAYKLAELLRLNRFKEVHYAPDQPRRDFKQLVLHYDELTAHQARWKTKLKARLRMQGVIVTGQRLFSPTGRKLVLAKVESGDVRTALKQLYEILDQSVAAQEQARLLMLRAAQAFPEIKLLRTVPGVGPIGACRFSAYIHTPQRFSSKRKLWKYSRLSVSHRSSNGKPLRRPKLDYSSGCGRLKDVSRKAFDVAQRLRTDNGFKRTYQRALATTHDKTHARLTVQRKILSTMRAIWLSRTAYRDELSR

SEQ ID NO: 236896 - protein, 342 aa, unidentified
MKEVTIIGVDLAKRVFQVHGAASDGSVVFRKRLSRAQLSVFLARQPACTVAMEACATAHYWGREITKLGHAVRLIPPIYVKPFVKRQKNDAADAEAITEAATRSSMRFVTVKTEDQQARAMIFRSRDLLIRQRTQLINALRGHLAEFGVIAAQGIAHIRRLRDAISDPQTGLPLIVRDIGQIYLDQIAVCSAKIVELEKALRTEAKRGDTTARLQTMPGIGPIGAMAIEAFAPPMECFRRGRDFSAWLGLVPRQKSTGGKQILGKTTKMGQRDIRRLLIIGAMAVVRWAVRKGAPERSWLARMLARKPRMVVAIALANKMARSVWAMLIKQEDYRDPVSVVV

SEQ ID NO: 236897 - protein, 356 aa, unidentified
MEIAHITFIRHKQRKGYSIMSNIMYFIGLDIACNDFAASIYQSPEKPIITKEAILNNQDGFNMFVSWLKSNNINNANSIICMEATGVYSKAVTRYLVADGFNVCVEAPLKVKRAFDPVGHKTDAVDSKQIAEYAYRYRDELKYWHPKDEILEKIRQLLAARERFTKQSTAIQNASKAYEKEPIKVALIIKSHKQTLSQLKKHIADIDKELDKYMRQNPTIFHNTNILKSIPGCGMLLSANLMVLTDNFENIKDHKRLSAFIGIVPYQYQSGTSISRKARIRHFGPQTTRKLLRLGAQSVATHNKVFRQYYLRKQAEGKAKALVLNNIANKLVKIAAENLLYCHKTEKEVYSNPSLR

SEQ ID NO: 236898 - protein, 334 aa, unidentified
MENIALIGIDLGKNSFHIHCQDRRGKAVYRKKFTRPKLIEFLATCPATTIAMEACGGSHFMARKLEELGHSPKLISPQFVRPFVKSNKNDFVDAEAICEAASRPSMRFVQPRTESQQAMRALHRVREYLVQDKVKTTNQMHAFLLEFGISVPRGAAVISRLSTILEDNSLPLYLSQLLLKLQQHYHYLVEQIKDLESQLKRKLDEDEVGQRLLSIPCVGTLTASTISTEIGDGKQYASSRDFAAATGLVPRQYSTGGRTTLLGISKRGNKKIRTLLVQCARVFIQKLEHQSGKLADWVRDLLCRKSNFVVTCALANKLARIAWALTARQQTYVA

SEQ ID NO: 236899 - protein, 355 aa, unidentified
MKGELQKGGILGRGKEVFIGVDVHKESWHVTVRVEGEEVFHGRIPSQYHALRKLLDHFRDCRVKVAYEAGPCGFWLYDRLTEEGIETIVVPPSLIPIESGNKVKTDKRDSRKLAKLLESNMLKRVHVLAEEERMHRELLRTRHQVVAHRSDVARQIKSKLLFYGISSPFPSKHRWTLKYVEWLRSLSLVSQFLKESLEVLIDLYEYLTRQLIRINRKVVELSRADKYRGRVRFLRTTPGVGLLTGMEVLVELQDMGRFRSSEEIASYIGLTPSEYSTGEYTRQGRITRSGNWRVRTALIESSWILITKDPWMRLRYMRLKSIKGSKRAIVAIARRLIIRLRSMLLHNVPYRMTKS

SEQ ID NO: 236900 - protein, 367 aa, unidentified
MKTKTTQSLVSTSMPAVVSGFTLGLDLGDRSHHVCVLDATGQIVREAALPNTRPALAQLLVDFPRATIALEAGTHSPWISRYLTGHGATVLVANPRKLHAISRSERKCDRRDAQMLARLARVDPALLHPIQHGTAQAQHDLLGLKLRDALVRTRVNLINAVRFTLKSLGHSVRNPSSESFHKTVLADVPADCLPVVQPLLTVLTQVTEQIKAMERDLVQRSRKDYPATQRLQQIAGVGPLTALCFVLKIGDPQRFSRGRDVGAYLGLCPRRDQSGGTDKQLRISKCGDGLLRRLLVSAAHYVLGPFGPACALREHGQRLTGTGSAREKKRAVVAVARKLAVLLLSLWKHGTDYEPRVTTSALVLSPA

SEQ ID NO: 236901 - protein, 411 aa, unidentified
MENIFARCAGLDVHKESVEACVRRIEPNGCVHSETRHWGTMTRDLLEMADWLAAEGVTNVAMESTGVFWKPIFNILEIRFTVLLVNARHLKQVPGRKSDIRDCQWIAQLLQCGLLKGSFIPPRAQRELRDLTRHRTQLVEEKTRTINRIQKVLEDANIKLASVASDVMGISGRAMIQRLIEGETNPYKLADLAQRQLRGKIPELQKALEGKLTDHHRFLLKLLWKELSQQEEVIVDLDSKIEEHTRPFAAEIEHLDTIPGVDHRVAEVLLAEVGPDMKPFPSDEHLSSWAGMCPGNEESAGKRRRRRITPGNRWLKQTLAQAAWAASHTKNTYLASQYRRLAGHRGKKRALIAVGHSILVIFYHMIRSGTSYTELGADFFDRLEPERLTHYYVKRLQRLGYTVTLESSAAA

SEQ ID NO: 236902 - protein, 451 aa, unidentified
MARRSTKSLGMPIIHDRAGGIDVGSRIHVVAVPADLCDEPVQTFQAFTGDIERMADWLVSLGIETVAMESTGVYWVPLYEVLQGRGVEVIVANAREARAVPGRKSDVNDAQWLQRLHACGLLRASFRPGRDIAALRAYLRLRERHLDYAAAHIQHMQKALTFMNLQLHHVVSDITGVTGLRIVRAIVGGERDPRVLATMRDVRCKASADTVSAALVGNYQPEHVFALTQALALYDFYQARVDECDVEIERSLAALNAEKEQPSEPLPKPRHKTQQPNAVNFDTRPLLHQLTGVDLTQIHGIGPYLALRMVAECGTDLSKWPTAKHFTSWLTLSPGCKISGGKVLSAHTRKTSNRLSAHLRLAAVTVGRTNTALGAFYRRLAARVGKAKAVTATARKIAVLFYNAMRFGMSYQDPGADNYERKYRERVIKQLHRRAAEFGFTLQEAASQSVS

SEQ ID NO: 236903 - protein, 360 aa, unidentified
MAKARSLVGLDVHATKIVAAVLDADTGELGVFVLNGENAGAAALCAGLPRPVRAAYEAGPTGYTLARELAKRGIECVVAAPSKIPRATGDKVKTDRRDAEHLVRLLLAGKLHPVRVPGPEEEALRDLVRARETLRLDLMRARHRLSKMLMRHGVRFDDGRAWTDRHRTWLKTVCLDWPAAQTTLLDLEGVIDVLVHRRDHLEREIVAILPGSPWETQVGRLRCLRGVDTLTAVGLCAEVGDFERFAKAGQLMSYLGLVPSESTTGNSRRLGSITKTGSAHARRLLVEAAWHYRKAPATRKTLTERQAGQPPEAIAIAWTAQRRLHRTWTRLEQRSKRRTIIAVAAARELVGFCWAITQIK

SEQ ID NO: 236904 - protein, 454 aa, unidentified
MRKPQVVPDEDHEVVYERVAAVDVAKASGVVCMRTPDPERPGRYVNRIWDNVPATRARIAELGRELLRCQVQMVTLESTSDYWRIWYYVLESTGLAVQLVSASQAKNLKGRPKTDKLDAMWLARLTQWGMLRPSFVPPAAIRALRDFTRARQDLIRERTRCLQRLEKLLEDAMVKITSVVSDGMKAKSSVAMVQALIAGERDPRTIADLAKGPLRGKRDQLAEALDGMFDSHHGVIAQMLLDQVAFLDQRITAMEDQAIAALAQVQESWGVDATGETGPGCGTGPDSQVLAAAYRLAEIPGISLLLAIVIIAEIGLNMAAFPTPAHLVSWMGLCRSASQSGTRHGKGKQKKGNSYARAAAGQAAIGASGTATFLGERYGRIARRRGKAIAQAAVARSIMIIIWHLLNDPTARYRDLGPDWHASHTSRDKRIRTHLRGLQALGLTVTITADEQAA

SEQ ID NO: 236905 - protein, 347 aa, unidentified
MTIVEDARAVTGGVDTHLEFHVAAALDHVGALLGTAPFPTTPAGYQGLLGWLESFGPVGKVGVEGTGSYGAGLSKFLAQAGISVLEVNRPNRAERRRSGKSDPLDAIEAARAALGGKAKSIAKSKDGPVEAVRTLHVAKRSARTARTSALVQMRELIVTGPDQLRSRLRGLSICALTTEAARLRPARQGDPVLSATKAALSSLAHRVQTLDEELAELDARIEALLMRHCPDLLGLFGVGPDTAAALVVCAGDNPERLHSEAAWARLCGVAPIPTGSGQTSGRVRLHRGGDRQANAALWRIVMVRIAHHPKTTAYYHRKLAEGQSKTEIVRLLKRYVAREVYRYLPRS

SEQ ID NO: 236906 - protein, 383 aa, unidentified
MRHGGILIEANDSEGEPMKKHTTINQSLSADVSTCVNVAVDLAKKVFQVAGENALGQVIFEDRIKSREAFQTFLLKLPASVTVLVETGPGAQAWARLLQTQGNSVRILPAQHVATHRSGPKNDRNDALAILRAGRDCRISAVPVKSAAALAMQALHRARQGYIRRRTAVGNQMRGLLLEQGVSMPQGEMAISQRIPRILEDATQPLPDLLRELIAELLVEWVHLGERVNVLTGRLETAAKNDETAKRLMTVRGVGPIIATALLAKQTEPERFANARQFAAYFGLVPSQHSSGEKIRLGKMSKKGDAYLRSLAVQGAHAVLRQVRPDSEQPDDQRLQRWVSRLGRKEAAVRLANRNLRILWRLLQNDQTYRRQPGNSQEAAMSH

SEQ ID NO: 236907 - protein, 342 aa, unidentified
MSIVIVGIDLGKNSCSIVGLDSLGTVVVRRRLRRDGVIAFASKLPACIMAMEACCGAHHMGRSLAALGHEVRLMSPEYVRPYVKAQKNDDRDAEAIAEAATRPTMRFVELKSEEQLDVQTLHRVRDRLVCERTSLTNQIRSLLLERGHVVAQGHARLRHLLADLLDPGTGSLSARMAFLLGDMRTRWDELDRRIAAFDAEFSAMARTDERARRLTSIPGIGALNATALVAAVGNAATFTKGRDLAAWLGLVPRQATTGGKPKLLGITKRGSRYLRKMLIQGARSAMPTLAKANSAVGAWLRALLVRTHPNVAVVALAAKMARTVWALLRHGRNYEAVPQAAG

SEQ ID NO: 236908 - protein, 484 aa, unidentified
MPQKERSKRRLESRQVRVQEVIPVSKSRPYSCLSVKSIEIQQLVKTRVGQSPLAGVDVSKDSFVLVLHWPDGSFQRPWRIKSPGEISEAVAKLAALNQHCPLTVAMESSGTYGDALRQALADAHLPVVRVSGKAVKDQSESFDGVPSQHDGKDAAIIADLGRRGKARGWQLGQASQLDQELRYWVRKLDRAQRIKQMHGGRIEALLARHWPEANAHLASGSATLAHALARWGDPACLAADQQASEYLARIGGRYLTEQKIADLLESARTTVGVRMNRWEQRELRELAKALLARRKTIARCRRRLKAMTTDHPIIAAQAPALGLISACVLWMCLGDPRNYSCAAAYRKAMGLNLVENSSGQQQSPLRLSKRGQRLARKWMYFAALRQMKHPAVRTWVGHKKQRDGGKGSRAVIGVMRRLALAAWHVAVHGVEFNAVQLFPSGRFDKTPRPSLPRNIRTAAPAVEIAPATSSPIVRCAQERQGTSP

SEQ ID NO: 236909 - protein, 407 aa, unidentified
MEVVYRCCCGIDVHKKLIVACLNKGGKRELREFGATTGEIKQLSNWLIEEGCQMIAMESTGVYWKPLYNLFEMMDLDAIIVNASHMKTLPGRKTDVKDAEWIADLLRHGLLKASYIPNREQRELRELARYRKSLIEERARELNRLQKVLEGANIKLDSIVKDINGKSSRKLLDKIANNEAMTADDVAGMIHSSMRPKLDAIMRSIEGITTPLQRMLITKIVDHIDDMTRRIAELDGMMKEYTEKYEQAIAAIDELPGIARRSAEVIIAEIGMDMSRFPSAAHLCSWAGIAPGNNKSAGKRKHGKTTKGNKALKTILTQCAKSARNCKESYFSAQYQRIAARRGKNRATIAVAHSMLIAIYHVLNEGVAFRDLGADYYDNFNREHKIKSYLKRLNSLGWTPDAALTMA

SEQ ID NO: 236910 - protein, 342 aa, unidentified
MSITTIAIDTAKSVFQLHGVDAAGTPMLKRGLRRDELLPFFEKQERCVVVMEACGASHHWGRALIALGHEVRLVPPEATRPFVKKGRKNDAADAAAILAASRHDVKFVPVKSREQQATLALHSARTLLVKQRTMLVNAMRGLATEFGLVMPKGIERLVELAADVDESLSGEEKRGFGELHASAAELSLHIEALEKEIVEHARRDQLARRLATVPGIGPINASLISATVGGNAGAFRSARQFAAWLGLVPRQNSTGGKTRLGRITRAGNSEIRTMLVLGATSMVYRAGNWNCATGAWLRGMLARRPAKLVAVALANKLARIAWAVMSRGEVYRADGRRAIAAS

SEQ ID NO: 236911 - protein, 413 aa, unidentified
MEVKEKVKRYYLGVDWADEVHQVWVSDPQGSKVAEMKVTQSPEGMSELGRWLHERRAEGIELWASIEKPEGRIVDFLLDDGVVVYPINPKAVDRARDRFRMSGAKSDLFDAYVLSEFLRTDHGHLRALRPNSEQAQELKMLTRDYQRLVTQRTRLLNQVVATLKEYYPRPLDLFTDISTEKALDFIKQCPTPETVKELSRKQWNRFARAHRFSQNETEELWKTVKAPQLPIPQHVVRAKAKLTAVLVKQLEVLVKATTHYSGEVQRFFASMPAAKLVSSLPGAKSGTTLASVWSEIGDAPGRWQSFRHLQAQAGSVPLTKESGKVRVVHFRFSCNKRLRHAVYWLAFTSLNQSEWAKTYYREQRSKGHTHHRAIRALGAKWLKIIFVLWKDHKPYDENYHLANITRQRMRQAA

SEQ ID NO: 236912 - protein, 398 aa, unidentified
MTESSDYESVQVFIGVDVGKDTHHAVAINRSGKRLFDKALPNDENKLRSLISDLKQHGQILLVVDQPATIGALPVAVARSEGVLVGYLPGLAMRRIADLHAGEAKTDARDAAIIAEAARTLPHALRTLKLADEQIAELSMLCGFDDDLAAQTTQASNRIRGLLTQIHPALERVLGPRLEHPAVLDLLQRYPSPEKLASLGEKKLAAQLCKLAPRLGKRLAADIAQALAEQTVVVPGTNAAAVVLPRLALQLITLRKQRDEVALEVEQRVLAHPLYPVLTSMPGVGVRTAARLLTEVASRAFASAAHLAAYAGLAPVTRRSGSSIRGEHPSRRGNKALKRALFLSAFAALRDPLSRAYYTRKMSQGKRHNQALIALARRRCDVLFAMMRDGTFYTPQGS

SEQ ID NO: 236913 - protein, 331 aa, unidentified
MCASVGVDVSARTFDVVVFEQGKFSKPVRHRHHPDDYGRFIAQLRTLRPAHIVMEATGVYYLDLAVALSEAGMPVSVINPKSSKHFAQLKLQNSKTDGIDAALLAEYGARMQPRHWSPPEPSRQALRSLGRQINRLIGARTQAKNRLHAMRATRATPQVLIDDESEAIAMLERRIERLREAAQALLNELPELKRMHAHCCAAKGIGEATALALLAELCVLPQDMKAAQVSRHAGLDVRLHQSGSSVARKARISKAGNAYLRSALYMPVMSAVRFDPNARAFYEALIARGKTKLQAQVAVMRKYLTGVWACIRTDSPFNSDLLFSPQHAKKT

SEQ ID NO: 236914 - protein, 417 aa, unidentified
MELEPIYRRVIGLDIHQAKISACAVSEQSDGSVVVEMREFGGFKRDRRALAQWAKEFDPEIVVMESTGIYWKSPYAALESVGIAAWVVNARHVKTVPGRKTDVADAQWLATLARAGLLRGSFIPPAHIRYLRLIARQRQKLGGMLASEKNRLHKILSDAGIRLGVLVSDIHGQAARAMVKAIIAGKPMASVLDLAGRLRASRSELFEALQPEELSAAHLFVLGEIMTHIEDLEARMGRFEQMLLQGLSAWQPQLTLLQTIPGIDQMGAAMLLVEISTDMDSFGSAEKLASWVGICPGNNESAGKRKSGKTRKGNAWVRRLLCEFAQAASRSRCALKDKFAALSIRKGHKKSIVALAHKMLRIIFAMLKNNKPYHDHAVDYEALNVQRNAPRWLKMLKKHGFLPINETPMTTSTAFAA

SEQ ID NO: 236915 - protein, 367 aa, unidentified
MKKGSTRAAAQSKNISQQKLTIGLDLGDRNSWYCVVDEAGQIQLEQRVRTTAKALQEVFGTMPRTRIALEIGTHSPWISRMLSELGHEVIVANARKVRLIGESRKKDDRLDAQTLARLARIDPELLYPVKHRSAQAQADLTVIRARAGLVRARTGLVNSARGLAKSYGERLRGCNVRNMNAEKAESLSPELQRALEPLLSAIAEVSQRICEYNERIEALAQQSYSQVELLKQVKGVGTLIALTFLLTLEDPHRFGKSRDVGGYLGLQPGRRNSGRSEPQMHISKEGDPYLRTLLMQGAQHILGPFGIDCDQRRWGLKLAERGGRNGKKRAIVATARKLAVLLHHLWVRGEAYEPLHNSSRTTVRAAA

SEQ ID NO: 236916 - protein, 356 aa, unidentified
MESMPAATPPVTVGVDTHLETHVAAVVDQTGRRLEIRSFAASTRGYVALVTWAEGFGPVERIGIEGTGTYGAGLARFARAYGLQVLEVDRPDRSTRRRRGKSDPIDAQAAARATLAGVAATTPKTRDGQVEMIRVLRVARRGALKARVAAAEQLHGVLYSAPEELRQPLLGLKTRALVGICAGMRPGPLTNPTAATKTTLRTLARRWQQLQAELDHLDGQLQTLVAAVAPTLLALPGVGVDTAGQLLVTAGDNPQRLRSEAAFAHLCGAAPIPASSGRTDRHRLNRAGDRRANNALWRIALVRMHYHPPTRAYVERRTKQGLSKPDILRCLKRYIAREVYPHLTSPPTPAPTTCPK

SEQ ID NO: 236917 - protein, 357 aa, unidentified
MAEGSWVGLDVHARTTLAGVLDAASGELSLQRLQPRSEVTIAWLLSLAQPVRVAYEAGPTGYGLARACARAGIACTVAAPSKIPRAPGDRVKTDRRDAERLARLLRLGELVAVRVPDPVGEAARDLVRAREDARGDLMRARHRLSKLLLRHGLVYEGSAWTRAHDTWLRRQRCAGRVLALACEESYGAVAQAKGRRDALDQASVELAGEPPFCEVGGRLCCLRGVSTLTALALSVELGEWERFRAESLGPFLGLVPSEDSSGERRRQGAITKTGNTHARRLLVEAAWHQRRPLRTSAALERRRQGQPAPVRARADESARRLHQRWHALEGRGKRRTIVAVAVARELAGHCWALATMK

SEQ ID NO: 236918 - protein, 341 aa, unidentified
MDTIGIDLHKRESQLCTITDDGELIEQRIVTTRERFTAVLGNRPPARILLEASTESEWVARHLESLGHTVIIADPGFAPMYATRSSRVKTDKRDARTLCDALRLGAYRAIHRASDAQRHIRAELAVRDALVRTRTRYIAIVKAFVRREGLRLPSGEAEHTVAKLERLSVPAALTQELAPLVALFEPVNAAIAAADARLMALAKEQLVVARLCTMPTIGPVTAMAFVAALDDVSRFPSAHQVEAYLGLVPSEYSSGDRRFRGRITKRGDVRTRWLLVEAGWRILRSSHPDVAGLKIWAEQVARRRGTRIAAVALARRIAGMLFAMWRDGQDYHASVGISNVA

SEQ ID NO: 236919 - protein, 353 aa, unidentified
MELDKYIGIDVHSSTLVVNARDAFGKVILESTVATNAEAIIQCIGGLRGRLHVTFEEGTHAQWLYEVLRRRVDDVVVCNARESRLLQDGSHADKIDAGKMSHLLRLGGLKPVYHERHGTAVLKELVRSYNGLVEDSVRVMNRVKAIYRSRAIATRGQAIYRPEQREAFSEQLKDSGAVRRVGLLNEQLDTLRQLRRQAEKSMVTEARRHPAYRLLRSIPQLGPVRVARLISIVDTPYRFPNKAGFWNYCGFAVVLHTSAEGKFVDGRLVRSQKRVATRGLNKDHNPKMKEIFKSAATKARVGGAFAAYYAGLIAGGMKPELATITLARKIAAITLAIWKKGEAFDPKKLTPPT

SEQ ID NO: 236920 - protein, 347 aa, unidentified
MVTLEKSSDVVIGVDTHKDSHTAAAVSSTGAVLEQLTVPADPKGYRKLIAFGRRHEAGLWAIEGTGSYGAGLTTALLARSEVVVEVDRPQRSARRGGAKSDDIDAVRAARQALAGVGLAEPRGRGEREAIRVLMTTRAQAIEFRTRAISALHALVTSAPDRLRERLRGMSFTALLDTCAALRGSSLQSAEEFATVTAMRSTARRALACEAEAAELEAQLETLVRLMAPKLLQVLGVGPVVAGQIIMSWSHHGRVRSEAAFAKLGGVAPIEASSGAVVRHRLNRSGDRQLNRALHTIVMVRMRQDSETIAYVERRTAEGKSIREIKRCLKRYVARQLFRQLEALPLAA

SEQ ID NO: 236921 - protein, 347 aa, unidentified
MKTNNKTKHTPSVVSTPTAPVITGGFTIGLDLGDRSHYVCVLHATGQILHEGSLSNERVALALLFTKYPAATVALEAGTHSPWISRYLTGLGATVIVANPRKLHAISRHERKCDRRDAVMLARLARADVALLHPLQHGSAQAQHDLLGLKLRDSLVRTRVGLINTVRFTLKSLGHLVSNPSSEAFHKHSVTEVPADCLPVVQPVLAVLTLITAQIKTLERGLIARSKKDYPVTQRLQQIAGVGPLTALCFVLKIGDPARFGRSRDVGPYLGRCPGRDQSGGTDKQLRISKCGDGLLRRLLVGAAHYILGPFGPACALRAYGEHLAGTSAREKNAPWWPWPASWPCCS

SEQ ID NO: 236922 - protein, 408 aa, unidentified
MNPLFVGIDVSSKNNVAYLMKPDGSKHSSFSVQNNLGGAKLLSERIVSALGSMQLERVVIGLEATSIYGDSLVYALREDGRLGRFQRKIHVLNPKQVRKFKEAYSDLPKNDWVDAFVIADLLRFGRINREVYMDDYRYKALQTLTRARFDVIQNLTREKQRFANYLFLKCSGMAQDKDIQNTSATTIALMEHFETVDDLANADLEELTAFITETGRGKFADPDATAKAVRAAAKGSYRLPKTVNDTVNQAMAVSIASMRALKGQVKVLDKAIEQQFEIIPNTLTSIPGIGKVYSAGIIAEIGDIHRFDSQASVAKYAGLVWNRSQSGDFEAEHSRMIKSGNRYLRYYLLEAANSVRRCDSEFRRYYDLKFKEVNKYQHKRALALTARKLVRLVFRLLKDNRLYIPPEG

SEQ ID NO: 236923 - protein, 376 aa, unidentified
MIAYVGIDAHTTNYTLSTYLEGSSVAPVNTNAYSPSVSNIVNYCKGIRKKIGNDTKIVVGYEAGCLGFKLKRDLEEKGLTVKILAPASITGTEINRRRRKKTDKRDAEAIARSLKNHEYSEVYTPDEEDESVRDFIRMQQDHKKQLRVIKQQICAFTTRHGYKFTDGRNYWTKKHLKWLKELPLEGINKETLDSYLLSYETVSDRIEQMNKRIEEIAETDKYREAVHKLICFKSVKVLTALAVIVEIGDFTRFVKAKNFAAFLGLVAGELSSSDDQNQTGITKQGNTFLRKLLVECAQSFSRTSSGKSEALKKRQEGNAPEVIAYADRANERLRKRYMRLVLHNRKSHNKATVAIARELACFIWGMMTGNIHTVLA

SEQ ID NO: 236924 - protein, 301 aa, unidentified
MFPVGIDVSKNTLDLCMLYDGIKGRIKTRNIQNNRHSVENILRWLRLQHCSPEDVHVVMEATGVYHERLATELHDAGFRVSLANPHRSREFARGMGIMTKTDKVDAYMLACYAFLKKPHCWEPPAPEIRYLGALLRRRDVLLGDALREENRLEKYLSTDTPADIISSCRRMAQLLREEVSNIERQIKAHIKASPALRRDYTLLTSIKSVGPQLGMHMLVVLRSHNFVSAEQAAAFLGVVPIEKRSGTSVRRRPRMSKIGPPQLRAKLYMSALCGKSTISECVIFTMRCACGVNLKWWPLAR

SEQ ID NO: 236925 - protein, 339 aa, unidentified
MEHVAIDLGSRKSQICVRGEDGRIVDERRCETAELKRYLATRPPSRVIVETCAEAFGVADAARELGHETRVVPATLVKTLGVGARRLKTDQRDARALSEVSCRVDLPTVHVPRRESRDRKSMCGMREALVGARTKLINTVRGWLRGQGRRLGTASRTTFTKRVRALWEDPLPSYVERQLQAIEMLTSQISAADDEVQCWAEADETCQKLMTVPAVGALTSLRFVAALDDASRFEGPHQVESYLGLVPGENSSSERQQKLSITKAGPRALRWVLVQAAWVLRTRCRKAEAVPLQLWAARVEQRRGKRAATVALARKLAGILFAIWRDGSAYDASRGAKMI

SEQ ID NO: 236926 - protein, 306 aa, unidentified
MAIVAQTHPFVIGVDAHAKTHTLAILAAPLGELVDTAQFPTTHAGLQRAIDWAGRRTGADLDVLWVIEGIGSYGARLAQTVAQTGYQVAEAPRMNARTNRGVGKSDPLDARRIAAAALPLEITHLRNPRDDDGERAALRVLVTAREHMTTERTGTINALTALLRTVNLGIDARRPLTSTQVTEITRWRARAETVAAATARAEAIRLAKRVTALNDELAENRLRMEALVHATPAATLLDEPGIGVVTAAITMTAWSHVGRLRSEAAFASLAGVNPIPASSGNTARHRLNRGGDRRLNRALHMSLIHI

SEQ ID NO: 236927 - protein, 306 aa, unidentified
MDLGDRKHAYCVLDGDGEVVREESVANRREALAELAGRWPAATVVMEAGTHSPWVSRYLQDLGMKVVVANPRKVRAIYQNERKSDQRDAEMLARIGRMDVKLLHPVVHGSEQAQQDMVSIKLRDTLVRNRVALINSVRFTLKSLGYSISNPSSARFHKTVVEEVPASCRDVIAPVVGALEELTGRIKELDVSLAKLARHRYPQTACLQQVAGVGPITALYFVLKVEDPGRFRKVRDVGAFVGLCPRRDQSGDTDKELRITKCGPTCGDCWSVRRNTSWGPSGRIAPCAKRGCAWPRMALPRPRSVP

SEQ ID NO: 236928 - protein, 340 aa, unidentified
MTITTVGIDLAKNVFAVHCIDQNGKAVLVKPKVSRAALSELIAGLPPCVIGMEACSGAHYWARLFRQYGHDVRLMAPKFVSPYRMAGKTGKNDAADAIAICEAVQRPHMRFVPVKDESQQAMQCLHRTRQGFIQERTATYNRLRGLISEFGVIAPQSTDALRHVVSDQKETLPVQVRLCIDDLLTHVTNIEEKIAEYDRVLSRVAKTDHRSQQLMELKGVGPTTASALVASIGNAHDFKNGRQLAAWLGLTPSQYSSGGKSKLGRITKAGDAYLRTLLVQGARSVMVGAENRTDPFSRWVCSLLGRRGYWRAVVAIAAKNARLCWASLHYGDDFRLYSTT

SEQ ID NO: 236929 - protein, 326 aa, unidentified
MKKSYFVGADVSKEKVDFCFLTSIESSKPKFVSLPNDTTTIKAYFQSFIKDDIYVVFEHTNNYHVPLQSALSDLQIKHSALNPAKISHFLKHLTFQKSDITDAYGLALYCKIFKADLNPSTYNHEYNLIKSYNSTILLLSKIQTQLKNFKKSQDFVADTELSEIIKSLTLQVQKTQEKLKLIAFEILKSFVPNCEQIIKSNKGFGIDLALNLFPQLHFNRAKSEKQFISFLGLSPRIYESGSSVHKSPRINKRGSSAIRRVLFLNAISCARFNDKFKQRYETLISKGKKKKVALVAVMCAIVRYLKSLFPLNESYINESLYHARTS

SEQ ID NO: 236930 - protein, 334 aa, unidentified
MEQITTVGIDLAKSVFSLHGVDASGKMVLRRTVRRDRLVETVAALAPCLIGMEACSGAHEWGRRFQEYGHTVKLMAPKFVAPYRKSDKNDGNDAEAICEAVTRPSMRFVPVKSVEQQALLALHRVRQGFVVERTAIINRLRGLMTEFGVVLALRSVTVRRQAAQAAEALPELARGAIGDLLEQLRRLDERIEAYDKQIEAQARLSESARRLMKIRGIGATTALAIVATVGNAREFKNGRQFAAWIGLVPGQYSTGGKARLGHISKRGDAYLRNLLVQGARSVLQTASQHSDRLSRWALELQARRGYYRTLVAIANKNARIAWALLAREQTLRQS

SEQ ID NO: 236931 - protein, 312 aa, unidentified
MANNRCVGIDVGKAELHANLYGEQVVKVFANTHIGIKHLGNWLGRQKAELVVMEASGGYERQPAQDLRKVGFAVSIVNPTYVRRFCQSMGSLAKTDVKDARLIANFAYVKQPKPQIAKSDGELRLTSLVERREQLIEMLGKEKNRRSNAPEFHLSSINLTITFLETQIEALDQETDTLIEANPDWQARLAVMQSFKSVGKVISTTLLVEMPELGSESREAIAALAGVAPINHDSGKMKGKRKTHGGRSRVRRVLYMAALSAVRSNPVIKKYYERLLQNGKEKKVALVACMHKILTILNALLKKSQLWDPLYA

SEQ ID NO: 236932 - protein, 450 aa, unidentified
MSPLALDVVIKTGKTPVLGRMLSKYVGRKTSSIENGITKARNHSRQRGNIMRVVFGIDVSKASSEVAILVNGEKVHGYIIPNDAIGFNRLLGDLKAVYQPEIVFEATGVYSRRLQAFFEDNSYAYTRLNPLESKKQLDSLRVRKTDKIDAEKLATSQFILNRKPSYVQEVLYQELRDLSRFYQNLTEDIVCAKNRLHKVLQITFPELENILSAPTGEQYWNLVITFPCNSFVLESDDATLTAIIRQSTAKRISEKRVTYLVDKLTKLANQSYCAVKKTSPMMEEVKYYAGELLRLSEHRQGVVEEMVTLAQSLPEYEILLSIPGIAETTATSIIGELGDIRRFHSANQINAFIGIDLRHYESGDFLAKEHITKRGNPYARKILFKCIHNIASASHTNPCHIADFYEKRKRQSQVTSTKPHTIASIHRLIRTMYYLITHNKLYDYTSTQNR

SEQ ID NO: 236933 - protein, 344 aa, unidentified
MTIVEDRYAITGCVDTHSEVHVAAALDPVGGLLGTREFPASAAGYAGLLDWLGGFGDLALVGVEGTGSYGAGLARYLAAHGVRVVEVDRADRQDRRRQGKSDPLDAVSAARAAQSGRAAGAPKGRDGAVEAIRALMVAKRSARNERTQAINQARALILTGPDELRARFAGHRAAALAAGIAALRPRPGDAAEYAVRIALRELGRRVEFLDAQIERLDDLIVPLVTVRAPGLLSLYGVGPDTASMLLIAAGDRPERLRSEAAWAHMCAVAPIPASSGKTRRHRLNRGGNREANPALWRIVITRMSAHPATRAYLERRTKEGLSKKEIIRCLKRYVAREVYPHLRG

SEQ ID NO: 236934 - protein, 399 aa, unidentified
MAQPILWAGVDAGKAAHYCVAINADGQRVLSRRVVNDEAALTDLIRAVKELADGGSVRWAIDLNSGGAALLITLLLDDGQDLLYIPGRTVHHASGGHRGDGKTDAKDAAIIADQARMRKDLHKFRHRDKTAVDLRILCARRNDLASDRNRVINRLRAQLLEYFPALERAFDFAHRKGALILLTGYQAPDGLRRTGAARLERWLRDRGAYNASDIATRAIEAATAQRTTVIGQDVAASVVARLAQNVLDLNAELVEVDAMIEAKFRQHRLAGIIASMPGFGHLLGAELLAATNGDLTSFTTADRLAGVAGLAPVPRDSGRISGNLKRPRRYDRRLLRVFYLAANNSIKTCPESRNYYDRKRSEGKLHSQAVLCLARRRLNVLWAMQRDNTSYQPGSPRVA

SEQ ID NO: 236935 - protein, 455 aa, unidentified
MKKSSSKKKKAMPKIAIDQNWSVINPNAAGIDLGSREHWVAVPPDRDAQSVQCFGTTTPQLEAMAQWLKQCRVTHVAMEATGVYWIAVYQYLEGQGLKVLLVNARQIKNVSGRKSDVLDCQWIQRLHTYGLLGGSFRPADAYCAVRSLVRYRDELIAGRTTQVQHMQKALLQMNLQLRVVLSDICGESGLAIIEAILQGERDPVKLAALAHRRVKSSRDQIAQALVGDYRSEHLFVLKMGWELYGSYQHQISQCEQELAAALERLPDRVNPQERPLPAKPKGKKIDAGLRQSLYCKLGVDLTAIESIGTTVALTVATEVGPDLGAFPTEKHFSSWLGLCPEHRITGGKILSTHTRRVVNRLSDALRLAATCLENSASALGGYYRRMKRKLGAPQAITATAHKLARIIYRMLKHGEAYVRQGLEDYEKKNREQSLKRLQRAAEAIGYKLTKCESLV

SEQ ID NO: 236936 - protein, 336 aa, unidentified
MYSGIDLHSNNSVVAVIDDGDRVVAQKRLPNDIGKITGFLARWQDELAGVVVESTYNWYWLVDGLQNAGLHVHLANTAAIKQYEGLKHSGDGTDAQHLAHLLRLGILPTGTILPREHRVVRDLARKRMQLVQSCTTHVLAVENIMARQLGGRMTSNQIKRLTDDTIDSLPLAADVGLAIKANVAVIATLQSQIEVLEKRLQERVRPRPQYALLTTVPGIGQTLATVIVLETGPIDRFAEVGNFASYARCVDSVHTSNRKKKGEGNVKNGNKYLAWAFVEAANFARRFCPEAKRFHERKKAKTNNIVATKALAHKLARACYHILKEGKPFDVTRCFA

SEQ ID NO: 236937 - protein, 317 aa, unidentified
MSKHSMICAGIDTGKRKLDVAIKGQADELQVDNSPDGHRALSGWLRQRRVKRVGIEASGGYEQAVVAQLRRDKFEVVVFQPAQVRAYAQFHLQRAKNDKIDAALIADCTAAVQQIHAPPDPRLAPFAKHQTLIDQITEDIARLKNRHESCRDQRIGRLWREEIARLRGILRSERKQLVAAIRRYPDLAERLALIASVDGVGQPTAVTILVRMPEIGRVTREQAAALVGLAPYDDDSGDHVGARCIDGGRERLRKSLYNATLAACFRWNAQLVAIYQRLIAAGKPHKVARIACARKLIIYVNTVVERGTPWVQNPTAA

SEQ ID NO: 236938 - protein, 380 aa, unidentified
MDKIIRIGVDTSKSVFVLHGVDAAEQPVLRKKLRRRQVLDFFAKLEPTRIGLEACAAAHYWARELQALGHTVVLLPPQYVKPYVKRNKNDTADAEAICEAMSRPTMRFVPVKTAEQQAALMLAGMRDQLVRRRTQVANAIRGYAGEFGATAAKGLANIEPLLARIAADAAVPELAKELFAVYGRDYGQLEMQIAQIESRLMAWHKGNELSRRLAEIPAIGPIGASLLAMKVTNPYAFRSGRDFAAWLGLTPKDHSTAGKTRLGVITRAGDEALRSTLIVGATAVIQQVRRGRGHASPWLIELLRRKPPKLAAVALANKTARVAWKLMISGERYHGARKFGHGCAPSVSREGRCAALREGSAPRPSRRSRTMPPQMELANA

SEQ ID NO: 236939 - protein, 414 aa, unidentified
MALTRWVGRAIGLDVHRDFCVVAICEDGKTRSVGRVPSTPDGLGLLAESLLPTDRVALEVTGSCWEVARLLEPHVQRVIVVSPDDTGISSARAKTDKLDSRTLASLLWRGELDAVWMPDERCRILRRRLARREQLMRTRTRAKNEIQAVLQRRLQERPPFADLFGISGRRWLADLELPVEERESVDAGLRQIAFSDTEIAAVDRLIAGQALDWPEIRRLMTVPGVNLICAASFMAAIGEASRFLTSRKLVAYLGLDPKVRQSGEAPARSGRISKRGSASARWALVEAAWSVVKQPGPLRAFYERLRARRGHGKAIVATARKLTVLFWCMLTRGEDYAHQRPALTKKKQRQLELTAGAKPRTKAAAGIWSTNRAIGDAERALAEQAEVSYKRMVTDQQAGRPSRKVGASATPERA

SEQ ID NO: 236940 - protein, 398 aa, unidentified
MTESSDYESVQVFIGVDVGKDTHHAVAINRSGKRLFDKALPNDENKLRSLISDLKQHGQILLVVDQPATIGALPVAVARSEGVLVGYLPGLAMRRIADLHAGEAKTDARDAAIIAEAARTLPHALRTLKLADEQIAELSMLCGFDDDLAAQTTQASNRIRGLLTQIHPALERVLGPRLEHPAVLDLLQRYPSPEKLASLGEKKLAAQLCKLAPRLGKRLAADIAQALAEQTVVVPGTNAAAVVLPRLALQLITLRKQRDEVALEVEQRVLAHPLYPALTSMPGVGVRTAARLLTEVACRAFASAAHLAAYAGLAPVTRRSGSSIRGEHPSRRGNKALKRALFLSAFAALRDPLSRAYYTRKMSQGKRHNQALIALARRRCDVLFAMMRDGTFYTPQGS

SEQ ID NO: 236941 - protein, 367 aa, unidentified
MKDTTVFVGLDVHKESITAACVDAAHDAPVIDLGTVGTQQYAIDRLLKKRSGRGRLKLVYEAGPCGFWLQRYLTDKRLDCVVAAPSLIPRKPGDRIKTDRRDARNLALALRAGTLSTVHVPTPDQEQFRDVVRAWQQTKRDVSGARQRLKSFLLRHDIRYTGTANWSAAHRRWLSEMVLPAAPQQIVFQELVDAINERERRRDRLERQLDELAPHWSGYALSQALLAFRGIQKTVAYTVIAEVHDLSRFAHPKHFMAWLGLVPGEHSSGATRRQGPITRCGNRHARTLLTEAAWAYRYAPKVSRIIESRAQDIDPQVRDIAWRAQIRLHHPYKKLTARGKHKNVAVTAVARELAAFIWDAARLVPLR

SEQ ID NO: 236942 - protein, 408 aa, unidentified
MEPIYTSCCGLDVHKRSIQACVRRLREDGSIHQETRTFGTMTRDILEMADWLAAEGITHVAMESTGVYWKPIYNLLEGRFTLLLVNAKHVKHVPGRKTDVKDCQWLAKLLQAGLLRGSFIPDRPQRELRDLTRHRTQLVAEKTRVANRIQKILEDANIKLASVASDILGASGRDMLRALIAGEQDPEKLADLARRQLRNKIPELRRALEGKVTDHHRFLVGQLLAHVEHLEGQIEALSRRIEEVSRPFASANKAVSSLPGFEQRSAQNVLAEIGADMEPFPTAAHLASWAGVCPGNNESAGKRKSGRTTHGNRWLRTALVQSAWAATRKKDSYFQAQYRRLAARRGKKRAIFAVAHSLLTAIYHMLKNGSTYKDLGGDYFDKLNAKRLLPHLAKRIKDLGYQVTIEAA

SEQ ID NO: 236943 - protein, 355 aa, unidentified
MNSEKYIGLDVHQATISVAVLDSTGKLVMESILETKAATILEFFAGLRGTLSVTFEEGTWAAWLHDLLKPHVAKLVVCNPRKNALLKDGNKSDRIDAHKLAELLYLNKLSSVYHGETGVRMLRELARSYLTIVKDLTRVMCRLKAVYRSWAIPCAGRDVYYTRHRAEWLGKIKEAGVRRRAERLYQQLDMLQYLRQQARRELLAESRKHAITVKLRQIPSLGPIRSALAVALIQTPHRFRTKRQLWAYSGLALETRTSAEYCYVKGGLRRSKKQISIRGLNKDHNHDLKGLFKGAATRASVLPGPFQDFYQRSLAKGIKPTMARLTLARKIAAITLTLWKKGENFDADKLKSQAA

SEQ ID NO: 236944 - protein, 334 aa, unidentified
MQNVALIGIDLGKHSFHIHCQDKSGNALLRKKFTRTKLMQFLVTCPSSVVVMEACAGAHFMARRISDIGHEVKLISPQFVRPFVKSNKNDFIDAEAICEAASRPSMRFVQPRTETQQAMRALHRVRESLIRDKVKTTNQIHGFLLEFGISLPTGDAVIKRLSLVLAEHEIPEYLSRLLMKLHAHYLYLIEQITELESELNRSIKADATAQRIMTIPGVGPITASLLSSQLGDGKQFSCSRDFAASTGLVPRQYSTGGKSTLLGISKRGDKNLRRLLVQCARSFMMRLEHQQGRLAEWVRKQLDNKHSNIVACALANKLARIAWAITALQKEYQA

SEQ ID NO: 236945 - protein, 345 aa, unidentified
MDQISRIGMDTSKHVFQLHGVNAAEAVVLRRKLRRKEMVSFFEKLAPTVIAIEACGASHHWARLLHSFGHTVKLIPPQLVKPYVKRGKNDAADAEALCEAMSRPTMRFVPVKTAEQQAALMLTSVRDRLIRNRTQLANAIRGHAAEFGLTAAKGMAHLVPLLERIQADESLPALARELFAAQAKEYEQLQMQIDEVDAQLMARHRADDCSRRLAKIPGIGPIGAMLLTMKTPAPELFRSGRQFAAWIGLTPRDHSTAGKVRLGVITRAGDEGLRSVLVVGATAVIQHARRSGKASPWLGALLKRKSPKLAAVALANKMARIAWKLMLTGEAYTATPAPAAAAGAA

SEQ ID NO: 236946 - protein, 370 aa, unidentified
MLDTTTFVGLDVHARSIKAVSLDVMTGEVRAATFGYDAGAVAEWVRSVDPRARCVYESGVTGFDLQKRLSGLGVDCVVGAVSKMIKPSADRRRKNDRNDAEFLARMLSVGNVVEVWVPDDECEAARDLTRALEDARDDLSRAKQRLSKFLLRHGLAFDERTPTGRRKGNWTRAHWSWIESIEFAERADNDVLAYYVDAVRRAAEEKARLEGLVGAEARKPRWRKRVDSLRCLKGVDTATAADLVFEAGEFSRFGNARSFASWVGLTPSEHSSGESDRRGAITKAGNKHLRKALVEAAWHYLACSARPKDPARGQVPDPGARRHAAKGVRRLVERREALLARGVHNNKANVATARELACWVWAVGLMAEEA

SEQ ID NO: 236947 - protein, 414 aa, unidentified
MEVLIPRAAGLDVHKKTVVVCALVGEADAVVTPEVATFGTMTVDLERLAEWLAARGITDVVMEATGVYWKPIYNVLEQQGGFRLVVGNAEHLKAVPGRKTDVKDAVWLARLLRHGLVRSSFVPDREQRELRELTRYRAALIRERASEVNRLQKTLEAANIKLASVISDVTGVSGQAILDALVNGEEDPATLVGLADKRIQKKREALEQALVGRLSPTLTFVVKHQLRHLHELDDLIDACDTEVERQLLPVADQLARLDEIPGVGARTAQVIVAELGVDMSRFPSHRHAAAWAGMCPGNNASGGKRRRAKTRKGSPWLRGALAEAAWAAGRCKDGYLPEQARRLTARRGRKRAIVAVGHSILVIAYHLLQRGTSYTDLGLDHFDRRDADRVRRRSVKRLEALGYKVSLERQEDAA

SEQ ID NO: 236948 - protein, 357 aa, unidentified
MFEHVWEPGRPHIDLVPQPEQLNEPELELHKRGQERGGSLLPQFTEVHLMKTWIGIDVSKATLAVCLLPQQQLLACSNDPLGHAQLLGHLQGLDIGNVLLEATGGYERLVMGALAGAGLMVTRINPRRARAFATALGKTAKTDPIDAALLARMAELVQRPVLAPEPDRDELRALVQRREQLVQQRDDERRRLHQTTSPLVREDLLEHIGQLRLRINAASRSIVQARQRLDHALADRLVAIAGIGEVTAASLLAYLPELGKLDRRQIAALVGLAPYNVDSGQHSGKRRIRGGRSPIRRVLYMACWSVIRTQADFKARYERLRQKGKCAKVAITACMRVLLIRLNAMARDNTEWKYLAA

SEQ ID NO: 236949 - protein, 454 aa, unidentified
MAKKREKRECRAVVLEPDAAGIDIGAEEIYVAVPPDRDEESVRMFSSFTCDLHALADWLQQCRIRTVAMESTGVYWIPLFQILEARGLEVYLVNAHYLKSVPGRKSDVSDCQWIQYLHSVGLLRASFRPAMDICAVRSLWRHRGSLLQMASEHILHMQKSLSQMNLQIHHVLSDLTGASGQAILDAILAGERNPVLLAQLCNCRVKSPREKVAKALEGDYRPEHVFTLKQSLDGYRYYQKLIAELDREIQRLMQTLPSAVETGQEIPRRTKHSAFQRQGNDPDFDLRAQLYRIAGVDLTDIPGVSAVTAQVVLTEVGPDLHRFRHASAFASWLGLCPENRVSGGKILSCKTRRVKSRAALALRLGANSLCRAKGYFGEFFRRMRAKLGTAQAITATAHKIARVLYHVLRTKQPYTETVFHRSDEHARRRAEMRLRKQAALLGFQIVPAPSDSAT

SEQ ID NO: 236950 - protein, 402 aa, unidentified
MNAVGIDVSKGKSMVAIMRPFGEIVSAPFEIKHTASDIHSLVELINSVEGESRIVMEHTGRYYEVLAHQLSKANLFVSAINPKLIKDFDNDSLRKVKSDKADSVKIARYALDKWQNLKQYNVMDELRNQLKTMNRQFGFYMKHKTAMKNNLIGILDQTYPGVNTYFDSPARSDGSQKWVDFASTYWHVDCVRKMSLNAFIDHYQNWCKRKKYNFSQSKAEEIYGKAKELIPVLPKDDITKLIIKQAVNQLNSASTTVESLRTLMNETASKLPEYPIVMAMKGVGASLGPQLMAEIGDVSRFTHKGAITAFAGVDPGVNESGSYEQKSVPTSKRGSSDLRKTLFQVMDVLIKTHPQDDPVYQFIDKKRAQGKPYYVYMTAGANKFLRIYYGRVKEYLSSLPES

SEQ ID NO: 236951 - protein, 422 aa, unidentified
MKKIQAKKVRFVNANTLIVTIDIGKSTSFGYCLCPDGTEVKPFEFTNNRGGFTKLWDCVIRTKMANGLEEVVVGYESTGAYAEPLINFLKGKAVKLVQVNPMHTKKLKELQGNSPNKTDKKDPKIIADIIKLGHALTVVIPEGSAAELRRLFQARERAIRRRTALYNQLQDLVFISFPEFLQVVKDVKTKSARYLLQHYPTPQDILNQGVDALALILKRISKGKLGIARAKALFEVAEQSVGVKEGRLSVTLEIKAMLADITNCDHLIKQFENEMTRYLEEIPYSRIILSMKGIGVITVAGLIGEVGDFSKFDTQAELLKLAGLNLFEVSSGKHKGQLRITKRGRSLMRKLLFFAAINTVRKGGIMHECYQRHLQKGMKKIKALIAIARKRLCIIFALVRKQSDYLENYQEAMAAQQFKKAA

SEQ ID NO: 236952 - protein, 442 aa, unidentified
MADTVVHPCEPDFVAFVGIDWGDQKHCWKLMVAGAQTIEAGELKQTPEELSSWALALHHRFGGRPVAVALEQSGGALVYQLSQYPHLWLYPVNPAAAACYRQAFYPSGSKSDPGDSKLLLELVVHHRDRLRRSAPETAETRLLRMLVEQRRQLVNEKTRWNNRLKAALKTYFPQVLEWIDIDTVLGCDLLERWPTLQLLQRAHPGTLRKFFREHNCRSASRLKERVDAIYQATPAVEDTALLEGESAIAASCVAQIRTLLASIAKLDQQIATSSSQHPEAPLFAQLPGAGAVLQPRLIVAFGTQRDRYASASEVQAYSGIAPVTESSGHSRWVHVRWACPTFLRQTFHEFAACSVSHSEWARAFYDAKIAAGKSHHAAVRALAYKWIRVLFRCWKDGRPYDEPTYLQALAKRNSPLRPSTVTSTKVGWKSVGGFKKLSTENS

SEQ ID NO: 236953 - protein, 367 aa, unidentified
MSSVASQAGLIHLGMDTSKNAIVVATLLPGRDGPATDRIANEEAAIRRLVGRFADRSVLRAWYEAGPGGYELYRLLASMGVACQVVAPSLIPRGGSDKVKTDKRDARRLARLGRAGELTPVRVPSAAEEAVRDLVRARDAMLADRKRAQQRLTAVLMRHGRVWRGATYWTAAHRSWIAAQRYGEPALAAAVGYYRATLAVREAELAALEAELAPWAAREPLAGPVARLGCYRGIAELGALTLAAEVVDWRRFPAARAFMSWTGLVPAEYSSGERTRRGHITKAGSEPVRTALIEAAWAYRHAPAIGAGLRRRQHGAGPDTLARSWKAQRRLHDRYVHLVHAGGKAAPEAATAVARELAGFTWAEMTA

SEQ ID NO: 236954 - protein, 338 aa, unidentified
MKITRVGVDLAKNVFQLHGVDRPDKLVWKRKLSRKNWLKILLKETDHGCEIGIEACAGAHHWARILMSKGYEVKIIAPQFVKPYVKSNKNGANDAEAICEAMSRPNMRFVEVKTTEQQDMQAMHRVLDELKSHRTAKGNQIRGLVAEYGLVAPKQLYALPQAIPDWLEDGENGLSSNFRQLLQGLREDLVRLDERIAQVNDAIEQIARTHPVAQRLQQLRGVGPLVSTAMIASVGTGRQFSRGRQMAASLGVTPKQFSSGGKERLQGISKRGDAYLRRLLIHGARSVITHAKNKDDRYSRWMTGLAKRSHWQTATDSRNLEFAMPYFSTQSTNQEINS

SEQ ID NO: 236955 - protein, 370 aa, unidentified
MKSIIYVGMDVHKASFTLSCFSVTTQETFATVKISPDAKAIKKYLDGVSLSRSEECEFVCGYEAGCLGYTLYHQLTAMNIRCVIMAPTTILRNSKRVKTDRIDAENLARCLAYGGYKSVYIPTAQDEAVRDYLRMRDDHKLMLKKIKQQINAFCLKHNKIYPGNKSKWTQAHVKWLNALEFDGYLQDAFNEYMITYRELTDKVERLESQIEQLTELEEYRDKVKKLICIKGIKTHTALSLIVETGDFSRFQSAERYASYIGLVPGEHSSSEDQNRLGITKAGNRHMRMLLIEAAQCYSRGVPAKKSKNLKSRQKGASPEVIAYADKASIRLRRKYIRMELVNKKKANVAKTAVARELACFIWGMMTDNIA

SEQ ID NO: 236956 - protein, 338 aa, unidentified
MTLYAGIDLHSNNNVIVVQDEEDNVVGRRRLANDLKTVSAWLEPYRDDLAGVVVESTYNWYWLVDGLMEQGYRVHLANTVAVQQYAGLKYRDDASDARWLAKLLRLGQLPEGHIYPREERALRDLLRKRSQLVRLGTMNLLSIQNLFARNRGEGIRANRVKQLTPEAVEATFEDSNVALAVKSNVKVLDCLLEQIAVLEKVIHGQVRLRKSYKKLLTVPGIGKILALTIMLETGDISRFRDVGNYVSYGRLVGSSYLTNGKRKGSGNTKNGNAFLCWAFIEAANFAIRHNQMIRRYYQRKQARTKRIVALKAVAHKLARACYHMIKEDASFDLTRAFG

SEQ ID NO: 236957 - protein, 413 aa, unidentified
MAQEETLSWFAGVDWGSEKHQACVVDAQGRIVGEREFPHGGTGLAELGDWLLAIAGAAGTVAVAIEVPHGPVVDSLVDRGFVVHAINPKQLDRLRDRFSIAGAKDDRRDAYVLGDGVRTDRRLFRQLHVSDPRLIELRAWSRLAEELKEERVRLSNRVGQQLWRYYPQMQKLTDDLAASWFLELWAIAPTPVKAQQLRKPPVESILRQHRIRRVDADTVLQTLREPAIKVADGVAEAASIHLRSLVARLRVVNRELREAEVQLDKLCLIIGESEATLGNCLRRQDVQILRSMPGIGRINLAVLLCEASGPLGSRDYRALRTLCGAAPVTKRSGKSHIVIMRYAAHVRLRNTVYHWARVATQHDPKCRARYAAFRQRGHSHGRALRGVADRLLALACVLLQRQTLFDPHFAQAG

SEQ ID NO: 236958 - protein, 476 aa, unidentified
MSERTRFVGLDVHKASIAVAVAEAFGDPEDHGHIANDPSAVRRLMQRLGGPDLHLEIAYEAGPTGYALHRQLTAMGIACVVVAPSLIPVRPGDRIKTDQRDAAKLARLLRSGDLTPVWVPDEAHEALRDLVRARDDAKADLLRAKHRLGKFLLRRAIQPPVGVRAWSRAHDAWLARLTFEHASDMVVLEHYHAVVREAAERVRRLETALAQCAAASPHAELLAALQAIRGIGFLTAVTIVAEAGDLRRFPTARQFMAYVGLVPSEHSSGDSRHRGHITKTGNRLIRHVLGQARPQRALSTQREHLPARTPPPGLPGGGRTRPAGPGPAPCALPPSGGTDRHQQGHHRGRPRAGGLRLGDRAAGPDRPGCLTHKGDGQGVVESGRLSREPSSTPMRSRLALLVRGTSVTTHCHAATARPTRAYQGDHRRTDLTSNAPCPTPLTSPSISGVRYAVRPARWQALAILPGLVTTLGWCCR

SEQ ID NO: 236959 - protein, 402 aa, unidentified
MAYDFVIGVDVGKYFHHACVLDPQGSQVLSERINQHEGSLRKLFGKFLADDASVLVIVDQPNNIGRLTVAVAQDMGADVRYLPGLAMRQLSRIHVGNSKTDVRDAYVIAHAGLKLPDALRSVDRVEEVFIQLKVLNGIDEDLARAYTRLINQMRSALVGTYPAFEHVLRGQVIHRKWILHLLAKYGGPTKIRRVGRARLAAFARSHRARNPEPVIDAMLAAIHGQTVSIAGAEYAELGVAMSAKDALAKLEHRKEIEAQVLKLIQDIPHTEILLSMPGIGPRSAAQILMTVGDMSDFPDAAHLASYAGLSPRTNQSGTSIMSNSPNRAGNKKLKNALWQSSFASIRFHERSRQFYERKRKEGKRHNAAVVALARRRLNVLFAMMRSGELYRDISTVQEVTAA

SEQ ID NO: 236960 - protein, 344 aa, unidentified
MKKNLFFIGLDIAKADFAASIYKTPSQSIVTKEAIPNDPKGFEMLLSWLKDHHIDKKNCRICMEATGVYSQAIAYYFLFAGFPVSVEPPLKVKRAFDPVGHKTDPVDSKQIAEYAYRFQDELTSWQPRDEILEKIRQLLSVREQFTKQKVALDNSLQAYSKQRVQVALIKKAHQETLNQLKKQIARIDKELANLIKQDPQIFQRANNLDSIPGCGMLLAAHLLVITENFTKIQNSKRLAAFIGIVPYQNQSGTSVFKRAKIRHFGPGPSRKLLRLAAQSVSTHNVTFRRYYLRKLDQGKAKPLVLNNIANKLLKVACTIIRNNTRYIKDYRSIHPMYLKSLKSA

SEQ ID NO: 236961 - protein, 382 aa, unidentified
MGKAITGVRRFVGLDVHAETIAAAIAEKDQAARDVGTIPNREESIRKLAKKLTEGGAWAACYEAGPTGYALYWQLTKLGIPCVVIAPTLVPTKAGDRVKTDRRDAQRLASSFRAGELTPVWVPDAEHEALRDLVRAREAAKQDQLRARHRLGKYLLRHGKKPPQQMRAWTENYLQWIKGKVSFDQRSQQVTLEDYLNEVDHAGARIARLEKAIDEAVEQAPETMRELIQALQALRGVAKVGAVTIVAEVGTLTRFEHPRQLMGYSGAVSSEHSSGGKIRRGAITKTGNAHLRRVIVEAAWSQRYKPVLSPAMRKRQEGVSAEVQELASKARHRLHHRYMHLLGKGKTKQEVVTAVAREMLGFIWAIGVSVERAQAQKAKGAA

SEQ ID NO: 236962 - protein, 444 aa, unidentified
MSTTDYRVEASPFAAWIGIDWADQEHAVCVVEAATGKSDTSTLAHDPGAIEEWAAELHNRFPGPIAVCLEQSKGALIYALMKYDFLVLFPINPKQLACYREALSPSGAKDDPVDAQLLVDFVRRYHDRLRAWRPDDEMTRLIAILNEDRRDLIDLRTQLTNRLQSRLKLYFPLVLELFRGRTKLYAPVVCELVLRWAALKELQYADPEEIDAFFKLHHLHQKSIQENLAKIAQAKPLTDDEAIVRSGRLQAQSLARQLLDLQDAIARCEAEIEKLMETHPDAPLFRELPGAGDALAPRLLAAFGTDRERIDSASAMQTYSGIAPVTRRSGKSQLIVRRWACPNFLRQTFHEFARCSIAKSVWAAAYYRMQRDRGKKHHAAIRALAFKWIRVLYACWKNRTLYNEFHYLQQLQRQQSPLLAYVGTAPVARPSGQSTNPKTFSISP

SEQ ID NO: 236963 - protein, 353 aa, unidentified
MTFYIGVDLHPHQQTVAWCNTETGETQTRDLKHDPETVREFYSSLPEPAIVGIEASTRATWFENMLFETCHKLFVGNPVLIRKRATSRHKNDRRDAELILQLLLHDEFPKIWRRPIESNRILEMVRLRQSMVRQRTQVCNRLQAIAHDLGLPKGRVRGVAFQAILKAAPADETTSIRRSHLFSLVGTLNEHIQKLDKWLEAKAAEDNNVQLLLTQIGVGYLTALVTVHTLGDVSRFSRISKQVASFAGLDSMERSSAGRIRFGRVSKAGSPLLRYQLGVAAKMASRSDARLKSFYTRLAKKKPKAVARMAVSRKLLIKLSIMLRDKITAEEFDRRGRTVGNARVLQGSERTVV

SEQ ID NO: 236964 - protein, 322 aa, unidentified
MSQPGSLCVDIDVSKAILDIAASSAIEQFSVGNDSDGFDTIIAELRMYAIALVLMKATGGLETAIVCALQAEGFELAVVNPRQARDFARAMGYLAKTDSIDARVLSQMAEVLNRHPERERFIRALPDTECQVLTAMVVRRRQLITMLVAERNRLHPAHPLNRKSINIIIKALEDELARLDADMNSHIHSHFKELAKRLSSIKGVGTMTAAALLAEVPEQGNLSRREISVLVGMVPVNRDSGTMRGRRTIFGGRAGVRTALYMAALVATRFNPVIKVFYMRLLAAGKPKKVALVTCIRKLLTILNAMLRKNEEWNESYHHVAP

SEQ ID NO: 236965 - protein, 409 aa, unidentified
MDVMFERVAGLDIGKKSVTVCVRTPGDGARRHSETRTFRTMTRSLVVMADWLVKEGVTLAAMESTSTYWKPVFYCLEERMECWLLNAGHMKAVPGRKTDVKDAEWIAQLLEHGLVRPSFVPPPPIRRLRLLTRYRTQLIGDRTRDAGRLEKMLEDASIKVSSVASSVTTVSARAMLAALIAGEADPAVLADLAKGKMRAKIPDLVEALTGHFDANHARLASAMLGRLDRVEAALAGLDEVIEAATQPWTHQIELLQTIPGVGLKVAQVIIAETGGDMSQFPSAAHLAAWAGLAPAIHESAGRRTPAGARHGNKWLTSMLVEAAGSASRSKNTYLAAQQARLGSRRGAKRAQVAVAHSILVSAYYMLERDEPYRDLGPDWLQRRHDQAHTRRLVAQLERLGHTVVLDPVA

SEQ ID NO: 236966 - protein, 329 aa, unidentified
MVFLGIDVSKGRLDCAVLAAEGGRSPGRRSFRNDAEGAERAATWTAQVSGAAAADTHVILEATAAYHEPVAHRLAALGMRVSIVNPAQVRSFAKGIGVLGKTDRIDAQLLARYGQLARPRAWFPPARALLDLQGLIARLDDIEADLRREGNRLEQARTRGCPDVVEQSLLASLAALESSRETLRRAIAAHVAAHGELQAGLDRLLTIPAVGPKTAVRMLAMLRARGFDSARQAAAYLGLVPVERQSGKSVRGRPQLSRAGNPRLRAALYMAAVAGIRRNPDLKAQYERLLGRGKCKMAALSAAMRKLVHLCFGVLKGEGGYRAGAATPA

SEQ ID NO: 236967 - protein, 482 aa, unidentified
MKKKNIYTNQSQELLTLFEEAGNGAKVMCVPIDYAKKDHVAMLCNGHGHILRKPFSVKNSLEGIEYLTKQVTRSCSHRQIDLKHVFFGGEDVGSYAENFVNTLRSGGWTVAGVNAHDAKEQRANMQASTDRLDLMGIASMLLNRRGNCSPAQSGIYRNLRTVVRHRRKLVAMSTEVKNRIHTVVDRLFPGFLDEKKSGICSFSKSSLYLMENRFSPHQIRRRKRKKLIEILDRCGTAKPESTAAKLQEYATRVLNTPNEYINTFQFSLAQHVKHLRCLQDSINQLEHEIAVWLAQTQGAFLTTFRGIGIVLAAGVSAEIGNPHEQKPLNNLVSYTGIIPKVKQTGGSEGKTYTGKVAKRCNHILKDYVVQSGNHMGLHGPEELMADYKRREAAGQHADFGIGRRYLRTAMCLMRTSQIYMPERLRNTEVKAEERATYYLTTWPSLRGKWNKAGALKAAFGKDRPLGQWRCMVQELYEIKLKL

SEQ ID NO: 236968 - protein, 341 aa, unidentified
MVMIGIDPHKGSHTAVVIDRDERVVDEIRVRTSNGQTGELSEWAASYPDRVWAVESARGMGYLVSQQLVAAGERVIDVPATMASRVRLLGSGKSQKTDPNDARSVAIAALRHSGLAMVQADDHVRVLGLLAKRHRDVARLKNKVACRLHALLMELAPGGLATEMTVNKALSLLDQVDVTDQVTHQRVVIATELVDDIARLEDQMKASKKRIRAAVDASGTTLCDIRGIGPIGAAIILSSVGDITRFPTPGHFASYNATAPIEASSGDKRRHRLNPRGNRKLNHVLHIAAVSQLRYPSEGRDYYQKKLAEGKTTKEAIRALKRRLSDLVYRRLLADGRRRSI

SEQ ID NO: 236969 - protein, 384 aa, unidentified
MNKHSILFIGLDTHREFHEIAYLEDHRGAQPVHYGRIPSAKAAVEKLVRQFESKYPHATLHFVYEAGPCGYWIYRLITSLGHCCYVVAPSLIPKKPGERVKTDKRDAIKLVKLLKSEDLTPIYVPEPEDEAVRDLSRARETAMKDLKDAKYQLKTLLLRNNINYSGTANWSLKHLRWLTELVLPHPAQQIVLQEYIQTINERINRLRRRDNELEYQVRNRRYFPVVKAIQAMRGVRLLVAAGVIAELGDLTRFDHPRKLMSYVGLVPSEHSSGGKRHLGAITKCGNGRARRLLVEGAHSYRYQAAVATELQKRQEGLPKQIVDMAWLAQLRLCRRYQRLMHKGKHYNVVVTAIAREMIAYIWAIARETVLSPVNPKLRIARVPA

SEQ ID NO: 236970 - protein, 369 aa, unidentified
MKQHTDVFVGIDVAKSRNAIAIAEGERGGEIRYFGEVDAASDAMRRVVQRIVGKYGRAHFCYEAGPTGYGLYRLITGMGYPCDVVAPSLIPRRPGDRVKTNRRDAVGLAKLLRAGELTPVWVPDEGHEAMRDLVRARSAAVQAQRVHRQQVSAFMLKHGRIYPRKKSWSMRYLRWLQEQRFEHPAHQIALQELVDAVRISKERIDRIEAAIVEFLPSWSLAPVVRALQALRGVDLIVAVTFATEVGDVRRFDNPGQLMGYLGLVPSERSTGDTIRRGGITKAGNSRVRHMLVESAWTYRHPPRVGAKKLYLLEQTTPKVREIAWKAQSRLTGRYRTLSANGKKTTVVCTAVARELAGFMWAVAREVQTA

SEQ ID NO: 236971 - protein, 324 aa, unidentified
MTEPALGIDISKLKFNVCLLREGGKLKHRVFPNNGAGFEQLQAWLTKLGVERVHACLEATGTYSEALALALFEAGHMVSVVNPAAVKAFAQSRLSRTKTDKVAAELIARFTVAQVPPRWTPPAPEVRELQALVRRLESLTEMRVIEENRLTSGITVDAVRQSVETHLSYLNQEIKRTEELIRQHINNHPTLKQQSELLDSIPGIAETTAARLLAEMVDITQYKSARQVAAYAGLVPRERQSGSSLRGRARLSKIGNARLRKALYFPALTALRSSAFFKAWAKGLQERGKCKMTVICAVMRKLLHLAYGVLKTGQPFDPEWVKIA

SEQ ID NO: 236972 - protein, 350 aa, unidentified
MQYVGIDWAYRRAAWCAKQADGTIFGEGFVPADEDGLARLVIELGPEVRACLEMMSGAVWVRDQLAGAGWQVEVADARKVKNVAPLACKTDKVDARVLAELCRRELVPALWIPSLEERALRERLKRRLHLVRLRTSAKNRVFGLLTQWGLRIPADRLRRPDAMELLETRGVPEVWRRSVAEALAVIELLDERIVPLDRELGPLARADRRVCLLSTIPGIGPLLGLTIAAEIGDVARFPSPRKLIGYSGLAPRVKQSGERSRTGELSKAGSRTLRFAAVEAAQGAWRETNPWHRLYSDVKARTGKANPAKSAVARKVLIACWHVLSLDEPFKPPHPPTDLVPASSLCFLAA

SEQ ID NO: 236973 - protein, 467 aa, unidentified
MSGRTLGIDLACVAAHQGSLADEAGRFLWAGRRFRSVRSELEAVLEAAGGPDGLTVVMEPTRNAWAPVAAFFRAQGATVILVPPERAADLRKYFSKHAKTDKLDSKMLARLPGLHPEGVPGHDGAGPTDDLRRAVRRRVNLVQDRVTVHQRIDALLELFGPGYAEALGTADYTKSALEVLGRFADPRALRRLGRRRLTELLVKTSRGSWREGKADELLLAASGAVALWADGGINFAGVAADIESEVRMAQLLDTEIARVDERIDALYAKADPAGIVLSTPGIGVTLAAGILGRLGDARRFGNLAAVRSFSGMVPGTDQSGISQGRPGLTKAGDPGLRRDLYLAADLARHVDPVLAKKYHDLMVKKGKCHTSALCHLSTALLTRIASCLRRGEPYALLDTDGNTITTEEGRQIVKDRFTVPADVRAARRRGRLAQAQKQGTSRRRKGSQSAPAASPSPTNATGQDAAA

SEQ ID NO: 236974 - protein, 389 aa, unidentified
MFYLGIDIGKNTHVASLVDDKKKVIFKAFSFSNSINGAESLVLKLEAFKNELEVGMEATGHYWLSLYSYLAQKNFTVRVINPIQTDGWRQGVEIRKRKTDIIDSLLIADLLRYGDFVETSLSNEDYLSLRNLSRFRSYLISSIGDLKRKTIALLDQVFPEYASSFSNIFGKTSKEILSNFSTPSDFEDINSDDLNTFLESVSKKNYASKKIDELSKKASSSFGINFCLDSFSLQIKMLIEQISFIQTQVSNVENEIEVLLEKLNSPITTIPGIGSVNAATILGEIGDIKRFSNPSKLVAYAGLDASISQSGEYESTYNHMSKRGSPYLRRALFQSALRAEFCDPVFSDYYQKKISEGKHHLVATNAVARKLCHTIFAVLTKNEPYQVQS

SEQ ID NO: 236975 - protein, 353 aa, unidentified
MAIVAESFDFVIGVDTHAKTHTLAVVTPAGLVGDTGTFPTSSPGLGRATSWVSKHTGGPEGCSRVLVSMEGTGSYGARLAAVLTHAGYQVVEAITPTSRARGSRGKNDPIDAQLAARTVLPVDTRRLTTPRSGNLRAALRVLVVAREEMNGEATRAKHALLALLRITDLGVDARGHLTGGTLTTVAAWRVRDEDLATATARTEATRLAKRVLALDLELAGNKTTCQAIVAQMAPRILELPGVGPITAAITLLAFSHPGRIHSEAAFAALAGACPIPASSGNTVRHRLNRGGDRRLNRALHTIVLVRTVYDQTTREYVQRRTAQGRTRREIVRCLKRYVARQLYRTLNTPTAMA

SEQ ID NO: 236976 - protein, 347 aa, unidentified
MRFYNEVHAYYCGIDLHVKTMYICILDGVGQVRVHRNVPSTPAAFLEVVAPYRTGLVVAVECMFTWYWLADLCAAEGIAFVLGHALAMKAIHGGKAKNDKIDSHKIAILLRGGMLPQAYVYPAAMRSTRDLLRRRLHLVRKRGQLLAHIQNTRAQYNLPAFEKRLAYPGNREGVVEHFPDPSVRKSIEVDVALIDQYDALITDLELTIVREAKRHDADAFHRLRSVPGIGKILALTILYEIHDITRFDRVQQFASYARLVKCRHESAGKVVGGGGAKIGNVHLKWAFSEAAVTFLRQNRQGQQLRARLEKKHGKGKALSILAHKIGRAVYYMLARETVFSMEKFLAA

SEQ ID NO: 236977 - protein, 351 aa, unidentified
MLIIGCDFHPGVQQVAIFDNRTGEIQEKRLGHREEAEQFYRSLPGPVRVGMEACGHYPWFERLLEELGFELWLGDAAKIRASVVRKQKTDRRDALQILQLLMEDRFPRIWVPSLEERDVRQLLVHRHKQVQARTRIKNQLQALALSQGVQKQRKLWTQAGRAELEKLPLMTYAAERRKRLLHGLDGMEAEIIELNRRVEEEVRRRPAAVRLMTHPGVGPVTALAMVLTLGPAERFASAKQVGSYFGLIPSEDSSGGRQRLGSISKQGSSFLRFLLVEAGQSAARYDAELKRFYRRLALRKNRGVAKVAVARKLATRLYLMLREEWTYPQLCQAVMQVSPSHSVVRQEKPTA

SEQ ID NO: 236978 - protein, 412 aa, unidentified
MTVTNQFAAHVGLDWADKKHDVCVQFKNGERVFDVIEHTAEALDAWLTELHQKVKGRIAIALELKKGPVVYALQKYPFITVFPVHALSLARYRQAFSPSGAKDDPQDAELALELMLRYPQKIKAIEPDNADIRLLQQLVEQRRQLVEDKRRFVNRIINTLKQYYPQPLEWFSHRGSLLLCELIIRWPSLQQLKRARRETIRNFLNAKGGRAMALTEQRVVSIDNAIPLTTDPSVIEANALMATALATQIKVVSEIIKTYDERIETLFDTLPDAGLFKSLPGMGPCMGPRMLAALGDNRDRFNNAEEIQNYAGIAPVTERSGQKSWVHWRWQCAKFVRQTFVEWAAKTVNSSYWARLYYQGLREKGKSHQSAIRALAFKWIRIIYRCWKTRTQYDEARYLLALEARHSPLLKP

SEQ ID NO: 236979 - protein, 339 aa, unidentified
MNISTVGLDLAKNVFHVVCFNDRDKEVKKRMLRRNQVLGFFTQLSPCCVAMEACASAHYWGRQFSDMGHEVKLISPRHVKPYVRGNKNDYNDARAIAEAANRPNMPFVGIKTVEEQDMQALHRIRSQCLRDRTALSNSTRGLLGEYGIVFAKGIPTLRKKIPEILEDAENGLSLDFRNLLARRYEQLVEMDEHIAFYTKRLESISQEDDACVRLQTAPGFGSIVSSAFRGAIGDGRAYARGRDAAASIGLVPRQYSSGGKNVLLGISKRGDKYLRKQLIHGARAVVLQAANKEDPLSLWINRIREERGWNKAVVAMANKMARIGWAILRHNTSYQPTSR

SEQ ID NO: 236980 - protein, 346 aa, unidentified
MRIIGCDLHARQQTISMLDTESGEVIEKTLAHEGETVREFYAALPQPVLVGLEATGSMFWFLRLLEELGIEYRVGHPAAIRKAETRKQKHDRRDAELIRRLLVEKRFPQIWLPTPEQRDLRTLLRHRHQLVRLRVMTQNGLQGLALSQGLRRGAKLWSQAGQQALDSLPLAGYSRTRREQLQELRQELNQRLQQLDQAVREQAEQRTGARLLLSHPGVGPITALATEVFLGDAQRFPNAKAVASYVGMIPSEHSSGGQQRNGSLSKQGNPLLRQLWVEAARAAARKDARLKQFYRKKLVQKGLGKAVVATARKLGIRLWIMLRDQIDYTEFCRRAEPRCPHAGMPE

SEQ ID NO: 236981 - protein, 342 aa, unidentified
MTEVTIIGVDLAKRVFQVHGAAADGSVVFRKKLSRAQFLRFLARQPACTVAMEACATSHYWGREIEKLGHTVRLIPPIYVKPFVKRQKNDAADAEAIAEAASRPTMRFVAVKTEGQQARALIFRTRDLLVRQRTQLINALRGHLAEYGVVVAQGVVHVKRLQDAIEAPEVKLPTMVCDIGRMYLNQISMCSDKIGVLEKSIRTEAARGETTARLQTMPGIGPVCAMAIEAFAPPMESFRRGRDFSAWLGLVPRQKSTGGKQILGKTSKMGQRDIRRLLIIGAMSMVRWAVRKGAPEGSWLARMLARKPRMVVAIALANKMARSVWAMLTKQEDYRDPVVAAA

SEQ ID NO: 236982 - protein, 347 aa, unidentified
MRFYTNQHKFYCGIDLHARTMYVVVTDQTGQVLVERNMKTDAQAFLQLVAPYREGLVVAVECIFTWYWLADLCAKEGIVFVLGHALYMKAIHGGKAKNDKIDAHKIAGLLRGGMIPQAYVYPAGMRSTRDLLRRRLHLVRKRGQLLAHILNTNSQCNLPDFGGRINYKVHRAGITERFEDPCVRKSIELDLNLITHYDELIRDLELHIVRAVRSDDADTFHRLMSIPGVGKILAMTMLYEIHQIDRFPSVQNFCSYSRLVKCARESAGKRHGTGGSKIGNVHLKWAFSEAAVTFLAKCPEARKLIERLRRKHGKAKALSILAHKLGRATYYMLTRQRAFDIEKFATC

SEQ ID NO: 236983 - protein, 341 aa, unidentified
MSKTILGIDLAKNVFQLCLLRGNSVVYNKKVSRRKLLDSVRQLEPKVDIAMEACSTAHYWGRQFKEMGHNVLLVPPQHVKAFVKNNKNDANDALAICEAACRPNIHFVPVKNTEQQDLCILHNIRQSTVEQRVALSNQIRGLASEYGVTFGQRKYAFRQQLPQALEDASNGLTIIARQTLNKLYEQWLDALEREVEIEQSIVAISAKSPAYELLKSVPGIGPILASAFIANIGNGRQFKNGRQLSAWIGLVPRQASSGGKTQLGGITKNGNRYLRSILIHGARSALQRRGLREDRLGEWMKSLVSRRGFNKACVAYANKCARMCWSILAKNESFNVQKAFI

SEQ ID NO: 236984 - protein, 338 aa, unidentified
MDRTTYAVDIAKQVMQVHWVDAHTGEIGRRKLTRAKFLECAAKLQPARFVMEACGGAHHWARCLRGLGHEVELLPAGQVRPFVRGNKDDAADARGIWLASHQGDIRRVPIKSCEQQAVLSLHRMREHWKSVRTATINALRGLLYEFGVVLPKGRTEGLKALAQRRADIDATLPQTMCRMVDAELSMLAQAQKRMDELEAEIQATSTSTAKRLRKASGIGVLGASALAATLGDGTCWRSGREFSASLGLVPAHTGTGGKTRMGHISKRGDAYLRTLLIHGARAVIAQSKKKPQWLHQLLLRRPANVAAVALTNKMARIAWAMVAHDRDYDANWISAKPC

SEQ ID NO: 236985 - protein, 415 aa, unidentified
MRVHRNCCGLDVHKKMIAACLLIEDADGNSVAERRLFGTMTRELHTLAQWLCAARVTAVAMEATGVYWMPVWNVLEQYGFQLLLINPEHYKAVRGKKTDLKDGTRIAELLQDGRLEGSYVPPVAIRVLRDLTCYRIKLVQHQSALANRIQKLLEQGNIKLASVARDALGVSAMAMLRALAQGETDAGRMANMAKKQLRKKIPQLQLALEGYLLPHHRLLLREMIEDLDHVAAKITRIEVTIEQQMRPFQEAVNRWLTVPGIKHRLAWTLVAEVGPTVEAFPSAADIVSWAGVCPGNNQTAGKRKSGTTHAGNPWLRRALCEAAWAASKSKGTYLQAQFRRLSTLRGPKRALIAVASSILTAGYYMLQRGTTYQELGPDYFDKRNTHRATHRLIKRLEALGHRVILEPRFIAVPSS

SEQ ID NO: 236986 - protein, 440 aa, unidentified
MGSYAGVDWASEKHDVRVADAAGEKLLAVTFAHDEQGLRSLCRQLVRLEVELVAIERPDGLLVERLLDAGLRVLALHPNQVAAARDRFRVSGGKSDGFDAFVLCELARTDNHRFRVLEPDSDQTKALRALTRGREDLVGMRTALTNQLRAELERFWPGPLGLFTDLHGRISLAFLERYPSPADARGLGEARLAGFLARERYSGRQKPAELLGKLRRAAAARVGELELSTRRQLVLGLVAMIKSLNAQIKELERQLARTLGEHPDGEIFRSLFRDPRSVICAAELLAEIGDCRGRYPSRDSLAADAGQAAVAIESGKRKAACFRWGCNKRLRAAFATLADSTRHWHPWAQDVYAAALARGHDHPRALRTLGRAWCRVVWQCWQKRTPYDPARHRALQQHITVTIPTASGPVVDQLATESMAAGLFATNAPTSRQQQVTAAQ

SEQ ID NO: 236987 - protein, 474 aa, unidentified
MGKGSGGGGTTRGDRRRNARRERLRGLLPRDGAVIGIDLAEDKQAIAVVDHDVRVLARKTVRVKAFRLGEALDWAVAQARAKGFSAVAVACEPTGPRWLQVQRLCAERGLPLVCIQPLVSHIAREQQDYTTHKSDEADCVMIARLAIELHCYIPEELDESWAHLRHLGRRRAQLITAATASVQRIRDFLSVAWPVVTETCAYPLESTTWLAAVQVVTSRCGGQPARLAEMGAEAFTAAVRDAQRGWGGQKAWGPICRRVFAALTDTEGVVASCRRGLLRRVADELGDLQRTRAQLRAVEADMVCVLDELGLGRLADIPGLSAVGAAAILAETGDPRRYDSSSSLVKHAGLSPAENASGAFAGQAHISRRGRPGLRLAVWRAVWPMLQYNPVMAAKYTAMTRAAGAAADAAAAADAGSRQVSAAAAAARARRAKARVACAASLLRWIYSMIVHDTSWDAAAASGQDAPRRQPEAA

SEQ ID NO: 236988 - protein, 452 aa, unidentified
MLTSLVTNDQREGMEMNQAERPSSPVDASSFQVVVGIDIGSQTCSMCTLTPDKRQVIKPTEFANALAGFGVLQEKLEQLGVPPEQVLIGLEATSRYGENLYHFLESRGYQLCLLHPRQTHQFAQQRGLRAKTDKLDATTIARVLLSGEARRGYVPSDLVATYRELVRLHTQLADEVARYKNEIQALLTVLFPEFSQVFANPCRATALALLKRYPSAHAIASAGVEAIASKLHELAPRNYGRSTAEHLVSLAQHSASQGIALAARSISLKMVCDQLEHTQANMAQLEGEIDKLLETDAGAKGLTSVPEFGHKTVAVLRAELGDVTRFQRTDQVVAYAGLDIEVKESGKWKGQAKLSKRGSGRLRRILYMAAVRCIRLPGSAFGAYYHRLVARGMKKRDALMAVMCKMLSVAYRLLRSEETYDPTKVCAVLVTQPVESPALHTPSSAKLVATGA

SEQ ID NO: 236989 - protein, 310 aa, unidentified
MRYIGIDVSKATFMVAYPSNEKEYKTREFSNNAKGIHQFIHTLKEDDHCVMEATGYYSYLLLYLLNQANITTSMENALKVKNFARTMLSVTKTDKADAQLLSLYGERMRPAPFKMPSDSILLLKQKRAAMRQFQKQLQANNNLRKSLEALPHRDAATFKYIDKISETLEKQIRKIEEDLVALTQKEFERQMQKLTSIKGIGASLAAALIIATGGFTYFDNAKQVSRYLGICPTYQQSGTSVNVKGHINRNGDSHLRSQLYVASWSMSLYNKECRNLYLRMKEKGKPGKLIMIAVANKVLRQCFAVVKHDT

SEQ ID NO: 236990 - protein, 346 aa, unidentified
MIVKGNYFDKLIIKIMKKNSIIIGIDVSKLTLDVYIQSIAFHFVIENAPKGFAKLLETTCKMCNCKKKDLFICFENTGKYSRMLSVFLHSQSITYVMVPALEIKKSLGMTRGKNDRIDSQRIANYAFEKKQKLVPTAMPGKEIDQLKMMLSLREKLIKHRTAYKNGIQDLYDCFEEGETLIIKESQKRLICSLNDEIEILENKILAIIKNNQNMAENFDLIQSITGIGKITAWYLIAYTGNFTMFPNARSFACYTGIAPFANSSGTVVGKPRVHHYANKQMKSILNMAAMSAIQLKGEFKVYYEKRIIELGKNKMSTLNIIRNKLLYRVFAVINRKTPYVNLYKFA

SEQ ID NO: 236991 - protein, 376 aa, unidentified
MTSPLRPVRWHSAVNGHPQERGPGVIVIGIDPHKQTHTAVAVEASTGELVDELTVPARKGGHERLLEWARALHGERRFALEDCRHVSGSLERLLLARGETVVRVPPKLMAGTRRSARERGKSDAIDAAAVARAALREPGLPPARLEGATREIRLLLDHREDLVAERTRIQQRLRWHLHDLDPALEIPAGALDRQVWLKRLSRRLARLEQTVQVRICRELVSRCGELARRADELERELASLIGQQAPALLELPGCGVLTAAKLVAETAGVERFRSDSKLALHAGAAPLDASSGRQQRHRLNRSGNRQLNCALHRIAVTQGRHHPPARAYLERKQAEGKSRREALRCLKRHLARTVYNTLRTTTSTTISTAPSELCLT

SEQ ID NO: 236992 - protein, 315 aa, unidentified
MSTTPLSVGIDVGKDRLDVAFHGRQRVHGYPNRDQGWQRICEALTELPVACVVLEATGGYELGLLGALLAAGLPAVRVQPGRARSFARSQGQCAKTDAIDARLLAHFGAASDLQPTRLPAAEQVLLAALCQRRRQVLDMRGAEANRLRLCHAGVRAFVQAAVARCDAEVAELEQQIQAVLAAVPVLAANAGLLRGVPGLGPVAVSSLVPGVPELGQMSPKEAGVLVGLAPWARDSGASSEPRHIRGGRAEVRHVLYMAALVAARHNPVLKPFYERLLAKGKPKKVALVAVARKLLIIANAIVRDQRPWRKMPLAA

SEQ ID NO: 236993 - protein, 390 aa, unidentified
MQVKADRPEAPSAIRSDLGAIFVSLELSRSIWLITSLSPGAGEKMSKHSVPAGDIGALLARFSEMKQKAFARTGKSFPIIVIQEAGLDGFWIHRVLQKEGIESHVVDPASIATSRRRRRAKTDRIDGEALLRALLAYKRGEPRVCTMVKAPTPEEEDRRRLCRERKVLTTERVQHVNRIKGLLFCQGVFGYEPLRRNRRQRLDELKTGDGRLLPDHLKAQISRELDRLELLLEQIKAVEAERNALFAVAEAAAPTAAPVAMLLDLKGIGPEFAAVLWMEAFFRSFANRKQIAAYAGLAPTPWQSGSIDREQGVSKAGNPRLRTTLIQLAWLWLRHQPQSALAIWFKERVMCNGGRFKKTTIVALARKLLVGLWKYVTAGVVIEGAVMKTV

SEQ ID NO: 236994 - protein, 343 aa, unidentified
MNQYVGLDVSLEETKIHVLDEAGGRVWRGKCASHPDELETAICKHAPGAVRIGLETGPLTTWLWTELSKRRLPMVCLDARAAQRALDMRANKTDANDAEGLAHLVRAGWYKEVRVKSRDAMLSKAVAAARRQLLDISTNLSNQVRGLMKTFGLVVPKGKGRIFEANVRRLLDQEHALAAVVLPLLEAWCAIRNRAAELDRLLLRKVRDDANCRRLMTAPGIGAVVAASYVAAIESPANFKHARDVGAWAGLTPRRFQSGEMDYDGHISRRGDERLRALLYEAATVILTRVRSASALRSWALALKKRLGFKRAAVALARKLAVVLHVMWKTGKNFDPNHRLAAA

SEQ ID NO: 236995 - protein, 365 aa, unidentified
MKIIHWIGIDDHADKWTIAHLKGQEQKPAHEFELKPDENGYRKLIAFAKNLGGEVRIVYEAGPCGYEMYRRLTKAELHCEVAAPSLTPNKPGQRVKTNRRDAVKLARYLRANELTFVVVPDGGRESLRDVVRARQAVQKDLVSIRHQIVKFLLRYGHRYREGKAWTTRFWRWLGTIKLEGEYGPIVLAEMKATHTERAARLARYDGEIEAAAKKPENAPYVAALCVLRGIGTLSAMTLLSELGDLRRFASAPQLMAAIGVVPAEHSTGDKTTRLSITKSGNAHVRHIVVEAAWHYQRRIANGPRITRRRKGQAQALRDIAHKCDLRLNRKFFRMTSRGKRSTVAAVAVGRELIGFIWAIGQLVHP

SEQ ID NO: 236996 - protein, 341 aa, unidentified
MSYLGVDLHTNSFTVCRRTKQDKESIRTFQIARMADFRKTLRKRDLLAVEATGNTAWFVSQVRDRVRKVTVVNPFQFEVIRRSVKKTDKNDAKTLAFYLSKGMLPEARMKTKENAQLHSLATTRDKLVKQRTALINKIHNVLNSYGIKFKKESLGTEKGLKSIWAYEWDVIVRIELEVLVEQIRSFNKSIKTLDKEMSDHGKNLKGHESLTSIKGIAARSATVLLTVIGDVNDFADENKLAAYFGIVPRVSDSNETVRHGRITKHGSKLGRTTLVQCTLVAKRYSPYLRRYYERIKSHRGSGKAIIATARKFLGIIYNTLKNGWVFEDFPNFVLASSCVKK

SEQ ID NO: 236997 - protein, 358 aa, unidentified
MSHYRVGCDAHKHYSQFAVLDQDGQLRQQSRVDHEPGAIQAFLENLPEGTPVALETVGNWYWIADEIEAAGCLPLLTHAAKAKVMMGNINKTDKLDAKGLAKLLHLDSLPTVWLPPGEIRDERELHRTRMALSKLRTALKNRIHATLAKYGITSTEHSDIFVGTGRTWLQATLCRLPPETGRCVAQEIEALDGLQLQIAQLEERIRERIALTPSIQLLKTLPGVGDILAIVIDREVGSIDRFDTAGQFTSYAGLVPTVHASGGKTRFGHMRKPSSQYLKWAFIEAANVIVRHRHHPAWKTKYVCLVYDQVCQRRGHAVAVGAVARHLAEAAFWILKRQEPYRPPANRQASPKQVRGRA

SEQ ID NO: 236998 - protein, 337 aa, unidentified
MLFCGIDLHSNNSFVVISDDADKVLYSRRLPNNLPEICAALSPYRQELVGIVVESTYNWYWLVDGLMEAGYSIHLANTTAIKQYDGIKHRGDESDARHLAHILRLGLLPEGHIMPKAARAVRDLARKRMQLVQQRTTQIVSIETCLAQQTGARISCNDVKQLTDQEIDKMPVGHHEAMGMKANVAIMQALQIQIDRIEKELSAHCRRDPGYRLLNTVSGIGPILATVILLETGSIERFADVGNYASYCRCVDSVHVSNGKKKGEGNTKNGNPYLAWAFVEAANFAIRFCEPARKFYQRKKAKRNGIVAIKAVAHKLARACFHILKTGECFSVERCFT

SEQ ID NO: 236999 - protein, 343 aa, unidentified
MQTITTIGFDIAKSVFQVHGVDALGKVVLRRQLKRRYVLALFQKLPPCLVGIEACASSHHWSRELQALGHTVRLMPPAYVKPYVKRHKNDATDAEAICEAVTRPNMRFVATKAPAQQSCLTLHRTRHLFIRQQTSVINAIRAHLAEFGIVAPVGRNGVAQLLDIAADANDKRLPEVARACVSALGAQLRMLKAQILEFDRMINAWHRSNEASRRLDDIPGVGPALATALVASIADPKVFRSGRDFSAWIGLVPKQNSSGGKDRLGNISKRGDRYLRSLFTTGALAVIRYAKIHGTRHRPWLTALLARRPTKVAAIALANKIARMAWAMMARGERYKEPAALAA

SEQ ID NO: 237000 - protein, 392 aa, unidentified
MLLEHPCNEPTAIHTQLGAIFVSLELSRSTWLITSISPGKGEKMSRHSVPAGNIAALLARFAELKRKAAMRTGQDYPIITIQEAGLDGFWIHRVLQGEGIESHVVDAASIAAPRRQRRAKTDKIDGESLLRVLLAYKRGEPRVCAMVIAPSPEEEDRRRIGRERQTLIAERIEHVNRIKGLLFSQGISDYAPLRRDRRTRLATMRTGDGRELPAHMKAQIERELDRLELLLTHIEAIEAARDALLAEAAKPEHKAAAATPVAMLMALKGIGEEFAAVLWLEAFCRSFSNRRQVAAYAGLAATPWRSGSIRHEQGVSKAGNPRLRKTMVQLAWLWVRHQPQSALTRWFEERTRNGGGRKTAIVALARKLLVALWKYVSAGVVIEGAVMKGAAA

SEQ ID NO: 237001 - protein, 431 aa, unidentified
MGEVSTIGLDIAKGVFQVHGIDGAGAVVIRKRISRSKVLEFFAELQPCLVGIEACPSAHHWGRELQKLGHTVKLMPPSYVKAYLKRGKNDANDAAAICEAVTRPSMRFVPIKTKEQQTALMLHRGTAIVVRQRTMSSNALRGHLAELGIVSAKGRNGMGELLRIIADGADHRVPAAVRGILDVLARQYCAIGTEIGSIDKSILTLHRACEASRRLAEIPGIGPIGAAALVAEIGDWKTFSSGRSLAAWIGLVPKQHTTGGKDRLGSITKQGNRLPAMVAGRRRDGRYPLRAETRDEEPAMARPVDGTPADEGGGRRARQQDCADSLGHHGPRREIQRAEAIAGRVRDATGQIGNTNWRGHDDVMQIRSFRGSGEPVWVNALSSASERLGLDPRRALGPAATPAASTGRKRDRTRPMLQQRQKSSCQGAVHA

SEQ ID NO: 237002 - protein, 385 aa, unidentified
MSESSKSAEAVQYDTTLVLAIELSSKTWVLAAQVPGLPKTKAKRTIEPDKLALESAIDGYRARAAAAGYSVDRVVVTYEAGWSGFWLARWLIAKGIEVHVVQPSSVPVDRRMRRAKSDGIDAELLLRTLLAWLRGEPRVCSMVPIPDEADEDARRCVREWTELVSERVALANRIGAVLATLGIDGYNPLLQSRRRRLADLRTGLGEPIPPNALAKIERLLSRLELVLAQIADLERDRDAVAESAAPSEAGKMIQQLCSLRGIGVQSATVLVREAFVRRFANGKALGSYAGLTATPYSSGGIEREQGIGKAGNRRLRTVMVELAWLWQRYQPGAAQVVWFRERTGSTGRRVRKVMVVALARKLLIALWRFVTDGVVPEGVTMKPAA

SEQ ID NO: 237003 - protein, 325 aa, unidentified
MRQPKSQVKPQTQVGLDVSSQTLDAHIRVDGKAFSVPNTDSGFDQLCDVLSAYDVSMILMEATGGYEDNVACYLQLQGFDVVVINPRFARRFAQSMGRLAKTDRIDAAILAQMAFMIDSGPDRDRYIKPVTDEQRKQLSRMSSRRRQVVDLITIEKQRLTHADEYARESINEIISLLNAQLKRIESDILRYVKKNFSELANRLSSIPGVGSQAVTVLIADLAELGHVNRRRISALLGVAPFNHDSGKFKGQRRIRDGRQSVRNVLYMGVIAATRFNPVIKAFYDNLLLRGKPRKVAIIACMHKLIRIINAMMRTGKPFDTSLHGV

SEQ ID NO: 237004 - protein, 408 aa, unidentified
MRIFVGDDWAEDHHDVHLMSNDGVRLEARRLPEGLEGIRTLHELVAAHADDPAEVIVGIETDRGLWVTALVAAGYQVYAINPLAASRYRDRHNVAGAKSDKGDAKMLADLVRTDRHNHRRVAGDTEQAEAVRILARGHQNLIWVRTRHTNMLRNALRDYYPAALKAFTDLADRDALAVLAKAPTPAQGAHLSLSQIEAALKRGGRQRNLRSRAIEIQAGLRAGQLAAPDAVADAFAATTIAAVGIITELNRQIIQLETTLAASFEQHPDSDIYHSLPGFGVVLGARALGEFGDDPNRYANTKSRRNYAGTSPLTIASGKNKAVLARHVRNRRLYDAIDQAAFCSLTQSPGCRTFYDEHRAAGDRHHQALRALGNHLVSILHGCLEHRCLYNEDIAWGHRATTSAPRAA

SEQ ID NO: 237005 - protein, 477 aa, unidentified
MKDNRRPPAPRHAAATKPRGWSPLLKRIQPDAAGIDCGATSHYVAVPEGRDPQPVRAFRTFTADLHQLTDWLVQCGIKTVAMESTGVYWISLYEVLEERGLEVVLVNARQVHNVRGRKSDVQDCQWLQELHSVGLLQASFRPAGEIVALRGYVRHRQTLIEAAATCIHRMQKALTEMNLKLHHVLSELTGVTGMAIVRDILAGVRDPHLLAAHRDGRCKASEAEIAAALTGHYRAEHLFALRQNFEAFEFHQRQIAQCDQAIEGQLAHLADSRPSAPSELPTARQRYKHSKNEPRGELRAPLHRITGGADLSQIDGIGPYGALQLIAEIGTDMSRWRTEKHFTAWLTLAPNNKISGGRLLSSKTQPSANRAAAVLRRCAMSLTRSATALGAYYRRLAYRLGQPKAITATARKLAILVYRVLRGEMVYRDSGATAYDQLHRTRLINGIIRRAQQFGLSLINLQTGEVLHHAAVPQSVS

SEQ ID NO: 237006 - protein, 350 aa, unidentified
MSIIGCDLHSRYQVVAGVNTEDGEVVTRRLEHENGEAKAFYAGLAKPSLIGIEATGYTQWFERMLAGMGHELWMGDPAEIWARSVRRQVTDTRAAEHLLDLLLTKRFPRVWVPRPEERDLRQLLKHRDKLVRMRTSVKNQLHFLAMSQGICRQRKLWSTRGRAELEGLSLGPWASQRRKELLELLDSLGPRIEQLDQAVKTEAEQRREAVRLMEQKGVGPVTALAFVLTIGAVERFPNSRKLVSYLGLNPSEHSSGGHQRLGHISKQGNEMLRWLLVEAGQSAAPCDAQLRRKYQRLKFRRGGKVAKVALARHLAVRLYWALRQASSATPPVRTPGSPARTLVEATPSIL

SEQ ID NO: 237007 - protein, 336 aa, unidentified
MPMYQLGIDVSKNTLDLCLLREGIKGRIKTRKLKNTADAAKVVAEWLKKQSCELGEVHIIMEATGVYHEPLAYGLHFAGARISLANPHRTREFARGMNILTKNDKVDAWMLACYGSLKEPEAWTPPPESVRYLRALLRRRDALVADSTREKNRLEKSVFTDSPDAVRASIENMLQELSNEIEHLDVLIQEHIKTHPELNQDFRLLTSIKSVGYLLGLNMLAILKSHSFESAEQAAAFLGVVPVERRSGTSVKGKPKLSKIGPPEIRTKLYLAALCGLRFNPVMKQMYTKLCQRGKSKMCAIGALMRKLVHWCYGVLKTQLPFDAEHNQQSHYKTTC

SEQ ID NO: 237008 - protein, 460 aa, unidentified
MVAQDGDTVEVEEPEEILARVAAIDVAKASGMVCTRVPHPAKPGRRATKVWQVPATTNAIIELAEQLARQGIQRVVVESTSDYWRAWLYLLQARGLVVWLVNARDVKHLPGRPKTDKLDAVWLARLNERGMLRPSFVPPAEIRQLRDYTRLRVDLTQERSRVVQRLEKLLEDALIKLSTVATDIMGVSGRAMLEALVAGQRDPKALAELARGRMRGKRGALVQALTGRFDDHHAELARMLLDHYDALTAQIDRLTARIQQLIAAIPAAQVPTDGAGPTGTGDDGTTGSDTNQQPAQPPLGVLDRLDEVPGIGSKAAQVVIAELGLDMGQFPTPGQLVSWARLSPRTIQSGTKHRAGATGKGNPYLKGVLGEVAAAAAKTDTFLGERYRRLVRRIGKLKALVAIARSILVIIWHLLADPTARFHDLGAGYYTSRIDTDRKTRNHVRQLQALGYTVTLTPAA

SEQ ID NO: 237009 - protein, 344 aa, unidentified
MRKYFVGLDVHWSHTNACILDAHGKKVKRFRVSGSWLRIAEELLKLKGKLFVCYEASCGYGCLYDMLRQVAHRVVVAHPGQLRLIFRSKRKNDRVDAEKLAKLLFLDEVPAVYVPSQDVRAWRQLIQHRVRLVNKRTRAKNACRALLRSVGIRAPGRCGLWTKNGMQWLRCLELPNPLYALQRNMLVEEIEMFNEQIKLAEKELQRYSKHNPAVQLLRTIPGVGLRTAETVVAYLDDPARFHNIKAVGAYLGLVPCQDQSSKTNRLGHITREGPAAVRRMLCEAAWQAVRRSPTARRYFERIQHGRKDRKKIAIVATAHYLARVMLSMLRSGEAWREAEVKQAA

SEQ ID NO: 237010 - protein, 282 aa, unidentified
MLHAGLDLSRRRLDICVLSGSGESVAEFATPADADGLRALARRVSGQRVRAVIESMNGARFVHDTLEESGWEVLVADAKKVKGLAPLACKTDKIDARVLAELSWRDLVPAIWLPDPTIRRERELARFRLHLVRHRTTLKNRIHATLITFGHPCPVSDLFGLAGRELLDRLAIPDPWRRNVDVSLELIDELELQIARLTCELKRQGADHRYIPLLVTAPGFGWINAYTIASEIGDIERFASPAKLCGYTGLCPRVVQSGATDRRGPISKHGPRYLRWGCSRPP

SEQ ID NO: 237011 - protein, 415 aa, unidentified
MRVHRNCCGLDVHKKIIAACLIKEDAGGNSIYEKRLFGSMTRDLHELAQWLCTAQVTAVAMEATGVYWMPVWNVLEPYGLQLLLINPEHYKAVRGKKTDLKDGTRIAELLQDGRLEGSYVPAVAIRVLRDLTRYRTKLVQYQSSLANRIQRLLEQCNIKLASVASDVLGVSAMAMLRALAQGETDAMRMADMAKKQLRKKIPQLQLALEGCVLPHHRWLLREMIEDLDHVGTKITRIEETIEQQMRPFQSAVERWVTVPGIKHRLAWTLVAEVGPSVEAFPSAADLVSWAGVCPGNNQTGGKRKSGTTRAGNPWLRRALCEAAWAASKTKGTYLQAQFRRLAALRGPKRALIAVANSILTAGYYMLQRATTYQDLGPAYFDKRNTVRATHRLVKRLEALGHRVILEPRFIADPGS

SEQ ID NO: 237012 - protein, 413 aa, unidentified
MALKIVYQICCGIDVHKTFVVACIASTNNGVTTYKRHRFSTYTKGLKELSQWLGDNNCKDVCMESTGKYWIPVFNVLEDSCNITLAHPKYVKAIRGKKTDKKDAKWIADLFKHDLIAGSFMPPLAIRQLRDLMRYRFKLTNFMSSEKNRLQNCLTVSNIQLGNVVSDTFGKSSMNIINRLLENPLDNSFDIEPLIHGSMKDKLPELELAIDGFITSEQAEKLKVIKQHYEDLESRKADLEKIILSLSAPYAEEINLILTVPSFKNIFSAIAVVSEIGVNMDVFPTAKHLCSWAGLTPTNNESAGKKKSVRISRAGCYIKPLLVQCATAVVKSEKHPEIRNRYLRLKKRRGHKRAIIAIARMLLTAIYNILKKKEPYNPELYRKSDVLPVNREITVEQAIILAKSQGYRIRAAS

SEQ ID NO: 237013 - protein, 425 aa, unidentified
MNSNTNHKINQVTENTLVIGIDIAKHKHFACAIDDRGRAFQKSFPIAQSRIGFEGFYERLLTLKATHEKQEILVGFEPTGHYWMNLAAFLTSYGIPFVMVNPMHVNRSKELDDNLQTKNDQKDALVIARLMRDGRFSYPRILDGVEAELRNGATLRAKIQEDLNAIQNRIIRWLDRFFPEFTQVFKSFGKMAYAVLEMTPLPSDIKGKTPEELLFLYRQVDGMKSPQLPKAKQLVEVAQDSIGLTEGLVMAKLEIATLLSQVKLMQAQLDELTAQLIELAKQMADYEYLASVPGIGDVTIVDLLSEVGSLTQYAHPRQLIKLAGLTLRENSSGQQKGQKRISKRGRRKLRALLFRVMMPLILHNPAFKQLHEYYTTRSINPLRKKQSIVVLCGKLLKILHALCKKKTMFNEHQMMNDFASLQTAA

SEQ ID NO: 237014 - protein, 343 aa, unidentified
MDYFAGLDLSVKETSICIVDDAGKIVREVRVASEPEALLQVLTNNNYRFKRIGLEAGPLSQWLFSALAEAGLPVICVETRHMRAVLKAQINKTDRNDARGIAQMMRVGLYRPVHVKTLRSQKLRMLLIHRKLLQSKAIAIENDLRASLRNFGLKMGLVGTVRFEARIKELVENLPDLAALVEPLLIVRRVLREQLGILHRRVLAVVRDDEVCRRLMTIPGVGPVVALTYRVTVDVPARFRNSKSVGAVFGLTPAKDQSGERDRSGAISRCGDELMRVMLYEAAQIMLVRSAKWSWLKAWAMKIARHRGMKKAIVALARRLAVIMHRMWVDGTNFRWTREVAAA

SEQ ID NO: 237015 - protein, 428 aa, unidentified
MNYNQNHKIAQITAETLIIGVDIAKFNHVARAQDFRGMDLGKSITFENTQSGFDGLIGWIKQLQVDNQMNKVFVGMEPTGHYWLNLAHYLKELNIKCVVVNPLHTKKSKELDDNSPTKNDVKEAKVIAQLVKDGRYAEPSIPEGVYAELRGAMKVRELLSTDLRSVQGKIHNWLDRYFPEFFTAFKDWEGKAALRTLKLNLLPHELLKLSDGEILKHLKKGAQRGVGLSRVRRLKEAACCSVGIKQGNNMAKLELKTLLAQYDLLKEKFEELDAHLDELLKQVPGVHNMVAITGIGKDTVAAFLAEVGDLRNYSHPKQIIKLAGLNLRENTSGLHKGRTTITKRGRKKLRALLFRVVMPLVAKNQAFKDLHEYYTTRPDNPLKKMPSLIAICNKLIRILFTVGTKQCEFSEEKMLSDIPHFNNLQEAA

SEQ ID NO: 237016 - protein, 385 aa, unidentified
MREVAEGQSAWNGAAVFVAIELSKSAWLLAVQGSPSGKASSHRLESGDVDGLLALLRRLQAREQQACGGGEVQIVLGYEAGYDGFWLQRRLAAEGIHCWVMDPGSLQVNRKARRAKTDRLDAAMLLRALMAWCRGDRSACHMVQVPSVEREDARRTYRERQRLIAERVQHVNRIKGLLATQGIYDHQPLRRDRWARLAELRTGDDRELPLRLRREIEREFKRLELVLEQIEAIEAERDAAAMESAAGDADAAKITLLARLGGIGVELATVLVREALYRPFANRKEVAAYAGLTPSPFASGDRHREQGISKAGNPLLRRSMIELAWLWLRYQPDSALARWFVERVGTARGRVRKITAVAMARKPLIASWKYVTTGLLPQGARLKAA

SEQ ID NO: 237017 - protein, 357 aa, unidentified
MRQKSLKSISNTTTERLDILPIYDHYIALDWSKTAMSIARISNKRPDKIKVIDGYSDLKELKQYLMNQQGRKILTIEESTPAQWLYVELLEYVDRIIICDPFKNKLLSDGPKNDPIDAKKLCNLLKAGMLTEVYHTTEDLYQLRKYVSGYEDLIKMGVRLKNQRSGFLAQIGKAKKTKERDFDTASNFILENIDKSIESYKAAKKEYEKLFEELCRKNKRLKYLKTIPGIGPILAVKILAIVIDPKRFRKMSKYLAYCGLVKHSAESGGRIYGRRTPRFNRVLKSTYKTAASVVINGKGPLREYYDYLISKGITEYNARHSVARYIAKLSLGIIKGEMRYKPYLWRKKKQKEESNDN

SEQ ID NO: 237018 - protein, 366 aa, unidentified
MKKQTNEVISRESLVNELKRVLNLGLDVHYRQVTVAMQEDGGRIKAAGKMSYVDFLNWVRKKLEEGWEINSCYEAGASGYWLHRELVKLGVKNLVVVPKAMGRGGQKQKTDKRDAGELCDSLDRYLRGQKKALSVVAVPTEEQEEKRALIRYHRQIMKDRGRCEARGKGLLCAQGIQVRGRWWQGDTWLTLISDPRLKDWMKEQLIGWRNKILSTDEEQSALRKQIAALAPALLPKGVGAYSAAVLHYELRGFEHFKNRRQVGSITGLCPGVHLSDGRGKEGSINRCGIGIVRWTLVEMVWRLMIWQPQYPPVRRLAAGFVKSKRAKKRLVVQAARRLAIDLWRLSTGQTTPEKLGLVMQYNPPAN

SEQ ID NO: 237019 - protein, 473 aa, unidentified
MQKSLNDKKNEVIKLLEKQKIRNVKDLDSYKLSVCHPFSAGIDLGSEELYVALAPDIAAEMDLAIVHKFGTFTSDLLRCRDLLKSCGINSVSMESTSVYWTTIYSVLREAGMEVCLVNPKKFRMVPGRKTDILDCQWLQTLHLYGLLRGSFHPDAEVETLRSYMRQRDTIIKERATYIQRMQKAMTKMNLLLHNVIDDITGKTGTDIITAILDGERDPKVLAAFRDPRVKKSEAEITQALTGYYKEDQLYLLKINWQTYRFFDKQLTDIDRQITKALKNFPLKKSAKEKRKDNGKSASKGKNDIRTKDNLEDVLYRILGSDLSRLPGIRSLAILQIISEIGTDMSKFPTANHFASYLGFAPHNKITGGRIISSRTDRIKNSAAQAFRKVIPSISQTKTALGAFYRRLAPRIGKPQAITATCRKLAILIYSAIIYGNEYIEHGEEQYIKKQEEWERKKLMKLAEKYNFKVVQNA

SEQ ID NO: 237020 - protein, 342 aa, unidentified
MNIPVRIGMDTSKSVFQLHGVDENEVVVVRRQFRRAEMIRYFERLPPILVAIESCGSSHHWGRLLQSFGHEVKLIPPQYVKAYVKRGKNDAADAEALCEAVTRPSMRFVPVKSKERQAACMLMTVRERLVSVKSQLSNAFRSYAAEFGIVGPAGRQNVAALIKRVLEDDSLPEMARDLFRLQADEYAAVQARLAKIEAKLMKWHRDDDISRRIATIPGVGPIGSSMLSMKAPPPETFRSGRDFAAWLGLTPKDHSTGGRQRLGGITKAGDSVLRSTLIVGATALLRHVRKGRHKPTPWLASLLERKPPKLVAVALANKFARIAWRLMMSGGVYNQPVAAMPT

SEQ ID NO: 237021 - protein, 391 aa, unidentified
MIYVGIDVAKDKHDCFITNSDGEVLFKVFTITNNLDGFNDLYQRIESVMDDVTKVKVGLEATGHYSYNLLGYLIDKGLPAYVINPLHTNLYRKSLSLRQTKTDKVDARTIASMLMSDVNLKSYSDTSYHNEELKSLTRYRFDKVKERAKLKSSISRLVCILFPELEKLVPTLHIASVYAMLSEFPGAKQVANAHLTRLTNLLSESSKGRYSRETAITFRDAARNSIGSNMPAKSLELKHTIKLIREISSEIDEIENEIKIIMDEINSPILSIPGINYRMGAMIIAEIGDFNRFDSSDKILAYAGFSPSTYQSGQLDGACAHMEKRGSRYLRYALYNAAKYVCHWDPTFAEYLAKKRAEGKHYNVALSHAVKKLVRVIYHLEKTNQQYIKAA

SEQ ID NO: 237022 - protein, 342 aa, unidentified
MTKTSIIGLDLAKRVFQAHGARADGGVAFRKKLSREKVLSFLALKPRCVVAMEACGSAHHFGRAIRDLGHEVRLIPPSYVKPFVKRQKNDAADAEAIAEAASRPTMRFVAVKTQEQQARAMVVRTRDLLVRQRTQLINALRGHLAEHGVVAPQGPANVKTLEPAIEDETTSLPLLVRELARLYLEQIDHLSKKIEALGAAISREAAGGAVTRRLQTLPGVGPITALAIETFAPPMEAFQCGRDFAAWLGLVPVQRSTGGKRVLGKTSKMGQRDIRRLLIGGAMTVVRWACRKGAPEGSWLHRMLCRKPRMLVAIALANKMARSIWAMLTKGEDFRVPAAAAA

SEQ ID NO: 237023 - protein, 313 aa, unidentified
MSSNTSTIIYAGLDIAKLNLQLHLAGRFYDLPNTAAGHRRLLKLLKAHPAVQIICEATGGYERKVVEALHQAVICLSILNPARVRHFARAQGQRAKTDRIDAAVLSAYGQALQPKPTPARTESEKHLAELVRRRVQLLEILVAQRQQAERLTLPSLRRQAKSLIRRLEADVAQIEEQLQELRQQTPELDERAQKLQTITGVGATTALAVLAELPELGTLNRTQTAALAGLAPHPRESGQWQGRRTIGGGRAEVRRALYMAALVAARSNAVLKVFYQRLRKVGKPAKVALTAVMRKLLVLMNHILKNPSFELQN

SEQ ID NO: 237024 - protein, 330 aa, unidentified
MPSKADTVIARTIGIDTGKNTLHVIGLDEKGAIVLRERVSRTRIAARFVNVPPCLIGIEAGMASHHVARELVALGHEVKQVPPAYSRPFRQGHKNDFRDAHAVAEAVERPSTRCVPIKTDEQLDLQALHRVRSRLISNRTAVINQIRGFLLEHGLPVRQGHHFLRRQLPQLLATRTDVLSPRMIRIIENLTADWKYLDERIERVTDEIEALSRADEGCQRLITVPGIGPIISSAMVAAIGNGAAYCKGRDFAAWLGLVPKQMSTGDRTILGRISKRVTAYNNIALGKLRDVRGNYFTDRAALHHITDANRFGVGRRIAHPAAHVGVERKP

SEQ ID NO: 237025 - protein, 356 aa, unidentified
MARTSLSSVQQFVKGFETHPFFIGIDVHKRSYHLALRRIDGKAVTLVCPADPLGLVGVIQRFCIRVGGIAYEAGPTGFGLARALRSAGMRPLMAAPSRIPRAVTAGAKTDRLDCLRLADYAAKGLIRSIAVPTPRQEAQRSLLRRRHDIVDSLRRCKQRIKGLLLFLGLPEPTQTRRWRRTAEEALRELPMEPHARLTLESHLRELSFYQKELSEVEEQLRQTVRQDGPALACLQSVPGVGEVVATTFMLELFSPERFERAEEVTSYLGLAPMVRHSGEKTPSGRLHPVGKTRLRSLLIESAWMWRQYDPYARDLYNRFLGRMGIAQKAIVAVARKLAVILWRLYVERRHYRTAVI

SEQ ID NO: 237026 - protein, 341 aa, unidentified
MSDYSYFCGIDLAKNHFSLHAVDQNGKVILHKSVTRSKLLTTIANMPLMRIGVEACGGAHYWARTLNKLGHDARIMAVKYVVPYRTKGKNDLNDAVAICEAVQRPSTRFVPVKSPEQQAILSVHRIREHWVRERTALMNRMRALLSEFGLIIPVGRSSLMKQIPLMLEDAENELPHLARTVIADAYHHLGELNQRIADTEQVFDSFAKVSTNVQRVMKVRGIGPQTATAILASIGNGSQFDKSRDFSAWLGLVPKQYSTGGKPRLGRITKHGDKYLRTLLVHGARTVIANLGDKQDKLSQWCRGVLERRGMNRAIVALAAKNARIIWSLLHNQTEYENYAA

SEQ ID NO: 237027 - protein, 345 aa, unidentified
MEQISRIGMDTSKHIFQLHGVNAVEASVLRKRLRRRDMVTFFERLAPTVIAIEACGASHHWARLLGSFGHEVKLIAPQLVKPYVKRGKNDAADAEALCEAMSRPTMRFVPVKTAEQQAALMLIGLRDRLIRNRTQLANAIRGYAAEFGLTGATGMIHVVPLLDRIQADENLPALARELFAIHAVEHAQLQAQIDEVEVKLKAWHKADACSRRLSKIPGVGPIGAAMLIMKTPAPEMFRSGRQFAAWIGLTPRDHSTAGKVRLGVITRAGDEGLRSVLVVGATAVIRQLRLARGPGSPWLANLLKRKPPKLAAVALANKIARIAWKMMVSGETYAARSASVLAPAI

SEQ ID NO: 237028 - protein, 281 aa, unidentified
MPRKRILVKSIDTSISYQVIGIDLAKHLVSACLITGAGEIFGIDRLTYDDLLKSAERMSPTLFCMELCPEVHYLAEKLQGYGHHTKVIDGAAVKEYIKTHFGGQKTDLNDAQAIAFLSLDTNLPEITPKNTSNSVLSSIQAVREQFRKEYIQSFVSLKGICQRWGLPISKGVMNKNKVEELVSESKKIPQEVKDWLLELLQSCRELQKRLNKISKYLKEYADNDEICQKIMSVPGIGPITATRLKATIGDIQRFEKPKSIVAYYGLVPKSKATGHNEKKAA

SEQ ID NO: 237029 - protein, 414 aa, unidentified
MLRIVYPICCGLDVHRDFVYACIASTVNGVTTYKSHRFSTFTKGLRELLSWLLQDNCRDVCMESTGKYWIPVYNILESGCKIVLAHPKYVKAIRGKKTDKKDAKWIADIFKHDLVSGSFIPPADIRQLRDLVRYNIKLTSYTTGEKNRAQNCLTVSGLKLDSVFSDVFGKASSNIIGTILSNPSEKISDVSVFRTKGMKATDEEVLDAIDGEMCPEQAEKLRIIRSHMDGLGLCKANLMSLILTTAEKYIPEIDLISTAPGLTAYSAIAVIGELGVDMSVFPTSKNLCSWAGLAPQNDQSAGKKKTTRISRAGVYIKPLLVQCALAAIKSKKHPEVFNRYNALKKRRGHKKAVIAIARMLLTAIYNILKKHEPYNAELYRKSDTPPEHRNVTLQEAVFILQRQGYIVSSPTPVG

SEQ ID NO: 237030 - protein, 410 aa, unidentified
MEVLYPHCAGLDVHKQTVVACARHMVNGTVTREVRTFGTTTKELLALSEWLASHGCTHVAMEATGVYWKPVWHILSDGEFTLVLANAKHVKNVPGRKTDVNDATWLADLKAHGLIRGSFVPDAHTQELRGLLRTRKQFVRERSCQVQRLQKTLEDANIKLDSVISDILGLSGRAMIEALIAGETDPGALAALAHRRIKALPAVLREALRGRVTKHHRFLLQLHLCHIKALDTALEAIDREVDTQIEPFRIAVLLLTTIPGVNDLGAQVIRAEIGGDMTRFPNEAHLLSWAGFCPQSDESAGKRRSTRLRKGAPWLKTTLIQCAWAATRKNGSYLQAQFRRLRARRGAKKAICAVAASILTAAYHMLKDGTVYHDLGPDHFDHRAKAVHTRRLLTRLQNLGYAVQITPLAA

SEQ ID NO: 237031 - protein, 314 aa, unidentified
MTERCYVGIDVSKATLDVCTSHGEAWEAANDDPAMTALQERLSALEPVLIVLEATGGYELRAAAALSMAGLPVAVVNPRQVRSFARSLGQLAKTDRIDARILAAFAERVRPKPRPLPDEDTRELEGLITRRRQLVAMITAEETRLAVAVPSMRKQIKAHIGWLRRQLAAVDAGIDGAVRRSPIWRAKDDLLQSVPGIGKTTARTLLALLPELGTLPEKQIAALVGVAPLNRDSGAFRGRRMVWGGRARVRTALYMAALVGSRHNPVLRAFYTRLRDAGKPAKVALVACMHKLLIMLNAMMRDGRPWHAQNGIVG

SEQ ID NO: 237032 - protein, 347 aa, unidentified
MDQQCHYVGLDVSLETTSICVIDDAGAIIWRGKCRSDPDTITAIVRQHAPGAVRVGLETGQLSNWLTLSLRRRGVPVVCMDARHAKAALSLQINKTDANDAFGLAQVVRTGWYREVAVKSMDAHTLRMLLVARSRLVSQRQATANTIRGLLKTFGLVVARGSKGLFPVRVREQIAGNPALIAIIEPLLAVWHAIRDQVAMLDRQMLARARNDQVARRLMTIPGVGVVIALAYTAVIDDPARFRRSVSVGAYLGLTPRRYQSGEVDTTGHISKCGDSLLRGYLYEAAAVLLCRDARASILKSWGLGLAKRIGMRRAKVAVARKLAVIMHRIWSDHSEYRWTALPPTAA

SEQ ID NO: 237033 - protein, 401 aa, unidentified
MICRPGPTIHLDTHRSGERDLVGAWLRGPVPVLSAVPARAFPPLAAETDEGMAMTTMTERKRRVTGGVDTHRDVNVVAALDERGSELGVQSFATTPAGYRAALRWLRRFGTLEKVGVEGTGSYGAGLTRYLHSEGIEVIEISCPNRQRRRSHGKSDPVDAIAAAKAVLSGEAVIEPKTRTGEVEAIRALRTSDRSARHARVKALNQMRALLLTGPEELREQFRGTTPWRMVRIAARLRPGDPTTAVGATKYSLRLLARRVLELEAEMAALKSILRPLVASTAPELVSRHGVGTDTAGALLVAAGDNPERLSDERSFAHYCGVSPIDASSGTVVRKRLNRGGNRFANEALWRIVMVRMVSDPATRLYMERRVKEGKSKREAMRCLKRYVARELYPLLASIGP

SEQ ID NO: 237034 - protein, 436 aa, unidentified
MNNSPLQVGLDISQKRLDMCVMQPNGAVLMNHRSFANNRHGYEELKHVLLEQITAGGFTGVDIGAESTGYYWLPLFLQLQADESWGSHEPTLYLLNSRQVYWFKKGYAPDDKTDAKDSFYVTEKLRTQRGKYHPWSADGDWLRLRFYSRLRYHIGQALTREKNYFWSHMFLKCSDYRANCPFGDGLGATGRALIRQYPDWQCLTQLPNDILQDQLADWSHNRLPNLEETMRQLRQTIDTSYPLPTELQMGVQSLLCMTLDHIAFLEKQAAQVERCLEQEIDAYHPEVSHLVNIKGLGVVLAAGIAAEIGDLHRFFAGQEWDERQNRFRPKNLRDVEDAVAKHAGLWWPRKSSGDFEGDERRLSKKGNRFLRYYLVEAADKLRQYQPEYQAYYERKYRETKKHQHKRALVLTARKSIGLFVGLLHRNEPYRPQEARR

SEQ ID NO: 237035 - protein, 381 aa, unidentified
MLDQTAHNSVPTVYAAIELSKKSWVVAIVQPAKGQPSIYRIKGGAFSDLVMRLRTATPGGERLLVCYEAGYDGFWLARSLQTEKIDCRVLDPASLQVNRRARRVKTDRIDVLMLVRALIAVDRGDRHVCSIVRVPTVEEEDARRSHRERQRLIRERTAHINRIKGLLFGQGIRGVEPRLRRSRIDFSDLRTGEGLPLPARLRAELKREYARLDLVETQLRATETERDTADAQDPSIEYKRNMLIQLRGVGPASAAILTREIFGRRFANRRQLGSYLGLTPSAYDSGSTTRCQGISKAGNSFARRVMIEVAWLWRKYQPNSALAKWYEERAAGQSPRIRRIMLVALARKLIVALWRYVEIGLVPAGAVPCANNGAALDAAAA

SEQ ID NO: 237036 - protein, 417 aa, unidentified
MAESNDTPEPLSAFVGIDWADAKHDIYLHPADGSTASHEVIDAKPEALHDWILKMREHFSAAGKIYVCLEQSKGALIHQLMQYDFFVLYPINPKTLARFREAFRPSGAKDDRSDADLLCELVRLHTHRLRPWKPDDEQTRKLNAFCQNRRQAVGSAVRLLQQVREQLKLYYPLALELELNTVLACDFLQRWPTLEELRQAKPQTIRKFFYAHNFRRGDKIEQFVQKLQKQTPVTSDRAIIEPAAMQVRLLAAQLRVILNSIPEFDQTIAEIFHSHPDAAIFESFPGAGPQLAPRLLTAFGTDRDRLESAEQMSVISGVAPIKIASGKSFATHKRWACPKFIRQSFHEFAGCSIKFCAWAKAFYQAQRDKNKGHHTAVRALAFKWMRILFACWKNRKPYDDALYTGALKKRGSAFASP

SEQ ID NO: 237037 - protein, 420 aa, unidentified
MVYLERGYNLKELPWSKIVSNSFLFKEACMILVGVDVAKDKHDCYIMTSEGEVLFKSFTIANNMEGFNQLYEKILSVIDNFDNVKIGLEATGHYSYNILGYLLDKGLTPYVINPLHSNLYRKSLSLRKTKTDKVDSRIIASMLMSDVSLKPYSNTLYHNEELKSLTRYRFTKVQERAKLKISISRLVTILFPELEKLVPTLQMNSIYALLYEFPSAHAISKAHLTRLTNLLNTTSKGHYTKDKAVLIREAAKNSIGSNMPAKSLELKHTIKLIKELTSEINEIEEEIKIIMNKINSPILTIPGIGLSTGAQILAEIGDFKNFSSPDKLLAFAGLSPSTYQSGNMYSSNAKMEKRGSKYLRFALFNAAIYVSYWEPTFSQYLKKKRVEGKHYYVAISHVVKKLVRLIFHLEKTNERYSTVI

SEQ ID NO: 237038 - protein, 421 aa, unidentified
MPNIEIGVDSMVKENFIYVGIDLHKETHTAVMIDCYNQKLGEITFPNRPAAFPKLVTKVKKCNTDGKEVVYGLENAYGYGRALAVWLIDKGYLVKDVNTAISHRQAKHRGAMYRKSDSDDAKAIALATLNMLDKLPDACPNDAYWSLGQLVHRRDNIMKQRTRLVNQLHEQLCIAYPSYKSFFNDISRPTALYFWEHYPSRKYLRGKSVEDLRKELVPVSHNRCSTKNCEKILDAVASDKVKNNAYQDARDMVTLSIVSDLQHYDSQLTEVDKMLEQMYKMLGCTLTTIPGVNVITAVKILAEIGDIKRFSNANKLAQFAGIAPLHLSSSGKGKDVATKQGNRRLQATIYFLAIQMVQVSSKGTPRNPVVRAYYEKRKAEGKTSQQALICISRRLISIIYGMLKYGTEYRMPVVENAGENR

SEQ ID NO: 237039 - protein, 459 aa, unidentified
MSRKKATGEQSDGKKVDWKSLEAMHPDAAGIDIGGSEHWVAISPERDAQPVRRFGCFTADLHAMAQWLVEKDVRSVAMQSTGVYWMPVFEILEQHGLKVSLVNARDTKNMPGRKSDIQECQWLLKLHTFGLLNNSFQPTDEIRTVRTLWRQRGNLVGDASSTMQRMQKTLIEMNVQLSSVLSDLSGVSGMTIIEAILKGERDRWKLAAMVQTGVKATAEEIALSLEGNWREELLFVLGQEVELYRFYQKKIADCDRQLRRHLKTFRSKVDVKAQPLGPRVKNRGASKNAPQFDLRTELYRITGIDWTKVDGLDVLTAQTVMAEAGVDLGEFPSERRFSSWLGLCPTNERSGGKILNRRTRKVVNRATVAFRIAASTLIRSQSYLGAQYRRLRTRLGAPKAITAMARKLACLYYRLIKHGQQYVDKGTEYYEARYREQQIRSLAKKAQKLGIQLVIPDVT

SEQ ID NO: 237040 - protein, 323 aa, unidentified
MQGKVSFEEDAMPVVYAGVDVSKEWLDIHLHPLGESRRFSNDKTGIRQLKRLLARHQPKSIVMEATGKFHRPAHRSLWLDGFAVAVVDPLRARMFARACGYLAKTDRLDARFLALLAESLRPPADTPPSPHVEALQELVNARSAAKCDITALQNRSKTATTALLRGELNRLVRRLEQHVERLDKEIERCVGEDPQLCRKAEILTSIPGIGRVTALALMAGMDELGSCSGKQAAMLAGLAPIANDSGARTGRRSIRAGRPAPRRALYMAALSARRYNPALARFADTLKAAGKPAKVILVAIMRKLLVLANCLLAHDRIWTPNPP

SEQ ID NO: 237041 - protein, 398 aa, unidentified
MIQGYDQVDVFIGLDVGKSDHHAVALDRGGKVLYDKGLPNSEAKLRAILADLSTHGRVLMVVDQPATIGALPVAVARNAGVMVGYLPGLSMRRIADLHPGQAKTDARDAAIIAQAARSMPHTLRSIDVDDEQIAELSMLCGFDDDLRSQITATSNRLRGLLTQIHPSLERVLGPHLDHPAVLDLIETWPTPADLATAGTKRITTRLTKQAPRLATRLAKQIAQALSEQSVVVTGTDAAGIVLPKLAAQLVTLRSQRDDVAVKVEELVVDHPLHLVLMSMPGVGIRTAARILTEVTAKDFVSAAHLASYAGLAPVTRRSGTSIRGEHPSRAGNKVLKRALFLSAFAALRDPRSRAYYDRKRAEGKRHNQALIALARRRCDVLFAMLRDGAFYDPQARLA

SEQ ID NO: 237042 - protein, 365 aa, unidentified
MATILEPEPRRVIGGVDTHKDVHVAAVIDTVGRALASESFPTTRHGYRCLLSWLRSHGELEAVGVEGTGSWGAGLARYLTTRGVVVVEVNRPNRQNRRLRGKSDAIDAEAAARAVLNGQATVTPKSGTGPVEAVRQLRIARSGAMKARTAAANQLHSLCDTAPDPIRAQLVPLSLNKKVAIAERWRPGAATTVETAAKRALTSVARRWRALDDEARELDRHIKAILDQIAAALLAVHGVGYETAGQLLVTAGDNPGRLGHEKSFAALCGSSPVQASSGRTNRHRLNRGGDRRANSALWTIVLTRMVSHAPTKAYVERRTTEGLSKTEIMRCLKRYVARELYPHLQAITIATTLEQRHANPAKSHP

SEQ ID NO: 237043 - protein, 348 aa, unidentified
MLIIGCDYHPGFQQIAFVDTETGEADERRLTHREEAEQFYRTLKTRWVRIGMEASGHARWFERLLIELQFELWIGDAAEIRTKRVRKQKTDRQDAQLLLKLLMEDRFPKIWVPDAANRDLRQLLWHRHRLVQMRTRIMNQLHVVALNEGVRRKKALWRPAGRSELESLMLAPWALRRRRDLLDLFDQLTPKIHDLTRALEEEVEKRPIARRLMTHPGVGVLTALAFELVIGTPERFGCGKQIASYVGLVPTEESSGDRRRLGHISKQGNALLRFLLVEAAQVTVRSQPQWRSKFFHLAMRRGRKIAKVAMARKLAVHLYWMWRQGLDYGQFAKLGSHAGEPGNRHGVQ

SEQ ID NO: 237044 - protein, 457 aa, unidentified
MARRSKSKKSGRNPKLKIIHTQAAGIDVGSTFHVVAVPPELSPEPVQAFQSFTGDLYRLANWLVEIGVTTVAMESTGIYWIPVFDILEAHGLEVLLVNARHVKNVPGRKTDVSDAQWIQQLHSYGLLRGSFHPAQEWAALRAYLRQRERLVEYAASHIQHMQKALMQMNLQLHHVVSDITGVTGMKIMRAIAAGQHDPAELATYRDVRCQASEETIREALTGHYRREHVFALCQALELYDSYQARIEACDQEIEASLKSLQDDTISMETLPAARYKKSRQANEPKFEVREALFGVLGVDLSQIHGFGAYTVLKLVGECGMDMSRWPMVKHFTSWLTLAPGNKISGGKVLSSKTRRSTNRAAAIFRLSAVNVGRTNTALGAFYRRIASRAGKAKAVTATARKLAELFYNTLRYGMAYEDPGASYYEERYRDRVLKGLRRRAKEFGYELTEAGTAEGVS

SEQ ID NO: 237045 - protein, 381 aa, unidentified
MLDQTAHNPVPTVYAAIELSKKSWVVAIMQPAKDQPSIYRIKGGAFSDLVMRLRMATRGGERLLVCYEAGYDGFWLARSLKMEKIDCRVLDPASLQVNRRARRVKTDRIDVLMLVRALIAVDRGDRHVCSIVRVPTVEEEDARRSHRERQRLIRERTAHINRIKALLFGQGIRGVEPRLRRSRIDFSDLRTGEGLPLPARLRAELEREYARLDLVETQLRVTEAERDTADAQDPCIEYKRKMLIQLRGVGPASAAILTREIFGRRFANRRQLGSYLGLTPSAYDSGSTTRCQGISKAGNSFARRVMIEVAWLWRKYQPNSALAKWYEERAAGQSPRIRRIMLVALARKLIVALWRYVEIGLVPAGAVCCANNGAALEAAAA

SEQ ID NO: 237046 - protein, 399 aa, unidentified
MNYLGIDISKKTSVIAHYHDDKFQMEFTIQNNKNGYNHFLKYLNKIDQFQLVFESTGIYSRGMVQFCRVNQINYIEMNPLEAKFKTTSLRSWKTDQSDAHKLALLAPSLKSMDSLNTKQDIFFELRERARFHLEIENDQNRLKIMIIELLHQTFPGLEKLFKNRYSIIALNIAEIYSHPDFVQQEDIDTLTSNIFESTDKGLSTQKAENYALKLYKLARESYPNVNQTSFLVKKVQLLIQQLKNSIQQLSQLDKEMVELSQQLECFEVIRSIPGIGELTTAMIIGELGDITKFKSNKQLNAYVGIDIKRYQSGNTQYRDTINKRGNKKARRLLFWVVMNIIRGQRHYDNHIIDYYYKLKKQPNEKPHKTAVVACMNRLLKTIHYLVTNNRLYDYQMSPH

SEQ ID NO: 237047 - protein, 425 aa, unidentified
MNYKQNEKINQVKESTLVVGIDIGSTTQYARAFDWRGIELGKVFPFSNSREGFESFKAWMQHLQDKYKKLDAIVGIEPTGHYWFDLGAYLEDEGILLVMVNPYAVKQTKELDDNSQSKNDRKDPKVIAKLVTEGRYSAPYTPDGVYADLRIMVTNRKRLIREMTQIKNRFARWFAIYFPEYTDVFGDYEAQSSMLLLKKVCTPEAIVELGAEKINKIWRDAKLRAVGMKRATTLCETAKRSIGLKKGSSAARYEMKLLLEDYEYKKAQLDAVMEEIEKLCRKIPESEQMLAIKGIGVITVAGFLAEVGDVRRFESPRQIQKLAGLSLRENSSGKHKGQTTISKRGRSNLRAVLFNAAIPLIATNPEFKSLHEYYTTRANNPLKKKQSVIAISCKLIRVFYAVLANGVTYDAQKMLSDIHRQPQAA

SEQ ID NO: 237048 - protein, 429 aa, unidentified
MKIIYPRVCGIDVHKKFIVAVICISESVEPIYLKKRFSTFHNDLIRFRDWLIQNDCQNVCMESTGKYYIPVYNVLESHISNIVVANPKWVRAVKGEKDDDKDAKWIADLFKFGIVRSSFIPQKDFRILRELTRYKYKLVNMRSSEKNRYQNALTSGNCKLDMVFTDVFGKSASNIIDLILSDNPYTDEDILSKVHKNCKASPDMILNSINGTDLTPVQKSRIELVNDHIKQLSSNIQRLDKLIDLMIEPYEDYISFLCQIPGVSRNSAIIILSEIGVDMNQFTSSRRITSWAGLTPSSNQSAGKKKSVRISRAGVYLKPCLVEVAHAAVKDKNHSYYANKFNKISKRRGKKRAYIAIARKILVAAYHMLLTGEIWNPADLAEVETPVEQRIKYVKNNLKSDIKQLLDIGLTVEELTLMIQQNANTMTAQ

SEQ ID NO: 237049 - protein, 348 aa, unidentified
MSQKSSSAIAVIGIDIGKNSFHVVGHDQRGAIVLRQKWSRGQVEARFANMPPCLVGMEACVGAHHLSRRLKALGHDARLMPAKYVRPYSKGQKNDFRDAEAIAEAVQRPTMKFVATKSAEQLDLQSLHRVRERLVSQRTGVINQIRAFLLERGIAVRQGQRFLRTELPQILVTPPEVLSPRMVRMIEELAADWRQLDARIGRVSDEIEELAKQDAACERLMSVPGIGPIISSAMVAAIGTGDGFGNGRDFAAWLGLVPRQISTGDRTILGKISKRGNRYLRVLFVQAAWVVLVKVRPDRWAGHGLRPWIEAAKKRLHHNVLAVALANKLARIAWSVLANGREFEASKT

SEQ ID NO: 237050 - protein, 331 aa, unidentified
MFPVGIDVSKNTLDLCMLYDGIKGRRKTRNIQNNRHSVENILRWLRLQHCSPEDVHVVMEATGVYHERLATELHDAGFRVSLANPHRSREFARGMGIMTKTDKVDAYMLACYAFLKKPHRWEPPAPEIRYLGALLRRRDVLLGDALREENRLEKYLSTDTPADIISSCRRMAQLLREEVSNIERQIKAHIKASPALRRDYTLLTSIKSVGPQLGMHMLVVLRSHNFVSAEQAAAFLGVVPIEKRSGTSVRRRPRMSKIGPPQLRAKLYMSALCGKIYNKRMRNIYDEMCLRGKPKMVAIGALMRKLVHWCYGVLKTGTVFNDEDLKPVLST

SEQ ID NO: 237051 - protein, 389 aa, unidentified
MKETIYIGIDIAKYKHDFCIISSTGEVIVQNNSFENNKKGFQLFFSYLKPYNKADVQILFESTAHYSMNLELELIDQGYSFMKMNGLIIKQFFKAQTLRKTKTYKADAFALTHYLMANTYKPNSNRLYHIYSLKSLCRTRDRLVKERSKFKVYITNELDKSFPEIKKFFDNKISITLLYILEKYKNKNKIALMKDYDSIRKVSAANFSFTRFLLLKQLAKESIGHPTETSDFLIESYVKSINCLSEQIDSIEKQIIEAVRKLDTHILSIPGIAEISAGSIIAEFGDIKNFESPEKMLAFAGLEPSIRQSGTLSTEGHMVKHGSGYLRNAIMRVVNSLVMHDQVFNEYYNKKRDEGKHHLVAQSHVAKKLIRIIYTLEIKDIDYDINFVK

SEQ ID NO: 237052 - protein, 426 aa, unidentified
MLNSQINKIQAITSDTLIVGVDIAKNIQWAQFINFRGIEVSKHICFENNYSGFNSIMEKIEEIKSKNNFLSVIVGMEPTGHYWKTFATFLHNNGIKVVQVNPYHTKKAKELDDNSQTKSDKKDALVIAKLIKDGRYSAIYFPEGEYANLRNLSNTRLEVSRLLNICKNRIHACVDEYFPEFETVFKSFIKGKVALHILKRIPFPTDILGLTLEDIISVIREAAKKSVGKKKAEELIRAAKVSIGVKVGLEGARIRLNNLLEEYELYHNQLEKIEKEMAQELEKTGYKDILTSIPGIGIISAASFIGEIGDPKRFSNPQQIIRLAGYNLVEDSSGKHKSKTMISKRGRKILRTILYKISLIVVCKNQEIKLLYKYLITRKENPLKKKQALIVISGKMVKIMYSLIKKEEVYDKEKVLGIYRKQQIVA

SEQ ID NO: 237053 - protein, 343 aa, unidentified
MEQYAGIDVLLESASICVVDSAGRIVREAKVACEPEALIAWFSKLGVSMTRIGLEAGPLSQWLYARMREAGLSVELLETRHVRDAFKAMPVKTDRTDARGIAQLMRLGWFRSVHCKSLPAQELRAILTARKLVQSKRHDLEMSLRGILRGFGLKVGQATPRNFEARVRELVDGHPTLLVVADAMLLARAVLVEQLGKLQKRLVSLARQDMRARLLMSTPGVGVLVALTYAAAIDDPARFRSSKAVGAHFGLTPKKYQSGETDVTGRISKIGDASVRTALYEAANVILTRPVRGSSLKSWAMRVAKRAGMRKAKVALARKLAVVLHRMLANGSVFVAGKAAAKA

SEQ ID NO: 237054 - protein, 474 aa, unidentified
MMVSKNPSSKLILVRSEEISVAPCDTGEHVKELVGFAPAPLSAPLDDSVSQAEAVPERRERMQIVYERCCGLDVHQKTVVGCRLLSQPKGTVEKSIRAFATTTNGLRELDHWLAEGHVEQVALESTGIYWRPVFNLLEGRYEILLVNAQHMHAIPGHKTDIKDSEWIADLLRHGLLKASFIPPKPIRELRDLVRTHTQLMQERNRHINRIHKILETANIKLSSVVTDIVGKSARRMLEALIEGESDPVELAQLARGRMRPKIALLQQALQGHLEPHHRFLLRETLTHLDFLQQRVGQLEQEVAERLSPFEKSLALLMTIPGISRRSATILISELGTDMTAFPSAAHLASWVGLCPGSHLSAGKRRNGKPTKGNRYLRSVLTQIAWVLTRMSDNYLSAQFHHLRPRLGEKKAVVAVAHSVLVIVYQVLAKGEPYQDLGPDYFRRQDKEQQARRFVRQLETLGYRVELAPQEEVTT

SEQ ID NO: 237055 - protein, 291 aa, unidentified
MSHKLNSGIAVIGIDIGKNSFHIVGHDKRGAIVLRQKWSRGQVETRLANLPPCLIGMEACVGAHHLSRKFQMLGHDARLMPAKYVRPYSKGQKNDFRDAEAIAEAVQRPTMKFVATKTAEQLDLQALHRVRERLVSQRTGIINQIRAFLLERGVAVRQGLRFLRAELPRILATPCDVLSPRMVRVIEDLAGDWRRLDERIGSLSSEIEVLARRDAGCERLMSVPGIGPIISSAMVAAIGTGDAFTKGRDFAAWLGLSPSRSRPATAPSSARYRSAAIATCAFCSFRPHGLY

SEQ ID NO: 237056 - protein, 355 aa, unidentified
MKYYTSTTEFNCGIDLHAHQMYVCLMDRQGKKLLHTNIRNNDFDYFLKLVEPYRHDLTVCAECMFGWYWLADACQASGLTFVLAHALYVKAIHGGKNKNDRIDSEKLTHLLRSNLIPPAYVYPADKRPLRALLRQRTFFVWQRSDLLARIQSHQLAHNRPPIRQTRSNRDPWEQKLLAHEDNPLRQLALKNELTMIRHYDAQIAQLEEQLHRLTKESAPREYALLQTVPGIGEHLGMTILYEIGDIHRFPTVKDFLSYCRLVKGTVASAGKIKGLRGAKLGNPYLRWAFGESAVIAKRDHHIIGPLAQRLEAQMNGNKFKANTVLAIKIARAVYFMLKNKTVFDPQRLVAALTNK

SEQ ID NO: 237057 - protein, 421 aa, unidentified
MDTHLIERHLAVDLHKAYLVVGGVNPQQEVVLSPRRMELSAWPKWAAANLHASDVLVVEATGNAWTFYDQTVAHVGRVLVANARKVALIAQARVKTDKLDVLKLARLSVANLIPEVWVPPQYVRELRGLLSHRQQVVKRQTMLKNRLQSLLHQQQVPQPAGDLFAAKQRDWWEGLPLNPTQKLQMRHDLEGLTHLHTQLQEIDDELRRLSTSAPWAEHVTYLMQLPGIGLIHAMTLLAAIGEVTRFTHAKQLVGYSGLGAGVHDSGQTHRNGHITKEGRRDLRRVMVEAAWIAVETHPHWKAEFAHLTHHLPKHKAIVAIARKLLVVVWHVLSERAADRHADPDMVAFKLMTWCWKLTPEQRGGLTTRQACPERSRRVVRYHLLRLQLGDELTLVIRGGARHLIASTEEVLALKPEREVVT

SEQ ID NO: 237058 - protein, 360 aa, unidentified
MHATPKSASVTTVAVDLAKDVFELAFADADAHILERRRLTRTAFARAFANHPPLRIVMEACGSAHDWARRFIRLGHAVELLPAHEVRPYVRRNKTDRTDAAGLLEAARCESIRRVPVKTPEQQGIQGLHRVREFHKAQRTAAINLLRGLLREFGVVIAPGSAKVRPAVLAALEDADNELPMTLRHTLKTVLDAISADERAMAAIEERLQVFAEGDLRSQRLQRAGGVGLITATALGASVGDFDRFPSSRHFASSLGLTPREHSSGNTRRLGRVTKRGDLYLRMLLIHGARAMLRSAKLAKKKQQPLDRTRAWALALSERVGHNKAAVALANKQARRLWAAEHHRSRFDPDHISVHHTLTP

SEQ ID NO: 237059 - protein, 585 aa, unidentified
MLPPPPSAPPAPRRFGVGIDTSRYGHYAAFLRDDLQPAAPELPFAESAAGYAQLRRQLDRLAQQHGPAHFVIRVDSAGQYADNLLHFLHGLGTPSAATPGGAAPWRASLSCGDPQRNKDYRAAIFGSQKSDPIEARAAARFALTERPKSDLPLALELRTLRQVAGRLQTVVRQRTRLRNQFHHLLALTFPELALLTKDLAAGWVLELVHRYPTAPLLAAASAADLAAIPYLPEQHRAALLEHARHSIGSLRGAVAEELVRDQVRQLRDSAARQKRLENLLVTAYRALPRANQLDTIAGIGPVTAAVLTAFLVDIDRFATPGKLVAYFGVLPIEVASGVDRDGQARAPRRWVMSRRGNDLVRRYLWMAALSALRCNPAVRALYARVVAKHPQQKAIAVGHAMRKLLHLVFAIWKSGRPFQADWYPWEAGATRVTSDRPLSTDGQAAGHKADTKPARSVVAAACTDTVGEAEAIGESTAVDFAHLKRQLPLARALDQLGLAERLRGSGPQRRGPCPLHRGDARGRTFSVNLDANVFQCFEAQCRQKGDVIDLWAAVHGLTLRAAALDLVRTFGLEPVRRTGTEKRNG

SEQ ID NO: 237060 - protein, 353 aa, unidentified
MPVYVAVDFHAREQTISWCDTADGEVHRTKLRHQHDDVRKFYEQFSGEVIVAFEASGYSAWFEQMLAELGHTVWLGNAAEIRRKAPRKQKNDRRDADLMLDLMMKGDFPRVHSFSAESRTVLRQLRYRHKLVKVRTIAKNSVHAIGINAGLPLRGRLLTQAGIEQLQALPLSPVLAQQRDEWLALIRLMNKQIGAVEESLGQRAKDDAAVDLLRTHPGIGLLTALALRYTLDPIARFTSTRCVVGYAGLDCVEDQSSERRRMGSISKQGSRLLRFLLNEAGQTAARKDPQLKQFYRRLLRRRDKPKAKVAVARKLLVRSFIMLRDQIDYAEFVRRGVAARVARETHSPKVTDL

SEQ ID NO: 237061 - protein, 345 aa, unidentified
MQAVTIGIDLAKHVFQVHGASAGDKVVFSKPLRRAQMLPFFARLKPCLIGMEACASAHYWARELKKIGHEVRLMPAKDVKAYVKRNKNDAIDAAACCEAVRRPVVRTVPVKTPEQQARLMQHRVRDLLIRQRTQAINALRSHLAELGIVAAQGYDGLKTLLSIVADESDARLPEDGRASLSALVNQIAACQAEISAIEKRLLAQHRKNEDSKRLETIPGIGIIGASAIVATVPDASVFKTGRDFAAWIGIVSREDSTGGKQRLGPISKQGNRYLRRILILGALSVVKRARCCPENYPWLTKLLARKPAKVAAVALANKMARIAWAVLTKKDTYHVPQIAAALIPA

SEQ ID NO: 237062 - protein, 345 aa, unidentified
MDYYAGIDVSLESASLCVVDATGRIVREAKVASEREILIGWFHALGLAVTRIGLEAGPLSRWLYAGMRDAGLPVELLETRHVRDAFKAMPVKTDRNDARGIAQLMRLGWFRPVHCKSLPAQEVRALLTARKLLQAKNHDVEMSLRGVLRGFGLKVGPTTPRTFPGRIRELVVGHTTLSTVAEALLAARGALFEQWQKLEKRLRSLAREDERVRRLMTAPGVGTIVALTYASAIDDPARFRSSKAVGAHFGLTPKKYQSGETDVTGRISKIGDGGVRTALYEAANVILTRPVKGSTLKSWGMRLAARAGMRKAKVALARKLAVVLHRMLADGTSFLADKAAVAAAR

SEQ ID NO: 237063 - protein, 350 aa, unidentified
MEIYTIGIDLGKTVFHMVGLNVRGEAVVRKKFSRTQLLRFTAKLRVELIGMEACGGAHFLGRALREQGHEVRLIPAQYVKPYVKTNKSDYIDAEAIAEAVGRPTMRFVPIKTDDQLDLQSLHRVRERWVMRRTAVINQIRGLLFERGITLRKGRCHLETALPDILEDADSKLSSAVRLLLVQLKMELAQLAMRLEEADALIQKTAQESEVCRRLDAIPGIGPVTATALLAAIGNGGAFRKGREFAAWVGLVPREHSTGGKQKLLGISKRGNGYLRRLFVQGARAVLQFREKQSPGLRAWLAQLTSRTHYNVAGVALANKLARIAWAVLAKGEVYRPPLLISSASADLACR

SEQ ID NO: 237064 - protein, 424 aa, unidentified
MKVTYQTCCGVDVHKSFLVATIVKTTGGIEPSYQKKRFSTFNNSILEFKQWLINNNCHDVCMESTGKYWIPVFNLLEDQINVTIANPKWVKAVKGNKDDTKDSKWIGDLFRLGLVKGSYIPCKAIRILREYTRYRYKLVSCRSSEKNRYQNALTVCNVALDSVVSDIFGKSSTSIIDYLLEQSGTTINHEEIASKLLRRLKSKEDAVIESVEGYQMTDAQKYRVRLVRAHMDYITAEINDVDKMIENMISSNPDFENAIQFLCTIPGVKRDSAITIISEIGTDMSQFSSSKRLCCWAGLTPGSNESAGKKKSVRITRAGVYLKPALVQCAHAAVKSDKSPYYKKKYESLVKRRGKKRSIIAIARMILTAIYQMLSTGEQWNPSDLYKIDMPVALVEKQKAKAIKQAKKLLQREGLLPPDEPLAS

SEQ ID NO: 237065 - protein, 452 aa, unidentified
MMEQEMATSKARVARVGRSKLEVMHPDAAGIDVGGSMHYVAVPNHAADETVRQFGCYTVELNALADWLSECGVKIVAMESTGVYWIPLYELLERRGFEVMLVDARHVKGVHGRKSDVLDCQWLQQLLSYGLLRAAFRPHDQFCALRELNRIRGRTLRDQGRSVQHMQKAMTLMNIQLGQAISDVAGVTGQKIVRAIVAGERDPQELAAYRDRRIKASEEEIAASLEGTWRAEHLFALKQALATFDFCAAQLQDCEGEIEQVMQQLHKYSGEPAKGKRRGRAKNAPKFDVREQLFKMCGVDVTQVDGIDVSTALSIISETGTDMSRFASDKHFTSWLGLCPGTRISGGKVLGSGTKHSVNRATQAFKQAAAALRTSQSALGAYFRRLCARMDKAKAVTAAAHKLARLFYALLTKGQEYVDQGQLYYEERYRQRVIHNLQRKASKLGMSLVPSA

SEQ ID NO: 237066 - protein, 354 aa, unidentified
MTILAQIIDAAVGVDTHRDTHEAEITSPTGAVLATTQVPNTSAGFIRLLDWITEHAPGPNVVVAVEGTRSYGIGLTRSLTAAGLTVLECEQPTTTARRGKGKTDAIDAHLAALFVLRQDDRHLPTPRADGIREGLRILLSARSELTTTSTAQTNRLRALLLTGDDEDRDTARRALTDTALAGLARRRRPTATHPHERVRHGELRRLAVALREASRALKANRAQMLELLHEIAPGLTDRPGVGPVSAAQTVVSFSHPGRVRNDAAFAALAGTSPLAASSGQRTRHRLNRGGDRALNRAVHTIALTRMRSCPRTRSYVARRTAEGKTTREIRRILKRYITRELYRALSHPPELDNT

SEQ ID NO: 237067 - protein, 387 aa, unidentified
MQPAHIQDFTLDDQTLTASLELASKNWKMALQDGMHRSPSEHKAEQEGAADRLEEAIGLIETTRREWGLPPSCRVVIVYEAGQDGFWISRALQKRGYEVVIVDPASIPVERQARRAKTDRLDAIRLLCCLRGWLRGERDRLHAVRVPELEAEEMRHLMRDRGLLQKEVGQHRDRIRKLLRTVGCWVRVGPAFAGQLERGEVVCHDGAALPPCLRQRLMRECERLDLVTRQLKELEAALPEQLPEATAQSVATLQRLRGVGQIGAHRLVLELFWRRFDNARQVGSCVGLVPQPYDSGQSRVDQGISKQGNRRVRALLIEMAWMWLRYQPDSALTHWFARRTTTGAGDPSAGKRGKRVAIVAVARKLVIALWRYLKDGVIPDGAELKYG

SEQ ID NO: 237068 - protein, 434 aa, unidentified
MNCNTQNAKIKSITEKTLIVGIDVGSETHYARAFDWRNIEFSKKPFAFSNDEAGFASFKAWLEDIKEKFGKTIVLPGMEPTGHYWFNLGAFLQDNGMKPVHVNPHHVHKSKELDDNNPSKDDRKDPKTIAALVNEGRFNYPYIPTGVYAEIRSLYGLQVMTQEALIRVKNRIARWLSIYFPEYKDVYRSCDAISGVMVLKVCPLPADIVMLGADGVNKIWRDAKLRAAGMKRARPLVEAAKHSVGSTESPEAAKYEMELLLGDYDVYTKRLEELTEKIEVKLEEIPYVDKLLEIKGVGKKIVSGLIAEIGDISRFDNPKQVQKLAGYAIVACSSGKHKGESHISYRGRKRIRYVLYEAAISLIGQNAEFKEIHRYYLTRQNNPLKKMESVIAVACKALRVFYAILTKGVSYDGKFMLESIRYPENQVLGNRIVA

SEQ ID NO: 237069 - protein, 355 aa, unidentified
MNSIKYVGLDVHRDTISVAVLNAEGKLVMQLVIATQASAILDFLQGLRGTLHVTFEEGTHSGWLYDLLVRRVAYLVVCNPRKNALLKAGSKSDAIDARKLAELLRAGMLSPVYHGQNSTAAVKHLGRSYAALTEDTTRIMGRLKALYRSQAIACAGKKPYGSRQRDEWLAQLADNGLQRRARRLYQELDLLQQLRREARQDLILECRKHGEAKLLRTVPWLGPIRAALLIGRVQTPHRFRTKRQFWAYCGLALETRSSADYQMVNGQLERRKKPVFIRGLNRNHNHDLKNLFKSAATAAGGSDGAFGVFYENLLKKGMRAEMARLTLARKIAAITLHVWKKGEAFDAEYVKPQAA

SEQ ID NO: 237070 - protein, 408 aa, unidentified
MEQNIVFGIDVSSHSSTVCVVIDRIKQGKPFTISNDSFGYQKLLDHLNRYLITPLVVFESTGVYSLSLQAFLEENHIKYLKLNPLKAKKLMDNNLRHNKTDKLDAYHLALIEFCAPQKLREPQPKEYHEMQNASRYFEELTKNLIVAKNQLHRNLQSTFPQIESIMATPTGKIYWTIVSLFPHAQYVLESNETRIYQELLSIPGIGKQRARYLTARLYSLAEQAYPYDSKDSITVRAIQRNISDLFSLSEERDNVINYLEKLAKIVNSRALTIYQSIPGIARTTALRLIAELGDLRRFDTSAQIDAFIGIDPGRYQSGEMDNHLGITKHGNHIARKILYRVIGQMESTKLSQPCHITDYYDNKKQSSHSRGYKKIAIASVHKLIRTMFALIKQNQLYDYNVATKNKRL

SEQ ID NO: 237071 - protein, 415 aa, unidentified
MMSMEREVVCGADIHKRFLVATILSRDGQKIQSRFETDLEGLLDFRDWLLAHGCQKLAVESTANYWQPIFQVVANDIDFVLANAYQIKHIPGRKTDVLDSEWIAELCLNDLISASRIFSGEDRDLRALTRTRENYVKMRSQIKNRIHHELEYACIKLSSVISDIFGKSGIRIIRGILRGESIENILNTISAKSIKAKREEIRKAINANISPVQASLIGQMLNSIESISRDIESIDRQIQHIMSRKQEDLDIAMSIPGMGAVSASTILAEIGNFADFKTGEQLAAYCGLVPSVYQSAGKQINGHITKRGSPHVRRMLIEVAHAVSRTKSNSKMKRFYTKIKAKRGSKVAIVALARKIVCILHHLIICKERFVDSESAKPKRNNRVGTSSPTEINISDAMQILAKAGYTIQREKRGG

SEQ ID NO: 237072 - protein, 409 aa, unidentified
MKLFVGLDVSSQDAKVCFLNGDGDRLQAFTITNDLPGAITLKEKILDTASRSTCKTIKIGLESTSIYSYHPAMFLHNDKELRTYGSQVFMINPKQIANFKKSYSEMDKTDAIDAFVIADYVRFGRHTMSIVKEEQYIALQQLTRSRYQLVHALTKEKQHFLQHLSMKCSQFSQDVNSSVFGNAMMELFLEQFSLEDLIQMPLQELALFLQEKGRNRFGNPEEVAKSIQKAVKGSYRLSKVVEDSIDLLLSTSIRIMRTYQTQIKEIEKGIESLMSTLPQTLESIPGIGPVFAAGIVAEIGQIERFTDETKIAKYAGLFWKKYQSGRFTAENTSLSRAGNQYLRYYLVEAANSVRRNVPEYRDYYVKKAAEVPKHKHKRALVLTARKLVRLVDALLRNNQIYAFGRSADR

SEQ ID NO: 237073 - protein, 316 aa, unidentified
MAKDGREVFVGIDVGKARLDVHIRPLGQHFVVGNDEAGLAELAMRLEAHAPELIVLEASGGYERLAAITLIERGLPVAVVNPRQTRKFAAALGQLAKTDKIDAAMLAHFAEAIRPAARAVTDDAIDRLQKLLARRRQLVVMRNAEKQRLGKATDPITQRSLKAMIASLDKQLGVIDKAIGRLIEADPALAEKLARLKTVPGIGDVSARTLLAELPELGLASRHEIAALSGVAPISRDRGRFRGKRRIQGGRVEVRAPLYMATLVAIRHNPVIRPFYRRLREAGKPAKVALVACMRKLLTMLNAMLRDRRCWAPAEA

SEQ ID NO: 237074 - protein, 344 aa, unidentified
MREVCTIGLDIAKNKFQVHGEDKQGKKMFNKQLSRSGVLTFFAKLPVCLVGLEACGGAHYWAREIEKFGHEVRLIPPRQVKPFVINNKTDAVDARAICEVVRRPTTRFVRVKSVEQQNLSALHRVRERYVGNRTALVNQMRGLLQEEGVVLPQGITHMRSDLSPILSDESTNLSRPLRNLIGNLLAELRMWDEKIKEIEENLKLMAKADPNCTRLLKIPGVGLLTATAVVAHFGDAKQFKNGRQFAACLGLTPREYSSGGKQKLLGISKRGNTYIRKLLIQGARMLCIWWERTIATPDQWRKLWLQQVIQRRGKFVAAVGQANKTARIIWNVLARGVEYSTAKF

SEQ ID NO: 237075 - protein, 344 aa, unidentified
MQVKTIGLDLAKNIFQVHGVDARGVTMLRKQLRRDQVLTFFARLEPCLIGIEACGGAHYWAAKLTALGHRVKMMAPQFVKPYVKTNKNDSLDAEAICEAVARPNMRFVPLKSPEQQSVLSLHTVRESFVHARTAQANQIRGLLLEFGLIVPQGMRHIYARVPDLIEDANNELPGRFRLLIDRLLQHLKELDRQVHELEREIELWHRCSEVSRRLETIPGIGPLTASALVASAGDPGNFKNARQFAAWIGLVPHQNSSGGKTQLLGISKRGNVYLRTLLIHGGRALVQLAKTRVDRADTWLGKLTARRHHNIAAVAMANKNARLAWALLATGRSYEPMHMPARSA

SEQ ID NO: 237076 - protein, 343 aa, unidentified
MGEVSTIGLDIAKSVFQIHGVDADGAVVIRKRITRAKLLEFFAALPRCLVGIEACPSAHYWSRQLQALGHTARLLPPSYVKAYLKRSKNDANDAAAICEAVMRPSMRFVPAKSEEQQSGLMLHRSRQLLVCQRTMLSNAIRGHMAELGIISAKGRNGTAELLEIIADEQDGRIPAAARFSLEVLARQYSAVRVEIAAIEKRIHAWHRSSEESRRLEEIPGVGPIVATALVAEVGDWKVFSSGRSLAAWIGLVPRQYSTGGKERLGGISKQGNRHLRWLLVAGAMAVIRYARQHGTKRLWLVRLMNRRPIKVAAVALANKIARMAWAMMVRGERFKEPKSLLAA

SEQ ID NO: 237077 - protein, 423 aa, unidentified
MDTYDDSRLKEFRQLKYNIRGSREHLVVGMDISKDRHHAFFGIPTGKTLLRRLVFDNTREGFESLGFHADTLRTQHALGKVVFGMEPTADYHKPLAEHLINKGCMVVLVGGSAVKKNRELLDGRWDKNDTKDAANVADLITQGKCLFYDLPSPDVRDLRSLLSLKRRLKKEEHGCRVRVRNHLIAQYFPEMDVYFGYSEGPAIAKWCLDPKEITSMPFEEFERMVSSRNGGERQRVRLWEIYKKAASSIGCEVTPGVPFEAKTLLDELQELLGMIQDTDKKILEVCSRFPEYASLLSIPGFGPDVSAKVLGAIGNPHRFENERQVLKLAGLDLSKSQSGKSEGVPVISKKGKAGLRYGLYQAAFIASTRNPRLMAYFTHKLKGRERERGILTNRRVKLSAKMLVIAWTLMKKKEMFDPGCITE

SEQ ID NO: 237078 - protein, 411 aa, unidentified
MEMVHGRCAGLDISKKDAKVCVRVAGAGRRKTTETVTTWGSTTNQVLALREHLIAEQVTCAVMEATGDYWKPFYYLLEDAGFEVMLVNARHVKNVPGRKTDVADATWLDQLGAHGLVRGSFVPPEPIRQLRDLTRARTAITRERGREVQRLEKLLEDAGIKLSSVASDIMGVSGRLMLEALIDGQHDPATLADLAKRRLRSKIPALTEALTGRFTEHHGFLARVHLDLIDRHTVAIEEITARIEVVIEPFQGFRDLICTIPGIGTLTADVIVAETGADMTRFPTAGHLASWAGTTPGHNESAGRHKSTKTRPGNPYLQGALGAAAMSCAQNPGTYLGARYRRIASRRGPMKANVAIQHTMLIAIWHMGRDGTLYDDPGADFFTRLHPERTKNRALHQLEAMGYQVSLERAG

SEQ ID NO: 237079 - protein, 357 aa, unidentified
MKIVGCDLHARQQTIAMVDTETGEFVERALSHEGNALREFYGALEGPVVVGIEATGSMQWFLELLQELGIQCRVGHPAKIRAKETRKQKHDRRDARLILELLIEDRFPEIWMPSIEERDLRTLLRDRHQWVKIRTRVQNTLQAMALNHALRRGRGLWTATGQKALQALSLPSYTSQRRDELLRLYGQLQRRIQELDGQVEKQVQQRPQALRLLTHPGVGPVTALATEVFLGDPSRFANGKNVASYIGMIPCEQTSGKRQRLGKLTKEGNSLLRYLWTEATIHAVRKDPELKRFYRRKLIQKGMGKARIAAAHKLGIRLWIMLRDQIDYKEFCRRGQQRQCGEAHAGMPNYDSGPALQ

SEQ ID NO: 237080 - protein, 402 aa, unidentified
MRFFVGIDWASQAHAVCVLDDAGRRHWQGSVPHTAEGLTELLGRLRRFLHRGPLRVALERPSGLLVDTLVEAGVEVVPIHPNALKASRPRYSAAGGKSDPGDAFILADLLRTDGHRFRPLRAPSDDTRALRALVRGRDDLVAQRVALANQLRALLERFWPGAAALFADVDSPIALAFLSRYPTPLSAARLGEKRLAQFLGQHAYCGRRPAAALLARLRAAPASQVGEAEAEASGEVVRALVAVLTPLGAHIQQLSAAITAALPQHADGPLVQSLPRSGAVNAAQILAELGDDRARFPTAEQFAAEGGLAPVTHASGTHHTVVFRWACNKRLRRALTTFADNSRHASPWAALVYQRARARGCRHPHAIRILARAWARILWRCWQARTPYDVGRHRAAQALAAA

SEQ ID NO: 237081 - protein, 416 aa, unidentified
MNEFTDQPFTAYVGIDWADRKHDICIQAAGSLKREFAVIPHKVESINEWVDSLAQRFGQPIAVAVELSKGPIVYALQKFDCFVIYPINPLTLAKYRQAFTPSRAKDDPTDAEFAVDLLLRHSGRFKPLQPQSMEMRALSSLVEQRRSLVNDKIRITNRLRSAFKHYYPQVLDWFDHIDTPLFCDFIRHWPTLKQVKRARKNTLESFFNQHNMRFAQVLADRLEAIKTATPLTTDDAIIIPYRLQALVLIEQLSVTLEGIKQFDQEIENIACKHSDYPLFSALPGAGPSLAPRLLVAFGEQRERYPSAADLQKYAGVAPVTERSGKKHWVHWRWQCPTFLRQTFTEWAAQTINKSFWAGQYYRQQRAKGCTYQVAVRALAFKWIRILYRCWQTGKPYNESTYLKALEHRGSPLLKQA

SEQ ID NO: 237082 - protein, 319 aa, unidentified
MNDSTFTDFIGIDVSKSKLDIALGISGEYWREDNDSEGIQHIVERLKTLPSPLVVVESTGGLETALITELFTVGIAFSLVHPVRVRQFARSIGLLAKTDKLDAHLLSLFGEAIKPSVTKLPGEAEQKMNACLVRRRQLLDMLVAEKNHLCSTCLALRPKVEEHIDWLKSEVEKLDKEINDQIQQLPRFKEKEEILRSAKGVGPILSAKLISALPELGQLDRKKIAALVGVAPFNRDSGPHRGKRRIRGGRIDVRGVLYMSIIAAVRYNPVIKSFYLHLIEAGKLKKVALVACMRKLLTILNAMVRDMRPFNATLYQIRA

SEQ ID NO: 237083 - protein, 464 aa, unidentified
MEQSRDDKSESDRGIEEPGFPVLRRNVAGIDLGSTSHWVCAPTVYGQGREVKVFGATTPELEKMAQWLEQRRVESVALESTGVYWIPPHEVLERQGFQVVLVNTRDLARVPGRKKTDRVDCQWIQRLHSCGLLRGSFRPPEQICMLRTLIRDKGNLVAERADWIQRMQKSLDQMNVRVHRAVSDIDGTTGMAIIRAIVAGERDAAELAKLRDPGCRNSREQIAEQLSGHWREDHLFSLEQGLKMHDAITGRIQVYEKEILRRLGEMERAEYREKQAPTLQNKNKAKMIRQRGEEPMRQALYRMSGVDLTAIDAVGVGAVQAVLTEYGPDLSCFPTEKHFVSHVTLAPKNAVSGGKPVKKRKKRGSASSRVAAALRMAALSLRHSQSALGAYYRQIARRIGADVAVFATARKLATWIYRLLRWGHPYVDEGAAAYEKRYQEARIRRLIATAADLGYELAPKATQP

SEQ ID NO: 237084 - protein, 383 aa, unidentified
MSSSQSTTARSIIYLGMDVHKDSITIAVLPAGAKTPTRIERLPNDPLKLKRFLDRLGREGELCACYEASGAGYVLHRALREWGYACDVIAPSLIPKRPGVQRKHDRRDASELARLYRAGELTPVRIPSEAEERVRDVVRCRETFQREILKSRHYILKFLARRGLVFREGTNWCTPHLRWLQHLTTEQSPLAPADRLVFREYHALLEYKLQRRDDLDREIARLAELPTLAPMVRRLQCFRGIALQGAMVLATEIVDWRRFERPTQLAAYLGLVSREDSSGDRERKGSITKAGNSHCRHVLIQAAWSYHHRPAVSMDLKRRQTGQPPAVIAHAWKAQHRLHQRYTHLAYRKQRQIAVVAVARELVGFLWAVMQDCSSIASVEVAA

SEQ ID NO: 237085 - protein, 365 aa, unidentified
MKHVTTYVGIDAHKKDLFIAMLIGHEATPVTWTVPNEPNAVRRFVRRLERDAPGPVRACYEAGPCGYVLQRQITTPRVSCHVIAPALVPRKPGERIKTNRRDARKLAELLRANVLTEVRPPTPEEEAVRDLCRARDDAREDLQRCRHRLGKFLLRRGLHYNGRNWTRAHRQWIDSLAWTNAAERVLLEDYQLAIDHVEARLIELDRRLVEIAEAAPYREPVGWLRCFRGIDTLTAMLVLAELHDFRRFKSPRALMAYLGLVPGEDSTGEKHRRGRITRTGNALVRRLLIETAWHYQHRPSVGAALMWRRKGQPGRVIAIADKAQQRLCRRFRRMAEQHKPAPKIAVAVARELAGFLWAALQAPAA

SEQ ID NO: 237086 - protein, 424 aa, unidentified
MKVTYQTCCGVDVHKSFLVATIIKTTAGIEPSYQKKRFSTFNNSILDFKSWLLENECHDVCMESTGKYWVPVFNLLEDQINVTIANPKWVKAVKGNKDDTKDSKWIGDLFRLGLVKSSYIPCRLIRILREYTRYRYKLVSCRSSEKNRYQNALTVCNIALDSVVSDIFGKSSSSIIDYLLEQSGTTINHEEIASKLLKSLKSKEDAVIESIEGYQMTDAQKYRMRLIRAHMDYITAEINDIDKQIESLISSDPDYDKAIRLLTTIPGVKRDSAITIISEIGIDMSQFCNSKRLCCWAGLTPGNNESAGKKKSVRITRAGVYLKPALVQCAHAAVKSDKSPYYKTKYESLVKRRGKKRAVIAIARMILTAIYRMLSTGEVWNPSDLYKIDMPAPLAEKQKAKAIKQAKKLLQKEGLLPPDEPLAS

SEQ ID NO: 237087 - protein, 366 aa, unidentified
MKKTNTMPIRRARKLQDQQLTIGLDLGDRSSFYGVLNGAGEVIVEERVTTSPEAMKQTFGKMPPSRIALETGTHSPWVSRLLSEPGHEVIVAHARNVRLIGESRRKDDRLDAQALARLARIDPQLLSPIQHRSAQAQADLSVIRARYALVRARTALVCAARGLTKSFGERIRGRNPKGFKPATGETLSPQLQVALGPLLGALETITARIREYDAQIEELAKESYPEVALLKQVKGVGTLIALTYILTLEDPRRFRKSRDAGCYVGLQPGRRNSGQSEPQLHITREGDSYLRMVLVQGAQHILGPFGEDSDLRRWGLKLAEHGGKSGKKRAIIAVARKLAVLLHHLWISCEAYEPFHNTQKEKLAAA

SEQ ID NO: 237088 - protein, 427 aa, unidentified
MAHTTIIGIDVSKNFADACAISAQGEVMLETKIFYDTVGLQHFLKQLDQLAGEQRHCAVAVMESTAHYHRILETYLRRSGIDVVVINPLQSGSMKNLEIRKIKNDRTDAKRIAQLYLFKMLRGNAVDSILVGALKDLTRQRSDIISERVKFSNKLTALLDQGFPGFRKVFSSLRTKSALAVLARFPGPEEICGANRIDIAKTIAFAAGRNTESAYAVKKANHLLDIAEQAMQLQVERGSFKTLITLFAEMLIQIQRAADQIERQIFETAQCDRTFWSQVELLTSIPGIGQYAAVVILAEIGDFSRFKKAKQLVAFAGIAPAVKQSGTSAYKHNKISKRGSPYLRKILDTCTHVAAHKGRNQQPANPILAAYYEEKRSVKPANVAQCACIHKMLGYIFSVLRNQKPFELRSPEEHLALMRSKTVDIAA

SEQ ID NO: 237089 - protein, 458 aa, unidentified
MQRNRSKPKTQRTMPMVHANAAAIDIGATMHMAAVRADRTSEPVRSFGTFTTDLHRLVDWFTECGVETVVMESTSVYWIPIFELLDARGFTVFLVNARDAKHVPGRKTDVSDAQWLQRLHSYGLLRASFRPKGQIAELRAYVRQRERLLEYGASHIQHMQKALTEMNLQLHHVVADITGATGLRIIRAILAGERDPKVLARLRHYQCHASADTIEKALTGSYRSEHLFALEQALALYDVYQEKASACDIRIEAVLKELSIGRGPRSDPLPSPRRHRATQANGLAFDVRAALFALLGKDLTQINGLGPYLSLKLIAECGDDLSAWPSAKHFTSWLGLAPSNKISGGKVLSSRTRRCGNRASALLRLAAVTVGRTDTALGAFYRRLSARIGKTKAITATARKIAVLFYNALRHGMEYVDPGASFYETRYRARVVDNLHRRAKAFGFVLQPIEPTPSSVVS

SEQ ID NO: 237090 - protein, 443 aa, unidentified
MKRNRQRHLRGRRGQAFADLVRGICPEQILCVSIDVSKDFHVVLLHNGLGEVVTPRLEIDIFRTGFEQLCQAVEAAIKASAAQVVLVGMEPTGHYYENLARHLQATGQKVTMVNSFAVKENRRQQMMAYEKDDDIDVAAIGDLLRRGEGSPFRPPTGIYLQMQQLDRARLGELKIQTIYKNRVIGHLDRIFPGLILTKAATKERYTPLFATDFWQCQTLQDLVRICPDPRQLAAFSPADLVALFHQHGCRMGPRTASRIITYAQRVLWPEPEVVAIRRQLLATDLHTLDQVIARVDHYSQQLQQLLAQTPYQFLTQFKGLPPIRVASLAAAAGDPANYRHAGQLFRRSGLVSGRDDSGARQRQGKGKAVVKTGDIYLRRALNDLLNGLILHQPVLRAYYHRLKQSKPVGVARVATIRRAVGILWATLRDQRADTLVLRGEPMT

SEQ ID NO: 237091 - protein, 384 aa, unidentified
MQTVVDRPEAPTAIRTDLGAIFVSLELSRSTWLITSLSPGGGEKMSKHVVRGGDAAGLLERFAQLREKTRARTGKVFSFVVIQEAGLDGFWIDRVLQNEGIESHVVDPASIATSRRRRRAKTDRIDGEALVRALLAYKRGEPRVCAMVKAPTPEEEDRRRLCRERKVLIAERVRHVNRVKGLLFSQGISGYEPLRRDRRERLVTLQTGDGRLLPDHLKAQVCRELDRLELLLEQIKAVEAERDVLLAAQQAPAAMLLDIKGIGPEFAAILWSEGLFRHFDNRRQVASYAGLAPTPWQSGSVDREQGVSKAGNPRLRTTLIQLAWLWLRHQPQSALALWFEERVRRNGDRLKKTTIVALARKLLVALWKYVTAGVVIEGAVMKAA

SEQ ID NO: 237092 - protein, 392 aa, unidentified
MSTFVGIDIAKEVHWVCAVDATGKVVLNRKLMNTPADLALLVEELGNFAQPCRVGIDVLGGIAAFAQAVLLHAEFELFHVPGMAVNRARQGTVGGEAKSDPRDARVIADQIRTRGDLRPVVAESELDIEIRLLVSRRADLTQEQTRRVARMHDLLVSIFPELEHRIDMTTKMGLRLLACASTPEEFRALSLNDLLMALGATGKRACGQELAMAARAAALRQATVVPGSRAVGRLIRELAEESLVTVGRLEQIDVDLEELLQRHPDAALIRSLPGMGAILTAEFIAEVGQISRFRSGDALAAAAGLAPVLKQSGKTRRLKRPLGGNKGLKRVFYQSAFASLRCPSSRQFYDRKRSEGKRHHQAIIALARRRVNVLWAMLTYRRPYTPTSPQFA

SEQ ID NO: 237093 - protein, 452 aa, unidentified
MAKDPEQKKSDEVQPLHELQPNAAGIDIGATEIYIAVPAGRSTKSVRRFLTFTDDLHEAARWLKDCGIESIAMESTGVYWIPVFQILDTYGFEVSLVNARHVKNVPGRKTDVKDCQWLQHLHSVGLLRGSFRPSQDVCVVRSLLRHRDNLVKAAASHVQHIHKSLTQMNLQIHNVISDITGVTGMAIMDAIIAGERNPEILAEHRDPRIKADKQTIVKSLTGDYRLEHLFTLKQALQTWRHYQQMIRECDVEIENHLKEFDSRIDPNENPLPPPTKNQRKPKGNGPDFDIRAHMYRILGTDLTQIDGVSSLTANVIFTEIGPDLSDFQNAGHFCSWLGLCPNNNISGGKILSSHTRPGSNRAAAALRLSANALWNSKSYLGDYFRRMRSRQGAPKAITATAHKLARIIYHLIKNKTIFNAFVFVEEENKHQHRLKKRLINQAKSVCLKLILA

SEQ ID NO: 237094 - protein, 330 aa, unidentified
MAKRDLVGIDVSAESVVVRVDRAGRSLGPREFGNDPRGHRGLCCWLSRGGGKARVALEASGIYHLDLALALHRAGIELMVVNPRSMRAFAQALAERSKTDPLDADVCLEFVRRMPFESWEPPTPEVLALRALTRRIGALTKTRAREKNRLHAVRHARELPPALAEEIEAHIAYLQASVERLAARARALIAEHADLESRFRHLVSVKGIAEASALQLLAELAVLPDDMDVRQWVAFAGLDPRHFESGTSVYKPPRISKRGNRYLRAALYMPALVAAQYEPHIRAFYDELLERGKKPLQALVAVMRKLLHSIYGMFLRDEDFDGEKFYRLNT

SEQ ID NO: 237095 - protein, 389 aa, unidentified
MNQIRDKVAGLDVHRDTVVACCRVQRRGRAAAVTKRSFSTTTTGLADLAAWLAESAVSTVAMEATGVYWKPVYYALEGLFPELWLCNAPHVKNVPGRKTDLSDAEWLADVAAHGMVRPSFVAPPAIRQLRELTRYRKTQVDMRTQEIQRLEKVLQDAGVKLSSVASGVWSKSAREMIEAMIAGERDSAVLAQMAKGRMRTKIPQLEEALAGRFGDHHAVACRRIIDHIDYIDLAIAGLTEQINFRLDPFAGALTILCSITGVSDITAQIMIAEMGVDMSRFPTAGHLCAWAGVAPASYESASKRRPAGTRKGGTWLRRALLEAAHAAARTKGSYFSAQYVRIARRRGPQQGCRRRRQLHTHGGLVPPLKRRVVRRPRRRLLHEATRPGD

SEQ ID NO: 237096 - protein, 343 aa, unidentified
MLYVGLDVHKEFCQACVIDERGRVLSNDKFPSTHESLDVFLAGIKHAKFVLESTGIWEYIYEGIEDRGFEVVLAHPLKVRAIAEARVKTDKVDAETLAQLLRADLIPRSWVPSRDIRDLRQLVRQRTYLVRQSTSFKNRISAELLRRGVRRPPELKSSFTKKDIERMRSLDVPTINSNLDCLERIQAQIEAMNQQLLVEFKRRPDAQLMATIPGIGFYSALLIHAEIDDINRFPDPERLASYAGLVPTVSQSASTVHYGGISKEGSAYLRWILIEAVLIHRHTHPESRLSRFHSKLEKRRGKNRATTATARKLAHIIYWMLKTREPYHGQGFNPVPKPARTSA

SEQ ID NO: 237097 - protein, 347 aa, unidentified
MRVYIGVDFHARKQTISYLTTEDGEIRRLELDHEKDDIRAFYGQFGGQEVVVGFESSGYAAWFEELLEELGYESWIGHAGRIRQYAKRRQKNDRRDADLILELMVAGDFPRLHRYSRESREVLQQLRYRQRLVKMRTMVINSLRYMVASRGVSLRSTLQSQRGQARLRQLALPGPLAQQRDELCRLLVELQQKIVTVEAWLQQKVDADPRVQRLRTHPGIGLLTGLGLVATLESIERFANPRKVTAYVGFDPVEDSSGERQRMGSISKQGSRLLRLLLVEAGQVAARRDQELGQVYRRVTLRRGHATAKVAVGRRLLVRAFIMLRDGIDYAEFCRRGVAARSSRGSA

SEQ ID NO: 237098 - protein, 306 aa, unidentified
MEKIVIGIDVSKDRLDVAVRPTGAAFVVARNAAGLGELVARLEGLAPHLVALEATGGFETVVAASLGAAGLPLAVINPAQIRAFAKALGRRAKTDPIDAAVIAHFAEATAPEPRPLPDEATQLLADLVARRRQIIAERQREMRARAKSLKKSIARLIRALEKELASVDTDIDEAMRASPAWREKEDLLASVPGIGPVIARSLIAELPELGRLTRRQIAALAGLAPWTRQSGQWRGKSFIGGGRTAVRTALFQGALVASRHNPVLKSFFHHLTSAGKPKMLALIAVARKLLTILNAILRDQKPWQTA

SEQ ID NO: 237099 - protein, 366 aa, unidentified
MTGKRYYIGMDVHKDTVQMAVFEETGEEPIHERRLANDTGLLIKEAARFSREGETEVAYEAGGMGYVLHRAMEQAGIRCHVLPANKVAKKRTDRIKTDKRDARLIGRELRSKSIRPIGVPDEADEAARDLLRCREDVCEDLRRVKQRLLKFMVRHGYVYRGGGNNWTKTHWDWMDKQEFRHGHEKTVYEEYRSQVRSLEERLAQLDAQVVQTAESARYKAAVSRLRAFKGIDYIIALAVVCEIGDFRRFANAKAFMSYLGFVPSENSSGGKRNRGGITKAGNGHLRRLLIEGAWHYTKNTRPGKRLEQRRRGSPADVVDTADRALHRLHRKYKRLVFKGKHVNTAVTAVARELAGFIWAVQVSAAA

SEQ ID NO: 237100 - protein, 340 aa, unidentified
MEKRYIGIDLHRNRFTCCIRLENERTYVTEWELEDLARFVKKLRASDEVAVEITSNTRLFREAVAPQVKRVVVVDTNQFRVISRSVKKTDPNDARLLSLYLSKNLLPEVRMKDKDLAQLASLTQTRDTLVKQRTALKNKVNNILSARGLNLAKEALSSEKKLAEVLELPFDEIVRIELGVIVAQIRSLNKSVAELEKTIGEEGSKLEGHQGLLSIKGIGKITGAILLSVIGDVKDFPDEGRLASYFGIVPRVSNSNETERSGRIHKRGTKLGRTALVQSALTAANYSPYLKSFYQRVKAKRGAGKAIIALAHKFLGIIYRTLKNKWVFEDFPNFVLTEES

SEQ ID NO: 237101 - protein, 366 aa, unidentified
MEKSSTAFVGMDVHKDSIDVGIADATEARHYGRVGGDAASVDRVVRKLRSAHRHLVFVYEAGPCGFWLYRRLKAQGLQCVVVSPSKTPRNAADRVKTDRRDSLKLARLARAGELEPIYVPDAQDEAVRDLVRAREDAVCMQRQARQRLAALLLRNEIRYSGKTAWTQAHRRWIAHLKLPNPAQQIAFEEYVQAVHEAGERLERLTKAIGAELEHWRWRPVVEALQALRGVSAIHAVRIVAELGDLSRFESPRGLMGYLGLIPSEDSSGPRRRQGSITKAGNSSARRALVEAAHAYAHPARVSWVIARRHTGLPKSVCDIAWKAQLRLCTRFRRLRARGVLKNKVVVAVARELSGFVWAIAREVKPD

SEQ ID NO: 237102 - protein, 390 aa, unidentified
MQALYPRPDEHAAVRTDLKAIFVSLELSRSTWVITSLSPGGGEKMSKHAVPSGDIPALLARLSQLKEKARARTGQVFPIIVIQEAGLDGFWIHRVLQQEGIESYVVDRASIATSRRRRRAKTDKIDGEALVRALLAYKRGEPRVCAMVQAPTPHEEDRRRIRREREVLTAERVQHVNRIKGLLFAQGIGDYEPLHRNRRERLEELITGDGRPLPECLKAQISRELDRLELVIEQVKAVEAERDALLAQAQASPGVPAPAAQLLTLRGIGPEAAATLWSEGLFRTFNNRKQVAAYAGLAPTPWQSGAVHRDQGVSKAGNPRLRTIMIQIAWLWLRHQPQSALALWYRARIKRTGGRLGKTMIVALARKLLVALWKYATAGVLIEGAVLKPA

SEQ ID NO: 237103 - protein, 342 aa, unidentified
MSKELYIGVDVSKNWLDLACYDGISVDWKQGHIRVDNKPSGYHQITRWLKKQGTDKDHVLFCMEHTGLYGQDFRVWLEKEGLVYGMVNPRKMHRFEPDLGENDRALDRIKTDEMDSFRIAMYCEKHSRKIKASPSRLPGEAYFKLKRLMAERRQYTKQSVIYKQQLHDISAHDTEESRKRKQSGLDLLKSQIRQTDADILRIIDKDPCLKRNYDLLYSVKGVGLVVAVDTIVLTENFTLITNPRKYACYIGIAPAKKESGISIRGGNHVSRKGFTLAKADLTIVCLSAIKNDPNIKSYWQRKKAEGKHGGVVLNAIKFKIVLRMFAVIKRQTPFVEMDAYKR

SEQ ID NO: 237104 - protein, 349 aa, unidentified
MAIVGGFDIHRRQVTFDYLDTVTGQVRRGRIEPACRQVLRAWLGRFAGRDDVTFAVEGCTGWQFVVEELQRAGITAVLAEPAETADLRGPKRRAKTDKTDARHLRSLVADGRVPASWIPPQQVCELRALLQLYRDLREEHTAWTQRIHATLFHQGVPGLAGRLGDPRVRARLATGTQTGLSPAGAQAVAVALRRMDDLEAELAPVHAQIAAFARRQAGCKTLASELYGVGPLVAAIVWAFLGDARRFSSSAQAVRHTGLDVTVRSSDDKRTPGHLSHQGPPILRWALFEAGHQGSRAGSPDHRYYTDVAERIDANRAALSVARKLARRSHHILRRLGDQAYAPVPAFGR

SEQ ID NO: 237105 - protein, 461 aa, unidentified
MAKQPGKRKKDGAGADATAGLPPLNLHAAGIDVGGAEHYVAVPADRDDEPGRRFGRFTADLHRMARWLKDCRIKKIVMQSTGGYWMALYDVLESHGLEVNVANARHTKTLPGRKTDVQECQWLQKLHTFGLLNNSFRPPEEIRVLRGYLRQRENLVAAAATCIQHMQKALTEMNIQLANVISDISGTTGLAILRDIVRGERDPHRLAMHKNSRIRASRQEIARSLEGTWRQELLFVLEQSLDLYQTYQEKIQTCDQRIDKQLRSMEPKIDPLSEPIPEPRRGKDARGHQSGFDLRGQLYRITGVDLTRIDGIEVQTAQTIISEVGVDMSRWKTEKHFASWLGLCPDNRISGGKVLKRGTRHVVNRASTALRLAASALLRSQNALGAKFRRLRSKLGAPKAITAMAHMLARLTYRMLKFGHDYVDRGIQFYEAKYQQQQLQRLTKQAAALHLQLVPVTSHVS

SEQ ID NO: 237106 - protein, 344 aa, unidentified
MKITRVGVDLAKNVFQVHGVNAHGKCVWKRRLKRATWLRVFTETVEPGCEVGMEACGGAHHWARELRARGYEVKLIPPQFVKPYVKSQKDDAADAAAICEAMSRPDMRFVPVKTLEQHDIQAVHRVRSSVMGQRTAASNQIRGLVAEYGLVTPKQVGPLRAAIPCWLEDAENGLTDRFRALLQGLWHELLMLDERIKVLDVEIEQLCNTHAVASRLKKQLRGVGPLVATGLIARIGDGRQFKRGRQASASIGVTPRHHGTGGKNRIYGISKVGDRYLRCILIHGARAVVAQAKHRDDPLSLWVTDIAERTHPNVAAVALANKTVRIAWAMIRNGTDYDPEFAMN

SEQ ID NO: 237107 - protein, 422 aa, unidentified
MKRLLERCAALDVHKKQVTVCVRLLAADGGIEEVVAEFSTMASQLVALRDWLNELGVTHVAMEATGVFWKAPYYALEDDFELLLVNAVHVKHVPGRKTDTKDAQWLCQLLECGLLRASFVPPKPIRELRDLTRYRKSLIQERSREANRLHKVLEDAGVKLSCVASDVLGVSGRLMLDALVSGTRDPELLAELAKGALRKKLWALREALAGDFKPHHALIASHILAHLDYLDETIGTLTQEVEQRLAPFALKAELLTTITGVAARTAQAILAELGPDMSRFPTDRHAASWAAVCPGNDESAGKRRSGRTRSGNPHLRAALVEAACAAIRTKDTYLRAQYEQVKRRRGHKKAVTAVAHSILIAAYHILKDDVPYEDLGGDYFARRADPQRLTKRLVAQLERLGHNVTLQATSTSTADGLAAAPA

SEQ ID NO: 237108 - protein, 335 aa, unidentified
MTHVVGIDIACESFVARILACSNTETTVGDATQFDNSNEGFTNCANWFTKKDLHPEQTLMVMEATGVYWEALAVFFTQQGHPVSVVNPAQIKYFSRSVLQRGKTDALDAHIIALFGVRMKPRLWNPPSPLSQDLQVLMRQRDAYVAMLTEERCRLHSYEHAAHTPHQAIAICKGTISFLRKQIKELDESFKNTLHGDPHWSKLYDLLRSIPSIGTVTAGVFLSETRGLNEFLSSRQLVAYTGIAPAPFSSGTSVYKKPRISKIGNARLRKAFYMAAVSSIRHNPTMKIVFDRLLEKGKPKKLILTAIARKLLVLCFAVCKSEQPYRLNYSRPQLI

SEQ ID NO: 237109 - protein, 414 aa, unidentified
MLKIVYRVCCGMDVHKSFVVACIASTNEQGVTTYKSKRFSTFTGDLRRCAAWLSENNCKDVCMESTGKYWIPIYNILERTCNIVLAHPKYVKAIRGKKTDKRDAKWIADIFKHDLVAGSFIPPADIRQLRDLFRYRWKLTNFATGEKNRAQNCLTVSNFKLDDVFSDVFGKAASAITARILKNPSEKITDVSGFRTKRMKATDEEILAAVDGEMCAEQAEKLRIIRSHMDSLELCKLNLESLILSTAEKYLPQLNLVMTAPGIQSFAAIGIISEIGVDMSVFPTSKHLCSWAGLTPQNNESAGKKKTTRISRAGAYIKPLLVQCALCAVRAIQFPEVRNRYLALKKRRGHKKAIIAIARMLLTAIYNMLKKNEPYNPELYRVGDRPPAHREVSVEEAVFILQRQGYLVTTPPTT

SEQ ID NO: 237110 - protein, 388 aa, unidentified
MTEMQVMIEGQSRFQPLGLSCWGFRDLNKGVGSMTASYDYHIGVDYHKSYSHLVVHDSSGKTLRSGRVKNDRQSLGGFLDRYRENSHAVVEATRNWMVMYDWLDDICDDVVLAHPLKVKAIADAKIKTDKIDATVLAHLLRADLVPEAWAPSEKSRDLRVALRERMFYVRLRTMTKNRIVTVFDRYPEQTAQLKKLGDLFGKAGRVQLAEVNVSEIDRVQINRGLAFISDIDIRIKQSEATIRTMTKANGNVRLLKTIPGIGEFFARLIDAEIDDISRFRNPKKLAAYAGLVPSTYSSGGKTFHGKIIKQGNKWLRWAFVEAVTPAIVTDPQLRAQYEHLKFRGVNKARVAIARKLLTIAFQILRDQRAYEPRDTSIMEGASTISRLS

SEQ ID NO: 237111 - protein, 365 aa, unidentified
MKKIAYVGIDYHINVLSIAVIVKGQKELYETIRLKNDNKIIARYMKKLSKKFQIKACYEASSSGYSFQRKMASWGFHCDVIAPSLIPKKPGNRRKNDFRDAKDLAKNYANDMLTFVRLPSEKEEALRSLIRCRLTFKESAKRVKHQINSLLLSQDFRWPKSKWTQQHRCWISQIKMPHVYLQHALDEYFNHLQYIEGRLEYLEDQIEELAASPIYASSVKKLRSFKGISTLTAMVLIAEITDFRRFANPRALMAFLGLIPSEHSSGDKQQGGSITKTGNSRCRKLLVESVQHYYKRPYISHRMRKELAQVDPQSAHIAVKCLKRLHKRFWALTMKGKQRPVVITAIARELVGFIWAMMQPVAVEA

SEQ ID NO: 237112 - protein, 399 aa, unidentified
MTPSQIVVIGADTHLDTIHLAALSETGKPLGDAEFPTRPSGYYVAVKWAQSFGTVTLAGVEGTNSYGAGLTRALQDGGIDVVEVNRPDRAARRRRGKSDPLDAYAAARTALSGHGLAAPKDERTLALSALLTARRGAVKAHTAATNQIQSLLVTAPSELRECYRRYTTRGLVKELARCRPTAHTDPTAVAVLTALKALAYRAQFLHHQEHELTEQIHTLTQQMNPGLRAAHGVGPDTAAALLITAGMNPHRLRSEAAFAALCGAAPVPASSGKTTRHRLSRGGDRTANNALYRIALVRMSNDPRTRDYVARQTANGRSKIEIIRLLKRAVAREVFRLLSQPCAIDDYSDLRPARQAKNITLTTVANHLDVWPNDISRLERGLKRDDTLAANYREYLSAA

SEQ ID NO: 237113 - protein, 338 aa, unidentified
MTTYYVGLDVHVNHTTMCILDHHGKPVKRQTIRESWRRVADELSQLKGKVRVCFEASTAYGYLFELLSQVADRVVVAHPGQLRLIFRSKQKNDRADAEKLAKLLFLDEVPAVYVPSRNVRAWRQLIEYRRRLVGKRTRTKNALRAILRTVGVRPPSEYGLWTKQGIAWLREVELPELTALQRDLLVEELALYDLQVRRAEQGLQHYSRDNPAVALLETIPGVGLRTAEAVVAYVDDPRRFGNSKTVGSYFGLIPSQDQSGQTNHLGHITRCGPSVVRHLLVEAAWRGVCCSSTIRQYFERVQQGTRERRKIALVATAHYLARVIHAMLRNNRPWAEAA

SEQ ID NO: 237114 - protein, 354 aa, unidentified
MIIIGVDFHPEFQQIALLNTTTGEVEEKRLAHPEEAEKFYRALAGAGETVRIGMEASGHARWFERLVAELQFDLWIGDAAEIRTKRVRKQKTDRQDAQLILSLLLEDRFPKIWVPSWENRDLRQLLWHRHRMVQARTRVMNQLQAVALNEGLRCKKKLWRERGRQQLESFGLAPWASRRRRDLLELLDRFNPAIAELTQAIEREVENCPAAQRLRTHPGVGVLTALAFVLILGDAERFHCGKQVASYLGLVPLEDSSGNRRRLGHITKQGSSILRFLLVEAAQVAVRSLPEWRSKYFHLVLRRGRKIAKVAMARRLAVQLFWMMRKEWNYEQLKKFGSHAGQPGNRHGVQSNTE

SEQ ID NO: 237115 - protein, 345 aa, unidentified
MKLTPVGIDIAKSVFQVHHVDQQTGEIVNKPIKRSRFLEYFANRESCLIGMEACAGSHHWGRQLAQMGHKVRLMPPQYVKAFNIGNKKDAADARAIWTAVQLAGQSVAVKTEMQQAMLALHRMRQQLVKFRTMQINNLRGLLTEYGEVMPVGRAALDNGIASAFARLAERLPAVLIDTLREQWNGLATLDHQIGAIERRMRDWKKEDRAVKAISEIPGVGLLTATAAVAMIGDAKAFRSGREFAASVGLVPKQTGSGGKIQLLGISKRGDTYLRTLLVHGARSVVKSRKHTDRWLEQITQRRPFNVVVVALANKMARTIWAILAHDRPYQNAFNSVRPNPSAPLA

SEQ ID NO: 237116 - protein, 356 aa, unidentified
MRKIVAERREVKAECGLGDIYVGIDVHKRSYSVALWSGGVIIKTWTSPANIEVLLNSLACYRSRIRSIVYEAGPTGFGLARRLRDERYSVCVAAPSQIPREAAPMNKTDRLDCRKLALYSGTGVLTKFVTVPTEEEEDDRQVVRLRGCFARKLRQVKQQIKSLLLQHGIEEPDGLEHWSNKALEELVKMKARPGVRFSLDILLSNLWQLKKELKEIDSYVEKIASSPRHKKRVEILRSHPGVGEVVAASFETEMFSGREFRNANEVGAFLGLAPRVESSGEKERRGHIMKRGNGPLRALLVQAAWKWIQLDPRARSRYGQLLHQTGEPNKSITAMARKLGIHLWRMLERGELYKAV

SEQ ID NO: 237117 - protein, 353 aa, unidentified
MTVYVGVDFHAREQTVSYCNSVDGEIHEGELQHVGNQVREFYAQFQGEVIVGLEASGYSNWFEELLESMQHTVWLGNPAEIRRKAPRRQKSDRRDADLILGLMLKGDFPKLHRFSAESRLVLRQLRYRHKLVKVRTIAKNSLAAISLGAGLTEKRGLLSQRGQQRLQALELPPVLSQQREEWLQLVAQLDERIATSEATLEKVAAGDEQIKLLRTHPGIGLLTGLGVRHTITPVTRFSSTRKVVAYAGLDPVEDSSGSRRRLGSISKEGSRLLRFLLNEAGQTASRKDPELKRFYQRLVHRRSRPKAKVAVARKLLVRSFIMLRDQIDYAEFVRRGVAARSARKAHRPTMPVL

SEQ ID NO: 237118 - protein, 377 aa, unidentified
MKRVKFVGLDVHAETIAVAVAEQNGEVRSLGVIPNREDSVRKLVRKLGPVEEPRFCYEAGPTGYVLYWQLTRMGAKCEVVAPTLVPVKSGDRVKTDRRDALKLARNYRAGELTPVWVPDAAHEALRDLVRAREAAKKDELRARHRLNKFLLRQGRRPPMGVKLWTIKYLEWVKREVHFEQMAQEATLLDYLHEVEHAAARIARLDGAIAEAVKLAPPKMRAVIAALQALRGIAHVAAVTVVAELGELSRFARAKQLMGYGGIVASEHSSGEHTRRGGITKTGNAHLRRVVVEAAWTYRHRPAVGTSLRKRQEHVSEEVKEIAWKAQQRLHQRYKKLLANGKNKGVVVTAIGRELLGFIWAIGIKVEAAQKESLQRAA

SEQ ID NO: 237119 - protein, 312 aa, unidentified
MTSEAFVGIDVSKRWLEVGVHGENESRKIGNDPDGYATLLEEMKALQPRLIVFEATGGYESRAVKVLSEAQFAVAVANPTRVRRFAEALGILAKTDKIDAKVIAHFASVVQPAANGRQTPLEEQLAAFVERRRQLLVELVAEKNRLSTCPACVREGIEEHIAWIDAQVDELEAKIQSCILQNPDWQERAEIIDSVPGVGPVTASTLVAELPELGQLSHKKIAALAGVAPFNKDSGPKKGKRRIFGGRSGVRRTLFMAALSATRHNPIIRAFYESLLKRGKEKKVALVACMRKLLVFINAMVKNGEIWRSSPA

SEQ ID NO: 237120 - protein, 371 aa, unidentified
MSNVRFIGLDVHAETIAVAVAEPDGAVRSVGVIPNRPESIRTLMKKLGAAEQLRVCYEAGPTGYVVYWQLTGLGVQCDVVAPTLVPTKAGDRVKTDRRDALKLARSYRAGDLTAVWVPDAAHEALRDLVRAREAAKKDQLRARHRLGKFLLRHGRRPPTAMKAWTQAHLTWVKRAVHFEHAAQEATLRDYLHEVDHVTERIVRLEGAIEAAVAGAPARMRAAIEALQALRGIARLSAATIVSEVGDLSRFAKPRQLMGYSGAVAREDSSGERTRRGGITKTGNAHLRRVVIEAAWAYRHRPAIGPALRKRQASVSPEVRAIAWKAQHRLHTRYRALTARGKCKQHVVTAIGRELLGFLWAIGVCVASTRVA

SEQ ID NO: 237121 - protein, 346 aa, unidentified
MEHYAGIDVSLELSSVCIVDTQGKIVKEAKVASEPEALVDFFGSLHFAVKRIGLEAGPLSQWLHAGLRRAGFETVLLETRHVKAALSAMTVKTDRKDARGLAQLIRMGWFRPVHAKSMGSQEVRALLVARKQLLGRLIDVELSIRGILRGFGLKVGAVTRKGFEARVRELATGQATLERIARAMLSARATLRAEYEKLHKAVLAIVREDAVCRRLMTVPGVGPLVAVTYKSAMDDPSRITKSKAAGALFGLTPKKYQSGEKDVTGGITRTGDEMVRTALYEAANVLLSRITRFSKLKRWGMDVAKRRGSKRAKVALARKIAVILHRMWVDGTTYRWTAAEQIAAQA

SEQ ID NO: 237122 - protein, 339 aa, unidentified
MNHCGLDMGKKSSVFCVMSGKRKILREGAVQNRPEQVAKTFAQMEKAQFVIEASTKAFWMADLLRSIGHEAVVVDPGRTKAIGAAMIKHDKLDARVLATLGAADLLAKVDQPTEEQRVARMPVVARDGLVRCRVRLVMLVRSMLDSEGIELKGCALGVFSREVRSMAGKMPVGITEAIAPVLTAIDTLTEQIARCDESLKESMAHDPTAQLLMTAPSVGPVVAACFQFAVRDPGRFKSGREVGAYLGLVPSLYQSGETYRRGRITKHGNRQARWALTMAANVLLSVVRKPSALRAWGLALAKKRGRKKAVVAVARKLAAILWSMWRHQRPFEPQPALAA

SEQ ID NO: 237123 - protein, 318 aa, unidentified
MSHGCDTFIGIDVCKDGFDVCCAGSGPLGRFDNTADGVSRLLPLLPAAGTCLVVVEATGGYERQLVGDLMTAGHHVSLVNPRQVRDFARAFNILAKTDRIDAAVLARFAEKVQPIPREKAGRIDELRQLVTRRRQLIEHRTAEKNRCAQGVSSFVRKNILRHIEMINKDIKAIDKLLLSLVQSDDDWRNKFDKIKEVTGLGTQTATTLVAEMPELGKVNRQQAAALVGVAPFNRDSGQFKGRRMVWGGRQSVRNVLYMAALSAMKHNPVIRDFAARLHAKGKPPKVVITACIRKLVVILNAILKANQSWQPRLATATP

SEQ ID NO: 237124 - protein, 442 aa, unidentified
MTTEKIKNKVTPDEIVAWVGLDWADSEHRISMYDVATSQVEDSALKQSGEALQQWLAELEKRYGGGKVAVILEQSRGGVVYGLMGYDFIVLYPVNPQSLSGYRKALYPSGAKDDPVDAALLREMVQKNPERFRQWVADDPETRSLRLLVEGRRKLVDEMTKLTNRLTSQLKSYYPQALEWAGELNSRQACDFLEEWPTLDAVKLARPARLRKFYLKYGRPRPETLDRRIESIKEATWLTRDPAAVIAGSMMVQAIVKQIRSLIIAIEDYDDEIKRLFQKHPDRLIFESLPGAGPVLAPRLLAAFGADRDRWSLAAEMEMVAGIAPVTERSGKQCWVHWRMACSKFLRQTFHEFGASSIRWCNWAKAYYDYLREHGKSHHAAVRALAFKWIRVIFACWKNRTPYDNQVFLDALAKRGSHLALKAALAVPPCRAHRAVITVENL

SEQ ID NO: 237125 - protein, 368 aa, unidentified
MKDYNGKTIFVGIDVHKKTYSVTAICDGCIIKRDTLKAEPEGLIFYLKKRFGSGKIKTAYEAGFCGFHLHRSLEATGIENIVVHAAGIEVSNTRVKTDKRDSLKIAAHLSEGKLRSVHIPTVEQEDNRTVTRLRDTFSRERTRIGNQIKSLLFLHGLIPADNKKKVSLAWIKGLSKFEMTPGVRLAIEMLSAMWLEFDSKIKEIDMEIKKQAIKDCAIDATYQAASGIGPTSARVLANELGHLQQFKNERQLFSYIGFTPSEHSSGEHTRQGHITKQGKPIVRKILVQAAWVAIRHDKELQAIYERIAAKSGAKRAIIAVARRLIGRIRACFRTGEPYKAQKIERATLKFNKTSQNKKQRTHKDKLVA

SEQ ID NO: 237126 - protein, 388 aa, unidentified
MPRQRKPNDLSRSLIALDMDTTLIAVVELSLSSWLVAGIVPGVERQPLKKLKTDENALLTLLNRWRDEAVRSGHKISRIAVAFEAGRDGFWLARWLRARGIEAHVIHASSVAVSREHRRAKTDRLDTELLKRAFVGWLRGERDHCKTAAIPALREEDAKRPSRERESLVGEQSRLVNRMKATLIRLGIRGFNPKLRQAEQRLEILRTPEGEPIPANTLAELKRDMQRRRFICDQIRSIEQERLERLKRTPDTEPHAMVRLLARVTGIGIETADLLVHEVLLRNMRDRRAVARYGGLTGSPDRSGGTNREKGMARSGNARVRRGMIQLAWRFLLFQKDSALAQWYRRRTEHSPKARKTMIVALARKLLIALWRLAREGVIPEGVAMRPA

SEQ ID NO: 237127 - protein, 374 aa, unidentified
MSYVTSIGLDVHARSITAVAFDPATGEVRSKRFGYAPAEVAAWTLAFDSPKAVYESGVTGFHLVRALRGLGVDCIVGAVSKMHKPAADKRKKNDRNDAEFLARQLAARNIKEVWIPDEECEAARDLSRVLEDVREDLTRAKHRLTHLLIRHGYAFDEIGPDGKRKGKWTRAHWEWIRSIELSEAAARDALDFYVSEVRHIEAQKKAIEKEIADYARADRWRGRVEALRRLKGIETMTAFSLVAEAGVFSRFESARAFSSWLGLTPSEHSSGERVSRGGIIKAGNTHLRKQLVESSWHYTRATTKRKRDQRGEEVPLAIENHAARGREAPCREAGSLCKAQSSPGGGQRGHRKRALLLGMGCGLHVGRGSRIETR

SEQ ID NO: 237128 - protein, 407 aa, unidentified
MIFVGVDWAEAHHDVHVEDAEGRRLGEGRLPEGVEGIARFHELVGAHIEDPKEVIVGIETDRGLFVAALVAAGYLVFAVNPMSTSRYRDRHSSSGAKSDPGDAKVLADMVRTDRHNHRPVAGDSESVEAVKVLARAHQSMIWSRGRQANALRSTLREFYPAALAAFDDLASADATEVLKVAPTPSLGAELSLAKIAASLRQGGRQRRIDERAREIQAALRSPQLQGSALVASAMGASVKASVTVISTMNAEIANLAQQLEAGFEQHPAAKVVRSLPGLGTILGARVLGEFGDDPDRYASAKSRKNYAGTSPITRASGTKRVVLARYARNMRLADAIYLWSFASLTASPGARAFYDARRTAGDTHHAALRALGNRLVGILHGCLVNSSFYDEHTAWGHRSESTVAAAA

SEQ ID NO: 237129 - protein, 319 aa, unidentified
MSVSSVVGIDVAKAHVDVFVLGAEFKPQRFDNAAEGHSALASALAPLGVRLVVMEATGGYETALACSLQAAGFAVAVVNPKQARDFAKAIGLLAKTDAIDARALASFADTLSRQPDLASYIRPLTDEAQRDLAALVTRRRQLLAMMLSERQRMQLAVAKVQPSIEAIMQAIKAQLDEVEGEMVGHVQEHFGKLDALLRSTKGIGPVASATLIAELPELGKLNRRQIAALVGVAPMANDSGNSKGRRSVKGGRFEIRRTLYMATLAATRYNPAIATFYARLRPAGKLPKVALVACMRKLLTTLNAMARSGQHWDPEFKPA

SEQ ID NO: 237130 - protein, 312 aa, unidentified
MNTEIFVGIDISKEHLDVAFGPDQAPQRFPYTPEGVNRLLAHLQALSPTLIVLEATGGLEADLMDALSRAGLPFSRVNPRRVRDFARASGVLAKTDRLDARILAEFGQKMRPPVTVLPDEQTRHLEILVARRRQLVEMRAIEEHHWRTAPETARPYIRKHLEWLDAEIATLEREMADWVNQTPLAETVEILDSAPGVALVGAATLVAEVPEIGRLNRKKIAALVGVAPYNRDSGTQKRQRRVTGGRQAAREVLYMLTIAGIRCNPVLRTFYQRLRAAGKPPKVAIVACMRKLLTILNAMVRDRRKWCLELAG

SEQ ID NO: 237131 - protein, 388 aa, unidentified
MYNTQHPFYCGIDLHARAMYVCILNQAGETLLHRNMKTTPEAFLKAIAPYRPDIVVAVECLFTWYWLADLCADEEIPFVLGHALSMKAIHGGKAKNDKIDSQKIAVLLRGGLLPQAYVYPAEMRATRDLLRRRMHLAHKRGELLAPVQNTNSQYNLPALGKNIAYKANRDGVAERFADPAVQKSLEVALSLVSDYDELLRDVELTIVKTAKQHDANTLYRLQTVPGIGKILSLVLLYEIHHIDRFPRVQEFASYCRLVKCAKESNGKRSGTSGAKIGNAHLTWAFSEAAVLFLRENPAGQKFLARLEKKHDKGKALTILAHKLARAVYYMFKRKVAFDMKRFLNDEGRGVGERDVSLDNHGMNLILATLSNASMTASLNAYERLGHYP

SEQ ID NO: 237132 - protein, 324 aa, unidentified
MFVGLDVHKKYTEVAIVDEDGVVAKQERIENEPRQIEEFSNKLSNATMVLEFSSSWYWLYEILSRKHKVVLSNPAKTKAIASAKLKTDKVDALMLANLLRGGYIAESYVPSRRIMSLRELVRYRANLVRMRGMIKNRVHAYLLMNNIKIDYSPFTKDFLEELEKVEDGRVQGYLRIIEALNLEIHEASKKICNEALSDESARLLMTIPGISFYSALLLVSEIGDVSRFPDSAHLVSYAGLASSTHSSGGTTCHGRITKAGSPYLRWVLNQCTWVHVRNEPEGSIAVFYERLRRKKGHSKASVAASAKLLKVVYWVLKEKRPYQG

SEQ ID NO: 237133 - protein, 315 aa, unidentified
MSSQCFVGSDVAKAQLDIARRPLGERWAVTNDDTGITALVRRLQEIVPQLIVLDATGGYQRAVVAALATAGLPVVVVNPRQARDVAKATGQLAKTEALDARALAHFAEAIRPAPRPLPDTQTEELRALLARRRHLVGMRTAEQNRLGSAPRRLQADIQVHITWLNERLAALDDDLDTTLGASPVWREREELLRSVPGIGPVWARTLLLDLPELGTLSRQRLAALVGVAPLNRDSGTLRGTRTIWGGRAHVRTTLYMSTLVAVRDNPGLKTLYERLRAAGKAAKVALTACMRKLLTILHALVKHHTPWQPQEFAIA

SEQ ID NO: 237134 - protein, 380 aa, unidentified
MNRVTLQSNDNAAEGVLYMAMELGDKHWKLVFSDGGAKRRHEIVEAGRRMQLVEAVSKAKANFHLLPEARVVSCYEAGRDGFWLHRYLVSLGIENHVVDSSSIETNRRERRAKTDRLDGVKLLTMLMRYWAGERGLWSVVRVPNVEEEDARRLHRELGSLKKERTRHRNRIRDLLVAQGLRLEPHRDFLKRLETLTLWDGRSLPAELKGELEREYRRLRMVEEQLRALEQTRTERIAHADSHPLRQVVRLMGLRAIGPNCAWLLVMEFFAWRGFRNRRELGACAGLTGTPYDSGGSKRDQGISKAGNARVRTMMVEIAWLWLRHQPNSKLSRWFRERFAGGGARMRRVGIVALARRLLVALWRYLEEGLLPEGAELKAGG

SEQ ID NO: 237135 - protein, 418 aa, unidentified
MNVKARRTKKQVNVENQAINLLSKEELNKKIEVVEKELRSYTWRELETNGKFAKNDKLSFITDDMLIVGCDIGSENHYIRAIDVRGRELSRGAFEFSNTSEGFENAKAWVMALAAKHDKKQIVLGLEPTGHYWFALAAWMISNGISVVRVNPYAVKQSKEIEDNSQLKDDRKDPQLIANLVKDGNYGMPYFPEKVYADMRRLSMFRDQLTEDRIRNINRLHRELKIYFPEYMDAFGKIDGAFTLEVLKISAIPSDITALGAEGIKNIWHNVKLRGRGYSRANEIVSYAEKSVGLTDGIDAGREAVKWYAEQILKLVACSSGKHKGQTKISHRGRKRLRYWLFQAAKSAVSHADEFKQLHEYYTTRTNNPLKKMQSLVVIACKILRVIYTILKTGTTYDPQKLLEDIKRPTASHAPMAA

SEQ ID NO: 237136 - protein, 417 aa, unidentified
MAESNDTPEPISAFVGIDWADAKHDIYLHPADGSTASHEVIDAKPEALHDWILKMREHFSAAGKIYVCLEQSKGALIHQLMQYDFFVLYPINPKTLARFREAFRPSGAKDDRSDADLLCELVRLHTHRLRPWKPDDEQTRKLNAFCQNRRQAVGSAVRLLQQVREQLKLYYPLALELELNTVLACDFLQRWPTLEELRQAKPQTIRKFFYAHNFRRGDKIEQFVQKLQKQTPVTSDRAIIEPAAMQVRLLAAQLRVILNSIPEFDQTIAEIFHSHPDAAIFESFPGAGPQLAPRLLTAFGTDRDRLESAEQMSVISGVAPIKIASGKSFATHKRWACPKFIRQSFHEFAGCSIKFCAWAKAFYQAQRDKNKGHHTAVRALAFKWMRILFACWKNRKPYDDVLYTGALKKRGSAFASP

SEQ ID NO: 237137 - protein, 300 aa, unidentified
MKTLDGWISGSGLELSVSLSPEGIAKLARFCAEHDVELVVMEATGGYEKLPFGLLWAAGVPCAIVNARSVRRFAEAMGVLEKTDRIDARIIADYAATKGLTGQAPESQIQQRLRALVTRLRQLTQLKVAQSNQRRLVDEPQVVATFDEMLALIARQSRALEIQIAELLGADPLWRALDAALREIKGVAGRTVARLMAEMPEIGTVSNKAVAKLAGLAPIARDSGQRKGKRPIRGGRANVRSILVVVAGVVARHDPDLAAFHQRLTQAGKPKMAVRVAVARKLLVRLNAKARDARATLATA

SEQ ID NO: 237138 - protein, 437 aa, unidentified
MLPCLNPNAAGVDIGATEIYIAVPGDRDPQPVRCFSTFTEDLQAAADWLTACHIETVAMESTGVYWIPLFQILEARGFTVFLVNAHHVKNVPGRKSDVSDCQWLQYLHAVGLLRGSFRPEQAVCTVRSLLRHRDSLVQMASSHVQHMQKALDQMNLQLHHVISDITGVTGVAILEAILAGERNPHRLAALRDRRIKASADTIAKSLVGDYRREHLFTLGQSLEAFRHYQELIAACDREIAQYLEGFESKLDPPPAPPSPAQDRPKPSDSQPRFDLQTHLHRIFGVDLTKVPGINVLTTQTLLAEIGPDFSRFASAPALTSWLGLCPDNRVSGGKVLSVKTRKVKNRAATALRMAAQSLYRSQSYLGHYFRRMRAKLGAPKAITATAHKLARIVYHMVTTRHAYDDSICAHNEVQNRQRLEARLRKQARELGLQVVAI

SEQ ID NO: 237139 - protein, 454 aa, unidentified
MNPKRSKSRNGGKMPMVHPNAAAIDVGATMHMAAVRADRAPEPVRSFGTFTADLHRLVDWFTECGVETVVMESTSVYWIPIFELLDARGFTVFLVNARDAKQVPGRKTDVSDAQWLQRLHSFGLLRASFRPKGQIAGLRAYVRQRERLLEYAASHIQHMQKALTEMNLQLHHVVADITGATGLRIIRAILAGERDPEALACLRHYSCHSSAEMIAKALTGSYRAEHLFALEQALALYDAYHEKASACDARIEAVLKELSIHRGHGHGPAPRASRRRNRTDQANALAFDVREALFALLGKDITTIDGLGPYLSLKLIAECGDDLSSWPSAKHFTSWLGLAPSNKVSGGKMLSSRTRRSGGRAAALLRLAAVTVGRTDTALGAFYRRLSARIGKAKAVTARPARSQFCSTMLCDTEWTMSIPGPRPTRRVTGREWSTICIGVPRHSALFSSPWSRK

SEQ ID NO: 237140 - protein, 349 aa, unidentified
MLAEKVDYVIGVDTHRDQHTLAVVAAPTGASVAQRSVRASTPGYSAALRFAVRHAAGARVWAVEGAGHYGAGLTRYLTSRGETVIEVGRSARAERRLRGKDDPLDALRAARSALAAETLTLPRAGEHQEALRVLLLARRSAVDVRRRALVQLRSVIVTAPENVRDELRQLPAGQLIRRCSRFRRSSSRTPDELAIVLALRSLARRIEAATAEATELEREILNHVRALVPQLLEEPGVGPIVAAQVIVTWSHRDRLRSEAAFARLAGVAPLPTSSGLTIRHRLSRGGDRQLNRALHTVILHRRQHDPATRDYIARRVAEGKSARDATRILKRYLARHLYRVMQNATPLMT

SEQ ID NO: 237141 - protein, 436 aa, unidentified
MILNALALKLKRQARGDFRGRHFEATLILQAVSWYLRYALSYRDIEEMLLERGLEVDHSTCADRDPVGGGAKLGCDAGGWAARSYLGEDAMAHYAAFDVSDKETAIHVLDEHGKLVWKGKRPSEPEALAAALRRHAPELVRVGLETGRLTPWLFHALKGLGVPVVCLDARHARAATALQRNKTDARDAETLAQLVRTGWFREARVKSWAAHAVRHLVGARAQLVGMATDLSNQIRSLLRTFGLRITGRAGGTFERKVREQITGSPEVAAVAEPLLAAWRAMRDQIAALDRKLIEAARSNATCRLLMTCPGVGVVVATSFAAAVAAPDHFRCSRAVGAYLGLTPRRHQSGESDHSAGVSKRGDKLLRSYLFEAAACLLIRVQRPSALKAWGVGLVQRLGFKRAAVAVARKLSVVLHAMWRENRPFQAWPTPAVAAAA

SEQ ID NO: 237142 - protein, 374 aa, unidentified
MHHHSEVFIGVDTSKLRHAVAVAEAGRSGEVRFLGEIEASETATAKLVRKLAGKYRRLTFCYEAGPTGYGLYRQIKELGHECVVVAPSLIPKRPGDRVKTNRRDAVSLAKLLRADELTAVWVPDRGHEAVRDLSRAREAAVMDLRSKRQQLSALLLRQGRFYPEGKQTWTKMHMRWLAGQKFDYPEQRMVFEETMLAIRQAQDRLVRLAEAIAGAVPDWSLAPYVTALMAMRGMDLIAASTVLAEIGDLTRFRTANELMAYLGLVPSEDSTGDTIKRGSITKAGNRRARRMLVECAWSYQHPPRVGRAKQAKVDAVAPAVREIAWKAQCRLYRRYRALIRKGKRKTVAITAIARELAGFLWAVGRQVTPQTHNQ

SEQ ID NO: 237143 - protein, 458 aa, unidentified
MKNRKPKSKTAKKKKRRSLSVVNPNAAGIDVGSRSHYVAIPAHCGDDTVREFGCLTPELHEMAKWLKQNGVETVAMESTGVYWIPVAQILEQYDIEVNLVDGRAAKNVPGRKSDVQDCQWIQELHSFGLLRAAFRPTDEMVVLRSYWRHRAELVTEASEQIHHMQKSLELMNLQLHKVLSDITGVSGMKIIRAIVSGERNTSVLAQMRHKSVKSSEQTIIDALTGDWRQEHLFTLKQALESYDFHQSQMAACDQQIEQYMQQFSSQGDMDKLEGRNMGARRKNQVHFDLRSELYRITGVDLTTIDSIQALTAQTVISECGYDMSRFPTEGHFASWLGLCPNHEITGGKVRRRGTRKVYNRAAHALRVAAQSLQHSKTALGAYYRRMKGRVGPSKANTATAHKLAKLIYRMLKFGMDYVDTGQEAYEQQYQERLLNSIRKRAKQMGYEVVALQSGEVVS

SEQ ID NO: 237144 - protein, 340 aa, unidentified
MRQLYVASDLHGNNNLLGIIDGEGKRIFKKKLPNDPLLINDILNPFKEEIVGIVVESTYNWYWLVDALMEEGYKVHLANPAAIQQYSGLKHTDDKHDAFWLAEMLRLGILPEGYIYPKEERPVRDLLRKRGHLVKLRTSLIISLENIISRNFGRKLPVNKVKGLREDHVTPLFEGKEDLGLAGRVSKETIDFLTHQIRQIEGAVEKRITLKEQYRNLLTLHGVGKILGLTIMLETGPIGRFETVGDYTSYCRKVPSQWISNGKRKGSGNRKNGNKYLSWAYAEASDFARRLHPESRAYYNRKMQQSNPAVAHSALSHKLARAAYYIMRDQVTFRPEKLFG

SEQ ID NO: 237145 - protein, 311 aa, unidentified
MQAINAGVDVSKDFLDAALSTGEQGRYPNTDQGVKALCKWLKKLTPERIVLEATGGLEGALAACLYRAGLPVVVVNPRMVRDFARSMGVLAKTDQIDARVLWLFAERVKPEIRQMADEEKVLLADLIKRRKQLVEALTMERNRLRSAARIVRPSHERMIKWLVEEIGQTDRRLGESLRASDTLKEQAKLLESIPGVGPVTSASLLGLVPELGSLSPKKAASLVGLAPMNWDSGRMRGRRHIRGGRKDVRSALYMPALVAIKANPHLAEFARRLKEAGKPFKVLITACMRKLLLLCNAVLRDETPFRLQTVS

SEQ ID NO: 237146 - protein, 347 aa, unidentified
MGEYVGMDVSLEEVSICVLNEDGRVIVRGATPTDPAAIVAFVAEYAPEVVRIVHESGQISTWLTRALRALGAPVICIDARLAHKALSARPNKSDKADAEGLAHLARSGWYQEVHVKSEVSDRLRTLIGARDRLLRIRKDIEGHVRGVLKTYGIRLAPVTSARNRAGFREQVQAVVEGDPVLEVVAASFIVVHEAVCTECAALEEELVTLARGSALARRLMTVPGVGPIVALSFIATIDDAARFGKSSQVGAYLGLTPRRYQSGEVDHSGRISKCGDAAMRALLVEAASTLIAKVKRFSPLKAWAIRLAARKGFKKAAVATARKLAVILHRMWCDGTTFAWKREAATA

SEQ ID NO: 237147 - protein, 400 aa, unidentified
MNAVGIDVSKGKSTVAIMRPFGEVIAEPFEVSHTDTELRKLACFLEKLPGETRIVMEYTGSYWQPIAKVLHDAGFFVSAVNALLIYKYGNNSIRKGKTDKLDAVKIANYCLDRWTDLERYSPTDQIRQTLKTCRRQYDQYIRLKVNLKNNLIALLDGTFPGVNTLLKSAPRDTDGHEKWVDFAGKFWHRQCVCGNSEKAFANQYRKWCAKAGYRFNAEKAVAIYSHAGSQVDTLPMSSAIQSLITHAVAQLNMIIETISAIQHEMLTLASQLPEYPIVMRMFGVGPVLGPQLMAEIGDVRRFHCKQSLVAFAGVDAPPCQSGTFESKNRHISKRGSPRLRKTLFQVMSTIIQHAPADDPVYQFLDRKRREGKHYYVYMTAAANKFLRIYYGTVMAYFEKP

SEQ ID NO: 237148 - protein, 354 aa, unidentified
MGYFAGLDVSLEETAICIVDDAGMIVREARAASEPELLVAFFEACGMKMERVGLEACSLTAWLHGGLTEAGIPAICIEARQAKAAMGAMPNKTDRNDARGIAQIMRTGWYRAVHVKSPPCRSWRALLTARRMVLNKRRDVENGIRALLREVGLKVGTPSRKDFPARVRELAADDPVLMSLAGSLLSVIEVMTREVERLTKRAFDEVRIEPTCRRLMTVPGVGPLTALAFRATIDQPGRFRKSRDVGAHFGLTPRRYQSGETDVQGRISRCGDELARTALYEAAHSLLIRSTKWSALRAWGMNIAKRRGMARARVAVARKLAVILHRMWVDGSEFLWSKQAPASGRCVADIPVSA

SEQ ID NO: 237149 - protein, 316 aa, unidentified
MRQVCQIGLDIAKEYFQVHGVDKNGKDVFNKKLKRKNVLSFFANLPPCLVGLEACGGAHYWARKIAKLDAGHTVKLISPRHVKPFVLNNKTDAADARAICEVVGRPSTRFVTVKTVEQQDLAAWHRIRERKIKERTALANQAKALLLEQGIVVAKGITRIRKFLPIAVENLENRLSMTARDYLSELYAELVTCDELVEKYESRIISFAKNDEACKRLQKIPGVGPITATAIVVHAADATEYKNGRGFAASLGLTPKEHSSGGKQRLPGISKRGSNTIRKLLIQGARIITRYALANKTARIIWNLLAKREEYRPVMA

SEQ ID NO: 237150 - protein, 358 aa, unidentified
MPQFTPSDPAEVVLGVDTHKDVHVAAVLTALGVLLATSTFPTTAAGYRRLLAWARGFGPVHRAGVECTGSYGAGLARYLLAETITVIEVNRGDRGERRRRGKTDTLDAETAARAVLSGRATAIAKSGDGQVEMLRMFKLAKASAIKSRSQAINQLKAIVVRAEPTLRESMTRLRNPALFRRCAQLSVSDPLDPAGAAALTLRLLARRVLALTGEIDELNVHITAAIQTRAPKLLQRYGVGPDTGAALLLAAGDNPERLASEASFAALCGVSPIEASSGKTRRRRLNRGGDRQANSALYTITIARLRWDKRTQHYVRRRVAEGTTRREAIRCLKRYICREIYRDITLAPNPPAPASSAA

SEQ ID NO: 237151 - protein, 345 aa, unidentified
MKLSRVGVDLAKNVYQLHGVDRHGKTVWKRRLRRGQWLQVLTDTVEPSCEIGMEACTGAHHWARELQARGYTVRLIAPQFVKPFVKSNKNDANDAEAICEAMSRPHMRFVSVKTIEQQDIQATHRVREELKAHRNAKANQIRGLVAEYGLVAPKGILVLRRTIPEWLEDAENGLTNSFRSLLHGVWNDLVTLEERLKELDKEIEKLARSFEVTKRLQQLRGVGPLVATALVATVGDGRQYAKGRQMASALGLTPRQNSSGDKYRLFGISKRGDVYLRTQMIHGARAVVSQAKHRDDPLSRWVTGIAKRRHPNVAAVALANKTARMAWAMLQNETNYDSSLANGQA

SEQ ID NO: 237152 - protein, 312 aa, unidentified
MEKLSCGGIDVSKDRLDVVVLPEGWFFSVSNDTAGWAELVARLRPLGVSAIGLEPSGGYERGIIRALLAAGLSVRRINPNKLRQFARARGVLAKNDRLDARLIAEYVAIMPTRVVQRDDAVERLAEIVTMRRQLCDEHVAVENQAAHLEDAMLRRLSKRRLIRLEADIRLLDKRLAEMVATNAAFAQLYELLTSMPGVGPVLAFTLIALLPELGKMSRKQIAALVGLAPYDFDSGKLRGHRSIYGGRMPIRNVLYMAALSASRHNPALKAFSNRLADANKKSKVIIVAVMRKMITTLNAMLRDNTAWQPQSA

SEQ ID NO: 237153 - protein, 342 aa, unidentified
MQAIATIGLDIAKSVFQVHGVDAVGQVVIRRQLKRRYVLAFFQKVPPCLVGIEACASSHHWSRELQALGHTVRLMPPAYVKPYVKRQKNDAAEAEAICEAVTRANMRFVATKTPEQQSGLMLHRTRHLFRQQTAVINAIRAHLAEFGIVAPVGRNGVEQLLGIVADPNDKRLPEVARVCIAALGTQLRGLKAQVLNFDRQIMAWHRSNETSKRLDEIPGVGPVLATALVASVADPKAFRSGRDFSAWIGLVPKQYSSGGKDKLGSISKQGDRYLRGLFTAGALAVIRYAKIHGTKHRPWLTALLARRPTKVVAIALANKLARMAWAMMAKGERYKQPVALAA

SEQ ID NO: 237154 - protein, 318 aa, unidentified
MTHTTQTTALYVGIDVSQNTLTVAIYPTDEVWTLVNDPHSHTALVQHLAQLPIQRVLLESSGGYEKAVVSALQQAGLPVVVVPAQRARYFAKSMRGDLKTDRADARMLAYFACCYPVQPVAPCSPVQAELKELWARREQLVQELEREKKRLQTGMSEAVRASLERMIAVLKEEIAQIEARVAELIASDADLSQKAALLQTAVGVGRVVAYGLVAELSELGQVSHRAIAALAGLAPVRCESGAWVGRARVRGGRPRVRRLLYQAAVVAATHDGRWRAVYEALVGRGKAKKVALCAVARQLLVVLNAMVRDGRAYERVQE

SEQ ID NO: 237155 - protein, 409 aa, unidentified
MNVYCGIDWAEEHHDIALADADGGLLGRRRISDDAAGFAQLLDLLAEHGDTAADPIPVAIETPRGLLVAALRATGRKVYPINPMAVARYRDRHSIAGRKSDHGDSFVLANILRTDLHVHRPLPGDSELAQAIAVLARAQQDAVWDRTTAHNKLRSHLRQYYPGFLAAFADARGGILRPEARVILAAAPTPAAAATLTPAQLRALLKKAGRRRGIETEATRLREAFRIPQMRQLPLVEDAMGRQAQALLGQLDAACTAADDLEQAVTQSFNQHPDAGIITSFPGLGILTGARVLAEIGDDRSRFQDARGLKAYAGAAPITRASGKSTAITHRRIKNNRLANTGWIWAFAASANYPSARDHYRHRREIGDRHGPATRHLFNKLLGQLYYCLQHGQTFDEDKAFRPTVAAAA

SEQ ID NO: 237156 - protein, 414 aa, unidentified
MKLFVGIDVSSEELEACFMNPEGDTLETLKVENNLHGASHLRDRIVAVADKLSSSEIHIGLEATSVYSWHPAMYLHEQEPLQKRNAKVFTINPKLINKFREAYPDLDKTDQIDAWIIADRLRFGRLTTTIVMQERYVALQRLTRMRFHLVHNLTREKQYFLQNLFYKCNAFRSEVDSNVFGHAILEMLSEQYSLDDIANMEVADLADYLKDKGRNRFPDPEHVAKCIQKAARASYRLSKVVEDSIDLVLGASIQAIRSIQSQLKEIDKAIERMLDGISGAQCLRSIPGIDRVYAAGILAEIGDIERFSDQAAVAKYAGLVWRKHQSGPFEAEDTKRIRSGNRFLRYYLVEAANSVKNREPEFGAYYRKKYNEVPKHQHKRALVLTARKLVRVVDVLLRNGQLYAPGRKVNTTEH

SEQ ID NO: 237157 - protein, 356 aa, unidentified
MQNKFSKILNFSGHNVYVGLDVHKASWAVNIRVDNIEHRTFTQPPDPVALYKYLVKNFPGANYFSAYECGFCGYHHHRKLKELGIHNIVINPADLPVTDKEKISKRDPVDSRRLSRALQNNQLKAIHVFDPDHEQFRALNRMRWKAAKEHRRVKNRIRSFLLYFGINPPSELNPDYWTIAFVNWLRQLKFPDQAGTLSLEYLLNSYKSTKDHLLEVSRHLRKQVKLHYPDIYKRLISVPGIGPVNAMCLIAEIGDMKRFKSCKHLASFVGLIPRSHQSGTKDPDCSLTYRSNKYLRSALIESAWMALRADPALLQYYKEKIPGHKSQIIITKIAHKLLNRIRNVWLNETSYQTGVM

SEQ ID NO: 237158 - protein, 425 aa, unidentified
MDCIENQKINQVTEKTLVVGIDIAKRTHFACFVDDRGRVLQKSFSVSQSRDGFESFYQRILRAMKDHDKTEVLVGIEPTGHYWLNLAYFLEERGIPLVITNPMHVKRSKELDDNLQTKNDRKDALVIARLLKDGRFSYPRILKEKEAELRVGSTFRGKLTEELGSVKNMMIRWLDRYFPEFTQVFPSFGKMALAVLECTPFPSDLHQKQPDEVLDIYRKVEGLKSPQRPKATQLIQVAAQSIGVTEGREMARFEIATLVRRYHQLEQEIESITQKLVELVKTSVEYEWLTTVQGLGDTTIVDLLAEIGSFSHYKDPRQLIKLAGLTLRENSSGQHQGQKRISKRGRRKLRSLLFRVMMPMIRHNEAFKKLHDYYTNRKVNPLRKKQSIVVLCGKLLKVLHGICTKHKVFDAQRMMKDIPSLAEAM

SEQ ID NO: 237159 - protein, 316 aa, unidentified
MAGGWYIGIDVSKDSLEVAFGCDGEVRQVANADRAIMALAAELKELGPQLVVMEASGGYERMVAALLWEAELPVVVANPSQVRDFAKGLGQYAKTDRQDARIIARWAEVKHPPVRRLPDAQGRELSELLRRRRQLLEMLVAERQRLAQTVSKPIRKELNASIGSLQRRLERIEAEIELRIRKSDLWNRTRELLESVPGVGKLTSFMLLAELPELGTSDRRRLASLVGVAPYPRDSGKWHRPRLTYGGRAAVRSALYMAALSAARCNPVLAPFYQRLLGRGAAKKQALVAVIRRLLGILNAIVRDRTPWRLPCAVPV

SEQ ID NO: 237160 - protein, 369 aa, unidentified
MRKKRIKQGMSNSAIAGVDLGGSDSLATVLSPGGEVSDRFSFPMSEEGYALFASRVSRDARVAFEATLMAYPFSRMLKELGYTDITVAHPTELAWIVRSKKKNDRADSLKIAKLHLAGMLPESHLLGKGEQIERDLLIQRVKLGLEIGRMKSSILSYLTREGVQSLPETSDNFSVARRLAIRSLRFDDDRDVVLKTMTDRLEFMEGQCEPLEERIRRNARENKHARLMMSIPGVDYYLASLYASYIGDPHRFPTFDHVASYLGIVPVSKDSSNVRRRGRMSKDGPSIARWTLGVMVDTVMRRNPGIKEYYDRAKKRKGRGSYARVLTMKKLARMIHHMLITEQNWRWEDEELTEEKLSRLDREEGGESA

SEQ ID NO: 237161 - protein, 341 aa, unidentified
MQVTTIGLDLAKNVFQVHGIDATEKVVVRKQLRRGQVMTFFEALAPCLIGMEACATAHHWARELTKLGHEVRLMPAKDVKAYVKRNKNDAADAEAICEAVRRPTMRFVAVKSAEQQGRLMQHRVRDLLMRQRTQLINALRAHLAELGMAAAQGREGIKELLAIIAQDEDSRLPVDAHASLIVLAAQLQAVQTMIGSIEKRVVGQHRSNEESKRLETIPGIGVIGATAIAATVPDPKVFRSGRDFAAWIGLVPREDSTGGKQKLGPISKQGDRYLRRILVVGACSVLRRARQQPEKYPWLTQLLARRPFKVVAVALANKMARIAWALLAKGGTYRTPQLTAV

SEQ ID NO: 237162 - protein, 403 aa, unidentified
MNAVGIDVSKGKSKVAVVQPGGEVVCKPYDVGHTVFELNELADFILSLNGEAKVVLEYTGRYSEPIANTLSNAGIFVSVVNAKLLKDYAGGGNTIRRDKTDKLDAVKIAKFCLDKWANLSQYYPEDEDRKILKVFNRQLSEYTKMKTMLINNLIALLDQTFPGINRLFTSPVRESDGHEKWVDFVSTFYHSNCISSKSLGAFYPRYEKWCRKNGYNYSYEKAVEIYALAEQSVTTLPKDDFTKSLILMAVYQLNILCETVAAVKYNMTQIATELPEYDTVLAMHGVGKSLAPQLIAEIGEVTRFNGRTSIARFAGIEPPANQSGTYNQKSRRISKQGSPHLRKSLFLVMKAVLQNKNQDQPTYQFLDKKRSEGKPYKVYMIAGANKFLRIYYARVMECYGLDE

SEQ ID NO: 237163 - protein, 344 aa, unidentified
MPVSVIGVDLAKNVFQVHGVDDLGRPLLLKQLRREQVMAFFAQLPPCLIGMEACASAHHWARKLQSLGHTVRLIAPQFVKPFVKSNKNDAADAEAICEAVRRPTMRFVPVKNIEQQAALALHRVRQSLVRSRTAQSNQIRGLLAEYGLVMPPRISSVRNGVPKLLDEAAGRIPGVFRELILGLLDYLRSLDERVKALERQIQLWHRGNVFSQKLEDIPGIGPLTASALVASIGDAKQFSTGRQLAAWLGLVPRQHSTGGKPKLLGISKRGDSYLRTLLIHGARSALRTAHRKPIGERWLNSLVGRRHPNIAAVALANKNARIVWALLVHNRTYDDNFEQAPLPT

SEQ ID NO: 237164 - protein, 340 aa, unidentified
MGSVTTIGLDLAKNVFQVHGVDAEGVAVIRQRLTRGRMLKFFAKLPPCLIGIEACATSHYWARELVVLGHDVKLMPAQYVKPYVKRGKNDAADAEAICEAVTRPTMRFVGIKSPEQQSAMLLHRVRLILNRQRTQLSNAMRAHLAEFGIAAPIGRNGIEQLLDVIADPTDERVPADARFCLEMLAAQLRIVKEQILENDRRILASARETELGRRLMEIPGVGPLLASAIVATVPDPAIFRSGRNLAAWIGLVPRQNSSGGKERLGGITKAGHQYLRQMLTVGAMAVVRFAERNGAKRPWLVQLLARRKAKVAAVALANKNARTIWAMMASGERYREPQVA

SEQ ID NO: 237165 - protein, 406 aa, unidentified
MRSYFRVPKKSVVACVLLTREDGTVQRQVRSFGTMTVDLLALADWLTAAGVTHVALESTGVYWRPVFNLLEDEARTIVLVNAQHMAAVPGRKTDVRDSEWLADLLRHGLVRASFIPPAPIRELRELTRYRKTLVQERAQEVNRLQKLLEGANIKLAAVATDVLGLSGRDMLRALIGGEQDPEALAELARGKLRAKLPALRQALQGRVQPYHLILLTRILAHIDFLEGSLAQLQAEIDARLTSCAEAVTLLQTIPGVGPIAAATIVAEIGTDMSRFPSAKHLASWAGVCPGNKQSGGKRLSGKPTNGDPWLRGVLGEVAQAVTRTRNNYLNAQYHRLARRRGKYKAILAVAHSILVIAYHVLRDKQPYSDLGADYFDKLNAARIERHHVRRLEQLGFTVTLAPNHAA

SEQ ID NO: 237166 - protein, 343 aa, unidentified
MQTVTTIGLDIAKSVFQVHGIDAAGRVVIRRQLKRRFVLSFFEKLPPCLVGIEACASSHHWSRELQALGHRVRLMPPAYVKPYVKRQKNDSTDAEAICEAVTRPNMRFVPTKTVEQQSCLMLHRARHLFIRQQTAVINSIRAYLVEFGIVAPVGRRGVEHLLEVVADADDHQLPEVARMCLVALGSQLRALKAQILEFDRRIMAWHRSNATSKQLDAIPGVGPALATALVASIADPNAFRSGRDFSAWVGLVPKQNSSGGKDKLGSISKQGDRYLRSLFTAGALAVIRYAKIHGTRHRPWLTALLARRPTKVAAIALANKLARMAWAMMARNEHYREPAALAA

SEQ ID NO: 237167 - protein, 462 aa, unidentified
MKLYLGGDVSKGYTDWVILSDKKQTVLENFQLDDTYEGHCSLYSRVEAYFDKHPGLEMYAAVESTGGYENNWFNALKSYQKVFNLKVARINPAGVNFNRRASMKRNVTDAISALSIAEYMINHPENILYDQDEKWKTLCRHWNFVEMQKHQRVQTINQLETILYTANPTLLRFKKNKLSNWLLELIIKCPTADKLARVKPEKLAKISFLTLKKAKALVAEANKNIASATDRNSEILVRQIARQIKAFDENIKSQMKLIEQELICPEIELLKSFKGIDTTSAIGLLLEIGTIERFPTVKGFSCFFGLHPKFKQSGDKIIGVRMSKQGSKNMRKILFNIAKGAITFNPLIRDVYEKKLSEGMSKMAAIGVCMHKILRIIYGMLKHNQVFDPLIDKHNNEQSKSKQQEKKLQENANIDKSRRYQEFDATAPISRKQIKKRKEHDLSQCELTSQSTGSACSSNTKL

SEQ ID NO: 237168 - protein, 343 aa, unidentified
METFVGLDVSLGETSVCILDKDGTRIFEGKVASEPAPIARLIRKRAPGVVRVGLESGPTSVWLTHALTAEGLPVVCLDARHAHAVLSVQINKSDRGDARGLAEMIRVGWFKAVQVKSLNAHERKALLIARHQLVDMRVRIDNQLRGIMKTFGLVIGKCGRGQIGQRAQELSKGQPGIDGVVASMVAVRDSLLEQIIVCDRAIRRLAKKDDTARRLMTVPGVGPVVALAYISVIDDPKRFNHARDVGAYLGLTPKRYQSGEVDLTGRISKCGDGFARTCLYEAASVLLTRVGRWSPLKAWGVRLMKRIGATKAKVAVARKLAVILHCIWTDGTEFWWTKEAATA

SEQ ID NO: 237169 - protein, 358 aa, unidentified
MEAQVKKLDFTDQNIYIGFDAHLKDWKVTIMAENIVYKTFTQPPRPEVLYNYLKNNFPGGNYHSAYEAGFCGYWIHDKLVSFGIKSIVVNPADIPTTDKERVQKEDKRDSRKIARSLSSGNLTPIYIPSIRTQRDRSLLRTRAMLVKDLARYKNRIKSFLYFYGISIDDSFKNPQSHWSNRFMIWLESIDMGEESGKEALNVLISECKNLRISILNVTKQVRKLSRTEPYQEQVILLKSIPGIGLLTAMIILTELETINRFKNIDKMCGYIGLVPSTKSSGEKERTGDITPRGHNVLRTALIESSWTAIRNDPSLMKSYLSYIKRMDSNKAIIKIAKKLLSRIRYVLTNNKPYICSIV

SEQ ID NO: 237170 - protein, 348 aa, unidentified
MSTYYIGADVHSNSTELAIEKRGKIVARYSVPTSIPAIANILDSVQGKKYLAIEEGPMSGWLYRNLNKKVDDFISSDPRRNKLIVSDGDKDDKIDASKLASLLRGGFLRKVHQSDDAGRAELKHWVSLYHDRVRDAVRGINKIRARCRMHGVKISRAALRNPDCRTDWLLETNNNALANQLKMLWIGYDATVQQVKFSKRQLSLLSKKYEIIQCFSQLPGVGLIRATTIFAYLDTAWRFKKKNKLWKYCGVGLQRTTSGTDPKGKPRPARLKLPWSVNRTLKNAVLGATLSAINQKNNVFKDYYERMVQGGVITSNARHAVARKMITAMWAMWKTKSRFDEKKVFLPN

SEQ ID NO: 237171 - protein, 343 aa, unidentified
MTKIITIGVDLAKNVFQVHGVDASGAVVLRRQLRRGAVEKFFAQLPPCLVGMEACGSAHHWARVIGRYGHEVKLMPPAYVKPYVKRNKNDGRDAEGICEAVTRPTMRFVPVKSVEQQAALAVHSTRALLVRQRTMAANSMRAALSELGIVAPQGYEGLRELMARLEEPSEEIPQMMRDALLVLARHWQALDADERVLERQIAKAARCDGEARRLMEVPSVGPMIASTILAKVPDPKVFRSGRDFAAWIGLTGKDHGTGGKHRPGRISKQGDRVLRALLISGASAHLRQQKARGITDPWLRDLLARRPYKVAMVAFAAKTARIIWAMLVKGEHYRDRASVSAAA

SEQ ID NO: 237172 - protein, 400 aa, unidentified
MSTASNRVVIGMDPHKRSVTIEMMTPDEIVVGGGRFDTNEAGFAAMMRYVSTPRPGREDRVWAVEGCNGIGHHVAMRLLAVGEEVVDVPPKFSARVRMFATGQGRKTDVTDAHSVALVGTRMAGLRPVVNDEQLAVLRVLVDRRRSLGEDHTRMVSQLHAHLLELIPGGAKKDLSAAQAKTLLAKVRPRGIAGKTRRRVAAELIGDLERIYTRKKAADRELRELVAATGTSLLGLNGIGPTGAARLLVEVGDITRFPDRGHFASWNGTAPIDASSGDHVRHRLSRAGNRQINRTLHIMATVQLRNPTEGRAYYDRRKADGKSSMEAMRCLKRRLSDIVYRTMLNDSVVHAIADGKTGPGGQRGDDSDSSAAGSHPHTGSSDKSLPGPAKHDPRTRLPDAS

SEQ ID NO: 237173 - protein, 458 aa, unidentified
MQRNRSKPKTQRTMPMVHANAAAIDIGATMHMAAVRADRTSEPVRSFGTFTTDLHQLVDWFTECGVETVVMESTSVYWIPIFELLDARGFTVFLVNARDAKHVPGRKTDVSDAQWLQRLHSYGLLRASFRPKGQIAELRAYMRQRERLLEYGASHIQHMQKALTEMNLQLHHVVADITGATGLRIIRAILAGERDPNVLARLRHYQCHASADTIEKALTGSYRSEHLFALEQALALYDVYQEKASACDIRIEAVLKELSIGRGPRSDPLPSPRRHRATQANGLAFDVRAALFALLGKDLTQINGLGPYLSLKLIAECGDDLSAWPSAKHFTSWLGLAPSNKISGGKVLSSRTRRCGNRASALLRLAAVTVGRTDTALGAFYRRLSARIGKTKAITATARKIAVLFYNALRHGMEYVDPGASFYETRYRARVVDNLHRRAKAFGFVLQPIEPTPSSVVS

SEQ ID NO: 237174 - protein, 348 aa, unidentified
MRFYTKQHKFSCGIDLHARTMYLCIIDKEGKIILHRDIKTDPDIFLKTIAPYREDIVVAVECIFTWYWLADLCSNENIPFVLGHALYMKAIHGGKAKNDKIDAYKIAALLRGGMMPMAYVYPSDMRSTRDLLRRRTHLARKRAELIAHIQNTNHQYNFADMGRIARKCDRIKIGASDRFTDPSVQKSIDLDISLIEHYDKLLNHLEHELSLIAKVHDADSYFRLRSIPGIGRVLGLTILYEIHDIKRFPSVQDFVSYCRLVKSAKESAGKIIGSSGKKIGNAHLKWAFSEAAVLFLRRNPEAMKYRAKLERQHGKAKSLTILAHKLARAVYNILKKKEVFHPKVFFAK

SEQ ID NO: 237175 - protein, 378 aa, unidentified
MDCLNAKSSEERVVYKRLNSTGTLIQTTTTEAPQGHMYYIGLDVHKKTISYCVKDASGQVHQEGKVGATRWELDGWMKTLPQPWTVAMEATIFTGWIYDHLLPHAQQVKVAHPLMLRAIATAKKKNDRIDAGKIADCLRCDFLPECHMACTAIRDRRRTLRYRHLLVRQMVQMKNRISGLLMETGVSHNKRRLHKVGYFRELLASNEEVSESIRPLLRVSRDTIVRLQKTEYALVSSLQRDPLLAERIKRLRTVPGVGPITALTWALEMGEVSRFPSIREAISYCGLCGDEKSSADKVMRTPLSKQRNKHIQRVLVEAAKLAPRQDHALALVYEREKQKGNANRATLAVARKMVAYLLAVDRGQRDFVPFADSQSAAA

SEQ ID NO: 237176 - protein, 296 aa, unidentified
MIIIGVGYHPSDQYIAFADSETGECGERRLNHGAGEAEKFYRALQQRAVSVRVGMEATGYSRWFERLLAELDMELWIGDAAKIKTKRVRKQKTDRNDAQLLLGLLIENRFPRVWAASPENRDLRQLLWHRHRLVQMRTRIMNQLQALAMNEGQRRKKKLWSAQGRAQLEKLPLARWASLRRQDLLELLDRMTPAIAELTAAVEQEAKKRPEVLRLMTHPGVGPITALAFVLIIGTPERFPCGKQIGSYIGLIPAKDSSAGRQRLGHISKQGNALLRYLLGEAAQAAVRCDADWRRR

SEQ ID NO: 237177 - protein, 421 aa, unidentified
MNTTPIAWEQRQHFGALDWARDHHDIAVVDAKGTILLQLRFEQTPEGWAGVRAALAPFGPALAVAVETNQGLAVEQLMDAGCTVYPVNPKSASHYRARKAPAGAKDDQRDAWSLADALRVDGHGWRPLVPDDPLVAELRLLTRDEVALISQRTALINELRSALAAYYPAALSAFDTWTCEGCWTFVETFPTPSDLAKAGPKKWEKFLRTHQLWKEASAEKRLAIFASAAGLSGAPATVAAKSFMAVSLVRVLHVLQAQLDAYRQRIQERFARHPDSGLFGSLPGVGVKLAPRLLAEIGDNRARFATAEGLQAYGGTAPVTFQSGQIEKHLVRRACQPFLRSALHLWADRSRLTCTWAADYYRAHRNKGQSHACALRCLGQRWVKILWKMWQTSTPYDEAKHIANQRKHGSPFVSALNPRTA

SEQ ID NO: 237178 - protein, 386 aa, unidentified
MHDGTNLPVPERTGIRRDCATLFVSLELSRSTWVATALAPGSSKMSKHTLAGGDGRKLLDLLARLKARAEQRIAAPVKVVAIHEVGLDGFWIHRLLDANGVESHVVDPASIAVPRRHRRAKTDAIDGETLLRTLMAWQRGEPRVCAMTVPPSPSEEDRRRISRERAALLRERIRHTNRIRGLLFGQGIANYNPLNKNRRECLEELRTGDGRLVPARLKAEILREIDRLELVLRQISEVEAERDEMLRPAEASSPAALLMQLKGIGAEFATVLYLEGLFRHFENRRQLAAYAGLAPSPWKSGSIDHEQGISKAGNPRLRTTMVELAWMWVRYQPDSALSCWFRQRVGSERGRTRRISIVALARKLLIALSRYVTHGEIPAGAVMKPV

SEQ ID NO: 237179 - protein, 340 aa, unidentified
MKKLYAGFDLHSSSSYLGIMNEDGRRLLGRKVANDPGGILEVLEPYRRGIAGVAVESTYNWYWLVDLLMEHGYRTHLANPSAMKQYKGCKHRDDRHDAFWLAEMLRLGILPEGYIYPKQTRGVRDLLRKRGHLVRLRTSLIISLQHMITRTRGTKLGVNDIKRFREDRVRPALDGDEDVLLAGSVSKETIDYFTRQIRKIETAVEGRIRLSSPYLRLPSLPGVGKILAMTIMLETGPVSRFPTVGDYVSYCRKVDSKWESNGKKKGKGNKKSGNRHLAWAFSEAAELARRYDPRARAFYQRKARARNFMVAYQALAHKLARAAYCMMRDDVPFQPEKLFR

SEQ ID NO: 237180 - protein, 395 aa, unidentified
MNSEQQKKYFVGIDISKDSFDATLIDEHQKKLFYQKFEMNKNGFKSFLQKLEKFDKALLQITVESTGVYFVSLYNYLLNTGFSISVINPLLVHNFHKSMSLRKTKTDKKDSFIIALFTLKNLEILSKHSKQTSTMRRLCRERDKISEEIAKVKTEIKSDMNILFPELEKHIDIFTKSMLLFLEKHSSATSIRKLRTTQIDAVFNKTKGNKVRMKSAELKKLARDSIGNGDKYLEKVLNSKIQRLKLYQELSKEFDLEISLFIDQNQSTDFDILTSIKGIGKITAQKFLIEVDDIRNFNNHKQLTAFMGTDPSLKQSGTSIMYQGKISKRGNKYLRKTLFQMAVSCIRNDSTFNAYYHKKRDEKKKYKQAVIATGNKLLRVIYSMLTKENYYCEEY

SEQ ID NO: 237181 - protein, 278 aa, unidentified
MFVGIDVHKDTHTAVGISPFGEKLFEITVGNYKKDFETLKEKVDEVAGTLSPYIGLEDVRGYGERLAGYLYEKYPVYHVPSILVDRARQNATHPEKSDSLDALGVAKVMIQSIDTLLPYTISEDGQKAKQLKEISIDREDLVLERTRLKNQVHTLLYRIYNTEYADKYKDPFSLKALRYWRSAKPKCDPFLLKTMKRKVKRLLDIHIEVTDLEKDMETLLDTGGYTIQTASGCGLVLASAIVGEIGDINRFTSPGALAKYAGCAPRERSSGKKVRHVK

SEQ ID NO: 237182 - protein, 345 aa, unidentified
MYNMLTGVDLAKKEIQVCVAKSNKIVRNMPMTPTAFSNWLATQKPMTVVFEACATSNYWYQCAREYGHDARLISAKLVSNIRQNQKTDKNDAEAVLQASQLSNVNFISGKSKEQQELQSLVRMHQLSVKHKVAYGNQLCSLLLEFNIKLSPTDAGLNSAIQSILEDAENGFSAIFREALHTAWHQYLKSIELVKHYEKSVARASSASEACKNLMKIEGVGPTNAVNLYIALGCCELGVFKKARDAAACIGLTPIQHSSGGKVRLGSIGKNIRNSSLRANLVAGAMSAVNQAVKRDSRTKKDEWIKGLVERRGKRCAAVALANKTVRTAFSLLRNGTDYKAELLSA

SEQ ID NO: 237183 - protein, 342 aa, unidentified
MGSVIRRGRSRHTMSALVCGLDVHKDSTYATILDSQGKIVDQRRMENDKVPSYLLDFKVHKVAMESSTAIAPLYRQLKKEGFDAVVSHPKKTKLIAEAKIKSDRVDSKAIAQLLRMDWLPLSYVPDDETGALREKVRRRAFLVRERVKLRVKIKSYLTYQGLKWPADHGLWTKGGVVWLQSLNLAPVESYLRLIDIFSEEIKVLSRELEGLAKNDEDVKLLMTIPGIGYYSALLVESEIGDIGRFPFAEKLCSYAGLVPSTYQSGGTVHHGAITKEGSRWLRWIMMECASTHVSKYDTWISRSYRCLAGRKGKNTARVAAARKLLVVCFSVLKNKRPFYDQP

SEQ ID NO: 237184 - protein, 454 aa, unidentified
MTVPRPARLRVDNLPTVFPNAAGLDIGSAEIVAALPPDRDGTVVRTVTTFTSDLRHLVAWLLDHDIDTVAMESTGVYWIPIYEMLEAAGIRVFLVNARHFKIVPGRKSDYNDAQWLQKLHALGLLEGSFRPDDEMCILRSFLRHRAQLIEHRSPHILHMQKALKLMNIQLPEVLSDVTGVTGLAILRAIVAGERRGDVLAKLRRPGCRRTEEDIIHALHGTWRDEHLFVLAQSLDLYDHYTAKVAECDRRIDQQFSAMKPRFDIEGEPPAPPTSRTKKNSNSKNQPAYNVRAHLVRILGIDLVDVIGISESLAQTIISEIGTDMSRFPTSKHFCSWLGLAPHNDISGGKVLRSRVMKVHNRAGQALRQAAQSCSRSHSIFGAFYRARSARSSSEEAVVATAHKIARVIYHMLTCHEAFQPESIRAFDQKRQERDVKHLQTRAKALGFILQPMTV

SEQ ID NO: 237185 - protein, 352 aa, unidentified
MWHCGIDYHKKYSTACVLDGNGDILREERLEHEDDGRLIACFFNGMSEPCEVVFEATQNWVWLYDVLEPLRMVSGIHLANPYQTRVIAAAQIKTDKLDARKLAKLLRGGLIPEVHIPGPVTRADKLVLRQRMFMVRLRTRMRNRIHKILARQHGLEMPQVSDLFGAKGVAALRAAKLGDPDRQMLDDALAVLKTLDEQIKKEEKLIKERMGDSDMMKLLSSMPGFGPILGGVVAAEIDDIGRFLDARKLCAYAGIVPSTYSSGGKTTHGRTLKACNKWMKWAIVEAAWVAVGHSAYFGGLYRSHVARGKTKTRAIIIVARRMCQIIWRILKEQRPYEDRPLQRNSPAAPRQF

SEQ ID NO: 237186 - protein, 423 aa, unidentified
MMRLAYPICCGLDVHKKIIVATIVTTDKSGISTYLQKEFRTINSDLQLFHDWLLENNCKHVCMESTGKYWIPIYNYLEEDIEVCLTHPKYVKAIKGQKTDKKDSKWIADLYKFDLVRCSFIPPKDFRQLREIARYRFKLVCMKSSEKNRIQNCMTVSNIALANVVTDPFGKTATEIISYLLEHTSESMDEKAVRKLIRKRANAKADDIIEAIKGYKIETDQVAKLTLARNHMAYLDQMIVQTEVELYVRIKPYYEYVEYVSSMPGMTALSATIVLAETGVNMDVFDDAGHLCSWCGLTPRNNESAGKKHSTKIMKAGAYLKPLMVQCALAAIACKKDPYFAIKYRRIKSRRGHKKAIIAIARMMMVSIYHMVKGKKPFSPCDYEEFLDPHKHTQRVVLNDANVFEYLRAQGYDTSSLVKCNGD

SEQ ID NO: 237187 - protein, 437 aa, unidentified
MEPTAAARAGNPPSAWKRLTFFLGLDWAKDHHQVLVLDHQGSIRLDRRIENNAQGWAGLRQALYELAGSDLTLVGVAIETSSGPVVERLLEMACTVFPLNPLAAQRYRQRHAPSGDKSDALDARSFAQALRHDGAQWRPLRPEDPLTQELRLLCRDEVVLITQRTALVNQLQAALHEYYPAALEAFDDWTLPCACAFVEAFPTPKALAIAGKRRWNSFLHTHKLYRPQTYEKRLDIFARADQFAGSPAVTHAKSRLVLALAKQLHALQAQIQEYRQAIDDLFRNHPDHDIFGSLPAAGGKMGPRLLGECGSDPQRFEDPDALRCYAGTAPVRFQSGQIHVVKFRRACNKHLRQAVHLWVNLSRSTCAWAEAYYQQKRKEGKSHACALRCLAQRWLKILWKMMQTRQPYDEALHTRNQVRHGSWVLALPSTNLTPVPA

SEQ ID NO: 237188 - protein, 320 aa, unidentified
MQAITTIGLDIAKSVFQVHGVDAGALRRQLKRRYVLAFFGKLAPCLVGIEACASSHYWARRLQALGHNVRLMPPAYVKPYVKRQKNDSTDAEAICEAVSRANMRFVPTKTPEQQSGLVLHRTRHLFIRQQTSVINAIRAHCAEFGIVAPVGRRGVEELLNVIANAKDEQVPAIARACVVALGAQLHRIKQQILEFDRMITAWHRCCDTSRRLDEIPGVGPALATALVASVANPRAFRSGRDFSAWIGLVPKQNSSGGKPKLGSISKQGDRYLRGLFTAGALAVIRYAKIHGTRHRPWLTALYAELEPNVANAADESYVRA

SEQ ID NO: 237189 - protein, 436 aa, unidentified
MTLINFVAANQKYYAFNLLSVFIMVFWSVQYLLQHLLVQTQVSHQLLQPLILILQLPQTPQFRHARPGKFFLPVNGMDYFLPLRLTVRNVLTRRITMNIVFLGIDLAKNVFQLCGLNQAGKPVYTKCTGRKELLQTLANIPACLIGIEASTGAFYWQREFEKLGHKVKVISPQYVRPFVRGQKNDGNDAQAIAVALMQPTMQFVPPKSPEQQDIQALHRARQRIVNHRTATVCQIRGLLLDRGIPIGSAVSRARRAIPLILEDAENGLSSRMRRTIAELYDLFNDLGRRIHFFDKEIETVFRQSEACPRIAKVKGIGPKTATAVVAAIGKGTEFKNGRHFAAWLGLVPRQHSSGDRQVLMNMTKKGDKHLRTLFIHGARAVVRVATNNNDGHMNQWVNQLKERRGFNKTTVAVANKNARIIWSMLRNDTGYQVVCN

SEQ ID NO: 237190 - protein, 418 aa, unidentified
MTTFNGNYSVYVGIDWANDKHDLCIQQANSDKRKFKVIKHSANTVNDWIIKLHKQYKGQIAVAVELSKGPIVYALQKYKFVTIHPVNPSMLAQYRKAFSPSGAKDDPTDAELALDLMLNYPKKIKALKMESEPVRKLTYLVEQRRRLVGDRRRFSNRLINTLKQYYPHLLDWFSHRGSGMFCDFITRWPNLQKLKRARADTLRKFFHAYPGRTASCTEQRLVLISQAEPLTLDNAVIESHQLLAVALANQMLVVVKAIKVFDKEISALFETLPDAELYKSLPGTGPCLAPRLLVAIGENRSRFTSASEIQMYTGIAPVTERSGQKCWVHWRYQCSKFNRQSFVEWAAKSVHQSYWAGLYYQQQRSKGNTHQSSVRSLAFKWIRVLYRCWKTKEPYDESKYLKALRDRNSPLLCKEKAC

SEQ ID NO: 237191 - protein, 361 aa, unidentified
MSTEQCIAVTFGVDLGKTWFHVVGLDTAGSPVKRAKLNRASIARFFVNLPRALVGMEACPGSQWLARKLQALGHEVRIVPAQFVKPYVKSNKNDTIDAAAIAEAITRPTMRFVQIKHCDQVDLQALHRSRDLLVSTRTRLINQMRAFCLEYGVAIRNGVGAFKVALPIVLGDEGNDLTPAMRELLVDLSQELSTLEDRIAQFTRKITAQADASDSARRLATIPGVGQLTATALVAAVGDARQFKTARDLSAWLGLTPAQYSTGGKTHLTGISKRGNSYVRKLLIHGARACSMHLDRTKDRLGMWLDQMEGRLHHNKMVVALANKLARIAWVILTKPGALYERRAPELSSCPVVPAAGPFTK

SEQ ID NO: 237192 - protein, 360 aa, unidentified
MNATTVAVDLAKSVFQLAVADEHWHLVETQRLTRTQFERWFANRDVSLVIMEACGSAHHWARWLNGLGIEVRLLPAQYIRAYVKRNKTDAADAAALLEAARASDMRPVRVKSVEQQALQGLHRIRSLWMGTRTSRINALRGFCREFGIAIPVGARTGIEAISRVLADPATAVPDLIRGTAKLLVEEIRLLEARTAQLERELTAIAKLSPACTTLLSIPGIGLLTATALVAATSGDVSHFKDARHFSSWFGLTPKEYSSGNTRYLGRISKKGDRYLRMLLTHGARSVLRAAAVARNAGREVCGVRHWALEVQGRTNHNKAACALANKLARICYATLRDKEPFGESQRLNKKISRESFVMPA

SEQ ID NO: 237193 - protein, 315 aa, unidentified
MKTMPENLTAVYAGLDIAKATLQLHCQNRQTTLPNTPAGHARLIKLLRAVPGTHLVCEATGGYERPVVAALQAAALPVSVVNPAQVRHFALAQGGRAKNDPLDAAVLTAYGCALKPAPTPVADEVLIELRALVQWRDQLKEQLVCTRQYSEHATLRFAQRQQTKLRQHLEKQIAAVEKELAAALTRNPRVQDQVNALAQLDGVGPLTAVSVLSQMTELGQLNRQQTAALAGLAPWTRQSGPWEGQRHIGGGRAVIRRALYMSAVGLARQTETTLGKFYQRLRLAGKPAKVALTAVMRKLLIQMNQTLKNHALKSV

SEQ ID NO: 237194 - protein, 392 aa, unidentified
MYIIGIDIGKNHHEASIVSPKGRQIGHSLRFATTHKGADSLISFIFKNIGDSPCVFGMEATGHYWYPIYSFLKFKGYTIYVINPIQSDSLRKMYIRQTKNDSIDSFLIAEVIRFGQFEATSMADENILAMRQLYRYRDSVVSSRTEIKLRISTIMEQIFPEYEKQFSSLWLGTSMGILEKYLTPENIQNAPIDELFEIIKDKSHNKLTMKKAISIREAASDTFGIKIAQDAFSFQLKQLIDRMNFLDKQIEALDCQILEYYEKFDCYLHTIPGIGMIAAATILAEIGDINRFKSSSALVAFAGIDPTVRQSGEFSSTHNHMSKRGSPYLRHAIFLAATTCSFHNSPLNAYYKKKREQGKHHLTATGAVARKLTTVIYAVLRDGKPYEPKSFC

SEQ ID NO: 237195 - protein, 370 aa, unidentified
MERVCYVGMDVHKETIDAVVMDLGGREPRFEKRISAHMSAVRRFFDPLLREGAVVAGYEAGCLGFKLYRELRGMGVRCVVIAPSSIARAPGERVKTDRRDALMLAKLLRNGEGQAVHVPEPCDEAVRDYLRARADLKVELKRYRQRLQHLLIRHGLVFVDGKNWTLRYRRWLGQQQFAHEALKETVDLYYGRILELEGRLVEMDQRIQEMAEGQRYGQAVGRLRCLRGIDYLTALALVAEIGDFRRFGSAEQFMAFLGLVPSEHSSGATRRQGGITKTGNRHIRRLLVEASWHYRYSRPPSAGLRRRREGQSEQVVVYADRAMRRLAKKFHRLVGRGKSSQVAVTAAARELAGFVWGLMVGKIELHEQAA

SEQ ID NO: 237196 - protein, 367 aa, unidentified
MKKVSTVAAKQSRNISQPQRTIGLDLGDRNSWYCVLDEAGQIEREQRVRTTAKELREVFGGMPRSRIALETGTHSPWISRLLGELGHEVIVAHARKVRLIGESRKKDDRLDAQTLARLARIDPELLCPVKHRSAQAQADLTVIRARAALVRARTGLVNSARSLAKSYGERLRGCNVRNMNPEKAESLSPELQVALEPLLHTIESLSERIVEYNDRIGALAEQRYPQVELLKQIKGVGTLIALTFLLTLEDPHRFRKSRDVGCYLGLQPGRRNSGQSQPQMHISKEGDPYLRTLLVQGAQHILGPFGVDCDLRRWGLKLAERGGKSGKKRAIVATARKLAVLLHHLWVSGEVYEPLHNSNRTAMPAAA

SEQ ID NO: 237197 - protein, 429 aa, unidentified
MQNESTPGARGPVFCGVDTHADSHWLCVLDWRGRKVLSRRFPADAAGYEALAGAIAAAGEPACVAMEGTSSYGAGLTRHLASLGMPVREALSPARTQRRRPGQGKCDEADAERAARAAMSGSKLGTPKSQDGWVDGVRCMLAARSGAVKARTSAINTARSLLTTAPEGLRSRFRGMGGPRLMEELPSVRAEGALGAALGALADLWAAARDAALDMERAIGASLEENCPALLAMYGCGPVSAAKLAVAAGDNPGRLRSEASFAAICGACPIPASSGKTVRHRLNRGGDRQANSALHEIARQRVMRDPETAEYAERARARGKSDREVMRCLKRYVAREAYRALMRPHEVRRPEDASGLVAARRAARVSQVRAASILGTSEKYISMLERGQRELKPIRRAYEAWVEAGLPLDWDRQAFEAERKMDSKKHLAK

SEQ ID NO: 237198 - protein, 429 aa, unidentified
MSGVSVEQELQFAAFVGIDWADQKHVWCLQVADSGTRESGELEHAPEAVEVWVAQLSQRFAQRPIAVAIEQSRGALVFMLTKYECLHLFPVPSTMAGNMRNALYPSGAKDDPRDADLLLDLLLQHRDKLRRLSPDTEATRRVQNLVEERRKLIDEKTEQINRLTSHLKIYFPQILDWFDRLDREAAYALLERWPTLQEWQKVSAARLRMFFRKHHCRDQQVIERRIVGIRKAIPAIRDRAVIEAKSEVVKVIAQLIRVLVQGIAELDRKIEEAAEAHPDFFIFDSLPGAGPALAPRLLAAFGSLRGRYGSAQEIQAYSGIAPVIERSGKKKWVHFRWAAPKFLRQSFHEWAGRSITQSSWARAYYDQQRQRGKAHHAAVRALAFKWIRIAFRCWKNGVAYDESRYLATLVRRVSPLRVFKVAPAPAETL

SEQ ID NO: 237199 - protein, 322 aa, unidentified
MHPLQLGIDVAKAKLDCALRLTSGKFRHKVVDNTPAGFKTLDDWLTKESAAGLQVCMEATGTYWEAVAEYLAGRTETTVSVVNPVQIKAFGASRMMRTKTDKVDAKLIAQFCAERTPVPWQAPTPAEKNLRALVLRLDALQSMRTQESNRLEVARDSVAEGITKHLKWLDDEIARLGKAIRDHIDNDPTLKDKHRLLDSIPGLGERTTAVLLAFLAEPARFENARQVVAFAGLDPRQHESGSSVRGKPRLSKVGHSFLRKALYMPAMVALYRTDWGKLFRERLAAKGKPPMLIIGAMMRKLLHVSYGVLKSGQTFQPALHGA

SEQ ID NO: 237200 - protein, 341 aa, unidentified
MIIIGVDSHPEFQQIASVDTDTGEFQEKRLVHPAEAERFYRALAGTGQKVRVGMEASGHARWFERLLAELQFELWIGDASEIQTKRARKQKTDRQDAQHILKLMLKDDFPKIWVPSWENRDLRQLLWHRHRMVQARTRIMNQLQAVALNEGLRCKKKLWRAGGRQQLESFRLAPWASRRRRDLLELLDRLTPTIAELSEAIEQEVENHPEARGLMTHPGVGALTALAFVLIIGNVERFQRGKQIASYLGLVPLEKSSGNRRRLGHITKQGSSMLRFLLVEAAQVTVRSLPEWRSQYFRLVMRRGTEDDESGDGPPTGHSFVLDVASRFELRAAQKFGSHAG

SEQ ID NO: 237201 - protein, 364 aa, unidentified
MKLVKDIANWVIRYIGMDVHKDSTTAVVLDAQGHLVMQVTVRTEGSVLVDFLRGLSGTLHLTFEEGTYSAWLYTLLSPCVEKLIVCNPRQNALLKQGNKSDPVDARKLAELLRLGSLTAVYHGSPAMRTLKELAASYDTLVSDGTRVMNRLKSLYRGRGIRCGGTQVYSPRHRARWLQQLLEPGAHQRAKLLYQELDLLLELRRPARRALLSESRKHPAQKILRTIPGLGAIRVARLLALMQTPHRFHNKRKLWGYGGLGLLTRGSAQYRLQQGELVVSPKGVTVRGLNPAHNARLKDIFKGAALAACQRPGPLREAYERCLREGMEEHLARLTIARKIATLVLTLWKKGEPFDAQRLRREQAA

SEQ ID NO: 237202 - protein, 325 aa, unidentified
MRELYAGVDIHKDQYVGCIMNATGKVVREHTFSPTPGGAQSFLCGMPVKSIVIEACGMWRAAMYLFREQGYDIKLCSPKKTKDIAGKKKTDKIDAKTLANLLRTGFLHEVYIPSDEMLQLRDIARHKANITRQQTQIKCKVKSHLLLRGIPYSKKIWNKSQLAKLRAMGDLNMNNWLRLYDVLVAEEKEVLSRIRKISRNRRLTQLLMTMPGIGEYSALLILAEIADIKRFKTPKELVMYAGLCPGIFQTGNTERNVANQAVNKWLKWIVGECSGRAAIMQNRFQEHYAKIKQRKGFKVARRSTARKMLTIIWHMLTNEQPFHAS

SEQ ID NO: 237203 - protein, 322 aa, unidentified
MRYIGIDVSKATFVVAYSSDKGGEIRTFNNTTTGIKQFIGALPKDSSIHCVMEATGNYSAMLLYLLNVAGIAVSMENPLKIKNFARAMLSTVKTDKIDARLIALYGEKMNPQPFKIQGEAILRLRQKRTVIRQLTKQITAMSNLRGSLAYLPVPDKGATHTVDETVKFLKKKRDRLQAELTDLVKVEFSRQLALLTTIKGIGITLATALIITTGGFTYFQNAKQVSRYLGICPTYEQSGTSVNIRGHINRNGDAYTRGLLYVAAWTASRFNAKCGETYTRLRQNGKPGKLAMIAVANKLVRQAFAVVTHDKEYVDGFVSNRP

SEQ ID NO: 237204 - protein, 358 aa, unidentified
MQRNKKTFKGQNIYIGIDIHKKNWQVAVITESGYTERLSTAADAKALFKFLKSHYPDGNYRAVYESGFSGFATHYALSELGVSCVVAHAADIPSSQYELTMKSDRIDAEKLARALRAGLVRGIYVRPKDNLDDRGVLRIRKTIQIQVGGYKTRIKHLLHSNGVELPERFSRSGTHWSRAFIAWLREDVRLLSDTRRSLELLLLQVETLRANLLEATRRVRALSMTDRYREDCALLMGIPGIGLTVAMTILTEVCDIGRFGNERQFASYLGLVPTSHSSGERVSHGEMTFRGNKHIGPLLVEASWVLIVRDRELGRMYTEYRWRIAGQKAIIKIARKLSNIIFAVLKTRKAYEPYRRNA

SEQ ID NO: 237205 - protein, 349 aa, unidentified
MVLIGTDSHKRTHTVVAIDATGRKLAERTVNATSAGHLELVRWAGRFVEVTWALEDCRHLSRGLERDLLVAGAHVVRVPPKLMAGARRSSREPGKSDPIDALAVARAALREPDLPIATLEGPERELRLLVDHRDDLVAARTQIENRLRWHLHELDPGNEPPSRSLARAHILAALEVRLSGRDGVVARLARDLVIRIRELTGTINALEREIAGLAKGLAPSLLALAGCGPLTAAKLIGETAGVGRFRSKAAFARHNGSAPVPVWSSNTVRHRLSRGGNRQLNVALHRIAITQLQREGPGKTYLEHRRGQGDTKPEAIRALRRRISDEVFRRMRHDEAARAASPSGLAAAA

SEQ ID NO: 237206 - protein, 421 aa, unidentified
MDDNTNTQSIDPAAPVAWIGLDWGHYEHAFSLEDRTGRKEEATLKHSAESLHGWLRELAQRYGGHPVALGVEASRGAVLEVLLQYHWLVIYPINPITSARYRTAFTPSGASDDLPDARVLLELVRDHRAKLRPLEAQDPQTQELNALVQARRDMVDRRTQVLNQLTMLLRSYYPQALELVDNLDSVLAVDLLKRWPDMLALKTAKASTITRFYYAHNLRRPELLEQRLELIRNAVALTTDHGRIKAAVLHLRLLLDQLQAFRKHIPIIEVQIKTLFGQHSEAALFRDLPGAGAHLAPRLCVAFGTVRTLYPEPTSLQKLSGVAPVREKSGQQLWTHWRWRAPVFIRQTFVEWAGQTVVYSAWARTYYEAMKAKGKPRHVILRALAFKWIRVLWKCWQDRTPYDEARYLKQLLHRKSPYAVV

SEQ ID NO: 237207 - protein, 355 aa, unidentified
MNSLGIDVGKKRCRAALKDERGDVIREFFFSNNNEGISALIQSASHYGKCTAVVESTGNMWIRIHDTLEENGIDTILANPYKTKIIAEAKIKSDKLDARILADLLRADLVYESYVPTKEFREKRSLVRHRISLVRNRTILENKVHSLLDKYDYKSDLTDIFGKLGIIWLKTLDVSNIDRLIMNTTLAAIENINIQIDIISKELAKCGWDSDYVKILLSITGIDVFAAMLIATEIVDVRRFCTPWKLVSYAGLAPSTRESSGKTKTGRISKQGSPWLRWILVQCAMTAVRYDQRLKSFYERLKSRKGNAKAIVATAKEILVIIWYMLTRRELYRHMNKDRYEQKLSRIKKIKESAA

SEQ ID NO: 237208 - protein, 487 aa, unidentified
MQGLYLQHHLIIQSKNKDLIRAYYKEVSPERIQQAMIMEEKEHGNYNLLRLVSVGNKNTLTGGVTAMRRKNDNRQVEKRQRITDATLVIGMDIGCEFNAMCLMSKEGTILGRYPKIYNSRKGFDYFHGIVESMKEKYGFTDVLIGMEPTGHYWRKIAYFAMDKQYEVRFIRTTALKHQRELDESSSAKNDIRDAYTIANIAREGKYIDTVIEDNIFRQLRTLAHTREKIQRISTGAKHALKGMLEDYFPELKHIFWSMKAKGLWALLEHYPFPEDVLKTDIDTVTELIAQSTRRKIQAHEKALQIYKAAQHSIGLQRVGDADRWRVAAYLSEIRHSETQLKEIEAQMEALLKKIPFAEYILSMPGIGTLTCGVFLGELGNPCNFTNPKQIVKYAGYDPKEHDSGQRTGRRIISKKGRWLLRKYLYFMAMRVVHRSPFLKDYYENKQKTMTKKEALCAVVIKLIKVIFALLRDKRTFTEKQSCLKQAA

SEQ ID NO: 237209 - protein, 416 aa, unidentified
MKIVRPICCGMDVHKNIIVATIGITNKKTRITEYIQETFSTLNPDLLNLKQWLINHKCFDACMESTGKYWIPIFNILEDEINIYLTHPKYVKAIKGKKTDKKDSKWICDLFKHDLIKFSFIPPKEIRALREISRYRYKLVGMRSSERNRYQNCMTVSNIGIGSVFSDPFGKSAQAIMKEVLESDIIEDEKILKCIHRSCKNKDKILDSIKHCNIETDQRFKMNESMTHMEELQVHIDNCEIEMMKRAAPMFDQFMHITQLPGISTLSAILIISEIGVDMKQFESDKQLTCWAGLAPANNESANKKKSVRISKAGQYLKPLLVQCALGAIKDKEGYFGIKYSRIKKRRGHKKAIIAIARMMLVSIYHMILTGETFNPSDYESFKNPKPPIKQQVLTEESAIEFLKKSGFDVSKLTKP

SEQ ID NO: 237210 - protein, 354 aa, unidentified
MEQIIKQCAGIDCAKKDFAVTFSVCDAMHEVQHLSSRTFANDELGFKAFNKWVGKFYKRSIPMSFVMEATGVYHERLAYFLNALGYQVTILLPKRAKDFSKTLKVKKITDKIASQYLAIMGLEKKLDVWNKPKKEYLDIRHLSREKERIQHQISQLKNQMEAEISGAYPGKKTIKRINETLKLLKKQKKEVLTEMEQVINGNEELKEKVRKITTIPGIGLMTAATVIGETDGFNHVKNKRQLVSYAGYDIINHESGTSIKTKARISKRGNRNIRKAMHMPALTSIRREINSKNLFIRLVTRTGIKMKGVVAVQRKLLVLIYTLWKNESEYDPDYESKKGGSFTPPHELDQVRSL

SEQ ID NO: 237211 - protein, 326 aa, unidentified
MQGKESSEQETNGKSYVGIDVCQDWLDIHILPARVTWRVHNTNQGHRLLKRRLEQHAVDLIAIEATGKWHRQLHRNLHAGGYRVAVVNPLRARLFAEAIGILAKTDRLDARMLAMFAMSLTPTARPPTPESLDALKELVQARASAVDEQTALKNQRTSAAISFLQRQLGNRLKRINKDIEALDVEIVRLINAEEGLARRYVILLSIPSFGPVTAATLLVCLAELGSCDHKQIALLAGVAPIADQSGKREGRRTVHGGRPTVRRALYLAALNAARWNRNMKPLYVRLIAAGKLKKVALIAVARKLVVLANTLIREDRLWQISAPSNA

SEQ ID NO: 237212 - protein, 349 aa, unidentified
MEGVFLGVDFHARTQTVCWCDTANGVIERRTLDHRTDDVRAFYQQFQPPAVVGLEATGYARWFHQLVEETGHRLVIGDALRIRQFAARRQKNDRRDSELLLDLLLRGDFPAIHIPSVASQEVLRLLRYRHRLVGMRTMLKNGLQAVMLSNRVLRTSRMRTLLWRHQLENLPLTGADAIRREHSLPLMDELSARIEALENELHRRSQNDPAVGLLQTHPGVGLLTALAVAHTLQPLSRFRRARCVAAYCGLDPVERSSGETVRFGRISKQGNRLLRFLLIEAGRSAVRPEGDPDLRRFYYQLALKRNGSIAAVAVARKLLLRLFCMLRDQIDYEEFRRRGRDARCARGES

SEQ ID NO: 237213 - protein, 330 aa, unidentified
MGFRYFLGVDVAKAKLDCLLLDSVEQRRRSKVVANTPEGFEQLVKWLTKQGVGCEQVHAVLEPTGVYHERALFALSQAGIAVSLVNPAQLRRFAQGLGIHTKTDACDSAVLARFGEMIKPAHWQPAPSKARALRALLARRDVVAQDLQRERNRCEALVIEDTPERVRQSLTDTITFLEQELQALQKSIDEHIDDDPDLKRIWDLLQSIPGVGQRVADHFTALLAGRDFKSAEQLAAYLGLVPIEWQSGTSIKGRPRMSKAGPASLRQLLYMPAVVATRHNPHVKALYQRLLAKGKAKMSALGAAMHKLAQLCFGVVHTGQPYRADWPGRA

SEQ ID NO: 237214 - protein, 386 aa, unidentified
MIYIGFDISKYKHDCFIATETINQQFSFENNQVGFNELLIHFKPYPKQEMIIGLEATGHYGENLKSFLTLHGYSFMEINPFLVKKFSEAHSLRKTKTDKKDAQMISAFMRTVDYKAYHHQSYHISALKSLTRLRFKLISIRTKHYNMMTKILDIIFPEFKPFMHETGYSDTTLYILKHFSYPSKIAKMNDDFYEAIHKLSMGKFNYPKFIKLKYLASSTIGITQEFQVSKLKLSIRYVEMLNKDISNTENKISALMSQYPTHFQTIKGIGVISAAVILSEYGKISLFSNPAAMLSYAGLDFSVKQSGTMSSTGKLVKRGSKYLRSTLINVSMTVMIYNPVFYAYYDKKKLEGKHHRVALVHIAKKLVRIIHHLETNKVNFDSRLLK

SEQ ID NO: 237215 - protein, 341 aa, unidentified
MDICYSGIDLHSNNNVVCVVDQDGKILFRRRLENDLSTVIKVLAPFREQLQGVVVESTFNWYWLVDGLMDDGFKVILANPAAMKQYEGLKYTDDKSDAAWLANSLRLGLLEKAQGYIYPRQQRQIRDLLRKRVQLVQQRTTHILSIQNLTARNTGGRIRGSDVKRLTEADIYRLFQEVHLAMAAIANLHVIQVLNSEISILEKEINKEVREDKLLVLLLSVSGIGRILGLTVLLETGNINRFAHVGNYASYCRCVESKRTSNDKIKGRGNRKCGNKYLAWAFIEAAHFAIRYDARIEQYYQRKLAKRKKAVAIKTVAHKLARACYWVLKTGEPFDVERAFT

SEQ ID NO: 237216 - protein, 366 aa, unidentified
MDKGIKFFVGLDVHKDSIAVAVAEAGRAPARLVGSIAHDVGKLRKLLARYGEPGTVQVVYEAGPTGYGLQRELARRGYHCQVIAPSLIPKRAGDRIKTDRRDGLRLAELTRAGELHAIWIPDPADEAIRDLARAREDAVNARTQVRQQLKGFLLRHDVRYTGKTSWSKTYYRWLATLNFGLSGAQTAFTEYWQAVSAADERVARLTDALANSIEGWRFEPVVMALQALRGIDQISAIGLVAEIGDISRFTHPRQLMAYLGLVPSEHSSGERVARGSITKTGNAHARRLLTEAAWNYRFQPRIGYRAQRRAENLPQELRDLAWKAQLRLTGRFARLRARGVQINKVCVAVARELAGFVWAMAWARTK

SEQ ID NO: 237217 - protein, 408 aa, unidentified
MQVLYTRCAGLDVHKDTIVACVRCVSPPMHQEVRSFGTTTAQLLELADWLAEHDCTHVAMEATGVYWKPVWHVLEAEFELVLANAAHIRNVPGRKTDVNDAMWIADLLAHGLIRSSFVPPQAIQQLRDLTRTRKQFVREVSQHSLRIQKVLEDANLKLGSVLSDVLGKSGRAMLDAIVAGETDPARLAALAQGTARNKAAELRQALRGRITEHHRTMLRLHLQVVDALQRTLAELDAAVGKALAPIQRRARLLTTMPGISDLTASVVVAEIGVDMSRFPSAAHLISWAGLCPRSDESAGKRRSTRVRKSGTWIKTTLVTAAWAAVRVKTSYLRAQFLRIKARRGAKKATLAVAASTLTAAFHMLRDGTEYNDLGSEQFDRQDKSKTIRRLLKRLQDLGCDVPELAHAT

SEQ ID NO: 237218 - protein, 298 aa, unidentified
MPPAAAVFVGIDVAKAELVMAIRPSGARWTATNDDVGIQSLLTRLHEEAPALVVLEATGGYERAAVAALATAGLALVVVNPRQVRDFARATGQLAKTDRIDADTLALFAERVRPDPRALPTESAQALDALLTRRRQILGMVGAERNRLEHAVPAVRRGIVQHIRWLERRLHDVDDDLDGTIQARPVWRAKENLLRSVPGVGPVVSRTLIGDLPELGTLPGKQIAALVGVAPLARDSGTLRGKRLVWGGRAPVRAALYMAALVATRRNPAIREFYQRLLTAGKPKKVALTACMRKLLRF

SEQ ID NO: 237219 - protein, 391 aa, unidentified
MGTTTTSGNAAHNTPVLALSLELGASEWKMAFSPGLGQAPRHRTVAAGDLEAVKREIAAAKARFQLPDDVPVMSCYEAGRDGFWIHRALKELGVENQVVDSAALEVNRRARRTKTDRLDAAKLVGMLLRSLSGERHVWKVVRVPTEEEEDRRHLHRELKTVKQARTAVTNRIKGLLATVGVRLAEITELPRVLDWLKLWNGRALPKWLKARVERDWQEREQMQQRIAELEKQRKQLLRKGKDSGSECARQLHRLRGIGPNAAWLYALEFFAWRAFQNRRQIGALAGLAPTPHQSGAERREQGISKAGNRWMRSVAIEIAWGWLRYQPQSELSRWYQERYGRGGPRLRKIGIVALARKLLIELWKYLQTGTPPAGAVLKKGYPQAQAQLRTA

SEQ ID NO: 237220 - protein, 338 aa, unidentified
MKKFSGIDLHSNNSVVVVSDEVDHIIYQRRLPNDALQIRAALAPHREELEGVVIEATYNWYWLVDALLADGYHVHLANPAAIKQYEGLKYSGDFTDAAHLAQLLRLGLLPEGYIYPADGRQVRDLGRKRMQLVQCRTAQILAIGNLFARHTGAQMHGPEVKRLDGAQVSRFGFAPDVTLAIRANLAVLQTLQQQIEIVEKRLMQQVKLDPDYALLNTVPGIGPVLATTIMLETGTISRFATVGHFSSYCRCVDSRRESNSRKKGEGNTKNGNRYLAWAFVEAANFAIRTCPQARRFYERKKRMRNGIVAIKALAHKLARACYHMLREHKPFETVRCFG

SEQ ID NO: 237221 - protein, 322 aa, unidentified
MRYIGIDVSKATFVVAYSSDKGVEIRTFNNTTAGIRQFIGTLPKDGSIHCVMEATGNYSALLLYMLNVAGITVSMENPLKVKNFAKAMLSTIKTDKSDARLITLYGEKMNPRPFKVQGEAILRLRQKRTVIRQLTKQIPAMSNLRGSLACLPVPDKGATHTVDETIKFLEKKRDRLQSELTDLVEVEFSRQLALLTTIKGIGITLATALIITTGGFTYFQNAKQVSRYLGICPTYEQSGTSVNIKGHINRNGDAYTRGLLYIAAWPASRFNAQCKETYTRLRQNGKSGKLAMIAVANKLVRQAFAVVAHDKEYVDGFVSNRP

SEQ ID NO: 237222 - protein, 375 aa, unidentified
MKNFSTFIGMDVHKETIAVATAGKHGSPRYYGEIANTAEALTKLVKKVVPSRSKAVFCYEAGPCGYGVHRQITDMGHRCDVVAPSLIPKKPGDRVKTDRRDAVTLVRLLRAEELTAVWIPDQQQEAMRDLSRIREDLKSMERCARQRLSGFLLRNKKVYAGQSNWTQAHFRWLERIIFDSPIQQIVFQEYVDVVKHLQGRVASVQQEMMKALAGWSLGVVVEALMALRGVNLVTAMTIVAEIGDMSRFESPRQLMAYLGLVPSEDSSGKQQKRGGITKTGNGHVRRVLVESSWSYRMPARKTAHLRRKAGKASEAVQAIAWKAQKRLCSRYWHLTQKGKLKVQACTAVARELAGFIWAISREVMGKNNTPVVKVA

SEQ ID NO: 237223 - protein, 412 aa, unidentified
MEVMYPRCAGLDVHKETVVACVRIVEGGDVSRSVRTFATTTASLIELGEWLEVNGCTHVAMEATGVYWKPVWQVLVDSSLELVLANAAQVKNVPGRKSDVNDATWLSELLAHGLVRASFVPEPAIQQLRGLLRTRKQLVREKASHVQRLQKTLEEANIKIESVLSDVMGRSGRAMIQALIDGESDPAKLAALAHWKVRASAATLREALHGRIKRHHRFLLRLHLQQVDALDAAIAEIDREADAGLACFRDAVKQLSTIPGVSELSAQVILSEIGTDMGRFATAAHLRSWAGLCPRNDESAGKRRSTRLRRGAPWLKAMLVQCAWAAARTKATYLHAQFVRLRGRRGPKKAICAVAASILTAAYHMLKDGTFYEDLGAVHFDRRRPETQARRLVKRLAELGFSVELKPAAAVS

SEQ ID NO: 237224 - protein, 344 aa, unidentified
MDYYSGIDVSLERSSVCVVDGSGKIARETKVASEPEALINWFGSLGFGLARIGLEAGPLSQWLYAAMKQAGLAVELLETRHVSDAFKAMPVKSDRNDARNIAQLMRLGWFRPVHCKSITAQEIRAMLTARKLVQSKLLDFENSLRGILRGFGLKVGKTTRTHFAGRIEELVKGHPNLQTITEALLRARAVLLAEFNGFEKRVRAMSRLHEKARLLISTPAVGPIVSLTFACAIDDPSRFTSSKQAGPHFGLTPKKYQSGETDYTGRISKHGDASVREALYEAAHIMLTKPVRGCSKLKSWAMRIARRAGTNKAKVALARKLAVIMLRMLKDNVPFNPAAKAATA

SEQ ID NO: 237225 - protein, 384 aa, unidentified
MSEITRGLIARVGVDLAKLVIQVHAVDGAGRRVVARAFKRDQFVAWCAQLPAGCLVAMEACSGAHHWGRRLRALGLDARLIAASFVSPYRMEGKSGKNDMTDAAAICEAASRPSMRFVPVKSCEQQGVMSLHRVREGLKEERTACTNRIRGVLAEAGLVFGKSTKVLRAVLADVIEDADNELSTIARLVLQRAFAHWRELDEHMRWCDHQVGLHVRASPAAQRAAKVIGIGELGASALTAGVGDFKQFKGGHQFGAWVGLVPSQNSSGGKARLGRITKRGDDYLRTLLIQGAKAAVMSAGRRDDATSRWLVALTARVGWQKACVAMANKNARILWAVMTREQGFDAAHVSVKPAGKSAGKPACKSAPRERAPAAPAKLAAACAA

SEQ ID NO: 237226 - protein, 345 aa, unidentified
MNAVGIDVSKGKSMVCVMRPFGEVVLEPFEVLHTAQSLNDLAGKLKALEGETRVVMEATGNYHKPVAFVLHDAGLFVSVVNPVLIHDYDNNSLRRVKTDRKDAVKIANYTLDKWTRLRQYLPEDDTRLALKNCYRQYQQAVAVRTMLKNNLISSLDLTFPDANKLFSSPAKSNGCEKWVDFIGDFWHSECVSSLSSDAFAKKYLKWCQKHGYNFTRSKSDTIYACAVNAASLPKSPTSKLLIQQQVAQLKAVSQSVAAFQQVLRLSQQLPEFDTVMEMYGVGPSLGPQLMAEIGDIRRFSSKKLLIAFAGIEPQPNDSGKIVASHSLHYIIHILTCHKSRSKTNG

SEQ ID NO: 237227 - protein, 327 aa, unidentified
MIEHYIGVDLHQAFFQVCAVNAIGTRLWEERFPRNEAGVAALLARCDRRTSLAVEASTPTWHFADAVSDHVGDLRVVDPVKTKLKAGYAAKTDRLDARRLADALRRDSVVGIYYPPVAIRELRELCRYRHAIVQVRTALINRLRAVLLRQGIVDGRRLARTRSDAWLETLTLPPRAAASVAGLRRLLTTVRTAAADADREVLAAVAVDPIAQRLQAIPGFGPVLSLMVRAEVGTLTRFPTPAHLASYAGLVPSVDASARRIRYGRITRRGSPWLRWALVEAAIHGTKRHDRIGRWGRRLAVRKGALNARVALARTLCEDVFRHWPID

SEQ ID NO: 237228 - protein, 374 aa, unidentified
MPRHLRYWVGLDAGHLETAVCLVDAEGNVFFEAMTETRAAPIRDILRRFGVEPVQSITIEAGVGTQMVRDLRSFGFPVQVADVRKSSKFLAIRRQKTDANDAKGLAELGRLAQSFGPHVFIKPVEHQDIRIMINIRRTLLKHRARTDALLQSIFRLHGASIKLLNGRGSLAAEVANQLRLLSTNGVTIRVDLDPLVRMGEDLRSHIWDMDRKMRTMAASIPVCARFQTIPGVGTITALSFYSAVGDPYRFRGNRDVGPYLGLTPNLYQSGATARRGRISRYGNKLTRSHLITAATVLLRTIKTESSLRTWGLRLATKIGFLKARVAVARKLAVIMMAMWKTGASFDPDKSKPRFLQPEEAGLDPVRISGTKIPL

SEQ ID NO: 237229 - protein, 348 aa, unidentified
MRKLIAGMDLHSNNVVIGLMDMDGKRVAHQKVECQLSEVVRFLAPYKKRLEQVAVESTYNWYWLVDGLQALRYPVVLANPAGMEQYSGIKHADDTNDAFFLAELLRLKILPTGYIYDRHLRPVRDLLRRRLTLVHQRTALMLSFKSLYTRTTGQEMTLSRLKELEIKQAQDLYDHPANQLIAGMQNKHIEQLTESIEKVEKAVLDCARELPFYSKLTTLPGVGKILGMTITLEVGDIKRFAEAGHFASYCRTVEAKRTSNSKKKGENNSKCGNKYLAWAFVEGANFARRYDPQCRRWYDRKVAKTSNVIATKALACKLAKAAWHVMAEGTDYDSQRMFGQAAEHEMRT

SEQ ID NO: 237230 - protein, 346 aa, unidentified
MILIGCDFHPSWQQVCWLNMADGETNNQKLVHASGDAEKFYRRLAVPVRVGIEATGNCQWFLELLGKLGHEVWVGDAAKIRACDPRQQKHDPRDARLLLQLLVENRFPRIWTPSSEEKDLRQLLLHRYKLVRMRVQVKNELQHLAMNNGITKGRRLWSAAGEKVLCELPLAPWASRRREDLFKLRSMLNEQVAALDEAVKHVAEENDRARLLMTQPGVGPITSMAFVLTMGDVSRFPRGKQVASYLGLIPREYSSGGHQRFGSISKQGNRFMRMLLVEAAQCVVRYDEGFRNEYLHRCHTKPRGVAKVAAARKLAVRLYWMLRTNTAYPEIARVGSSSRVPLAGAS

SEQ ID NO: 237231 - protein, 418 aa, unidentified
MNEDGNTRGTRRYVALDIHKHYCVVAGVDREGRVRFQPVRVEHADLESWLKKHLCSSDQVVIESTTNAWHVYDLLAPLVERVVVANPIQVKQIAQARVKTDIRDTLILARLLAANLVPDVWVPPVHVREMRQLLSQRRQFVETHTQIVNRMHSVAHRHHLRHPAGKRFNEKTTGWHKNKTLSSLEQFQLQLEMENLTYIEKQIERISKEVRKMCHQKPWAESMTYLMQLPGFGVITAMTVLAAIGEVQRFESPKQLASYSGLTPGLEQSGTKHRGKGITKEGRRELRWALVEAAQMAVKSDPVWRTRFQEMLKRMHRNQAIAAVAHRLLELVWYVLTRRQPYRHFSHERIAYKYLTWAWKMDEEARDGLTRQQFARYYLMRLGIGHDLTRIALDPKHPRKIASEAELLALRPEFLHIE

SEQ ID NO: 237232 - protein, 362 aa, unidentified
MTAVMIGVDPHKGSHTAVVIGPAEEPLGELRVRASAGQVEKLVAWAADWPERTWAVEGAAGLGRLLAQQLVAAGERVLDVQPKLACRVRLLQAGDTNKNDPNDALSVAVAARRSKTARPVMAEDYPAVLKVWSKRHRDLARLRNQVACRLHAVLCDLVPGGHPKEISAAQAARILEQSSPSGAVDRARAELAAQFPGDMRRLDAQLRGTRKKLAAAVRASGTTLTEVFGVGPVIAGTIIGDIADVSRFPGRDHFAAYNGTAPVEVSSGNRKIHRLPLRGNRRINHAIHMAAITQIRHRHSDGRAYYDKKVTEGKTHKEALRSLKRRISDAIFACLLARVSDDHGFLIASPLVRRHIEAGLSL

SEQ ID NO: 237233 - protein, 372 aa, unidentified
MRKGPVMDKDTTYVALDDSKRKLAVAILRPGQTELEQREMAKEPHLIQRVFRRLAREGAVAACYEAGVSGYDLYRQITACGVACHVIAPALTPRRPGQRIKTDRRDAAKLVRLFRAGELTAIHVPAEAEEAVRDLTRCREDVRRDVLRWRHRLLKFLDRHGRLYVTGKNWSQRHWAWIRQQRFDLPPLQRTFEATLFALEQARAHQAELDQEIAALAEQAPYREPVGWLRCFRGIDTLSAMILRAEIVDFQRFTHPRELMAYLGLVPSEYSSGDRERRGALTKAGNTHARRVLVEAAWHYRHRPTLGRALAARAQGQSPACRAQAWRAQQRLYRRYRHLVGHGKRPPVAVAAIARELVGFIWAVMTQRAPAA

SEQ ID NO: 237234 - protein, 328 aa, unidentified
MQGKVSSARTAMATVYVGIDVCKEWLDIHLHPLGRSFRVTNDTAGLRRLKRELDALDQMPPSALHIVMEATGKWHRAVQRSLHADGFYVSVVDPLRARLFAKACGFLAKTDRLDARLLAIMGEALKPAQTPPQDQALEALQELVNARSAANGERTALSNRMKTAVTAFLRKELTRRLAALDTHIARLDAEIERSIGAEPEMRRRLDILISIPGIGAVTAASLIAGLCELGACSGKQAAMLAGLAPLACESGERAGHRAIRGGRPAPRNAIYMAALSASRHNPDLAHFAERLKKAGKPNKVVLVAVMRKLIVLANTLITKNRIWTPNPP

SEQ ID NO: 237235 - protein, 343 aa, unidentified
MKLNRIGIDLAKNIFQLHGVDDQGKVVLKKKLKRGEWLRKLCDSVELGCEVGMEACGGAHHWARQLQERGFVVKIIAPQFVTPYVKSNKNDANDAEAICEAMSRPNIRFVKSKTVAQQDIQAVHRIRQELMSHRTAKANQIRGLVTEYGIVAPLGLAALRSAIPCWLEDAENDLTVLFRSLLHGLWEDLRRFDERIATMDAEVDRIAKSDPMAQRLQQLRGVGPLIATALVASVGNGAQFSQCRQMAAALGLTPRQHSSGGRDRLLGISKRGDPYLRSILIHGARSTVAHAKNKEDRLSLWMTGLAQRRHLNVAAVALANKTVRMAWAMMRNETDYDPDYVTA

SEQ ID NO: 237236 - protein, 448 aa, unidentified
MAQRSQLKRMEIANPNAAGIDVGSASHFVSVPPDRDDEPVREFKSFTEDLGHLADWLVSCGIDTVAMESTGVYWITLFELLESGGLNVFLVNARHVKNVSGRKSDVLDCQWLQQLMSYGLLSGAFRPKDEICALRSVMRQRAMLLSYQSRHVQHMQKALMLMNVQLANVISDVVGETGQKILRAIIAGERDPLKLADLKNGRIEASKEEIAKSLQGNWREEHLFALAQAVELFDAYSKALQRCDVQLESMLKALSRSEAEPGPSRRRVGKAKNAPKFDARTYLFRICGVDLTAIDGIDVTTALKVVAEIGPDLSRFQNAKHFASWLGLSPGTRISGGKRLSGATKGNANRAAQALKLAAAALRPSRSALGAYYRRMCGRLDKGKAVTAVAHKLARLVYAMLTKGTAYVDQGQAYYEERYQQRVIYHLRRKAAAIGLELVPIQAQGQSA

SEQ ID NO: 237237 - protein, 350 aa, unidentified
MNYIAFDCHRRYTFARVEDASGRRLWEGRIPHRRGIFLEFLEGFEPSTPRALETIGSWYWVVDEIEARGLRPRLVHARGAKVMMGMIDKSDKLDAKGLNILQRTGTLPEVWIPSGEIRDRRELPRSRMLLVRQRRRLKQRVLSNLAKYGFVVSEVSDPFGRKGREILKRMIAELPPETRRITLMLLEEIEHLEGRIEEIEGRMREVFSSSEEVELLQSIPGVGFILAVVIALEVGDISRFGGPERFVSYCGLVPRVEQSGSRVRYGRMRKEANRYLKWAFIEAANAVALNARRWPERHASRLPQRIKQRKGHGKAVGAVGRHLAEAAYWILRKGEPYRDPGLRALGARGA

SEQ ID NO: 237238 - protein, 320 aa, unidentified
MLSFCGIDVSKDRLDVMVLPEGHRSWVPNDVAGWAELVEQLRDCSIAAIGIEASGGYERGAMRALLAADLPVRQVNPFKLRQFARASGVLAKSDPLDARMIASFVATMPTRPAPRQAPAAERLTEMLAVRRQLSAEKVAAENASRLVEDAMLQRLSRRRIARLAADIDVLDQRLVEIVATDVALAHRYRLLTSMPGVGSVLACTLIALLPELGRLSRKQVAALVGVAPYAFDSGALKGRRCIWGGRANVRQVLYMAAMSASNWNPVLKAFHDRLAAAGKLPKVVIVAVMRKMITMLNAMVRDDVLWADRLSGRHIVPTTR

SEQ ID NO: 237239 - protein, 317 aa, unidentified
MTKIICGVDVSSTSLDAFVRPSGPARSFNNTAEGIAELAAFCRQQSIELVAMEASGGYEKQAFALLWAGGVPVALLNPRAVRDFAKGMGLLEKTDRIDARVIAWFAAVKGSASSTPASAEQQRLKALVTRLRQLTELQAAQRNQRLLVSEATVLELIADLLKVVASQMRMLEGEISALLASDPLWQKLDQALRSIKGVADRTVARVMAEMPEIGTLSNKAVSKLAGLAPLAHDSGKREGRRPVRGGRRNVRAILFVVAGVVRRHDPDFAAFHQRLSAAGKPRKVIRIALAHKLLVRLNARARDARKAFAGAGLCQSA

SEQ ID NO: 237240 - protein, 375 aa, unidentified
MKEKVRFLGLDVHAETITVAIAEPDGEVRSLGTIANREESIRKLVKKLGRPEHLRACYEAGPTGYVLYWQLTQLGVECAVVAPTLVPTKVGDRVKTDRRDALKLARSHRSGDLTAVWVPDGDSEALRDLVRTREAAKQDQLRARHRLSKFLLRTGRRPAVGIKAWTGPYMAWVRQVRFERPAQQATLQDYLHEVDHMVARVKRLEQAIAEAVKLASPQVQEVVKGLQALRGIAEISAVTIVAELGQISRFDTAPQLMGYSGAVPSEDSSGKRKRQGSITKTGNAHLRRIAVEAAWSYRHRPAIGPKLRKRQEGVPEPIKEIAWKAQIRLHKRYMKLTAAGKDRRKIMTAVGRELLGFIWAIGVKLETPVKQQIAA

SEQ ID NO: 237241 - protein, 456 aa, unidentified
MRKGKRKRATAVEPPQVRSDAAGIDVSPKVMYVAVDPRRDPQPVRAFSAFTDDLYQIANWLQACGVHTVAMESTGVYWIPLFQVLADEGFEVCLVNSRDYKNVPGRKTDVADCQWLQYLHAVGLLRASFRPAQEICAVRSLLRHRASLSEAASKHVLHMHKALDQMNVQVHRVLSDVTGRSGLAILDAILAGERNPAVLAGLRDGRVKASEAEILRALTGDYREEHLFTLRQSLELYRQYRRMMEECNRQIQSQLEALADKDDSGGNVPEATPGKQLRRGDGEDLRQLHSRILGVDLTGIPSISTATVQTIVSEVGPDFSKFRDGGAFASWLGLCPHETITGGKVRSSRTRKVVNRVAAALRMAAESLSHDKSYLGQYYRRMRARIGPAEALTAAAHKLARIIYRLVNKREAYNESVFAEIEQRHARRQRLWLSKQAQRYGYILTPVPGDQAGVVS

SEQ ID NO: 237242 - protein, 368 aa, unidentified
MKKVSITATMQSGNCFVQQKLTIGLDLGDRNSWYCVLDEVGKVQLEQRVGTTAKALREVLGAMPRSRIALETGTHSPWISRLLSELGHEVIVANAGKVRLIGESRKKDDRLDAQTLARLARIDPHLLCPVKHRGAQAQADLTVIRARAGLVRARTGLVNTVRGLVKSHGERLRGCNVRNMNAEKAEGVSPELQRALEPLLSAIEELSERICEYNERIEALAQESYPQVALLKQIKGVGTLIALTFLLTLEDPHRFGKSRDVGCYLGLQPGRRKSGQSEPQMHISKEGDPYLRTLLVQGAQHILGPFGIDCDLRRWGLKLAERGGSNGKKRAIVATARKLAVLLHHLWVSGEVYEPLHNSSPMTVATAA

SEQ ID NO: 237243 - protein, 383 aa, unidentified
MDHKQGTLSRDKSAPGPVLYVAFELANSTWKLACSDGNKLRHVTVTAGDLAQVRGAITGAKRHFDMGDEVHTVSCYEAGRDGFWLHRYLHSCGIDNVVVDSASLEVNRRLRRTKTDRIDAGKLLSMLVRYHGGEQHLWRVVRVPSREDEDARHLHRELEALKRERTRYRNRIHGILIQQGLRIKNPSTKKFVQALELMRTWDGRELPPEMKVRLVQVHERLRLVEEQISCLVKEKTLRLKAETARMAQVAQLMRLPGIGPVSSWTFVMEFFGWRRFRNRREVAALAGLTPTPYDSGKRLREQGISKAGNRRVRTLAIEIAWAWLRFQPRSKLSRWFLERFAGGGSRMRRIGIVALARRLLIDLWRFLEYGVVPEGAQVRPLAI

SEQ ID NO: 237244 - protein, 310 aa, unidentified
MDAIYVGIDVSKDRLDVHVRPGGEAFAVARDGKGLGELVERLRSVAPSLIAVEATGGFETIVAAAIAGAHLPLAVVNPAQVRHFAQAVGKRAKTDPIDAAVIARFAEAVKPQPRELPDQAARLLAELVGRRVQIIEMLVAERQREKRAAAVRVRKSLARHIAALEKELPEIDRDIDAMVRGSPVWREKEDLLVSFPGVGSTIARAVLADLPELGRLTRREIASLVGVAPFTRQSGQWKGKSTIAGGRPSVRAALFMAAFSAIRCNPVLHVFYQRLLARGKPKMVALIAVARKVLTILNAMLRDKKQWLTA

SEQ ID NO: 237245 - protein, 458 aa, unidentified
MLQVRLSLITNTQGLHLNACYIAFAELWYTCRTLMFSIGRGVMIMTNINGKFSVYIGIDWANKKHDICLQGKSDNRREFCIIPHSPEAIDKWINALHKKFKGQIAVAVELARGPIVYALQKYSFVTIFPINPSMLAQYRKAFCLSGAKDDPTDAEFALDLMLNYPNKIKPLKLQSNAMRKLTYLVEQRRRLVEDRRRFTNRLISTLKQYYPQLLDMFSHRDTPLFCDFISRWPNIQKLQRARTETIRNFFLSYGGSAVSSIEERIKTIVSAVPLTKDSAVIETHQLLAVALTNQIMTTVQAIKLFDKEIEAVFKDMPDASLFISLPGTGACLAPRLLVAFGENRDRFNSAADVQMLAGVAPVTERSGQKSWIHWRWQCSKFLRQSFIEWSAKSVHSSYWAEIYYQKQREKGNSHQSAVRALAFKWIRILYRCWKTRTPYDESKYLKALRDRNSPLLTA

SEQ ID NO: 237246 - protein, 443 aa, unidentified
MKRKEKTHIRGERGQAFANQIRGLNLEQVLCVSLDISKYFHLVMIHNGLGEIVSPTFEIDIFKTGFTGLCRVIDEAVEQTKAQLVLVGMEPTAHYFENLARHLQQRPQPVTLLNSYAVSQNREQQMMHREKTDPIDVAAIGDLRRRGEGSPFQPLKGIYLELQHLDRVRLSKIKMQTMLKNQIIGHLDRIFPGLVIIGKEGKKRYTPLFATDFWACQTLQHLIRVCPNPRQLAAMSATELISAFHAQDYKMGPKTATKIITYAQKVLLPDPAVIAIRTEVLQHDLSLLEAVTEPISLMKARLVALVAQTPYQIWTTLKGLSDIQVARLAAAIGDPQHYRHAKQVFRRSGLVSGRNDSGGHQKQGQGQPIVKTGDVHLRRALMDALSTFVLHQPVLFRYYTKLKLTKPDLVARVATVRRATGILWATLRDQHSTSLVYKRGVHM

SEQ ID NO: 237247 - protein, 347 aa, unidentified
MSIVENPDAVVGGVDTHVDMHVAAAVNHVGGLLGVESFATTHNGYRQLLSWLRSHGELVLVGVEGTGSYGVGLARYLTRAGVPVVEVDRPNRQTRHRQGKSDPVDAVAAARAAISGQATRLPKSRDGNVEAIRVLMIARRSAVDTRIETLNQLRHVVFCATPEIRRKFSGLTAITLANKAAVLRPREGDDPVRYTTQVTIRTLGQRVKYLREEVKRLNRLLRPLIRETAPGLLEVFGVGFDTAAKLLVAAGDNPERIRTEAAFAHLCGVAPIPASSGKTARHRLNRGGNRQANSALFHIVLTRMKHDQATRDYIARRLAEGKTMGEIARILKRYTAREVFKHLPRPA

SEQ ID NO: 237248 - protein, 391 aa, unidentified
MRKPNDMSKCLAALAQDSTLVAVIELGQQGWLVAGIIPGIERHPLKKLEVDEAALLKLLQRWCEEARKAGHPIKRICVAFEAGRDGFWLARWLRMRSIEAYVIHPTSVSVSREHRRAKTDRLDTELLKRAFIGWLRGETEHCSMAAIPTLEEEDCKRPTRERESLVGERTRIVNRLKSCLVRLGIRGFNPKLRKAAERFASLRTPEGAPIPPNTLEELKRDTARLRLVSDQIKEIEEARLVRLQAASQTGPNAMVRLLARILGIGVETADMLVHEVLSREWRDRRAVARYAGLTGSPGESGKKRREKGLSKSGNARVRRGMIQLAWRFLRFQHDSELAQWFRARGVEGRRDIRKKMIVALARKLLIALWRLVTSGEVPAGVVLRAASSLPR

SEQ ID NO: 237249 - protein, 334 aa, unidentified
MALNTLAIDIGKHSFHLFGIDDDGVIVSRKVSRLKLVATVDRLDPKIIAMEACGSAHHWGRMFQASGRMVRLINPYFVRPFVRGSKNDATDAQAIFEAAGRPTMRFVPVKSLKCQDLQSLHRIRDRLVHNRTSLINHTRGLLAEYGIVLPQGAKRFTLQVRQAVVEAELSDLARELFEGLLDQLGDLDRRIAHIDKHLIAICRDKAACRRLVGIPGIGPVVATALLAAVDDGRQFGSGRDLAAWIGLVPRQYTTGGKPRLGGIGRRANHYLRRQIVHGARAVMSQAGRRSDPRAEWMKAVAARRGFNRAVIAVANKMARAAWAILVRGEAYATA

SEQ ID NO: 237250 - protein, 415 aa, unidentified
MEIVFPRVAGIDVGKREVAVAVRMPGDGRGQRRQEVRKYKTFYPVLRQMVSWLVEQGVTHIAMEATGVYWKPVFHALCEAEQIEVLLVNARHAKNVPGRKTDVKDSEWLAQLLECGLLRGSFIPPKEIAAIRELTRYRKKLIETRTREWQRLSKVLEDGGIKIDSVASSITTLSARDMIEALIAGERDPRVLAELARGVMRNKIGDLTMACAGRFGDHHALLARMHTDHIDHLAVMIAGLDDRIEAVLDPFSEPVRLLRTIPGIGERAAQVIISEIGVDMSRFPTAAHLASWAGLCPGNNESAGKHKSGRTRKGNVEVRTILTECAWSASHTGTYVGSQFRRLHRRFGRAGGGKAAIAIAHTLIVIIWYVLHDNAEYRDLGSDYFTRYDNPEARKRRLVHDLQAMGYDVTIAPAA

SEQ ID NO: 237251 - protein, 408 aa, unidentified
MELIYTICCGLDVHKRSIQACLRRLGPDGRIHQEVRSFGTMTRDILAMADWLAAAGVTHVAMESTGVYWKPIYNLLEGRFTLLLVNARHVKHVPGRKTDVKDCQWLAQLLQCGLLKGSFIPPRPQRELRELTRHRTQLVAEKTRAANRIQKVLEDANIKLASVASDILGASGRDMLRALIAGEQDPVKLADLARRQLRSKIPQLALALEGQVTEHHCFVLGELLDHLGYLESQIERFTRRIEEVSHPFASAINLVTQVTGFDQRAAQNVVAEIGADMSPFPSEGHLASWSSVCPGSNESGGKRKSGKTTKGNRWLRSTLVQAAWAATRKKDSYFQAQYRRLAARRGKKRAILAVAHSLLVVIYHMLKTGSTYKNLGGDYFDKLNKNRLLPFLLKRIKDLGYQVTLEAA

SEQ ID NO: 237252 - protein, 442 aa, unidentified
MIEELREKYYFGKNTPLICDEYGSYTKPSVFRRRYYRLLEGAGIPSKGLHSPRHTFATNLVNGVKQSDGTVKTLTVKQVADLLGHSTTQVTEMYYVKKDTTGRYYEPIARYLHEAGVFVSVVNAILAHDYSGNTIRRAKTDRKDATKLANMAIDRWLDLKEYIPEDEIRHTLKICNRQYSQYSKLKAMLKNNLIALLDQTFPDVNRLFTSPARKSDGHEKWVDFALKFWHAECVCGISVKQFKDKYERWCKRNGYHYTQAKAEEIYARACDNVGLLPMCESTKMLITQAIIQLQAIEESLATVQSEMQRLSSSLPEYDTVFSLYGVGRVLGSQLIAEIGNVCRFESKKSLIAFAGIDAPPYQSGTLNVQSRSISKRGSALLRKTLFQVMSVILQNAPADEPVYSYLDKKRSEGKPYKVYMIAAANKFLRIYYARTKLALVNT

SEQ ID NO: 237253 - protein, 408 aa, unidentified
MTEVMIGVDPHKGSHTAVAIDAAEEPLGKLRVRASAAQADRLVAWAAAWPERAWAVEGAGGLGHLLAQQLVAAGERVLDVQPKLGARVRLLATGASNKNDPNDAFSVAVAALRSKSRRPVTADDHGAVLRVWSRRHRDLGRAKNQVACRLHAVLCELVPGGVPEEITAAQAARILQSAPPSGPAGQARRELAADLLDDMRRLDAQMRESKKKLAIAVRASGTSLTEIFGVGPVVAATVIGDAGDVARFASRDHFAAYNGTAPIEVSSGNRKIYRLSLRGNRRVNHAIHMAAITQIRYSHSGGRAYYDKKLAEGKTHKEALRSLKRRISNAIYAGLQADARQAAAAAASPTGPGGQPGNDSDSRAAGSHPERQLFGQATPEPGHTLRPATPARPTTPPKPTTGKTRQDP

SEQ ID NO: 237254 - protein, 392 aa, unidentified
MYIIGIDIGKNHHEASIVSPEGKQIGHSLRFATTHKGADSLMSFIFNNIGNSSCIFGMEATGHYWYPIYSFLKARGYTIYVINPIQSDSLRKMYIRQTKNDSIDSFMIAEVIRFGQFTTTSMADESILAMRQLCRYRDSVISSRTEIKLRISTIMEQIFPEYEKQFSSLWLSTSMGILEKYLTPENIENAPIDELFEIIKDKSHNKLTMKKAISIREAAADTFGIKIAQDAFSFQLKQLIDRMNFLDKQIEALDCQILEYYEKFDCYLHTIPGIGMIAAATILAEIGDINRFKSSSALVAFAGIDPTVRQSGEFSSTHNHMSKRGSPYLRHAIFLAATTCSFHNSPLNAYYKKKRDQGKHHLTATGAVARKLTTVIYAVLRDSKPYEPKKFC

SEQ ID NO: 237255 - protein, 360 aa, unidentified
MIIIGCDFHPEFQQVAMVDTETGAYRQARLQHQEQARAFYAGLVGQEVLVGFEACGYTQWFERLLSELGHQWRMGDAAQIRAAQPRRQKTDQRDADHLLTLLLEERFPAIWVPSPAERDVRQLLMHRHKAVQMRTRVKNQLQALAINQGLRLRHQLWTQRGQQQLQALELLPYAAQRRQELLALLDQMERMLAPLDAAVAREAAARPAAVRLMTHPGVGPVTALAFVLTIGDVTRFARARQVASYLGLIPCEDSSAGKQRLGRLSKQGNALLRFLLVEAAHHARRGDPELRRCYARLSHRHPSGVAKVAIARKLAVRLYWMLRADLEYAQLKVVRMPASPSHPVVARTIDRLSGPPASRP

SEQ ID NO: 237256 - protein, 347 aa, unidentified
MRFYNEQRPFYCGVDLHARTMYLCILDRDGNVVLHKNIKTRPAALLRAVEPFREGLVIGCECMFAWYWLADLCAEEGIEFVLGHALYMGAIHGGKSKNDRIDSEKIARLIRGGTFPLSYVYPAQMRSTRDLMRRRMYLMRRRSELLAHIHMTYQQYNLDCPARRLRYAGNREGLTDPFDDGSVKKMMAVDVAVIDQLDELIKDLELFIVRHAKVHDGQSFYLLRSVPGIGKVLALILMYEIHTIRRFGSVGDFVSYCRLVKCSHSSAGKISGSGGRKIGNAFLRWAFGEAACLLIRQLPQAKRWIDRKEKKYGKGKALSLLAAKLGRAVYWMLRREEVFDVSKFFQD

SEQ ID NO: 237257 - protein, 311 aa, unidentified
MVDKVTKAAVVGGVDTHKDLHVAAVVDQNNKVLGTQYFSTTRQGYRQMLAWMTSFGTLKRIGVECTGTYGSGLLRYFQNAGLEVLEVTAPDRMERRKRGKSDTIDAECAAHAAFSGIRTVTPKTRDGMIESLRVLKTCRKTAISARRVALQIIHSNIISAPDELREQLRNMTRMQLIRTLGSWRPDASEYRNVTNVYRISLKSLARRYLELHDEIADLDVMIAAIVDELAPELIKRNAIGYESASQLLITAGDNPQRLRSESGFAALCGVSPVPVSSGKTNRYRLNRGGDRAGVVSENGKNRTLRPVWLAG

SEQ ID NO: 237258 - protein, 344 aa, unidentified
MQHYVGLDVSVKETSVCIVDKAGKVIREVKVATKPAEILAVLTEEALAIERIGLEAGPLSQWLYSALAEACLPVICVETRHMKAALSAQINKSDRNDARGIAQMMRVGLYRPVHVKTMASQKRRMLLTSRQLLQAKALDIENHLRGTLRNFGLKVGMVGTVKFDARIRELVADHPDLAAIVEPLLIARRVLREQLGVLHRQLLEIVRQDEVCRRLMTTPGVGPVVALTFRATVDVPSRFSNSKAVGAALGLTPRRYQSGDIDRMGGISKSGDAMMREMLFEAALVLMTHSRKWSWLKAWGMKIARHRGMKRAIIAVARRLAVIMHRMWVDGTEFRWSRKEAAAA

SEQ ID NO: 237259 - protein, 345 aa, unidentified
MGVIIGVDPHKASCTAAVLDERGELVDQQRFASTRTGSRALGRWAKRWPERRWAVEGASGLGRRLAQQLVGDGEPVVDVPAKLAARVRLLSAGHGRKSDAHDAVSVAVAALGTRRLGQVRLEDHAAVLRLLSDRRDDLVRQRTRTLNRLHVLLCDLLPGGAKRSLDADTAAALLRRLRPATAPARTRRQLAVDLVADLRALDRRITAVEERLRHAVTQSATTLIELFGVGPILAAKLLGEVGDVRRFATKHRFAAHNGTAPIEASSGEVVRHRLSRAGNRKLNHALHLIAIVQIRHPTAGQAYYRRKLAEGKSRKEALRCLKRRLSDAVYRQLLADQHQPVQAQA

SEQ ID NO: 237260 - protein, 459 aa, unidentified
MSYRIAGIDVHKKMLAVVVSDVEIESEYQFERRMFGSSPEQLRSLAAWLLEQEAEEVVMESTAQYWKPVWGALERYWKPVNEKREGARRRSGTLHLAQAQSNRGPRGRKKDFPDAERLVKRLVARELTLSFVPDAEQRLWRTVTRRKYQLTRHRVRLQNQLESFLEEAHIKLSSLVSDLLGLSARRMLKALADGATNPAALAALADQRLRATPAQLCDALGACAELSPVYRRLLKMALEELRLIDEQIGQLDQEMANLLSQHQDAVQRLAEVPGLGVDSAQLSFRAFGPRNLMKAVSVTALFSAQGTRLSTQIIAEVGPTAATFPSEKCLSSWVGACPGDDESAGVNYSHRSPKGNRHLRRLLHQAANAAARTKGSIFEIVYRRSVPRLGHNQAIGTIAHRPCRLIWLILHQGVRYEERGPAVTKRSKQLRTSKMLRQLRSLGYRIEPPNPQPSQAQAQ

SEQ ID NO: 237261 - protein, 326 aa, unidentified
MNKHMMYVGVDVGQDEVWAVVRGSKPRMFRNGEAGIRDLGTWAHTRAKGMGVHFCLEATGVYGRTVAVRLLKGHYGDVSIVNPAQIAAYARAQLRRTKTDGVDAQVILSFAQSQQPTPWTPEPPALRHLIHLVTQADAMREDLRRWSNRRHTEKYTDDLPATVRTSTTRIIQGLRRQLANLERAINELLDASPELKQQVELLCSIPGIAQLSAVRLLAYGRNTITTYSARALVAHAGLATRHRQSGRTVRGKSRLAKQGDRRLRTALYMPALVGIKHNSRLQPFYQRLVDAGKPKKLAIAACMKKLLVISRAVLLNKKTFKPEFLT

SEQ ID NO: 237262 - protein, 306 aa, unidentified
MTSVKYIGLDVHKESISICVRNSVGKVVMESVIETKASTILQFIDGLRGDLRVTFEEGTWAAWLYDLLKPRVSGVEVCNPRKNALLKDGSKSDRIDANKLSEQLYMNNIKSAYHGEHGLRTLKELARSYLTISKDLTRVMNRLKASYRSWAIPCAGKEVYAPRHRAEWLGKISESGVRRRAEFYYQQLDTLRLLRQEVRRDLLLEVKKHKAWKLLRQIPGIGPIRAAVLMAVMQTPHRFRTKRQLWNYSGLGLETHDSGEYRAVEGQLQGAKRQATVRGLNRDHNHDLKDIFKGAAMRGDARFEGE

SEQ ID NO: 237263 - protein, 475 aa, unidentified
MAKRTAQADLQVIPRLSRETLYVGVDIGKKTHVAGFVSTTLLSRHQRFEHCPALSFENSREGFRSLVDRISSYVPLTQVYVVMEVTGHYHRPLLHYLQELDFPVYVMHVQKRQEGLLKTDKRDALGLGNLLFNQLEKGIQMGDPMQAVRRLAPPTEAASQLRGMVQHRQELTVESTRRKNKLTSICDEVFPEFVQILKDPNLPTALAIRKRFPTPAALATASLLDLQELRGKNRSLSDAKLLELQRLAVQSIGTKEPARLRGLIFEQTQLIAELELIQAHLEQLETEMAQVIDHCREGKILTSIPGIGPTQAAAILASIGTIANFERAAQLKSYFGWAPSVAQSGSTLNHVRLTPRGQRQMKLTMYLVVWQAIRLKDSEWSKIYERLVPIKCSFNEKTHQYAGRGKVIGRIAGQMISVIYALLKQDLETLSKTPSGAKPPDPVLYNPEIHHKHRAGQYRASVQKKPHNVIELPPH

SEQ ID NO: 237264 - protein, 350 aa, unidentified
MEYIAFDAHKHYTVASVERPTGEVLRETRLAHHRGVIRDFLQQWTPGSPVAVETVGNWYWLVDEIEEAGMVPRLVHARKAKLMSGMINKTDKLDVRGLNRLQRTGTLPTVWIPHAEIRDQRDLPRTRMVLVRARTRLKNRIHATLAKYALTVTDVSDLFGKQGRIILSDKLTQLPPHSRFSTEHLLEQLKALDAHIAEFEVRIRKVFKKTPALEWVISLPGVGLILGIVILLEVGDIHRFPDAEHLAAYAGTTPRVSGTGGKIRFGRLRPGVNHYLKWAYTEAAEVICQHRADWSHRHVSQLYTRVRHRKNHQKAIGAVARHLAEATYWILTKRESYQEPKRRSDASMKA

SEQ ID NO: 237265 - protein, 378 aa, unidentified
MPNTIRNDIGAIFVSLELSRSKWLITSLSPGGGERMSKHTVPGGDIYALLARFSELQRKALARTGTLFPVIVVQEAGLDGFWIHRLLEKEGIESHVVDAASIAVARRRRRAKTDGIDGETLLRTLLAYKRNEPRVCAMVKAPTIEEEDRRRLCRERKTLMNERVVHVNRIKGLLFSQGVSGYEPLRRDRRRRLDELKTGDGRPLPPHLKAHVVRELERLELLLEQIKAVEGERDALLAPQEATTPEMAMLLAIKGVGLEFAAVLWSECLFRQFANRRQIAAYAGLAPTPWQSGSVDHEQGVSKAGNPRLRTTLIQLAWLWLRHQPHSALAEWFHERVRRNGGRLKKATIVALARKLLVALWKYVTAGIVIEGAVMKTA

SEQ ID NO: 237266 - protein, 401 aa, unidentified
MKRLSGGIDIGKSSHHMVILDEKEDILYQRKIPHNLSKMKEIMRQLEDLEKSKKAHLSFALEGKNGYGNPLDRLLLLKGFTLYNVDNYKLKRFREAFPGEWRDDNRDALMLSKMLSLKEHIDSGQEKIFVPIERPSKVTESLKLLSRHQQDLIVEKVRLINRLGKKLLEISPELLLLGKLKNKKMIALLAKYPDLSRYHKITLKMLLTVSGIGKKQAPHLLAGLHELAYMSEMTAIYKTIIFSCAKRILQLNKEIKEIEEKMEKIGMLDKSFRHLKSMPGVGTRLASRFIGEIGNIFRFSSQSKLAIYCGIACVTSSSGKMTKTKAVYKANKIAKQTLITIAGCSIRFNPECRDYYFKKRQEGKTHNHALRCLARQMIKVIYKMLTLGRDYKIRKEDVKIA

SEQ ID NO: 237267 - protein, 353 aa, unidentified
MKKVVAGMDLHSNNVVIGVMDLDGKRLAHQKVECRLNEVLKFLAPYKKRLERVAVESTYNWYWLVDGLRALKYPVVLANPAGMEQYSGIKHADDTNDAFFLAELMRLKVLPTGYIYDEQLRPVRDLLRRRMGLVHQRTSLMLSFKSLYVRTTGQELSLSRLKELEVEQAQELYDHPANQLIAGMQVKHMEQLTQSIEKIEKAVLASARELPYYPKLTSLPGVGKILGMTITMEVGDIKRFAEPGNFASYCRTVEAKRTANSKKKGENNSKKKGENNSKCGNKYLAWAFVEAANFAKRYDEPCRKWYGRKAAKTSKVIATKALACKLARAAWYLMAEGTDYDSQRMFGQPATTK

SEQ ID NO: 237268 - protein, 355 aa, unidentified
MTETVYCGVDFHARMQTVAYCDTANGEIKLVQLDHRKDDIRGFYAQFTGQVIVGLEAGGYSSWFEAMLEELGHTVWTGHATEIRRRANWRQKNDRRDAELILEIMLKGDFPEVHRHSRESVEVLRMLRYRSRLIKMRTTISNSLQAIAISCGVLERSRMLSQSGQQRLKSAQMTPAFRHQTEDLVTLLVPINERIGRVDKWLKQQVSTDERVKLLMTHPGVGVLTALGVVHTLEPFSRFRNQRSVVAYVGLEPMERSSAERKRYIGISKAGSRMLRFLLGEAAQMAVRFDPELKQFYERVGKRRGKQKATVAVARKLLIRCWIMLRNNVDYAEFRSRGVEARLAPKHPRPGVSVG

SEQ ID NO: 237269 - protein, 338 aa, unidentified
MTIETLSVDIAKNVFQLHGVNCNGRVVLKRRVMRDQLLEVLAQIDPCTVVVEACTGAFYWARKFEAHGHRVKVISPQYVKPFVRRQKNDGNDAEAICTAARQPHIPFVPKKTVEQQDVQALHRARQRMVNHRTAVVSQIRGLLLDRGFAIAKSITRARRLVPDILASFDNELTPMARDAIGELYDLFRDLDRRIASFDKKIEQVFRTSETCQRIAKIKGVGPKTATAIVAAIGDGAEFKNGRHLAAWVGLVPRQFSSGDRKVLMGISKRGNQHLRSLLVHGARAVVRTAPNKIDFNNQWVNQLRERRGFNRATVAVANKNARIIWAVLRTGEPYRAAF

SEQ ID NO: 237270 - protein, 352 aa, unidentified
MSQESTKRSPKPLKENFLKYSIGVDISKDKFDACICAISLEQDVKVIGTRSFTNNPTGFDHLIGWVANKSKWDLETSFTMEATGIYYESLAWFLYRQDRYVSVVLPNKARKFMQSQGLKSKNDKIDSIGLARMGVVQRLERWQAPDEIFLQLRSLTRHRQSLQETRTVFNNQLHAIRSGEFVDPFLVNQLNSMIDNLDQYIKEAEKEIKKAIGQYPEMQQKIEKITAIKGVGLLTVATVLAETNGFNLFRNQRQVVSYAGYDVVENSSGKHVGKTKISKRGNAHIRRILHMPGFCVVESEEPVFKTLYDRVYERTRMKMKAYVAVQRKLLVMIYVLWKNDREYIPSLPILLS

SEQ ID NO: 237271 - protein, 346 aa, unidentified
MDHYAGIDVSLECSSVCVVDAKGKIVREAKVASEPEALIDWFHSLGFDLARIGLEAGPLSQWLYAAMKKAGLAVELLETRHVSDAFKAMPVKSDRNDARNIAQLMRLGWFRPVHCKSVSAQETRAMLTARKLIQTKLQDIENSLRGILRGFGLKVGKTTKRSFATQISELVAGHPALETIATAILAVHMVLLREFNSFEKRVRAMSLLDAKARLLMSTPAVGPIISLTYACAIDDPARFASSKRAGPLFGLTPKKHQSGETDYSGRISKNGDASVREALYEAAHIILTKPIKGCAQLKSWAMRIAKRAGMNKAKVALARKLAVIMLRMLKDNVPFNSTAKATTAAV

SEQ ID NO: 237272 - protein, 410 aa, unidentified
MEAIVERVAGVDVGQATVVATALVGAAHERARKETRTFRTVTRDLLALREWLLAKEVTHVALEGTGIYWRPVYEVLEDAFEMILGNAHHIKNVPGRKTDVKDSEWLADLARHGLIAQSFVPPKPFRRLRELLRYRRKLLESRTAERNRLLKLLETANIKLASVASNVFGVSGRLMLQALIEGAATPSAMAALAQGRLRTKVAELEHALEGRLDEHHRFLLQLQLRRLDHGDADLASLDARIDEALLPYRAPCEVLQQIPGVSRVVAAVIVAELGTDLTVFRSAQHAAAWAGVCPGNNESAGKRMRAGARKGNVHLRTALVEAAVAASHTKGSYLRDKFYRLRARRGTKRAAMAIGHKILIAAYHLLATGAPYRDLGPTYLDGLDKRHTTRTLVRRLERLGYDVTIAPKVA

SEQ ID NO: 237273 - protein, 353 aa, unidentified
MDSRKYIGMDVHQASISVAVRDDGGKLLMECIIETKAATILEFIQGLHGSLWVAFEEGTSAAWLYDLLKPHVAHLVVCDPRKNALLKAGNKNDRVDARKLSDLLRAGLLTPVYHGESGVRTLRELGRSYLTVTKDLTRVMNRLKALYRSWAIPCAGQKLYSPRHRSAWLEKLSEAGVRRRAERLYQQFDILVRIRREARRELLTESQKHPANQLLRQIPRLGPIRVALLIALLQTPHRFRTKRQLWAYCGLALQTRSSGEYRFTGGQRQHSKKLPALRGLNDNHNHDLKNLFKSAATHTSTDPLGDFYQNLLAKGMKPAMARLTLARKMAAIVLKIWKKGERFDPGQLKRQAA

SEQ ID NO: 237274 - protein, 357 aa, unidentified
MTQVKKLDFTGSTIFCGVDVHKKNWRVNIHDSEFELEDFSQDADPVLLHKHLTRKYPGASYKVCYESGFSGFSAQRLLSSLGIDCQLVNPADVATTDKEKRQKNDKIDARKLCEHLQSKKMKGIYIPSLQWEHGRSLIRARAKIVSNQTRCKNRIWQLLHFSGLSLPKNYEAGQYWSRSFIKDLQSTNCGTKELKITLDLYIKDFLQTRSLLLEATRAIRKLCTQTQYQPQIALLRSIPGIGEINAAVILFELQEINRFKHFDNLCSYVGFVPNTSDSGETKKTKGITNRHNHYLRTALVESSWSVIRKDPALLMKYKMYCRRMDKNKAIIRIAKHLLARINYVLKNQKEYVSGVVA

SEQ ID NO: 237275 - protein, 423 aa, unidentified
MMKLKYSICCGLDVHKNVIVATIVTTNKQGISEYHQKSFFTINSDIQKFHSWLIENNCYHVCMESTGKYWIPIFNYLENDINVCLTHPKYVKAIKGKKTDKKDSKWIADLYKFDLVRCSFIPPKDFRQLRELARYRFKLVGMKSSEKNRIQNCMTVSNVGIASVLSDPFGKTATEIMSYLLEHTSESMDEKAVRKLIKKGAKAKSDEIIEAIKGYNIETDQAKKLELARAHLDYLDDMITQTEVELYVRIKPYYEFVELVSTMPGMTELSSTIVLSETGVNMYIFDDAKHLCSWCGLSPTNNESANKKKSVRIAKAGAYLKPMMVQCALAAIKSKKEPYFAIKYGRIKKRRGHKKAIIAIARMMMVCIYHMIAEKKPFSPTDYEELMDPQNHVEKVILNENTVFAYLESLGYDSTQLVKHNDK

SEQ ID NO: 237276 - protein, 341 aa, unidentified
MNEITLIGIDIGKQVFHLHAQDAKGREVFRKKLSRAQLLSFFSNLQVVTVVMEACAGAHWLARKLNAMGHQARLISAQYVRPFVKSNKNDYIDAEAICEAASRPTMRFVEPRTESQQLLAALHRTREGLVTERTATINRIHGLLLEFGIVVPASKATLRRLPDILALYDLQPRLIQLVYRLHAHYQYLDQQIEEVERDLSSQLRADENAARLLSIPGIGTITASLLASEIGSVAQYAGGRNFAASIGLVPRQHSTGGRSTLCGISKRGDKHLRHLLVQGARAVIQRVENRTDRLGEWIRSMLTRRHSNIVACAVANKLARIAWAVLTRHTVYDAGRLGLVD

SEQ ID NO: 237277 - protein, 321 aa, unidentified
MTYVGIDVSKATFVVAYSSAKSSKTKTFKNTTKGVHEFIQTLSASEHHCVLEATGNYSSLLVYLLSQVGITVSLENPLKIKNFARVMLSVTKTDETDARLIALYGEKMQPAPYRLRSDAILTLKQKRTVIRQLKKQLIATRNLKGSMEALPFFDPKCKKAIEKTIAFLEKQVKNLEEELAVLAQCEYKKQMDLLISIKGIGVTLAAALIMATGGFTYFDNAKQLTRYLGLSPTYQQSGTSVNLKGHINRNGDSSLRGQLYIAAMASLRCNAECKECFNRLRSNGKPGKVAVVAVANKLVRQAFAVVTQEKPYVDGFKSEKP

SEQ ID NO: 237278 - protein, 315 aa, unidentified
MTKHLPPVNVGVDVGKNQLDLYLLERDRALTVPNEEQAILVLVRSLSRYRVERIVVEATGRLEQPFVRAALAAGLPVIVVSPLKIRRFADVIGQLAKTDQIDARLIAQFAATVKPLPRPASDANAQAIKDLVVRRRQLTSLRTMEKNRRQVMPNDLKPSFDRILKALDRELKSLEQLINHAIDQHASSRHKRELLTSTPGIGNCVAATLIGDLPELGSLDRRQIASLTGVAPFNRDSGTLRGKRRIRGGRTHSRTALFLSAMVATRFNPDIKRFYQRLLTAGKHKKVALTACIRKIVTALNAMLRDNLPWRSAIA

SEQ ID NO: 237279 - protein, 377 aa, unidentified
MKQYNTLSVGLDVHKESIAVAYAPDEDGAEAIYLGPVGTRQCDVDKVIRQLHSKACKLRFVYEAGPCGYWLYRYLQKKGQECIVVAPSRIPRRSGDRVKTDRRDALQLARLLRSGDLTAVYVPKPEDESVRDLSRLREETLRDLQAAKNRLKAFLLRHDIRYEGKANWTASHLRTLAHICMATAAQRVVFQEYLGAVTHLMEKLALIETELREHAKSWRLAPLVQALQALRGVQFHVAVTIAAELGDLRRFEKPRQLMAYVGLHPSEYSSGGKRHQGAIAKTGNAHARRVLVEGAWSYRHLAKVSPQIQQRLEGLPEDIRSIAWKAQVRLCKRCRRMIAHGKNRNIVIVAIARELIAFMWAIARKVELSQVSLAQAS

SEQ ID NO: 237280 - protein, 400 aa, unidentified
MRVVFGIDVSKVSSEVAILVNGEKVHNYTMSNDAIGFSRLLGDLKTVHKPEIIFEATGVYSRRLQTFLEDNGYAYTRLNPLEAKKQLDSLRVRKTDQIDAEKLAQSQFVLNRKPTYVQEEVYQNLRDLSRFYQNLTEDIVRAKNRLHKALQVTFPELETILSTPTGEQYGNLVVAFPCKDFVLDLSKDELSESIRQSTSKRISDKRVAYLAEKLIALANQSYCAVKKTSPMLEEVRYYTKELLRLSEQRQTVLDQMVELAQPLPEYDILLSIPGIAETTATSIIGELGDIRRFQSANQINAFIGIDLKHYESGNFLAKEHITKHGNPYARKILFKCIHNIASASHTNPCHIADFYEKRKKQSQTTSTKPHTIASIHRLIRTMYYLIMHNKLYDYASTQNR

SEQ ID NO: 237281 - protein, 388 aa, unidentified
MNVTADQPEAPTAIRTDLGAIFVSLELSRSSWLITSLSPGGGEKMSKHTVRGGDVSGLLQRVAQLSEKARVRTGKVFRLIVIQEAGLDGFWIDRVLQNEEVESHVVDPASIATSRRRRRAKTDKIDGETLVRSLLAYKRGEPRVCSMVKAPTPEEEDHRRLCRERKVLTAESVRHVNRIKGLLFCQGISGYEPLRRDRRERLEELQTGDGRRLPQHLKAQVDRELDRLELLLKQIKTVEGERDALLAAAQTAMPAPAAMLLDIKGIGSEFAAVLWSEGLFRHFDNRRQLAAYAGLAPTPWQSGAVDREQGVSKAGNPRLRTTLIQLAWLWLRNQPQSALTIWFHERVRRNGGRLRKTTIVALARKLLVALWKYVTTGVVIEGATMKAA

SEQ ID NO: 237282 - protein, 342 aa, unidentified
MQAIATIGLDIAKSVFQVHGVDAVGQVVIRRQLKRRYVLAFFQKVPPCLVGIEACASSHHWSRELQALGHTVRLMPPAYVKPYVKRQKNDAADAEAICEAVTRANMRFVATKTPEQQSGLMLHRTRHLFRQQTAVINAIRAHLAEFGIVAPVGRNGVEQLLGIVADPNDKRLPEVARVCIAALGTQLRGLKAQVLNFDRQIMAWHRSNETSKRLDEIPGVGPVLATALVASVADPKAFRSGRDFSAWIGLVPKQYSSGGKDKLGSISKQGDRYLRGLFTAGALAVIRYAKIHGTKHRPWLTALLARRPTKVVAIALANKLARMAWAMMAKGERYKQPVALAA

SEQ ID NO: 237283 - protein, 333 aa, unidentified
MERVSIPTTAKELQDLVGRSAAGDGLLVGQELGTLAFFVHDVRTALGVEIRSFNADQLRRIAASRKKTDRRAAFWIAKALQTGMTPHPVYIPTGPIRRLRSLLAQRDAVVAERKRWLLRARSCLRSGGCGLPKASRSVARLRDKALGDPDGLDAHLAEALDLCQRREAALSEEARRLDALLEEETADIPAIQRLRTIPAVGDQVAVRIYAAVGDISRFPNARALAAHAGLVPNVHQSGEVLHMGRITRMGSPALRGVRIQAGHVLLSRCDPVKAGPLREIASRIQSTRGRRKIAVVGAARHILRIAYDVLRDGSTYDPHLLRSPAGAKPATAA

SEQ ID NO: 237284 - protein, 351 aa, unidentified
MQYVGIDWAYRRAAWCAKETDGTISGEGLVPADEDGLARVVIEQGPEVSACLEMMSGAVWVRDRLAGAGWAVEVADARKVKNVAPLACKTDKVDARVLAELCRRELVPALWIPSLEERALRERLKRRLHLVRLRTSAKNRIFGLLTQWGLRIRLERLRQPDAMELLETRGVPEVWRRSVTEALAVIDLLDERIAPLEQELGPLARADRRVVLLDTIPGIGSVLGLTIAAEIGEVARFPNARKLVGYAGLAPRVKQSGERSRSGELSKAGSRTLRWAAVEAAQGAWRESNPWHRLYSDVKARTGKANPAKAAVARKVLIACRHVLSREEPFKPSPPRATDLVPTSSSCFLAA

SEQ ID NO: 237285 - protein, 344 aa, unidentified
MDNHTQYLGFAGVDLAKKVMQIHFVTADGEITDKSAKRAEFLDFFRNRGKCLIGMEACGSSQDWARKLEAMGHEVHLLPPKAVKPFVSGQKNDHNDAIGIYKAMFNGVRRVPVKSTEIRDLQTLRRIRSQVTKDKVKEINHVRGLLAEYGIVMGKSITAFNKGISSALESLKERGDVSPLVAEELQTTVESIKTKIERQKRLDREIEQLARGCKNYENFLKTPGVGPFTAAMLCVLLCEPAIFANGRQFAAYIGLAPRSRGSGGKNFIIGIPSKFNCDRESRAVFVECAQALARYKNKSPWVDGILRRKPKKVAVIAIANKLARQVWAMANKGESFKQMTILTA

SEQ ID NO: 237286 - protein, 340 aa, unidentified
MSLVLQPLLPFPDSCQGMSPHQQGRGTKMTEHCYGGIDVSKDRLDVMVLPDRRSFSVDNNAAGYSELVKQLRGLSIAAIGIEPSGGYERAVIRALLAADLSVRRINPNKLRQFGRARGVLAKNDRLDARLIAEYVAIMPTRVVQRDPATEQLAEVVTMRRQLCDEHVAVENQTAHLEDAMLRRLNKRRLARLAADILLLDRRMAQIVASNANLTRRYELLTSMQGVGPTLAFTLIALLPELGHMSRKQIAALVGLAPYDFDSGRLKGHRCIYGGRLPVRNVLYMAALSACRYNPALKVFHHRLAATNKKPKVIIVAVMRKMITTLNAMLRDNVAWQPKSA

SEQ ID NO: 237287 - protein, 385 aa, unidentified
MKPNSQMTVGEFFRQCVGIDISKKKFTVCLYMYDRASDAGCCTQSVDFANTKTGFNQMVKWSRKEAVKGQPLTYLMEPTGSYYEKLAYHLNKIGLTVYVVLPNKARQWCEAEGVKTKTDAMDARCLALMGCASRKLSPWSPPAAIYRELRQITRFHADLCKVRTSVANRMEALGNMYGPDKSVRKHCEKLLEEIDNLMEKNDEALLCKLAEDKDLKSKVERIAGAKGVSIQTVACVIAETDGFHLIRNRKQLTSYAGFDVVAKQSGGQDPKHKISKKGNANIRAALYMPALVATRYNKQMKATYDRICQKHPNEKKIGVTAVMRRILLLIYTLWKNGEEYDENKDKANAKGKKKQAQEHGPEDCLAVNEEHVEGVAEDENGQPSS

SEQ ID NO: 237288 - protein, 420 aa, unidentified
MERIVERPGALDVHKESVTACVRVWEGRELREQIAEFKTTVAGLLALGDWLAALGVRQVVMEATGVYWRPVWAVLEDSFELMLVNARHVKQCPGRKTDVLDAQWLCQLLEAGLLKASFVPPKPIRTLRNLTRYRKAQINDRQREAARLHKILEDTGIKLGCVASDILGKSGRDMLDALVAGTKDPAVLAELARGQLRKKLPALREALVGRFDDEHALVIGQILAHIDFLDEAIDRISADIEERMRPFAAQRDLLMTIPGVKQRAAEVLIAEIGTDMTVFPTPKHLASWAGMCPGNNESGGKRRSGKTRNGSKWLRATLTESANAAARSKNTYLASQYARLRGRRGHAKAITAVGHSILTAAWHMLSTGELYRDLGSDYLTRQDPDRATRRLVRQLEALGHIVTLQTPTATSTAPGASVAA

SEQ ID NO: 237289 - protein, 376 aa, unidentified
MSEIIRIGIDTSKSIFVLHGVDAAEQPALRRKLRRSQMHEFFRKLAPTKIGMEACGGAHYWARELKALGHEVVLLPPQYVKAYVKRNKNDAADAEAICEAMSRPTMRFVPMKTSEQQAALMLAGTRRGLTKRRTQLSNTIRGYAAEFGLTTAKGLDKIEPLLARIALSADLPKLAKELFAAYDREYAQLERQFLGMEARLMAWHKHNELSRRLVEIPSIGPIGATLLAMKVTNPHAFRCGRDFAAWIGLTPKDHSTAGKTRLGVISRAGDEELRSVLVAGATAVIQQAQKGRGYSPPWLVELLKRKPPKLAAVALANKMARVVWKLMVSGERYNPARIEAQLAAREGRGAALCGGSAPRPSLASRTSREVVAMTEA

SEQ ID NO: 237290 - protein, 368 aa, unidentified
MEKDTTYVALDDSKRKIVAGILRPNDTAPELREIANDPHHIRRLLTRLQRERPVSACYEAGVSGYDLYRQLRALGVACHVIAPALTPRRPGRRIKTDRRDAAKLVHLYRAGELTAIHVPDEVEGGRDLIRCRDDIRRDVLRWRHRLLKLLTRHGRMYVAGRNWSQAHWRWIREQRFDVPPLQRAFEATLFTLEQALARQAELDKEIEALAATVPYREPVGWLRCFRGIDTLSAMILLAEVVDFQRFHRPRELMAYLGLVPSEYSSGETQRRGALPKAGNAHARRVLVEAAWHYRHRPTIGHALATRSQGQPPAIVAQAWRAQQRRHRRYRHLVGHGKRPPVAVAAIARELVGFIWAAMTGHESRLQTA

SEQ ID NO: 237291 - protein, 343 aa, unidentified
MSRTKAQSLSRMGVDIGKNTFHVVGMDDKGNILIRRCFTRVKLIEYLARLPQTTIGMEACPGCHWLARKAKSFGHTPCIVPAQFVKPFVKSNKNDLIDAEAIAEAISRPTMRTVIPKTTAQLDLQALHRIRERVVSHKTAVVNQARAFLLEYGLTIHSGIAKFTHDMPSLLSDEQNELSPSMRDILTDLWQEYRSLEGKLLHLRRQIESIADADGIAKRLTSIPGVGKLTATAITAFVGNGQQFKSGRNLAAWLGLVPREYSTGGKQRLLGMSKRGNAYLRKLLIHGARTCVLHLNRTTNFLGQWIQLMEERGVHRNKVVVALANKIARIIWAVMTRPGAFYL

SEQ ID NO: 237292 - protein, 409 aa, unidentified
MQVIHPRCAALDLGKDVLVAAVRLQDAAEVRRECRTFQTTGRELLRLASWLESERVTHIVMEATGSYWKAVWHVLENRFDLTLANPAHIKNLPGRKSDVNDATWMADLHAHGLVRGSFVPPAEIGALRELTRTRKQFVREINRHTQRIQKTLDIAGIKLTGAVSQVLGVSGRKILAALIAGETNAKKLAALAHPRLKASSDRLEEALQGRLTTQQRRLLGMHLNLIQTLDAAIAELDADIAKAVDPFRGIVERLHEVPGLSEINIPAVLGEIGVDMSRFATHAHLISWARLCPRLDESAGKVRSRQTMKGAVWIKELMIQAAWAAIRTKDSYLRAQYLRLRARRGGKKAIVAVAASLLTIVYHVIRDGTTYRDLGPNHFATRDRTQAARRLVARLHQLGYNVSVTAEVA

SEQ ID NO: 237293 - protein, 344 aa, unidentified
MTAVMIGVDPHKGSHTATALDATEHELACLRVRAGRRQVEQLLAWATPFEARTWAIESANGLGYLLAQQLVAAGEVVLDVPATLAARVRVLSSGQSNKNDPNDARSVAIAAMHAPMLAAVPVEDHRTVLRLMAKNHTDLARWRNKICCRLHALVAELVAGGISKEVVVSDAFALLESIHPEGVAAIERHRLAGQLADELVHVDDQLKLAKANIRTAVAASGTTLTDIFGVGPVVAAMLIGYTGDPFRFPTSGHYAAYTGTAPIEFSSAGRVVHRLSRRGNRRLNHALHIVAVTQIRHAHSPGRGYYDRKRAQGKTPREALRSLKRRLSDIVWRQLVDDARRAAD

SEQ ID NO: 237294 - protein, 340 aa, unidentified
MDKRDFSGIEVSAEELIVAVEREGRTIPLECFANDAPGHHAVLRFLRGARHPVRVCMESTGVYGLDLALVLARAGIEVMVANPRAARHFATAMMQRSKNDRLDARVLLEFAKRMPFQAWTPPRPVVLQLHALSRRLEALKDTQAAEQSRLHAAQATGTTPAAVRRDLERSLRSLRRAIARLTVEAVKIIRQDSGLQLRFDLLLSAKGIGETSAIALLAELAVAPQDLDVRQLVAYAGLDPRQHSSGSSVHKKPRISKHGNVHLRRALYMPALVAIRRQSNLRAFYEHLRARGKAKMVALVAVMRKLLHAIFGMFKHQTAFDGNKVFTLPAPEISTAEAAA

SEQ ID NO: 237295 - protein, 418 aa, unidentified
MKVIKTKKNRIVNGKTLIVTVDISKDRHFGYWRCPDGTDVKPFSFPNTGAGFTEFWERISRAKEIHHLDEIVFGYESTGPYGEALTHFMKARGVRLVQVNPMHTKRVKELQGNSPNKTDQKDPKIIADIIELGRALTVVIPEGSAAELRRLTQARERSTERHTALVNQLQSLLAIIFPEFLQVVKNVKTITAHYLLKHCPTPQRLVAYGLDNLTKTMWTVSRGRMKEDQAKALFEAAEASIGVVEGQASILLEIQAILAAMEASEKFTEGLEKEMSHHLKQIPYSSCLLSIKGIGEVTAAGLIGEVGDFRKYSTLGEIMKLAGLDLYEVSSGKYQGTRRISKRGRPLMRKLLYFAALRAVRSDGLMAHQYQRYLDRGMLKTKAVIAIARKLLGIIFAIVRDNSAFDYSRTSFQFQEAA

SEQ ID NO: 237296 - protein, 450 aa, unidentified
MMSEPQEIEDEEYEQVLERVAAIDVAKAPGMVCTRVPHPSRAGRRQAKAWNVDATTNAILELGEYLAGLGTEKVTLESTSDYWRPFYYLLEAAGLSVQLVNSRDVKNVPGRPKTDKLDCVWQAKLTERGMLRPSFVPPQEIRQLRDYTRLRLDLTRDRSRHAQRIEKLLEDALIKLSSVATDIMGKSGRAMIGALIAGERDPQVLAGLARGRMRVKHAALVQALTGRFDAHHAELAAILPGQYDALTVQIDALTARIEALIAAIPAARGVDADGTTGPGAGAGTGAAVLAAIDRLDDIPGIARHTAQVILAEIGLDMSVFPAAGHLASWAKLSPRTIQSGPENRSGKTGRGNPCLKGALGEAATAAAKTGTFPGERYRRIVKRRGKLRALVAVARSILVIIWHLLADPAARYCDLGSGYYASRTGKDRKTRSHIRQLEALGYTVTLTQAA

SEQ ID NO: 237297 - protein, 342 aa, unidentified
MYYIGLDVHKKTISYCVKDAAGKIHGEGKIGSTRRELDAWIKTLPQPRMMAMEATIFTGWIYDHLLPHAEKVRVAHPLMLRAIAAAKRKNDKIDASKIADCLRCDFLPECYMTSTEIRDRRRTLRYRGLLVKQMVQMKNRISGLLMETGVSYNKQRLHKVGYFTELMSGNEEIDCVRPLLKLSRETINRSQKLDYALVSSLERDPLLADRLKRLRTVPGVGPITALTWVLEIGDVMRFRSIKQAISYCGLCGAERSSADKVMRTPISKQRNKHIQQVLVEAAKLAPRYSHELALIYEKEKQRGNRNRATLAVARKMVAWMVAVERRKQDFVPAEKRGGTVAA

SEQ ID NO: 237298 - protein, 340 aa, unidentified
MTKKHTQTTLDVSIEYAVIGLDLAKYDVSLAAVTLNEGEVILIDRVTYAELYEIADKLSPTLFAVEPCNGYSQLNLELEARGHEMRVISGKAVKMWIDTHMSGQKTDINDALALARLTADPDLRPIRAKSLEECRIMTVQGVRQQLVGQRTKTIVSFKGFAQAWGIGIPAGRRNLKKMREAVEAKAELMGAAAVSALTTMLDRVKTLDDQIHQLDKDLEALVSANANGRLLKSVMGVGTQIAGRFITVVGDVKRFEKPRSLVAYIGCVPKNFITGHVNKPRQKKSSAPDLSSKGQGRISRRGDKLLRSLLMQGAACIYMQYCKRQLPDCQLTKWIDSSWR

SEQ ID NO: 237299 - protein, 337 aa, unidentified
MNFRPIAGIDIGKYFSEMVILSPSNQISCRMKIHHDSVADIKRAVELLKKAEKDFALKPFVVMESTGHYHKILFRSLCNEKYEVSVTNPIQTDSIKNIGIRKVKNDKVDARKIALLYRFQELRTTNIPNEDIECLKNLCRQHYNLSDELTVYKNRLTSIVDQIMLNYTDVFPNIFSKASLAVLEQYPTPTAMLEGNKNDIIALIQKKSRKSLESSTLKYQLLVKKASDFAPLSNEEKSNITMLGIYISMIKAFQENIDKVMTSIRKIINEDISNDFPQLSLTLELLQSLTGIGLLSAATLLGEIGDFSAFTKPEKLVAFFGIDPSVNQSGEFVGVQV

SEQ ID NO: 237300 - protein, 370 aa, unidentified
MLDTTTFVGLDVHARSIKAVSLDVMTGEVRCATFGYDAGAVAEWVRSVDPKAKCVYESGVTGFDLQKRLSGLGVDCVVGAVSKMIKPSADRRRKNDRNDAEFLARMLSVGNVVEVWVPDDECEAARDLTRALEDARDDLSRSKQRLSKFLLRHGLVFDERTPTGRRKGNWTRAHWSWIESIRFAEGADNDVLAYYVDAVRRAAEEKARLEGLVEAEARKPRWRRRVDSLRCLKGVDTATAADLVFEAGEFSRFRNARSFAAWVGLTPSEHSSGENDRRGAITKAGNKHLRKALVEAAWHYLTCSGRPKDLAKGQAPDRVARRHAAKGVRRLVERREALLARGVHNNKANVATARELACWVWAVGLMAEGA

SEQ ID NO: 237301 - protein, 340 aa, unidentified
MEQIIGIDLAKRIFQVNIVSVQGEKKANKMITREKLMAFIAQQPPSRIVMEACGSANYWSRQFRQYGHDVRQISPQYVAPFRMGSKNDKNDAVAIVEADSRPGMRYVPEKSIEQQDIQCLHRVRQRLMKNKTALINQIRGLGLEYGIAIPEGAHKIMACLPDYLEDAENELTTLSRQLFHEMLQELQDCKQRLKELDIRLALISQQNEDTLRLESIPGIGPLGASALTVALGGSTDFQNGRHFASYLGLVPKEYSSGGKVRLLGITKRGDSYLRGLLIHGARSVVYRAINLPEERCGSLQRWLKGIIARSGVNKAVVALANKNARIAWALINQKAAYMAK

SEQ ID NO: 237302 - protein, 358 aa, unidentified
MGKVTRRKVSSKRLQVTDSDVVHVGLDVHKRSIHVAVWLNGRVERHWVMPADDRKVLAKLEPLRVALKRAVYEAGPTGYGLARLAHSAGLPLDVVAPSKTPQPADRSAKSDRLDCFQLAEYSAAGLLRAVAVPSRQQEADRQLLRLRDQVIRKLRRVKQQIKSLLLQYGIAEPAGLTYWSIAGVEALSDLALGDELRFCLDELLEELEQLQARLGRVNRRIEQLADQPRHAAAVVVLTSHPGVGTITAMTFRTELHHPERFRSPAEVARYFGLCPRVRQSGATRRDGPISKTGRGHARAILVLAAWRWIAGDPLAKTVYERLVHNTGLPQKAIVGMARRLAIRLWRMMTTGELCRQAA

SEQ ID NO: 237303 - protein, 384 aa, unidentified
MPDVSSNAPGVVRMRAALDVHKRTIVCVSQPDDPRAGELRLQEIPNTERALRALIRRLGGAEGLVVCYEAGPCGYEPYRLLSEMGVACDIVAPALVPVAPGARVKTDRRDAKRLLVLHRAGALKFVHPPTPAQEGLRDLVRCREDLVCARRAARHRVAKQLLRHGHIFREGKKSWTKIHQAWVRRQRLADPLAQSALEHMLAHLDALDAQIAVLDHQLDKIAQREPWSDPVRWLSCFRGITTLTALALLAELGDFRRFGTARELMGFLGLTPSEYSSGEQRHRGHITLAGNTHARRLLIEAAWHYQHAPRVSQRIAAVQPHVPPDVAARAHSAQVRLHHRHRSLTGRGKRSTVANVAVARELAGFIWAAMTRQPLRDPEVNAAA

SEQ ID NO: 237304 - protein, 343 aa, unidentified
MWSIGLDVQSRSSAVCILDGHGKRVKELNVAGGLARVLEVVGRIRQPFAICYEASCGYGYVHDRLERIARRVVVAHPGQLRLIFRSKRKNDRVDARKLATLLFLDQVPPVHVPSMDVRAWRGLIEFRHRLVAKRVRAKNGLRSLLRGCGVELQPGKAQWTKKGMTHLATLELPAEAVALQRDLLLDEVRHLTEQLGRVERELNAIGHRHPGVMLLTTIPGVGPRTAEAMVAYVDRPGRFARNKAVGSYFGLIPCQDASAANNRLGHITREGPATVRKLVTEAAWQAIRRSPHVRGFFERICGEDPSRKKIALVATAHYLVRVMHAMLRTGEVWRHETKKRRAA

SEQ ID NO: 237305 - protein, 322 aa, unidentified
MQDAKPELNVWVGIDVAKRHFDVAVLPGGETCRLTYDDEGLAQLLEWLKPWDRCFIVMEATGGLERRLAGELIEAGHQVAVVNPRQVRDFARGQGTLAKTDRIDAFVLARFAQQVQPRVLEKTSEKQAELAALVARRRQLKTMTVSETNRRETAQASRAGRSIDNVLRVLRKETAEIDEAIAKLIASDDTWRDQAQRLKSVPGVGPATSAMLVAELPELGRLNRREISALVGLAPYNHDSGKLRGKRSIWGGRAQVRSALYMATLSARRCNPVIRTFAARLKQAGKPFKVILTACMRKLLIILNALAKRQQPWSTEKITSTT

SEQ ID NO: 237306 - protein, 326 aa, unidentified
MQGKVPSQRSAAAPVYIGIDVCKARLDVHIHPLGESLVLPNDAGGLKRLKKILARYDVVVVVMEATGKFHRPAHRSLHASGFKVAIVNPLRSRRFAEAIGTLAKTDRVDARMLALMGESLKPGALEPTPELMETLQELARGRESAVDSKTAIGNQIQTSNSKVLVRELKRQLTAVETAIENLEAELQRQIDADPVLARRFEILTSIPGIGLVAAVALIVELNEIGRLSSKQVAMIVGLAPIARDSGQKTGTREIRGGRKHLRTALYMPANSAKQHNPDLKIFHDRLIKAGKLAKVAITAVMRKLLVLANTLVREDRLWQPKHVIAR

SEQ ID NO: 237307 - protein, 342 aa, unidentified
MRSRSRFEVDKNRSRFSKKSVMYKIKHFYGVDISKSFFDVVDQNGIHDQFSNDSKGFKSFLKVIQRDSLIVMEATGYYHYRLAQYLYEKGITVSIVNPLSVKRFIQMKLFKVKTDKSDAKAICEYAQANEVPLYTARNAVQAECLQLLSLQDLYLKQRTAVKNKIHGEKALGTPSKAVSRSLNRMLKQIEKELTQIETKLEFLIRETQKDQLEQLTNIPGMGKKTAMRLIVLTDGFTSFENARQLCCYSGLTPTIRQSGTSVRGRSRISKVGNRKLRNLLFMCSFTANRTKKACRELYERIVEKGKSKKLALIAVCNKLLKQAFAIAKSGTYYQENYMSKLA

SEQ ID NO: 237308 - protein, 352 aa, unidentified
MSIIAFDSHKRYTFARVENENGETLKECRIDHKRGQIYEFLSRQEPGSPVAIETIGNWYWIVDEIEQAGMKPRLVHARKAKMMFGCINKTDKLDAKGLNMLQRAGTLPTVWIPPGDVRDKRELPRTRMVFGRQRTLLKNRIHSVLDKYGFQDMFGDISDIFGKNGRRIFENILDKFPAHTRYSTELLLQHLDQTEQKIKEIEKRMNVLFKETEQHSLLKSMPGIGFILAVVILQEIGDIKRFSSAERFASYSGVTPRVHASGGKVRYGRLRPDTNRYLKWAFSEAANSVAVNRKRYPARHVSQLYNRIRSRKNHAKAIGAVARHLAEAAYWILTKQEVYRERGLLKVSPTGT

SEQ ID NO: 237309 - protein, 333 aa, unidentified
MSRTTEQSLESAIARTRQVTVKKTICGVDVSKARLDACVDPAGIFASFDNDTSGIARLAAFCRQHSVSLVVMEASGGYERRAFLELWQAGVSCALTNPRSVRRYAEAMGVLEKTDRIDAGVIARFAAAKNLSPTPLPSPSQQRLKALVARLRQVTDDLTVQKQRRASLLDSPEMLASIDEVIALLKRQSRSLEGEIASMIDDDPLWSLLAQTWRSVKGVAGRTVARLHAELPEIGTYSNKSIAKLAGLAPIADDSGKHRGKRHIRGGRAGVRSILFLVAAIAARYDKSLAEFRDRLVAAGKEKMVIRIALARKLLVRLNAKARDARAAYANAT

SEQ ID NO: 237310 - protein, 336 aa, unidentified
MRYIGVDLHTTQITVCYLTEKDEILIRKYQLCEIEKFVSDLNKTDEIAVEATCNTRWFAEQVAEKVSRVVLVNPRQFEVVKNSCKKTDKNDALNLAKFLKADLLPEVRAKGEEAEKVQSLVNTRTKLVRLKTSLINKIHALFVANGQKLKKASLSSEKALEKVLLSEWSAIERIELEIIIEQLRSLKVSIKKLDKVIETESEKLKGYESLVSMSGIGSLSAGILLSVIGEVKDFATADKLASYFGIVPRVANSNETVNHGRITKRGNKTGRTTLVQCSLAAIKKSEYLKKYYEQVKTRRGHGKAKIALARKYLGIIYNTLSNNWVFADFNNFELAE

SEQ ID NO: 237311 - protein, 349 aa, unidentified
MKKIVKQVAAIGVAQKELVVCLGRMYDDWSPQLYAHKTFANTVKGFEVLLLWLKKMTDETIAVRFVMEATGIYHESLAYFLDEKGYEISVVLPNKISNYFRTLDVKTITDKTASEAIVLFGLERKLDCWQKPKAIFKKLKQLTRERDQIVEERTMVKNQLHAEQTEAEPNKKSVQRIKERIKMLNSQESEIKAEVDALIKQDEQLTQHVNVICSLTGVGLLTAAIVLGETNGFELIRNKRQLASYAGFDIKEKQSGTSVKGKPRISKKGNKHLRKAMHMPALCAIRYDERFKAVFARLVSRHGIKMKAAVAIQRKMLEMIYTLYKTGNRYNKNYLKKNDSLIEQHENVL

SEQ ID NO: 237312 - protein, 348 aa, unidentified
MAVTIVEDRRAITGGVDTHAEVHVAAALDPIGGLLGVKEFPVTAAGYASLLGWLAEFGTVALVGIEGTGSYGAGLARHMAAAGVRVVEVDRADRQDRRRQGKSDPLDAVSAARAAQSGRAAGAPKGRDGAVEGIRALMVAKRSARNERTQAINQARSLIVTGPDDLRARFAKHTVTALVSDLAALRPRPGDVPGYATRIALRELGRRAQFLDAQLERLDELISPLVAGHAPGLLALYGIGPDTAALLLIAAGDHPERLRSEAAWAHLCAVAPIPASSGKVRRHRLNPGGNREANHALWRIVITRMSSHAPTRAYVDRRTKEGLSKKEIIRCLKRYVAREVYPRLRAGG

SEQ ID NO: 237313 - protein, 336 aa, unidentified
MNDATWFLGIDVAKRKLDIALLVTDKIKSKVFDNNTSGHAALTRWLIERGAIQSHTHICLEATGPYSEALAIALVDAGWHLSVVNPARIKGFAQGELARNKTDRADASMLARFCAAMRPGFWTPPSSEWRELRGWVDRLQALKDMHQQESNRLEAHLASGQAALVTAVQTHLDWLTKHIEQLERDIDDHIDRHPELKRDAELLHSIPGIGNTTIAKVLAYAGDVRRFASAKALAAFVGVTPRQRLSGTSVKGRSMMSRTGHADLRRALYMPGLVARRHNPLLKVFGDRLSAAGLAPKAVVGAVMRKLAHLIYGVIKSGQPFDPKFSTARLDFQDGI

SEQ ID NO: 237314 - protein, 342 aa, unidentified
MSMVVIGIDPHKSSHTAVAVDQAGRKLACKTVRSDNDGLLRLRAWAARFGTELTWAVEDGRGVAGRLVRTLIGTGATVKWVPPKLMAACRTSARTRGKSDPIDALAVARAALREPDLPTAHLDQQALDLRLLTDRRENLVNRRTASINQLRWHLHDLDPALDQNHHDLTRPRALATLTSAITALDPGVRRDLTLDLLTEITTLGKQITQLEHQLTERVRPLAPKLLSITGVGAITAAKIIGETAGITRFRSPAAYAMHTGTAPIPVWSSNKPHYRLNRGGNRQLNTCIHRIAITQLAHHPPARHYRDTWTTNHPHATTKAALRALKRHLTNTIYQALKADLT

SEQ ID NO: 237315 - protein, 414 aa, unidentified
MPYKIAGIDVHKKVLMVVVLDASTPEEKPERRRFPTMPSEIRRLLIWLREQGVEEAVMESTAQYWRSVWLELEPYMRLHLAHAFSNRAPRGRKHDFKDAERLVRRLIAKELILSFVPDGEQRTWRSLTRMKLQLTRDRVRLQNQIECLLEEMRIKLSIVVSDLLGASGLRMLRALATGETDPKKLAQFGDARLRCTEEQLVDALTGRVQPMHRAMLGLQLERLQLIDRQISELNRMIAQAMKPHQEAVMRLAEVPGFGVDSAQQIIAEVGVQASTFPSAAELTSWVGTCPGKDESAEENHSSRSAKGNKYLRRVLNQAAHAAVKKKGSHFQVVFRRLLPRLGYQSAIWAIAHRLCRVVWKILHEGVRFIEQGCEPDPKAKNKRARMLARALRKLGYEVTITPINLAIAENGMQI

SEQ ID NO: 237316 - protein, 359 aa, unidentified
MPMLAELLDAIVGVDTHRDTHEVEIALPNGIPIATCQISNDTAGYAELLAWIIDHAPGPRLAVSIEGTRSYGVGLARAATAAGLLVVECEQPNRKARRGKGKSDPIDAHLAVLAALRLDADRLPIPRADGDREALRILLGARQELTAISTAQTNRLRALLRDGDDTDLALARGLLNDAVLAAIARRREPRDASRQQSVRHAEIRRLALALRESGRTLRTNRAQLQAISNDLAPGLTDRRGLGPVTAAQAIVSFSHPGRCRSDAAFAALSGTSPLQASSGRTVRHRLNRGGDRALNSTIHTIAMVRMRSCSRTQAYVTRRTAEGKTPREIRRCLKRYIARELYRTLTATMTTTAGTPNAA

SEQ ID NO: 237317 - protein, 440 aa, unidentified
MLQALPMLDPLAAFVDVGSEHMHVSVGGNRPAVFGTVTSQLHALRDWLLAQGVHSVAMEATGVYWLPLYGVLESAGLEVRMVNGRQTRNLPGRKTDMADSQWGATLHMHGLLHAGFVPPADIRRLQDYLRLRADHVAAAATCVQLMQKAFERMNIKLHDVISSLAGVSGLAVARAIVAGERSPEALVALCDVQIRRKKAQAVIEALRGSWADEHIFALAQALQSWDHYQKLIAECDARIATVLPPHDDTQPPLPRTTRQTGVNAPDIARLREILAQMCGGRDLTKLPALSSYGVLQLIGEVGTDLSAWPTEKHFTAWTGLAPGSHDSGKRRKGVRRGRNRTGRLFCMMAQSLIRSRDIALGGFYRRLAARRGGLVATKALARKLAAWFWRVMVKGDDYVEQGLARYEEQVRQSKERALKRLARELGRELVPLSAVDHATA

SEQ ID NO: 237318 - protein, 401 aa, unidentified
MNAVGIDVSKGKSMVAIMRPFGEVVASPFEVAHTVSELGKLKDLLKSLNGETKVILEYTGSYYQPVACVLHEAGLFVSVVHAKLIHDYGNNTIRKVKTDKADAVKIANYGLSNWLALPEYIPEDDIRRMLKAYSRQYTKYNKLKIMLKNNFIALTDSTFPGVNELFSSPPRKSDGHEKWMDFAFKFWHCECVCKLSPEAFTERYRKWCKRAGYYFNEDKAFDVYASACGHVCVVPMNDTSKQLVTLAINQINAVAETIAIVAREMKRLAEMLPEYPVVSAFYGVGDVLGPQIMAEIGDVTRFRSKGSLVCYAGLEPPEYQSGKFEATERNISKTGSPHLRKALFQVMDCILKRSPADDPIYQFLDRKRSEGKHYYSYMTGVRRRFFLFGLPPALLCLSSYC

SEQ ID NO: 237319 - protein, 400 aa, unidentified
MGSLWAGVDVGETHHHVCVVDDDGTVVMSGKIPNDQQAISGIAGLDKRRKPIRWAVDLRGGPAALLLAVLFDRGADVRYVSGTVTSRMAEAFHGERKTDAHDAYVIAQTLRMRGDLPTLTLADGVQQQLKLLVSRRLDLVADRVRIAARIQDLLAMISPALEKALNLRSKRALRLLAQWQTPAGLRRAGEARILAYLRQHGVRAAKALTVKVLTAARTQTVPVAGEATAAGTVAQMATDLEAVNDRIAAIEETIAGIVAEHELGEIVTSLPGIGTTLAAEFLAHAGTLTTYPSAAALAAHAGLAPISRDSGSRQGHQIRPHRYHRGLRRVFSMSSFTALTHCPRSRAYYDKKRAGGKTHRQATAALSRQRLNVLWACTRDKTPYQPKQPRSAEVALCELA

SEQ ID NO: 237320 - protein, 353 aa, unidentified
MSKEKYVGLDVHKATIVIAVLNAIGQVVMQTIIATDAQVIREFFKGLSGTVNVALEEGTQSAWLYALLRPLVKDVVVCNPRHNKLIETGAKSDRIDAEKLAHLLRMGSLKAVYKGNQEQRQLKDLQRAYQNLVSDSTRVMNRIKAIYRGRGIKCDGHNIYKSDQRQVWLDRLREEGARFRARTLFEQLEKLSELRQAAKQEFLRQGKRNPDYPILCGLPGIGPLRASTLLAFVGTPHRFRTKRQFWPYCGLTVITRSSADHQVINGTISKRRKVIATRGLNPMHVPELKQVFKDAALTAARREPCQSWYQARIANGMRPEMARLSLARRLAAVTLTLWQRQEKFESDKFSTLL

SEQ ID NO: 237321 - protein, 333 aa, unidentified
MEKKRFVGIDISKKTLDVVIYDSKKKHADCNTYRRVMNDEEGYKNLLGWFKSERIKLSELVVGMENTGAYGYDLCLFLESKQVDYCSFNPLTLKRSMGLVRGKNDKVDAERIAYFTWLHRDELKYTKLAGSTILRLRELSTERKRFVKQRAEYEGVLTERKRPDMTSTSLRAEKMRRILEEEIDAVEKEMEEVIKQDPQIHQNFQLLMSIKGIGKVNAISTIIHTNNFESFQTARQYACYLGIAPFEHSSGTSIKGKPKVSCVGAKQLKADLSQAAVSAVQWDREIRLYYLRKINEGKTYGVVLNAIKFKLVCRMFSVIRRGTPYVDLMAYKN

SEQ ID NO: 237322 - protein, 458 aa, unidentified
MTPRHDHLPHPQRRSRCVRLHVTNPDAAGIDVGADAHWVAVPVERDPEPVRRFGTCTADLEALADWLQACGVTTVALESTGVYWIPLYELLQARGFQVLLVDARQVARAPGRPKTDVKDCQWIQRLHSYGLLSAAFRPAEQVVVLRAYLRQRDMLVTYAGQHIQHMQKALEQLNVKLTEVVSDITGVTGMAIIKAILGGARDPVGLAKLRDPRCKESEATIARALQGTWREEHLFALRQAVTLYEFYHQQIGVCDQAIEAHLRTFADQSGGQPLPYWPRRRKREANEPRFDARARLYAACGVDLTAIEGIDETTALVLLSEIGTDMSRWPSLKHFASWLGLCPQHKISGGKILSRRVRRGSSRAKRALRLAARSLHHSKSALGAFFRRLKARQGTPSAITAAAHKLARLVYTLLKHGTDYVAQEMAAYEVRYRERKVQSISRQAQALGFVLVPAVAGE

SEQ ID NO: 237323 - protein, 355 aa, unidentified
MDSKKYIGMDVHKESISIAVRNDAGKIVMECVIETKASMILQFINGLRGDLQVTFEEGTSAAWLYDLLKPHVTRLVVCDPRKNASMKEGNKSDKIDARRLAELLRLNHLSAVYHGEHGLRSLKELVRSYLTITKDLGRVMSRVKAIYRSWAIPCTGKQVYAPRHRAEWLAKITEPGVRRRAEFYYQQLDALRGLRQEVRRDLVAESKKHPAWKRLCHIPSIGPIRAAVLLGILQTPHRFRTKRQLWTYSGFGIETRSSADHRSVDGQLERAKKQICIRGLNQNCNHDLKNLFKGAAIVASSKPGPFQEFYTALLTKGIRPEMARLTLARKIATIALIVWKRGASFDAQHLKPQTA

SEQ ID NO: 237324 - protein, 418 aa, unidentified
MEIVYERVAAIDVGKKIIAVAVRTPGERPGKRRQQLRKYNTFHQTLTTMVAWLVAEGVTHVTMEATGIYWKPIFHALCAAERPLELLLVNARHVKNVPGRKSDALDAVWLAELTECGLLRGSFIPPPRIAAIRELARYRKKLIEQRTSELQRLAKVLEDSGIKIDSVASALTTLSARDMIEALIAGERDPAVLANLARGKMRSKIPELTLACAGRFADQHALMCVLHLEHIDHLADMIARLDTRIDEASLPFARQTDLLATIPGISERAAQIVISEIGVDMTRFPTAAHLASWAGLCPGNNESAGKHRSGRTRKGNTELCTVLTECAWAAGRTSTYIGAQFRRFHRRFGTKGGKKAATATAHTLIVIIWHVLAETAAYRDLGSDYFTRRVDNPEARKRRLIHELEALGHKVTIEPAAA

SEQ ID NO: 237325 - protein, 403 aa, unidentified
MNSVGIDISKGRSTVAVMRPFGEVVISPFEVRHTDSELSELARQLKSLDGETRVVMEATGNYHTPVAKLLHDAGLYVSVVNAKLVHDYGNNDLRRVKTDKKDAVKLANYGLDRWLTLPRYIPEEDTRLLLKNCYRQYRQYSKVQTVLKNNLISLLDTVFPNANRLFSSPIRGDGSEKWVDFVAEFWHCRCVSEKSEKAFANKYQRWCRKYGYNFNEAKAHTIHAEASGHIGVMPMSETTKLLVEQAVAQLRATSTALAALKHEMQALTSQLPEYPAVMDLFGVGPTLGPQLIAEIGDVRRFYSKKALVAYAGLDAPPNDSGDVTGRHKSMSKIGASSLRRTLFLVMSVYLQTAPLDEPVYQFMDRKRAEGKPYRVYMMASANKFLRIYYATVKAYLESLEHTA

SEQ ID NO: 237326 - protein, 327 aa, unidentified
MNIIIGIDVSKAKLDVAWVRSVETGKLKTKVFENTPKGHQNVVDWVEKNAQVTAEQMHFVMEATGVYYEALAYSLVSAGVKVSVVNPAWARDYARSLGTRSKTDKKDSVAIARYGMTHDLKLWQPEAPEVRELKALLARLQAVEKDIQRELNRLEKAQISATSEHVIVSIEGVLETLRAEKQRLEDLIKQHFDQHPGLKKDVTLLETIPGIGEVLSRLMTSVIRSRDFKTAAECAAYTGLVPIHHESGSSVRGKPMLSKAGNPLIRAKLYMGAVVAIRYNPDVRALYERLLRKGKSKMVALCAAMRKLVHICFGVLKHQKPYLEQTA

SEQ ID NO: 237327 - protein, 430 aa, unidentified
MKIVYPICCGIDVHKTFIVAVIVKSDSINPTYLKKRFSTFHNDLIRFRDWLISNHCDNVCMESTGKYWIPIYNILEDHIPNVVVANPKWVKAIKGEKDDNKDAKWIADLFKMGIVRSSFIPSKDIRVLRECSRYLFKLVNNRSSEKNRFQNALTVGNCNLDQVFSDVFGKSASSIVNLILSDNDYSREAIISSIHGKCKSSPDEILSAIEGVSFSQSQILRMKIIQDHMVYLDSQIRHLESLIDSLVSPYEDYIYLLCSIPGVKRTSAITILSEIGIDMSQFSSHHRLASWAGLAPGCNESAGKKKSVKISRAGVYLKPCLVQVAHAAIKDKNCPYYGNKHSKIAKRRGKKRAIIAIARKILVAIYHMLKTGEFFNPSDLVTIETSPKQRIKYAKSNLLSAVNQLSSNGLSLEDIIHFFKKDSSSTPLLD

SEQ ID NO: 237328 - protein, 341 aa, unidentified
MKKFIRTGIDLGKTYFQVHGLESEGGQSISRKMKRSKMREFYQQIEPCRVGMEACGSGHYWARELVAMGHEVVLIPPAYIKPYIKRGKNDAVDAAAICEAMSRPGMRFVPIKSADQQAVLMLHKTREMFVKQRTMSVNALRGHLAEFGIIVAKGIGRVDELLALAQSDAELPQIAKSAVAGLAQHLEGLDQSIEAVGDEIARAHKQNPTSRLLDEIPGIGVLIASVIASSVPDPSVFKTGRDFAAWLGLTPRQNSSGGKEKLGSITKQGNRYIRKMLVVGATSVMRVAGKRKGALADWINALQAKKPKRVAAVALANKLARICWAIMATGEGFRVDTYIKA

SEQ ID NO: 237329 - protein, 329 aa, unidentified
MKVIYPICCGIDVHKTFLVGTIISTTDGVQPHYQKKRFSTYNSDLNRFADWLHSNNCLDVCMESTGKYWVPVYNILEERKIRVTIANPKWVKAVKGNKDDTKDSKWIGDLFRLGLVPGSFIPTKDIRILREFTRYSYKLTSMKSSEKNRFQNAFTVCNVALDSVVSDMFGKSATAITDYLISEDTFNPEYCVSLLKHSLKKKSESVLESIEGYSITQEQKLRIRIVRSHLNYIESLISQIDSAIDVMVAKHESLISLLCTIPGVDRNSAITIISEIGNDMSQFGSSKRLCCWAGLTPGNNESAGKKKSVRITRAGVYLKPALVQVAMQP

SEQ ID NO: 237330 - protein, 307 aa, unidentified
MRFYTKQHRHYCGIDLHARSMYMCILDQTGELLVHRNVKACPEAFLEIVAPYREDLVVAVECIFTWYWLADLCAEEKIAFVLGHALYMGAIHGGKAKNDKIDSLKIATLLRGGTIPQAYVYPAGMRATRDLLRRRLHFVRKRGQLLAHIQNTNHQYNLPGFEKRIAYPANRDGVVEHFGDEAVRKSIALDVALVDRYDDLIQELELYLVRKTKIEEPQGFQLLRSTPGVGKVLAMTILYEIHDIHRFDRVQQFASYARLVRCAKESAGKKLGKGKALSILAHKIGRAAYHMLVRGRPFELEKFMATA

SEQ ID NO: 237331 - protein, 440 aa, unidentified
MKHRSYSATDIRHVDLTQLLSRQKGVKIVVGVDVSKEELLLVLRWHQGSGQSPQGPFERPWRMSNPVQVPELITLLRRLREGRELIVALEPTGAYGDPLRQALGDAGIPTHRVSPKASHDWAEVFDGVPSQHDGKDAAIVAELCALGKSSVWAYEQRDENHQRITMTVDWMDAQRKLKSIWCGRIEALLARHWPEAQRLLDCSSGTLLRALEHWGGPAPLAADPSAPQRITRWGGRMLKAEKARSLLDSAGRTIGVRQGVVDLQRMKRYAAQARAAGREVALCRRELGRLSADNPVIQSQSAAVGVATACVLWTAVGDPRDYHCAAAYRKAMGLNLAERSSGRYQGKLKISKRGSAMARHWLHLAALRSIRSHAPVKAWYQAKKRRDAGAGLAAVTAVTRRLAIALYAVAVNRQAFDPQRLFPAARHARRRKGGPAIATL

SEQ ID NO: 237332 - protein, 369 aa, unidentified
MNKIVKYIGLDVHKNSIAIAIAEEGRQRDVNFYSVINNDMDQLYKFLRKLISQGAEPRCVYEAGPCGYNIYRSLSEKGIDCVVVAPSLIPKRSGDKIKTDRRDSETLAKLHRAGELTSVYVPSLEDEALRDLVRAREDSVNALKRVKQQLGAFLLRHHIFYPGKSKWCKSYFNWLADIAMPHPAQQIALQEYIETVYGCKQRVERIAEQMRQLSKQTRLYGLNKALQALRGVSEIVSAVVVSELGDLTRFDSPSKLMAYLGLVPSQHNSGDKKRTGSITKTGNGHVRRALVEAAQAYRLPARKSRCIVKRNEGLPQEIRNIAWQAQVRLCSRYKRLVYRGKNSNLVKTAIARELAGFMWAIAHKVPNAV

SEQ ID NO: 237333 - protein, 382 aa, unidentified
MKQNSTRRQSPKQALKQSPKQSPKQSPRQSKKSCPGPMAIGMDLGDKTSRYCVLNDCGEVVKEASAATTKKGLAQVFAALKRSRIAIEVGTHSPWVSRLLKSLGHEVFVANPRQLKLISQSSRKDDRVDARTLARLVRVDPELLRPIQHRSAEMQMDLMVIRVRAALVEARTALVNSARGLAKSVGERLPKCDAKCIGSGHLRPLPKPLQDTLEALLLQVEALSVRIEKCDRQVEQIARTKYPETKLLQQVSGVGPLIALTFVLTVADKERFQKSRDVGCYLGLRPKRSQSGQSEPELRITKEGDVYLRKLLVQAAQYILGRQGPDTDLKRWGARLAVGGKRMKKRAVVAVARKLAILLHTLWSGGEVYEPLRNSPARQVAA

SEQ ID NO: 237334 - protein, 432 aa, unidentified
MDSIPPSSETCFGQLTHYAGFDWAKDRHQIAVVDREGRLLLELNFEDTAEGWADLRQKLRSFPKLGVAIETCCGPAVERLLEAGLDVYPLNPKAAQRYRDRKAPSGGKSDSLDARSFADALRMDGHGWRILRPQDPQTQELRLLCRDEIRLIQQRTALVNQLQEALHEYYPTALQAFDDWTLPSAWEFVIAFPTPHALVQAGKRKWEKFLHVHKLYRAQTADRRLELFAHAGEFVSPNPAVTRAKSFLAVALAKQLRILEAQLDAYRDRIRKLFGEHPDHDIFGSLPGAGEKLAPRLLAGLGRNRAEFDSPEALQCYAGTAPVSFQSGKMHKVHLRRACNRWLRATVHLWADESRQLCAWAQAYYQQKKKHGMSHAAALRCLGQRWLKILWRMWQDGTPYNEGLHMRNQVGHGSWVIALIPPKGTAAGSGRG

SEQ ID NO: 237335 - protein, 387 aa, unidentified
MPQPNDLSRSLVTLEQDSTLIAVIEMGQSSWLVAGIVPGIERQPLKKLTADQDGLLQLLNRWRKEAAQAGHTIKRIAVAYEAGRDGFWLARWLRAREIEVYVIHPSSVPVSREHRRAKTDRLDTELLKRAFLGWLRGEPKHCSMAAIPTVEDEDAKRPSRERESLVGECTRIVNRVKANLARLGIRGFRPRLAHAPKRLDTLRTPEGTTLPANTLAEMQRDMAHLRFVKQQIKEIETTRTKRLQQASEGGRDAMVRLLARVVGIGIETADLLVQEAFSRKLRDRKAVARYAGLTGAPDESGQKRRERGLAKAGNARVRHAMIELAWGHLLHQPDSALAEWYRRRTVHARSGTRKTMIVALARKLLIALWRLVTTGEAPAGLLLRPAV

SEQ ID NO: 237336 - protein, 347 aa, unidentified
MRFYTQQHPFYCGIDLHARTMYLCILDQAGETLLHRNMTATPEALLKAIAPYRDQIVLAAECMFTWYWLADLCADHGIPFVLGHALYMKAIHGGKAKNDKIDAHKIAVLLRGGMLPQAYVYPAEMRATRDLLRRRMHLARKRGELLAHVQNTNSQYNLPAIGKNIAYKTNRDGVAERFADPAVHKSIEVDLALITSYDELLRDVELTIVKTAKHHDANTLYLLQTVPGIGKILSLVLLYEIHQIDRFPRVQDFASYCRLVKCAKESAGKRSGTSGTKIGNAHLKWAFSEAAVLFLRDNPAGQKFLARLEKKHSKGKALTILAHKLARAVYYMLQHKTAFDMPKFLNS

SEQ ID NO: 237337 - protein, 353 aa, unidentified
MDRYIGLDAHSESCTIAVMSKTGRKLRCSVLDTSADVLIDFLKGIAGERHLCLEDGQLAEWLVEVLGSHVDTIKVTQPERHTGQKTDEEDAWSLAEQIRVQARATYVFKPTRHLRELREAMRTYEVAVQDLVRAKNRLRALFRSRGVRELSDAIYDPMKRHEWIQMLHTAFRQRARWLGEHLDAMTRQHSIAQDELESIAKKHADVLRLATIPGIGLIRAATIVSIVVTPNRFPTRSKFWKYCGLGIVVHSSSDWEKTSNGSWSRRQKVQVRGLHPGNRLLKNVLKGAATSVIGMTNHPLRHHFDRMVAQGTPAHLARLTVARRIGAMALAMWKKKEGYQPSKYLAPPALASA

SEQ ID NO: 237338 - protein, 399 aa, unidentified
MNYLGIDISKKTSVIAHYHDDKFQMEFTIQNNKNGYNHFLKYLNKIDQFQLVFESTGIYSRGMVQFCRVNQINYIEMNPLEAKFKTTSLRSWKTDQSDTHKLALLAPSLKSMDSLNTKQDIFFELRERARFHLEIENDQNRLKIMIIELLHQTFPGLEKLFKNRYSIIALNIAEIYSHPDFVQQEDIDTLTSIIFESTDKGLSTQKAENYALKLYKLARESYPNVNQISFLVKKVQLLIQQLKNSIQQLSQLDKEMVELSQQLECFEVIRSIPGIGELTAAMIIGELGDITKFKSNKQLNAYVGIDIKRYQSGNTQYRDTINKRGNKKARRLLFWVVMNIIRGQRHYDNHIIDYYYKLKKQPNEKPHKTAVVACMNRLLKTIHYLVTNNRLYDYQMSPH

SEQ ID NO: 237339 - protein, 412 aa, unidentified
MTVTNQFAAHVGLDWADKKHDVCVQFKNGERVFHVIEHTAEALDAWLTELHQKVKGRIAIALELKKGPVVYALQKYPFITVFPVHALSLARYRQAFSPSGAKDDPQDAELALELMLRYPQKIKAIEPDNADIRLLQQLVEQRRQLVEDKRRFVNRIINTLKQYYPQPLEWFSHRGSLLLCELIIRWPSLQQLKRARRETIRNFLNAKGGRAMALTEQRVVSIDNAIPLTTDSSVIEANALMATALATQIKVVSEIIKTYDERIEALFDTLPDAGLFKSLPGMGPCMGPRMLAALGDNRDRFNSAEEIQNYAGIAPVTERSGQKCWVHWRWQCAKFVRQTFVEWAAKTVNSSYWARLYYQGLREKGKSHQAAIRALAFKWIRIIYRCWKTRTQYDEAKYLLALEARHSPLLKP

SEQ ID NO: 237340 - protein, 343 aa, unidentified
MNKLNVIGVDLAKNVIQVSVLSPSNRELRNSALTRRKFAEFLGRQRSSLVAFEACATSHYWARVAQRYGHEVKIIPAKAVFPFRQGHKTDENDALAVAEAARRPNVKLAPLKTVEQQGMQAVQRSRELLVHERVSLSNHLRGLLMEFGIVIPQGFASLYRQLPEILEDGENELPDLYRPTLNLLYRRLCALRNDLEQLNGEIETLVRQNPMCQRLTELEGVGPISSVLLYATLGTGEAFVNGRQFSAYLGLTPKQFSSGGKVNLVGISKRVANKRLRAVLIQGARAYVYHMKEPKTTKDRWLWAIVERSGKCKAAVALANKNVRTAWAMLTQNTEYHRYPLAT

SEQ ID NO: 237341 - protein, 351 aa, unidentified
MVTVGIDPHKHVPIAVAVRGDGRPIGTPLTVKNDALLIITLLKWIRSITDGTATWAIEDGRGFARRLADGLLLAGQEVVWVPSRLTAAHRKLHAATGAKSDPVDATAAAHAAIATPDLDRHRIDEHVRELRVLVDYRADLIKRRTMVINQLKAQLHVWLDHTPQDLTRAKNLAMVTTLTSTAQLSPHVRRALAGMTAEIAALNRQIRDLDTTIRQLVSPLAPTLLQVTGISYNSAAVLIAEIGDITRFPSSARLARYTGCAPIPVYSAGQERHRLHRGGNRRLNSVLYTTAIVQKRFSPAAQQLLAHHGPAKGTRGARRILQRHLIDVIHRAMTADQATWQHHITRHHNAA

SEQ ID NO: 237342 - protein, 486 aa, unidentified
MGKQIRYQAKRVKDLDVERLLGLGEVITLTVDVAKDEQLVGFSGTDGEVVALGKWSHPSESREFLGLCERLRASGRRLVVVLEPSGTYGDWLLNWLWAKGIEVRRVLGKQVHDGAAALDGTTSGHDAKSAVLMAGLHALGASRPWAPPTETSRRLRAVSGLHAWYDEECERLQGKLEALMARHWPELQTWLSGRRRSYWRLLEGTGGPKGVSERPDEAQTLMGRKGADAAWRAKVEAVLESAKDTLGVPALPEEVELVRVLASEYERARKKRDALAGQLKETMSESATAELVALLGPAATATLIALNLDPKAFEHPRAFVKALGLGLKEKSSGSVKGRLHITKRGSPRARWLVVLAALRLVRFNPVAAAWYRSKRERDGRRDRAGNGMIGVVAVARKLAQAAWHVARGAPFDATRLFDVTRLNIAPTAEEAGIGAGATEQTNAHQAGDHAVPANLAPSRRAKSTSEPGVPGKQRGGTRPVVGDQMN

SEQ ID NO: 237343 - protein, 451 aa, unidentified
MAKKKLEMDIINPHCAGIDIGSRSHFVATGQALQDVKEFGVYADDLIEICEHLNARGITSVAMESTGSYWQNLYVELVKHGFDVVLANGKFTKNIKGKKTDVKDARWIQKLHSIGLLTGSFLPDDQTETLRTYCRQRQNWLDLAVEATHKMQKYLKLLNFRLDVVVRDVCGLTGMTIIKDICKGNLNPQELAKHRHFNCRKSQDEIAKALKGNNRTDYLFGLKQEFESYEFYQKKIAECEKMIAAFLKSQINTNPQKKKLKTTDKQHKRLNKNAIKGIDLNQASFQYFGGVDLMAIEGLGHSTVLSIISEVGPEGFSKFETAKHFTSWLRLAPNNKISGGKLLSSKTPKGSNRLKIALRNAANAIGNLKDTHLSNFFNRVCYRKGRTVAVSATARKLAVIIWNMVVKQIPYQPPTQYLFLDEKRKLGMVKRIRKQMDRFELTNADLGFVTT

SEQ ID NO: 237344 - protein, 417 aa, unidentified
MKCFVGLDISSTKLDVCIMLSDTSTPVTASLSNDLSGATDIKNHILDLNHTYHFERIVIGMEATSLYSFHPAMFFHEDRQLKELHVEIMVEQPNKIKKYRDAFEENKNDTIDAFYIADYFRIERFSPSFLKEEKYMALQHLTRTRLQIIEQLTRTKQHFIENIYYKCNTLAYQFKKEELSTNLWSSTMMTLMTDEMTLDELANMPLQELDDWLQKLGKGHFKDSEKLAQTIQAAIRGSYRLSKLQQDSVNVILGLLAREIRNLEKMIKEIDKAIEDMVETIPEYQCLTSIPGVGKVYAAGIIAEIGQIERFKDHPQVAKFAGLNWREKQSGNSNSQHTSLVNRGNRYLRYYLVEAANSVRRYDDEYKDFYKKKYHEVPKHQHKRAILLTARKFVRLVDVLLRNHQLYTPPRRIMEDN

SEQ ID NO: 237345 - protein, 342 aa, unidentified
MYYIGLDVHKKTISFCVKDAAGHVHREGKIGSTRRELDAWIGTLPQPRMIAMEATIFTGWIYDHLLPHASAIKVAHPLMLRAIALAKKLSDRIDASKIADCLRCDFLPEWHMASTEIRNRRRVLRYRHLLVRQMVQTKNRVSGLLLETGVEHNKSRLHKVGYFRRLLATNSDIDDSIRPLLRLSRETIERCQKTEYALVSSLERDPFLKERIKRQRTVPGVGPITALNWALEMGDISRFRTIKQAVSYCGLCGDERSSADKVMRMPLSKQRNKHIQHVLVEAAKLAPRQSAELALIHHKAMEKGNRNRATLAVARKIVAWLLAVDRENREFIPAQQRETRAA

SEQ ID NO: 237346 - protein, 362 aa, unidentified
MPKMIWLGMDVHAASITVAQYEDQAPTAMVQTIANDPAQVRRLVRRLPAGCDVRACYEAGSCGYGLHRQLTALGVHCDVIAPALIPRRPGERIKTDRRDAEKLGRFHRSGELTTITVPTPSQEGVRDLVRAREDVRRDRTAARQRLAKFLLRHGHRYPGSHWTKRHWEWVCGHTFDGPARTVFVHYCDHVLALNERLAHLEREIRTLAESAAYQPVVTRLSCLRGLATLSALMLIAELYDLRRFRTPRELMAYLGLVPSEHSSGARERRGRITKTGNALARRLLIEAAWAYRHPARQTRRVQQALTTQPPAVHAISDRALHRLTARYRRLLSRGKTPHHAVTAIARELCGFVWAIALVPDLT

SEQ ID NO: 237347 - protein, 356 aa, unidentified
MQEEHYAGIDVSLELASVCIVDANGKLVKETKVDSHPDALAALFNALRLPITRIGLEAGPLSQWLHAGLTHAGFETVLLETRHVKAALSAMTVKTDRKDARGIAQLLRMGWFRPVHPKSVRSQEVRALLVARKLLQNKLRDVELSIRGILRGFGLKVGKVTRKKFHGRIRQLVAGHALLERIAEAMLSARAGLLIQFNKLDKAVRQIARHDKICLQFMTAPSVGPLTAITYKSAIDDPQRVQKSKAAGPLFGLTPRKYQSGETDVTGGITRVGDEMVRTALYESANVLLSRDTRFSALKRWGLEVAKRRGFNRAKVAVARKLAVILHRMWIDGTSFRWGKAETASRSCTSRSCPST

SEQ ID NO: 237348 - protein, 412 aa, unidentified
MDRFIERCAGLDVHKASVKACVRIPDGHGGRHSETRTFRTTTAGLVLLGDWLASHQVQVVGMESTGVFQKPVYYLLEDDVECWLLSAQHRKNVPGRKTDVADAAWIAQLVEHGLVRSSFVPPRPIRELRELTRYRKALIYERTRETQRLHKVLEDAGIKLGCVASDVLGVSGRLMLEALVGGTTDPEVLAELARGQLRKKLPALREALQGRVARHHRLLVAELLAHLDYLEEAIGRLSGEVARVIAPCSPLLALLTTIPGVDRRTAEVIVAEIGTDMTRFPTAGHLASWAGLCPGNNESAGKHFSGKTRKGSKWLRTALSQAANAAARSKGTYLAAHYARIKGRRGHKKAIVAVAHSILVIAWHLLTRNQPYTDLGADYFLERQTSEAYRNRLVRQLERMGHKVTLEPAQVA

SEQ ID NO: 237349 - protein, 326 aa, unidentified
MQGKELSEQATAAKSSVGIDVSKSWLDIHVLPSAQTLRVPNTGEGIRKLKRWLARFEVNQVVVEATGKWHRQVHRSLIAGGIAVAATDPFRVRAFAKAKGILAKTDRIDARVLALFAALMAPDIRPPASQALEELAELVAARDSAVAEQTALKNQLTAACGSFLKRQLERRCARIAKDIEVIEGEIARHIAADEGLARRYVVLTSIPGFGAIVAATLIACLAELGACNRKQIALLAGAAPIADQSGKREGVRVVWGGRPAVRRALYLAALSAAAHNPGMKAFYQRLIAKGKTAKQALIAVARKLIVLANTLIAEDRTWQPSPPKQA

SEQ ID NO: 237350 - protein, 409 aa, unidentified
MDVMFERVAGLDIGKKSVTVCVRTPWPDGGRHGETRTFRTMTRSLELMRDWLVGQGVTLAAMESTSTYWKPVFYALEERMECWLLNAAHMKAVPGRKTDVKDSEWIAQLLEHGLLRPSFVPPPPIRRLRLLTRYRVQLMGDRTRDAGRLEKMLEDASIKISSVASSVTTVSARAMLASLIAGEADPEVLAQLAKGKMRSKIPDLVEALTGHFDADHARLAAAMLGRLDRVEAALVSMDEAIAAASRPWARQIQLLQTIPGVGLKTAQVIIAETGGDMSRFPSAAHLAAWAGVAPAIHESAGRRTPAGARHGNKWLTSALVEAAASAARSKNTYLAAQQARIASRRGARRAQVAGAHSILDSAYYMLERNEPYRDLGPEWLHRRYDQAQTRRLVTQLERLGHTVVIDPAA

SEQ ID NO: 237351 - protein, 344 aa, unidentified
MTYYTGIDVSLRSVSICIVNDRGEVCLETKVEAEIDAIVDRLRRFSSEVKSVGFEAGTLTQYLTYGLQAAGFEVICLEARQVSVTLAAMRNKTDRNDARGLAQILRTGWYSRVHVKSLQSHQVRALLASRKAILKKCVDLENELRGLLKVFGIRLPSRVGHGSFDAELRETVSSDEMLACALVPLLDARTVLYKTYLKLDNAVKGLVRVDPICRRLMSIPGVGPVTALTFKAAVDDPNRFKSSRTVAAHFGLTPRRFQSGEVDNPGHISRAGDADVRSALYVAAHSLLTRNAQWSTLKAWGVRLAKTRGHRRAVIAVARKLAVILHRMWIDGSEFRWGAAETAA

SEQ ID NO: 237352 - protein, 323 aa, unidentified
MSPVVGIDVAKHSFDLAIDLANGKYRTKAKLPNDPKGFQTLRTWLQTHAQADIWIVMEATGTYHEALAEFVHALGYQVCVLNPAQMALYARSQLTRVKTDRSDAKLIASYGLRHASQLRPWQPDPPALKHLKALVRRRDDLLQMLQMERNRLDVAAPVVRDSLLETIGQLQANIAQIERAIDDQIDQDPTLRGQRELLVSIDGIADRSAALLLAELGDVERFSQASAVTAFAGLNPRLQESGKRKGQVCISRTGSPRLRAGLFLPALVAMTHNPVVRALKQRLRERGKANKQIICAAMRKLLHIAYGVLKSRTPFDPHKALAW

SEQ ID NO: 237353 - protein, 443 aa, unidentified
MSEEVRHTSEPEFAALVAIDWADKKHVWRLEVIGTGQRERGELEHTPEAIEAWASHLAERFSGRAIAVGLEQSRGSLLYTLTKYAHLVLYPIHPTTLARFRAALFPSGAKDDPMDADLLLELLLHHRGFLRPLQPDTLETRRLQLLVEQRRQLVNEKTRQTNRLTARLKMYYPQILQWFEEVDSPMVSALLLRWPTLQKLQRARPDTLRKFFHQHNCRGTQRIEQRLEQIGQAIPATHDAAVVETCVVAVQLLARLIATLRRGIAELDRRIEKVAASHPDFALFDSLPGAGKVMAPRLIVAFGTQRERYSSAKEIHAYSGIAPVLERSGKSTWTHFRWTCPKFLRQTFHEWAGHSLSKSHWARLYYQQQRAKGKAHHAVIRALAFKWIRIVFRCWQNRTPYDEQIYLRALQQRRSPLAATESPTVNLQWIKSGGFWKLSTDPS

SEQ ID NO: 237354 - protein, 409 aa, unidentified
MQIVHQRCAGLDVHKKSVYACVIWPGEKGEKKQEVRSFGTFTADLLKLADWLREHGVTDVAMEATGVFWRPVWAVLEGLFELLLVNPQHIKAVPGRKTDTKDCEWIADLLQHGLMRGSFVPPSEIQDLRDLTRYRAELRQAQNKVDNRIQKLLEQCNVKLSSVASNTLGVSGQLMLEAIIKGEDDPAQLADLAQRKLREKIPQLRLALAGKVRVHHRFLLKEYLEEWKALRDRIARMEQEIDRRMSPFEGTVALWESMPGVDHTTACNLVAEVGVNMAQFPSGGHLASWAGLCPGNNESAGKRLSGTMRDGNKWLRRALCQAAWAVTRKKDCYLSAQFRRLAARRGVKRAVMAVAHTMLIIGYTMLKTGQSYRELGGTYFEQINKDQLQKYFVKRLQRLGLTVSVVSPA

SEQ ID NO: 237355 - protein, 429 aa, unidentified
MRAESTPGARGPVFCGVDTHADSHWLCVLDWRGRKVLSRRFPADAAGYEALAGAIAAAGEPACVAMEGTSSYGAGLTRHLASLGMPVREALSPARTQRRRPGQGKCDESDAERAARAAMSGSKLGTPKSQDGWVDGVRCMLAARSGAVKARTSAINTARSLLTTAPEGLRSRFRGMGGPRLMEELPSVRAEGALGAALGALADLWAAARDAALDMELAIEASLEENCPALLAMYGCGPVSAAKLAVAAGDNPGRLRSEASFAAICGACPIPASSGKTVRHRLNRGGDRQANSALHEIARQRVMRDPETAEYAERARGRGKSDREVMRCLKRYVAREAYRALMRPHEIRRPEDASELVAARRAAKVSQVRAASILGTSEKYISMLERGQRELKPIRRAYEAWVEAGLPLDWDRRAFEAERKMDSKKHLAK

SEQ ID NO: 237356 - protein, 357 aa, unidentified
MDKYIGFDVDDKKTVACVVQQGKKDIYQTLPTEVEAMKCWLKKQRKAGEKLHLTFEVSGQAGWFYDALTDAVDTLTISNPAKMTWIFRTSKKTDRIDARKQAVLLQVGEIPPVHMPVREIRQWRLQIQHRRKLVNSCTQTKNRIRMLLKNHGYRQPANQGSWWKKSNRTWMQCVSEEGEAGWPETLADLLEQLALYEKQIDRLTKKLDERLSHHAGGSLLQTIPGVGPRTAEAVLAYTDEVERFRRGKDYCSYFGMTPKLDESGSMRRLGHISKQGPSVVRWLLVESAWRAIGKSSSLSAFYERVRHGQTQRKKIAIVATARKMLSIMRAMQITGEAFNEKLVLEQEPIHFGKELIA

SEQ ID NO: 237357 - protein, 321 aa, unidentified
METVNFQQVVNRGCGIDVHKKTVVATIDGQGLKRTTREFLTFTSSLTDLKDWLLENGITHVVMESTGVYWKPVYQILEPTGLTVWIVNARHVKYVPGHKTDKKDSAWLCKLLLAGLLKPSYIPPKQQRELRDLTRYRKKLIQDIASNKNRIIRILEDCNVKLSSVLSDTSGITATKLIDKLCDGKAITMDDINEVYHKKIQATKEELWEACNGFMNEHHIYFLQTIRQNTRDTEKIILELNDRIRALLSPYENILEHLREIPGLGPKTAEDLVAEIGLDMEVFPTENHLSSWVGVSPGNNESAGKKKADAQRTGINKQNPH

SEQ ID NO: 237358 - protein, 409 aa, unidentified
MKVAGIDVHKKVLMVVVVDARTPEEKPARRRFATMPSELHRLLTWLREQGVEEAVMESTAQYWRSVWLELEPHMRLHLAQAFSNRAPRGRKHDFKDAERLVRRLMANELILSFVPSGEQRIWRSMTRMKLQLTRDRVRLQNQIECLLEEMRIKLSIVVSNLLGVSGLRILHALANGETDPKKLAQLGGERLQCTEEQLMDALTGRAQPVHGAMLALQLQRLQLIDEQMARLNTMIAAAMKAHQDAVIRLAEVPGLGVDSAQQIIAEVGAQASTFPSAAELTSWVGTCPGKEESAEQNHSSRSAKGNKYLRRVLNQAAHAAVAKKGSHFQAVFRRLLPRLGYQSAIWAVAHRLCRLVWKILHEGVRFIEQGHEVGPREKKKRAQMLARALRKLGYEVTITPINQLAAKPI

SEQ ID NO: 237359 - protein, 337 aa, unidentified
MLIIGCDFHPGFQQVAIFDNRTGEIEEKRLRHRDEAEQFYGSLAGQVVRVGMEACGHYPWFERLLESVGIELWMGDAARIRAAVVRKQKTDRRDAEHLMQLLRDERFPRIWVPSLEVRDARQLLVERHKQVQTRTRVKNQLQAMALGQGVQKKRKLWNETGRAELEKLELLPYAGQRRQHLLGTLDQLEAEIAKLDQQVEEEVKRRPEAVKLMTHPGVGPVTSLAMVLTLGPAERFENARQVASYFGLIPSEHSSGGRQQLGPISKQGNPFLRFLLVEAGQTAARYDAELGRFYRRLAMRRHRALAKVAVARKLAVRLYLMLREDWTYAQLCRAVCR

SEQ ID NO: 237360 - protein, 396 aa, unidentified
MTTTTRTTSAATTLYLAFELGWDKWLLAFATQPAEKPRLRRIPARDLPALLQEVAKAKQRFGLPADAPVCCCYEAGRDGFWLHRCLTHHGLANLVVDAASIEVNRRAKRAKTDPIDAGKLLGLLIRYHHGERKVWSVVRPPSVEDEDRRQLHRGLKDLQHQRTECSNRIKGLLASLGLDVAVDGTFRERLAALRDWQGQPVPAGMQQRLVQEYAVWEVLQRQIRDVENARERQLREGQAPWLEKVRRLMSLKAIGIHSAWVFVLEIFGWRQIQKAKELGSLAGLVPVPYTSGQSERDQGISKAGNRHVRAMVVEIAWLWLRLQPRSKLSRWYQARFGRGNKRARKVGIVALARKLLIALWRYVEHGELPEGAEEKDWRLRVSSTARRQARAAAPPA

SEQ ID NO: 237361 - protein, 342 aa, unidentified
MKTFVGLDVSQKKTSICVIDHNGNKIRMANVDTHPGVIANYLFSEGFDNSKVGLETGPLCVWLYHSLKSFGLDIDCIHARHVHAALSMQLNKTDQNDVFGIARLVLSGWYKPVHVKSLECHQQRLILTSREKLVQLRVAVTNQIRGLLKTFGVVLPPGKNSVFERSVLESSPSLETVKPAVIMLLNTWEHLSDQIKKFNSMLEKLARKDPVCQILRSIPGVGVLTALRFKTSIDDPSRFRRVSDVGAFLGLTPKKYQSGEVDRNGGISKQGNRMTRTLLYEAASCLLTRYGTDTSLAIWANGLRHRMGYKKVIVALARKLTTLMLSMWKSETTYNERLNAIN

SEQ ID NO: 237362 - protein, 345 aa, unidentified
MHYVGVDYHKKSSYVTVVDERGKVVKQAQIANSKEALAAVLDGMAQSASAVLEAGRNWPVMYDWLDELVDEVTLAHPAKVRVIAEAKVKTDRIDSRMLAHLLRADLIPAAYVPGAVTREQRRRLRQRMFLVRLSTMVKNRVHTLVDRHPELSRRADGWSDLFGKAGRAWLEQLELPASELQLLRTDLDLLTEIQEHIKASNRWVAQLARKDARAKLLATLPGIGDFFAVLLAVEIDDVHRFSRPQKLTAYAGLVPSTYASGGYVHHGRITKRGNKWIRWACIEAVYPAIRQDPALRALYERLKIAKGANVAKVAVAKRLLTIAYRVLSEARPYRPADEQARLSRR

SEQ ID NO: 237363 - protein, 441 aa, unidentified
MSDNKLPLLDPLAAFVDVGSEHMHVSVGGDTPKVFGTVTSQLHALRDWLLSEGVHSVAMEATGVYWLPLYGLLEAAGLEVRMVNGRQTRNLPGRKTDMADSQWGATLHMHGLLHAGFVPAADIRRLQDYLRLRADHVASAASCVQLMQKAFDRMNIKLHDVIASLSGVSGLAVVRAIVAGERSPEALAALCAVQIRRRKEQAVIEALRGTWADEHLFLLEQALQSWDHYQKLIADCDRRIAAVLPPHDEAPPPLPRSTRQTGVNAPHITRLREILAQMCGGRDLTRLPALSEYGVLQLIGEVGIDLSIWPTEKHFTAWAGLAPGSHDSGKRKKGVRRGRNRTGQLFCMMAQSLVRSKDIALGGFYRRLAARRGGLIATKALARKLAGWFWRVMVKGDDYVEQGLARYEEQVRKSKERALKRLAKELGRELVPLSTVDHATA

SEQ ID NO: 237364 - protein, 328 aa, unidentified
MQGKVSSERTAMATVYVGIDVCKEWLDIHLHPLGRSFRVTNDTAGLRRLKRELDALDQMPRSALHIVMEATGKWHRAVQRSLHADGFYVSVVDPLRARLFAKACGFLAKTDRLDARLLAIMGEALKPAQTPQQDQALEALQELVNARSAANGERTALSNRMKTAVTAFLRKELTRRLAALDTHIARLDAEIERSIGAEPEMRRRLDILISIPGIGAVTAASLIAGLCELGACSGKQAAMLAGLAPLACESGERAGHRAIRGGRPAPRNAIYMAALSASRHNPDLAHFAERLKKAGKPNKVVLVAVMRKLIVLANTLITKNRIWTPNPP

SEQ ID NO: 237365 - protein, 404 aa, unidentified
MELNAIYRCVAALDVHQAKLTVCILFETDAGEVVSQLREFGGFKRDRREMAAWVSSFKPELVVMESTGIYWKSPYAALEWYGLNLAVVNAYHVKHVPGRKTDIGDAQWLAILARSGLLRGGFVPPQHFREYRLISRQLQKLTSLAAGEKNRLHKLLTDAGIRLSVVLSDLYGKSAKAMIKGLLDGETPEQLLAHADSRLKASPDELRDALDGDLSESHRFVIRELMAHIDELEARVLRFRQTLLNHLSSYQVILQNLQTLPGIDELSAAMLFVEIGDDMSAFGSPNKLASWAGVCPGQNESAGKRKSAKTRKGNPYLRRILCEAANAASRTRCSLQDRFKGLMIRRGRKRAIFAIAHKLLKTVFLLIQRGDYYRDANTDYEALSVQRNAPRWIKKLVQYGYISA

SEQ ID NO: 237366 - protein, 480 aa, unidentified
MNVKTRRTKKQVNVENQAINLLSKEELNKKIEVVEKELRSYTWRELETNGKFAKNDKLSFITDDMLIVGCDIGSETHYIRAIDVRGRELSSGAFEFSNTSEGFANAKAWVLALAAKNDKKQIVLGLEPTGHYWFALAAWMISNGISVVQVNPYAVKQSKEIEDNSQLKDDRKDPQLIANLVKDGNYGMPYLPEKVYADMRRLSMFRDQLTEDRIRNINRLHRELKIYFPEYMDAFGKIDGAFTLEVLKVSAIPSDITALGAEGIKNIWYNVKLRGRGYSRANEIVSYAEKSVGLTDGTDAGREAVKWYAEQILKLDEQLAVVESTLHEKCREIPCAENILEIKGVGENILAGILAEMGDISRFDDVKEIQKLSGMGLVACSSGKHKGQTKISHRGRKRLRYWLFQAAKSAVSHADEFKQLHEYYTTRTNNPLKKMQSLVVIACKILRVIYTILKTGTTYDPQKLLKDIKRPTASQAPMAA

SEQ ID NO: 237367 - protein, 409 aa, unidentified
MLKIVYPNCCGIDVHKTFVVAVVAITDDHNITQYHRRRFSTFTKGLRSLQKWLELYSCFDVCMESTGKYWIPVFNVLEESCNVCLAHPKYVKAIKGKKTDKKDAKWIADLFKHDLVANSFIPPLKIRQLRDLFRYRMKLSSILTSEKNRYQNCLTWSNLQIASVVSDVFGKSAQEIIQSVLDNPQDKPDIASMMRKNMKASVETLTDSMDGDITPEQANKLRVIKSHFDAVTFCQNNLDQMIKELGIEFEDQRKLIQTVPGFKNPLTALRVISEIGVDMTKFPTAGHLCSWAGLVPRNDESANKKHSTKITKGGRYIKPLLVEVANAVVRSKKNPEHRNKYLQLKKRRGHKKAIIAIARRLLVAIYHILLKQVAYDATLYHVPELKQANRKLTLKEAVRFAQSQGFQVI

SEQ ID NO: 237368 - protein, 323 aa, unidentified
MQGKVLLERSAEERVYVGIDVSKEWLDVFCHPGGFRSRVSNDVSGLRGLKHKLAQFGPIQVIMEATGKFHRAAWRSLAASGIPVTIADARRIRDLARGLGFAAKTDTLDARVLALIGAMLPAAATPVPAKPLEELQELVNARAGTLAEAVAISNRCKASQTPWLRTELDRLHTACRDLVAKLDAEIARRIQADPAMTRRFTILTSIPGIGPAVAVTLISGLAELGSMDGKQAAMLTGVAPIADDSGKRRGQRVIRGGRDLPRQALYMAALSASRHNPALIAFVSRLKAKGKKPKVILVAVMRKLVILANTLISQDRFWSPAAP

SEQ ID NO: 237369 - protein, 337 aa, unidentified
MKYCGIDLHSNNSVVIVSDEEDRIVFSKRLPNDLGQIRAALEPHREDLAGVVIESTYNWYWLVDGLMDTGYQVHLAHPSAIKKYEGLKHSGDFADATYLAHLLRLGLLAEGYVYPREERGVRDLARKRLQLVRYRTAQILAIEGILMRQTGARLKGEAVKRLTAEQVDAFAFAPDVSLAVEANRAVSQTLSQQIEALEKRLQQRVILRPEYRLLKTVPGIGEVLATTIMLETGTISRFTRVGNFSSYCRCVESLKESNGKRKGEGNTRNGNKYLAWAFVEAANFALRCCPQARSFYDRKKSRSNRILALKALAHKLARACYHMLQDHKPFDVHLCFG

SEQ ID NO: 237370 - protein, 365 aa, unidentified
MNRNTGTRVGQIIGTMNGLQVVGLDIAKHVFQLHTVDMSTGEIINIQLKRAKVLKYFVNKPPYLIAIEACGGAHHWARELERLGHSVRLLHAKGVRPFVSGNKTDATDARAIWQAVQQPEVKFVGIKSTEQQATLTLHRQREMMMKMCNMQTNAVRGLLYEFGATFAQGRQALFKDVEKALEGLADQLPQMVRDSLREQVARIKTTIEDMKVIEKRLTVQLRQDPQMQRIFQIPGVGLLTATAAIATMGEASAFKSGREFCAWLGLVPSQTGTGGKVRLGNISKRGDTYLRTLIIHGARSVLAHTKEPGPWLEALKGRRPASVVIVAQAAKMARTIWAVTAKEQDYKRDFQSVRPAAAAKAPVLA

SEQ ID NO: 237371 - protein, 411 aa, unidentified
MIPAIVERGAGIDVGKTFVVVCIMIGPLDQEPRVEIRTFGTTNGALEHLRQWLVEEECTHVAMESTGSYWKPVFNVLEESLTVILANAEDVKGRKGHKTDPQDSRWLAHLLRHGLIRPSFIPPRTVRQLRDLTRLRRQLLNDSTSERNRIQKILEDANVKMASVLADPFGVSGQLMLEALLEGKASAEDIAELAKGRARSKIPELRAALEGHRLSDHHRRMIRYSLEHLAFLDRQLLQLDGDILRHIETAGFGPALELIKTVPGIQQDSAMTVLAEIGPNVSTFPSAAHLSSWAGLCPGNRRSAGKEKSVRTTRGNRWLRTTMTQCAWAASMKKDCYLKGKFWRLAAEGKKRAIVAVAHNLVVLVYHVLATGTPYQERGGPPEERHKQRRIRHHIRALGRLGVNVGCRPAT

SEQ ID NO: 237372 - protein, 465 aa, unidentified
MVLQTRPSAFIIQRRAMGKLKASSSMPVVHPNAAGIDIGSQFHVVAVASDRDSEPVRTFKSFTGELHDMAKWLQACHIETVAMESTGVYWIPAFEILESYGLEVFLVNAREAKNVPGRKTDIKDAQWLQKLHQFGLLRASFRPTVDIVELRAYIRQRERLLDCKAEHIQHMQQAMMEMNVQLHHVVADITGKTGMEIIRAIVAGQHDPEELVKFRDCRCKNPLEVMIAALTGNYRPEHLFTLKQSLALVDFYATQLIECDEAIELKVKQLQQQIEPPSKPLLKKRQSHGGNAMNFDVRTELYNVLGVDLTEIHGIGPTLALKLIAECGTDMSRWPTSKHFTSWLCLAPANKISGGKLLSSKTRKSSNRVSALLRLAVPVLGKTDSALGAFYRRLAARSGKSIAITATARKIATIFYNTLRFGMKYIDPGAGYYDEKYKARALEGLRRRAEAFGFTLQEKPVAAMA

SEQ ID NO: 237373 - protein, 344 aa, unidentified
MDHYAGIDVSLECSSVCVVDASGKIVREAKVASEPEALVGWFGSLGLGLARIGLEAGPLSQWLYAAMKQAGLAVELLETRHVSDAFKAMPVKSDRNDARKIAQLMRLGWFRPVHCKSMNAQEIRAMLTARKLVQSKLLDLENSLRGILRGFGLKVGKTTKRNFASRISELVAGQPALEAIAAAMLAVHMVLLREFNGFEKRVRAMSRLHENARLLMSTPAVGPIVSLTFACAIDDPSRFTSSKQAGPHFGLTPKKYQSGKTDYTGRISKLGDASVREALYEAAHIMLTKPIKRCSELKGWAMRIARRAGINKAKVALARKLAVIMLRMLKDNVPFNPAAKPTTA

SEQ ID NO: 237374 - protein, 338 aa, unidentified
MPLYGGIDLHANNSVVVLLNEQDQVVSQKRLANHLPTILDLLAPYHAEITGLVVESTYNWYWLVDGLMDAGYWVHLANPAAIQQYSGLKYTDDHSDAHWLAHLLRLGVLPEGYIYPKAQRPVRDLLRKRSHLVEQRTANVLSIQNIIVRNTGSRLSANRIKQLSRNDVEGLLPDADQALAVTSALAVVRCLTEQIKAVEKRVSTRMQSTPLYELLQTVAGIGPILAQTILLETGDIGRFPHVGDYASYCRCVDSTKVSNGKRKGQGNVKNGNPYLAWAYAEAAHFAIRLHPSVQRYYQRKQTKTTVPVAHKTVAHQLARACYHMMRHQVPFDAAKAFG

SEQ ID NO: 237375 - protein, 348 aa, unidentified
MSDQKEYVGVDLHKRFFIAHFTDEKGRQSQTRRYETNPQQLDVFMHDLHPEASIAVEPVSQWSWFCDTLEREGFDTHLAHPMQVKAIANARIKTDKIDAKVLADLLRCNMLPEAYQSPLHVRQWKELTRHRLTFVCQRTQNKNRIHAILFKNALSYEGVLWTKKGKAWLSEQQISDHHRLLINEHLQAIEELDGHIAQMTTLIERAVENHEGAKLLMTIPGISYIWALTIMAEIGDVGRFKRASKLMSYAGLVPSTYSSGGNTRHGRITKRGSSWLRLAMIEVAHVQGRLRKSHGLRWYYDKMKLKKDSKTAAVATARKLLAVVWTVLSEGRPYEDRPRSGKRETRTN

SEQ ID NO: 237376 - protein, 354 aa, unidentified
MDDAGVPQRNRNLANDLAKLIPVLGALSPGTPVAFEAAYGWGWLVDLLEELELEPHLVHPSRCKAIASARLKNDKVDAATLAQLLRADLLPEAWIAPQATRDLRALLCHRASLVRMGTACKNRVHAVLADRGIPGHSSLWTGPGRAWLADLKLPATPRGIIQDGCGLLDALTTPIGRLEREIAGLAKPDPRVQALMVLPGVGRLTAMTLVAEIGDIARFPTARKLCAWAGLTPQVRNSDRKVGHGHITKQGSPWVRGILQEAAQTAKRHPMFAPAYTQLARRRGTDIATTAIARRLLARSVHILTQLETAPAPEQASTGRACVRMSLPTRPPGLTEQPGSGLTVMPTPPSGPRS

SEQ ID NO: 237377 - protein, 350 aa, unidentified
MIIIGADYHPGFQQIAFVDSETGEVQERRLEHPGEAEKFYRDLGAPGASVRVGMEASGHARWFERLLSELKFELWIGDAAGIRAKRVRKQKTDRQDAELILQLLLENRFPRIWVPNWENRDLRQLLWHRHRMVQARTRIMNQLQAVALNEGLRCKKRLWRERGRDQLEAFVLAPWANQRRRDLLELLDRLNPTIAKLTQSIEQEVEKSPEARRLQTHPGVGPLTALAFVLILGKVDRFQCGKQIASYLGLVPMEDSSGNRRRLGHITKQGNSLLRFLLVEAAQVTVRSDPEWRSKYFHLALRRGRKIAKVAMERRLAVRMYWMLRKGWDYEQLNKFGSHAGQPGHRHGVQ

SEQ ID NO: 237378 - protein, 329 aa, unidentified
MKVQHIIGADLSKKSIDLVCHLFKSHVQIENTTTGFKDLMQWFKHQKVNASKTMIVMEHTGLYSYCFEKFLHQHQIPFCKVNALTIKRSMGLVRGKTDKLDAARIAAYGYEKKDKLTIDVPASDSLRRLQMLHSTRERLVRHRASLICSIKEYKCIGISDKDVIMQTQLQLIKNFDKQIEKLMIEIETIIENQKALKQNFRLLQSIRGVGKVVALVTIIKTHNFTRFANARKFACFCGTAPFPHDSGTSIKKRTRVSHLADKQMKSLLDLSAKSAIQYDKELREYYLKRTEGGKSKMSTINVVRNKILYRMFAVIKRQTPFLENYLQAA

SEQ ID NO: 237379 - protein, 343 aa, unidentified
MEFYVGMDVSLEETSICVVDGKGEVVSEGTVISEPAAIAAFVKTKAASAKRIGLETGPTTTWLWHELRGLGLPVICIDARHAKAALSMQINKSDRNDAVGLARIMQAGWYKEVQVKSLPCHEIRAVLNSRAQLVKIRCDLENQIRGLLKNFGLVIGKAGGKVFHRRAEELVDEHRLLQEAVRPLLTVREVVRREIASLTRKLLALARDNDESRRLMTAPGIGPINALAFCAAIDEPSRFQRSRSVGAYFGLTPRRHASGEVDWTGRISKFGDAMVRTYLFEAAGVLLTRVPHWCRLKAWGLRLVKRIGFKKARVAVARKLAVILHRMWRDGTDFMWSSKEAAA

SEQ ID NO: 237380 - protein, 342 aa, unidentified
MSINTLGIDLGKTVCHMVALDEGGQILFRRKLRRDQVLRMTANLPACRIGLEACCGAHHLGHRLNAQGHDVRLMPPEYVRPYVKSNKNDDRDAEAIAEAVGRPTMRFVPLKEEVQLDLQAIHRARERLVRDRTALINQVRGFLFERGITVPQGRLRLGRRLPEILRDDTLGISPRIRVLLSDIRAEWQELDRRIDAFDRELAECARRNDKACRLIEIPGIGVTIATALVAAIDNGAAFSRARDLSAWLGLVPKQHTTGGRPRLGGISKRGNVYLRRLLIHGARSVLPHLAEQSSPAGCWLGGLLSRAHRNVAIVALANKMARFAWVVLRTGTHYEAQTLPTA

SEQ ID NO: 237381 - protein, 342 aa, unidentified
MSYKLYFGVDVSKHWLDIAYYDGEDVDWQHGHIRVDNDEKGFKELGKWLTRLGVGKGTAIFCMEYTGLYCQEFRQWLERQGIVYGMVVPRKMHRFEPDLGAGERALDRVKTDEMDSFRIAIYCKEHAMKIRRKPSRLPSPAYFKLKRLMAERRQYVKQSMLYKQQLHDIGIYDSDSSRCRKQSELDNLTEKVRQTMAEMQTVISEDERIRRNYDLLLSIKGIGPVVAVDTIVLTENFTAIDCPRRFACYVGIAPARKESGVSIQKGDHISKKGFTQAKADLSMAALQGIQNDSGIRAYWQRKKAEGKHSGVVLNAVKFKLVLRMFAVIKRQKPYVEIDSYKK

SEQ ID NO: 237382 - protein, 362 aa, unidentified
MNTARTISESELVVVGGVDTHKDLHSAAVVDAHDRVLGHDYFPTTRHGYKTMLRWMRSFGHLDRVGIECTGTYGAGLLRYLQKADVEVLEVTAPDKTVRRQRGKDDALDAENAAHAAYARARAVTPKTRDGMIESLRILKVCRKTAIAARRVALQMIQMNIVSAPQELRDSLREMTRMQLIRTLASWRPDVTGYRDVTTAYRITFKSLARRYLELHDEIADLDVMIAAIVDDLAPELIARNSIGYESAAQLLLTAGDNPDRLRSEASFASLCGVSPVPASSGKTQRHRLNRGGDRAANSALHIIAIGRLRTDTRTKDYVRRRLTEGHSKLEALRCLKRYLAREVYHILRQRNRAINATQVAA

SEQ ID NO: 237383 - protein, 402 aa, unidentified
MNAVGIDVSKGKSMVAIMRPFGEIVSPPFEIKHTANDINSLVELINSVEGESRIVMEHTGRYYEVLAHQLSEANLFVSAINPKLIKDFDNDSLRKVKSDKADSVKIARYALDKWQNLKQYSVMDELRNQLKTMNRQFGFYMKHKTAMKNNLIGILDQTYPGVNTYFDSHARSDGSQKWVDFASTYWHVDCVRKMSINAFIDHYENWCKRKKYNFSKSKSEEIYGKAKELVPVLPKDDLTKLIIKQAVDQLNSASITVESLRTLMNETASKLPEYPVVMAMKGVGTSLGPQLMAEIGDVSRFTHKGAITAFAGVDPGVNKSGSYEQKSVPTSKRGSSDLRKTLFQVMDVLIKTHPQDDPVYQFLDKKRAQKKPYYVYMTAGANKFLRIYYGRVKEYLASLPES

SEQ ID NO: 237384 - protein, 412 aa, unidentified
MPDDQSLPNLSNLSWEVYVAFKIFRKNCCGLDVHKTWIYACMGITDTNGRTEYKQARFSSFTKGLQELAVWLAKYDCNDVCMESTGKFWIPVFNILEKTCWVTLAYPKYTKPQKGNKTDHKDAKWICDLYMCDMVNPSFIPPPDIRQLRDLMRYRSKLTNIMTSEKNRALNCLTVSNLKLDDVFSDVFGKSSRSVIRYILEHPGETFQVAPFIDRRCKHPVEEIQAVIDGTISHQQAVKLRECLQHLDELEVHKTNVEKEILCLVQQYPYQLELLQTVLGFSGNIMTAIALISEIGADMSVFPSAKHLVSWAGCCPRNDQSSKKVKSTRISRAGVYLKPLLVQVAIQPFTANADKLSAAGALEIRCQICDGRFLSMWAALFIFLGCPLPPCPKNLHVHNGRIVILASVAWIF

SEQ ID NO: 237385 - protein, 397 aa, unidentified
MYIVGIDIAKRKHEAAVIDGEGTVIIKPFSFTNNCSGYNRLLAMLAKAKLPLDEVSFAMEATGHYWLALFTRLQKEGFRVQVINPVQTNSIRSFYIRQAKTDPRDALLIAEVIRFGHFSESTLHPENIYELRELCRGRHAIVSMQADVKRKVVALLDQVFPEYETAFTNMFSDTSMAILQNCPTPKELSEMPFEELCHLIEVSSHKRFRMAKARELQELARNSFGFAMAGDVFSTMIRLYAKHLDFLKQQVREMDRKIAEIMETLDTPITTITGIGPTLGAYILSEIGDISRFSSAAKLAAYAGIDPTMRQSGEYNGVRNRMSKRGSPYLRHAIWLAASSAVLHDPALKLYFQKKRDEGKPYMASVGHACRKMVSIIYAVMRGNKAYTPCIPNEISA

SEQ ID NO: 237386 - protein, 387 aa, unidentified
MSQASDLTRCFAPYDQATTLIAVIELSLSSWLIAGMVPGLARQPLKKMAPDEAGLLRLLERWREEAVTAGSAINRVSVAFEAGRDGFWLARWLRTRGIDAHVIHSSSVAVSREHRRAKTDRLDTALLMRVFIGWLRGERGHCSMVAVPSIEEEDAKRPNRERENLVGERTRIINRMKSALARLGIRGFKPELRKAPQRLDTLSTPEGIPIPINTLDEFRRDLVRLALVREQIDAIERTRIAQLEAAPKTGPHAMVRLLAKILGLGIETADMLVNEVLSRNLRDRRAVARYAGLTGSPDESGKKRRERGLAKAGNARVRRGLVQLAWRFLLFQKESALVLWFRARTESAAGVRKTKMIVALARKLLIALWRMVTTGEVPAGVVLRPSP

SEQ ID NO: 237387 - protein, 424 aa, unidentified
MKKVLYVGLDVHKESIVVATAPEGDTEAQLYGKIGGTLDALDKLIKKMDKPDLELRFVYEAGPCGYVIYRHLKKLAYFCEVIAPSLIPTKASDRVKTDRRDARQLARLFRAGELTAIYVPDEEDEAVRDLVRARDRSMIDQRKARQRLKGFLLRLGHRYLGRGNWSAEHLRYLAQIKLSHAAQQIAFQEYLEAITVATERLERLTKAMEAALPAWKRAPVVQAIMSLRGVALINGMTLVAEAGDLTRFDSPSQLMSYFGLTPSEYSSGEKRVQGGITKAGNGACRRALVEAAHHYRIAPRVSPAMQKRQEGQSQEVRAIALKAQQRLNSRFRLLTARQKKPVIVIAALARELCGFVWAIVCQVSAPEKVKTRQKGGLKETKATVTSTPAPAKTPPPMRAGKREYQLNPQKTFKKTAPVCQTTHE

SEQ ID NO: 237388 - protein, 307 aa, unidentified
MKIAGIDVHKKVLMVVVIDASTPEEKPERRRFATMPSELHRLLIWLQKQGVEEAVLESTAQYWRSVWLELEPHMRLHLAQAFSNRAPRGRKHDFKDAERLVRRLIADELILSFVPNGEQRIWRSMTRMKLQLTRDRVRLQNQMECLLEEMRIKLSIVVSNLLGASGLRILHALAKGETDPRRLAELGDERLQCTEEQLVDALTGRVQPTHREMLRLQLERLQLIDQQMAELNSMIARAMKSHQDAVIRLAEVPGLGVDSAQQIIAEVGAQASTFPSAAELTSWVGTCPGKEESAEQNHSSRSAKGNK

SEQ ID NO: 237389 - protein, 358 aa, unidentified
MYPFYLGIDLHLKRTYVVLMDNRGKVIDECQVSNHDIREYLVNKVPKNTYAVLEATRNWAFMYDHLSEHVERVELAHPKELKAISAAAVKADRIDAKVLANLARLNYLPIAYAAPKDIRDLRMYIRARDQLVRLGTQAKNRIHAILASYNLFPPVSDLFGIEGRNYLDEVMETNLSTAAKEVVEIHLAVLDHIEEQIKDLESKIELSPEQERTIRLLKTMPGVGRITAIMILAEIGDIKRFNSPRALCNWAGLTPKIHSSDVIVRHGRISKQGSSLLRGAMTRSATITSRFSKRWYIVHENLALRCGRQAAKVAVARRLLTVIYYMLKNQEPYREDYNHHRKVVDESVDRHGTLIPRK

SEQ ID NO: 237390 - protein, 325 aa, unidentified
MKKWFAGLDIHMEKLYGTVLNKQGEIIVQGSLPNSKLGIQSFFAGLSSSKLVVAIEACGLWRGAYNMLTELGYDVVLANPLKTHQIAVGKKTDKVDSRILADLLRTGYLPLVYIPGEDVLKLRDIARHRARLVRVRTSLQSKIKSHLNQSGLKFKKGWSRKNLEYLKTLDPLVASFVHVIEVVSEEIKKVTSEINRVAGSLRLACLLQTVPGIGRFGSLMILGEIGDVRRFPNPKSLVSYAGLCPGVYQSGDRCFGVVNRSCNRWLKWIVTECSGRAARMNNRYMRHYCQVKHRKGFRVARRSVARKMLTDIWYILSREEPFKAS

SEQ ID NO: 237391 - protein, 342 aa, unidentified
MTAIKYFVGVDIASATFTACVGTTPWKVILKPHTFENTGNGYQTFLEWLAKQQIGAKESVVCMEATGVYSEGLAYFLFATGYAVVVQSPLEVKRTFKPYGPKTDAVDSLQIAEYAGRHIDKLSFWQPRNEILEQVKALLATREQFVSQNVAHKNALQAIQRKPVRTLFAEQAHAQMIEQFKKHIQAIDQEIRRLIESDPTFREMLLLLLSVPGVGLLLASHMILLTQISLDHKELASYLGIAPNEHSSGSSVFKHATSRHFGPAAVRKLLYLASCSVRMHQAQFASYFARKTRQGKPAKLVLNNIANKLIKIICAVLLTKTAFIKNYHSVQPLVFQNTLTGS

SEQ ID NO: 237392 - protein, 448 aa, unidentified
MDQGTRKPMRTLSIINPDAAGIDVGSEKLFVSIAGDEPVVFGTFTNEVYRLRDYLKQNGVKSVAMEATGVYWLYVYAVLEAAGLELVVVNGRYVKNLPGRKSDMSDCQWLATLHAHGLLRGGFVPPAQIRRLQDYQRLRSDHLVGAASQIQKMQQALERMNIKFHDVIRDLTGVSGMKVLKAILEGERQAERLLLLCDPQIQKKKKEPVLESLQGVWADEHLFALGQAVAIWEFYQKLLAECDQQIEAVLKELAGPPTAWPAPETSPPSPAKRPSKNAPQIEQFHQLLVRICGGQDATSLPGIADYSWLQLLAETGPELSAWPTEKQFQCWCGLAPGIRQSGKRKGSVKRHCNRTGRIFCLVAQTLYKSVDKGLGGFVRRISRRKGGLVATKALARKIAGLYYRILRYGLEYAEKGLRAYEQKYEETERRLLGKLAAQQGFRLVSLKT

SEQ ID NO: 237393 - protein, 347 aa, unidentified
MWNSDKLLQTNDFMKKEFIKQNVGIDVSKDDFKVCFSCLTNNLQVIARGSRTFVNTHKGFEELQDWVKSKGDSALPLSFTLEATGVYYESLAYFLYGQDNCVHIVLPNQAKKYSQSLGLKSKTDKIDACTLAQMGLKQELRIWQPISGHLLGLKQLTREREALVRSKVTASNHLHAYRHQGKPNEASIVRTQKRIVFLEQQIKQIEKEIGAFVNQDKSLKTKMEYLTSIPGVRLLTAAIIVAESGGFETFESIKQLTSYAGLDVRIQESGKWKGNNKISKQGNSHIRKALYMPAITKITHDKTTRLFYERLAEKKGQKMIAVIAVERKLLGLMYSLWKKQEMYNIAA

SEQ ID NO: 237394 - protein, 457 aa, unidentified
MAMRVKKAGATGAQDWQIVHPNAAGIDVGAAEHYVAVPAGRDAQPVRGFGACTEDLIALEQWLKQCGIDTVALESTGVYWIPLYELLEARGYKVILANARAVKNVPGRKSDVLDCQWLAQLTAYGLVSSAFRPAGKVCALRERVRQRQMLIGMQAQHIQHMQKALALMNLKLTEAVSDITGKTGLAIIRAIVAGQRNAGELARLRDRRVKASEDDVRRALEGHYRAEHLFALKQALHLYDAYAERVQECDVELERVLTTLARGDDDVPPQDPRKARSHAKNAPAFDLRGALYRCYGVDLTRINGIHVTTALTMLAEIGFDLTRFKNAKHFCAWLGLAPGTKISGGKRLSGRRPKTANRAAQALRLAAQSLRNSQSGLGAYFRRLCARMDKPKAITATAHKLARIIYAMLTQGQAFVDQGQAWFEERYRQRVLHNLKRRAMQLGMNLVPVPTPQIEHA

SEQ ID NO: 237395 - protein, 351 aa, unidentified
MSHKTAATVAHTIGIDTGKNTLHLIGLDDQGAIVLREKIARGRIAARLANVPRCLIGIEAGMATHYVARELGALGHDVKQVPPAYSKPFRQGHKNDFRDAHAIAEAVQRPSTRCVPVKTDDQLDLQALHRVRSRLVGQRTAVINQIRGFLLEHGIAVRQGLRFLRQQLPDILAKRSDVLSPRMIRIMEDLSGDWRRLDERIEHITKEIEVLAGTDVNCGQLMTVPGIGPIVASAMVAAIGNGAAFARGRDFAAWLGLVPKQMSTGDRTILGRITKRGNRYLRMLFVQGARAILLRPKSWVKHSFGPWLTTAARRLHRNILTIALANKLARIALSVLIQGRSYETRIVPAAA

SEQ ID NO: 237396 - protein, 436 aa, unidentified
MSTVNRLGIDLSSDHLDLFLAGPDGRPLMPARRFDHNGPGSQAAREAVIAACRRHPAEQLVIGAEATGLLWWHLYHQWAADPQLAELHPVFYLLNPAPVHGFRRAVPPQDKTDQVDPRLIVQYLSVPGLALQPWVNQLEQWPLRFLTRYRCHLAHTLGAYKSYARTWIYLLASAYESCKPFGDLFGKTSLEILTQYPTLDSLAEMPTAELAEQLDVLGKRRFPDPTDNARRLQQAARQSYSLDPAVREAVHFILGQVIDVIRFLDKRLATANAFIATRVQEDADVHNLDAIGGLGPVYSAGLAAEIRPTQRFLTGTKFDHQRGCERPRTLADGEASVAKLAGLWWPRSASGHFEAQDRRMSKAGNAYLRYYLIEAANHVRGHVPEYGDFYQRKYAEATKHHHQRALVLTARKLVRLVFVLLHKHEAYRSGGTPQTT

SEQ ID NO: 237397 - protein, 404 aa, unidentified
MWYVGLDWADTHHDVEVQDEAGKRVGARRFAHSHGGLNELKAFLLGIAASPEELACIVETNHGLLITFLLEAGIPVYPVNPKSANQLRKAAGAKTDRIDAHLLAKLGRFDLAELRRMAPDSPTVQELKTLTRDQDALIQTQTRLVNQLTACLKEYYPAALQLFAKVQQRSTLLFLQAYPTPQAALAASIEQITATLRTGKHTNPRRAAPKIVEELHRPQLVASEVIVRAKSRLMLSLVKQLLVVIEEIAKYDKAISTLFLTHNDQELWSSLPGAGKRLAPRLLAEWGADRSRYADATSVQALAATAPVPFESGNYAKAHKRFACLKPLRNALHQFAWQSTLQEDWALAYYQRKRAEGKTHSMAVRALANVWVRIIYRMWISKTCYQTATFEAAKLAHAPRQHVA

SEQ ID NO: 237398 - protein, 443 aa, unidentified
MEDEDYQLRHERVAGIDIAKAKADVCTRLPPARDGGRRASRLEEVPATAREILALAGRLLADGVELAVMEATSDYWRIWYYLLEAAGLTVQLVNPAHARQLAGRPKTDRLDAQWIARLAEMGLLRPSFVPPPEIRALRDLTRTRLQLVRDRTREWQRLEKLLEGALIKLSSVVSRLARVKTARDILEAIADGQRDPRALAALAASHVKGGREGVEHALEGMLPGEHHPMLIRIHLDHVTFLDRSIAAVEDEIDAALGAIPAAWGISADGVPSPDPGPGAAALTAVERLAEIPGVSPKLAMAIIAETGLDMTRFPTADHLVSWAGLAPVARQSGPRNRKPKKGQGDAYLKGYCTQAANGAARTETFLGERLRRLSKRLGGNRAKCAVARSILIIIWHLLASPEARFTDLGADWHERKTDRDRKIRAHLRQLQALGLDVTITPAA

SEQ ID NO: 237399 - protein, 320 aa, unidentified
MSTSGRTTSYVGIDISKATLDVAVLPTGEHFVVSNDEAGIEELLGKLAEVSDALVILEASGGFERPVAAALAASGVALFVVDPRQARDFAKATGQLAKTDRLDAFVLAHFAQAIRPAPRAIPDAEAREFQEILARRRQIIQMMAAEKNRLGASTSKAVCGRIEAHIRWLEKELSRTDRDLDETIENSPTLKENEALLRSVPGVGPVLCRTLLAELPELGSLSPRELSALVGVAPLNRDSGTLRGRRTAWGGRARVREALYMGALIASRFNPAIEEFYERLVEAGKPKKVALVACMRKLLIILNALMRERTPWRCPHALNP

SEQ ID NO: 237400 - protein, 405 aa, unidentified
MRTLCLPPLEMLWVIASRDILAHYLLTIIRKESGMTQITHNKRALYMAIDVGVKNWKISLSDMVKERDISINVCGCAVRLAEEISKAKQKFGLVAEAPVYSCYEAGRDGFWIHRMLTRLGITNFVVDPASIEVNRRARRVKTDRLDAQKLRNMLIRYVVQGERKHWRVLHVPDEEAETARRMGREEDRLKKERGAHICRIRSLLALYGIRVKSVKCDILLLKDWDGRPLPEALREEIAREQQRLEFVDRQLEVLKKAKKEGIKNPDTDAKAKAARLIRLKGIGEDTAWDLSHEFFGWRKFNNRRQVGSAAGLTGCPYNSGNSNREQGISKAGNRRIRTSMVETAWRWLQFQPNSELSKWYMLRFAGNGKRMRRVGIVGLARKLLVAIWKYVEFGTLPEGAIEKAV

SEQ ID NO: 237401 - protein, 230 aa, unidentified
MNLTRIGLDLAKQVFQVHGVDRHEHVVCRRQLKRAQVRDFFRQLPPCLVAMEACGSAHYWARELRELGHTVRLIAPQFVKPYVKGDKHDAHDAEAICEAASRPSMRYVPVKSAEQQAVQSMHRVRSRLVRARTGRQFAAWLGLVPRQHSTGGQQRLGNISKRGDTYLRTLLIHGARAVVRCCANKTDARSRWLQGLLQRRPANVVAVALANKNARILWALLSRETCYRPG

SEQ ID NO: 237402 - protein, 339 aa, unidentified
MFCIALDLHKENTYGVVLDDKSGQLVWEGNFASTFRAAKETLEPYFVHGTKIAIESTSCFYPMYDGLKSIKGINISVVNTARLEKPAIKTDRRDAHRIAHLLRRNELPTAFIPNKKLRLQRELCSLRMRLVHSCTQCKNRISSILHKEGKRPLGVKDAFSDKGLAQLEKLRILRKEEMNEELDLLRILKKKLSRIEKQISEVIEQDARLRKQVGLIDSITGFAQTLAFVCATELGPIGRFNSEEAVVSYAGMHPCIDSSGGRTKHGKIMRVGRKLFRWALIEAAHVCGRTDTILGNYYRKKAKQKKSNHAAAIATANKLARLIYQILITQKDYDPGLGQ

SEQ ID NO: 237403 - protein, 356 aa, unidentified
MEQINKLDFSGQSIYVGLDVHKKSWSVSIFSEQCEHKTFTQPPKADKLVHYLKRNFPGATYQAVYEAGFSGFWAHDQLQEQGVNCLVTNPADVPTSDKERTRKRDRTDCRKLARSLRSRELKGIYVPSRPKLEDRSLVRTRQSMVRKQTRCKNQIKELLYFYGINLPEEVVESHWSQKFLHGLENLRMERTSGDMALKAHLDELHHLKRIIASLNRSIILLSREAEYGQRVRLLRTVPGISTLAAMIFLTEIGELARFASLDKLASYVGLIPDFESSGEIEHIKNITHRRNPQLRALLIEAAWVAARKDPVLLLAFNEYCHRMKKTRAIIKIARKLLNRIRYVLKNQVEYVPGVVQ

SEQ ID NO: 237404 - protein, 413 aa, unidentified
MEVIYQRCAGLDVGKDEVVACTRVPAGASGGGRRQEVRTYKTFSASLEALADWLQDHGVIQVVMEATGQYWKPIWYVLEARGFELLLVNARHVKILPGRKTDVGDAAWLCELLEHGLLRGSFVPPPAIRQLRDLTRYRKRLVQTHTAEVQRIHKTLEDASIRLGSVASDVLGVSGRAMLQALLAGERDPKVLADLARGRLRNKLPELREALRGRFDAHHALLLRLALEHVEQLERSIAALDAEVDRVIAPFTKARDHLDTITGVGKRAAECIIAEIGVDMGVFPTAGHLASWAGRCPGNNVTGGKRRSGKPTKGNRWLGEILVECAWAAARSRDTYLAAQFWRLARRIGKKKAAGAVGHSILVIAWYLLSGDCDYADLGGDFFVQRDTDRARQRAVAQLQALGYHVTLQPAAA

SEQ ID NO: 237405 - protein, 411 aa, unidentified
MENIFPCCAGLDIHKKSVEACVRRLEPTGQMHHQTRHWGTMTRDLLAMADWMAAQGVTHVAMESTGVYWKPIYNILESRFTVLLVNARHLKQVPGRKSDVRDCQWIAQLLQHGLLKGSFIPPRTQRELRDLTRHRTQLVEEKTRTVNRLHKVLEDANIKLASVATDILGVSGRAMLEALMEGQEDPVKLADLAQRQLRGKIPELEKALEGHLTEHHRFLLRLLWKELAQQEELIAELDRKIEEQTRPFANEIERLDAVPGVDRRVAEVVLAEVGSDVKPFPTHSHMASWAGICPGNEESAGKRRRQRITPGNRWLKRTLVQAAWAASHTKNTYLASQYRRLAGRRGKKRALVAVGHSMLVIFYHMLKERTTYKNLGGDFFDRLEPERLTRYYVKRLKDLGHKVTLEPGVAA

SEQ ID NO: 237406 - protein, 359 aa, unidentified
MLEGKIDHVIGVDTHRDSHTAAILDPNGGLVAELTVTSNQAGSEALLGVVAQRAPGRRCWALEGTGSYGAGLASFLADQGEWVTEIDRPKRPRGRNGAKSDPLDAIRAGREALGRDHLASPRQRGHREALRVLQLTRSGAVKVAADSRRQLKALLVTAPEPLRAALCGGTWLAQARACAVLTAEASDPVEYRATVRALRLTAERALAAHAEAKQLAEELQMLVAVMAPALLAQPGVGPITGAQVLISWSHPGRLRSEAAFAMLAGVAPIPASSGRVVRHRLNRGGDRQLNRALHTIVMLRETWHEPTKRYVTRRTAEGKSRREIRRCLTRATARQLFRLLERKAGHPVAAGQPALPPTP

SEQ ID NO: 237407 - protein, 407 aa, unidentified
MARYYLGVDWGEEQHGVCVCEETGAIVWEGMVPHTPTGLSVWGRQLDEWCAAGIELWAAIEKPDGRVVDCLLDHGVVVYPVNPKAVDRARDRFRMSASKSDTFDGRVLAQFLRTDHVHLPPLRPSSVAAQEVKLLTRDHTRIVRQQTRTLNQLTSTLKEYYPRVLDLFGDLTTQLALDFLQTYPTPATLTKLRLSSWKRFAQQHRLGSVRTTELWEQLHAPQLPVPEHVVRAKARLVAVLIAQVLVTHRAVTEYQAEIERFFVTLPAAEWMQTLPGGLSGTMIPRLWAELGDAPGRWASWSHLQAQAGTVPLTRQSGKSCVVRFRVACNKHLRQAIWQLAFQSLRHSEWAKHYYQQCRARGHQHNQALRALGAKWLKIIFRMWQHQVPYEESYHLANMTRQYLRATA

SEQ ID NO: 237408 - protein, 369 aa, unidentified
MKASVVYVGMDVHKDSITIAVARQGREPAETWKTIPNDGVRLRKALKLLARDGQVLRVCYEAGPTGFGLCRRLREGGIDCIVVAPSLVPGKPGDRVKTDRRDARKLAHFLRSGDLTEVYVPDEAVEAIRDLERARDDAKCAERVARHQLSKFLLRHDRHWEGTTWTHRHLEWIRTQKFAYPAQQRVLEDYLKTVEDLAERVAWLTAAMGELVEETVLAPLVKALQAFRGVSVVSAVTIAAEAGDLRRFGTAAQFMSYVGLVPSEDSSGKRRRQGRITRCGNGHLRRILVEAAWHYRHVPSMSKELRRRNQGVAPGVRRIAWETQKRLHTRLYHLLHAGKSAQKAITALARELAGFIWSVGQEETLLEAA

SEQ ID NO: 237409 - protein, 343 aa, unidentified
MQIRTIGVDLAKNVFQVHGVDSAGKVVITRQLRRKQVIEFFSKIPPCLVGMEACGTAHHWAREVSKLGHTVRLMPPSYVKGYVKRSKNDAADAAAICEAVTRPSMRFVAVKSTDQQASLMLHRTRDLLIRQRTQLINALRAHLAEFGLVAETGREGVAQLAALITDESDREALPFAMKQALQAIVDQLAALELQVGTLDRAIHAHHRANDMSRRLETVPGIGVIGATAIASTVTDPSNFKSGRDFAAWIGLVPRQHSTGGKERLGGISKQGDRYLRRLLVVGATAVVRHARQHPQKHPWVMRLLAKKPAKLVAVAVANKMARIAWAIMAKGGYYRAPELAAAA

SEQ ID NO: 237410 - protein, 337 aa, unidentified
MDKVTMVGIDLAKNVFWLHGADERGRKVFSKKMSRAQLPEFVVNLQTCTIVMEACSSAHFWGRKFIKMGHEVKLISPQFVTPFVKSNKNDAKDSEAIVEAASRPSMRFVAVKTTEQQEILSLHRVREQVVGNKTALINELRGLLGEYGIIIPKQASNVKKYILEILEDATNELTAGMRILINDLYCELKKMIERVSVFDEKIKELSKKSEVCTLLETIPGIGPTTSTAMAASVGNAKNFKNGRELSAWLGLVPKQHSSGGKQVLGRISKRGDIYVRKLLVHGARTVLRYAKNKEDVVSKKWNTLAERIGHNKACIAIANRNARVAWAVMTTGSPYRT

SEQ ID NO: 237411 - protein, 425 aa, unidentified
MNDDVMIAVDPHKASNTAAVLDPVSKTLIDSARFPNSAGGYEQLTVFAGRWAQRRWAVEGCHGAGRSLAQRLAADGELVLDVPAKLAARVRVYSRGHGRKTDKHDAVSIGLAALEGAGILPVVCDDVTVSLRLLCDRREELAAQRTQAACRLHRLLAELTPGGMRRELTANKAQALLARIRPAGDVAAVRLHIARDHLADIRALDARLKYIAAQISALVTASGTTLTSLYGIGPVIAGRILAEVGDVSRFATKDKFASYNGTAPIDVSSGDQVRHRLSRAGNRRINHALHMMAVTQIRYPGTSGRRYYERKRTEGKTPKEALRCLKRRLSDQVYRQLVRDAQGRIEGCGSPTTLPPTPPTSTSPANGSPAAAPASPPPRPKASRPSSSWTGKMTASSASKSSTPAADCTPTSSKKPKSSAENGAP

SEQ ID NO: 237412 - protein, 444 aa, unidentified
MQLKQRIQPTIESAKTMSESIAAAALQAVAAYIGIDWADQKHDVVLRSASQPNKVEHRIIEHKLEALMEWVGQLQQRFGGQGKILVCLEQSRGALIYHLMGYEFFELYPVNPLQLARYRETFSPGGAKDDRADAELLCELLYCHRDRLRAWKADSELTRKLVFFTEGRREAVDQRARLSQAIKSQLKVYFPLALELLNNDTTTALAADLLLRWSSLEALQKQSAHTLRKFFYGHNCRGEAKMLERLQLVQEAQPLTQDAAVIEPAALRVQMLACQLKHLLPDIARYDKKIAELFAVHPDRFLFENLPGAGLALAPRLAVAFGSDPNRWESAQEIATLLGIAPTRRASGKKTGKKASVHFRQACPKFHRQSFHEFAGCSIRYCPWADAHYQTQRARGKGHHTAVRSVAFKWIRICFACWKQRIPYDPQRYLQALQRRGSPLADAC

SEQ ID NO: 237413 - protein, 339 aa, unidentified
MSRLYGGIDLHSNNSVVVLSPGNDEVVYKKRLRNELSVILDALSPYQKDIEGLVVESTYNWYWLVDGLQEAGYRVHLANTAAIGQYEGLKYGDDESDARWLAKMLWLGVLPEGHIYPKEERPVRDLMRKRGHLVQQRTSQVLSIQNLLARNTGRRLSGNAIKALKDEDVETMQPNEELALALKSSAAVMRCLDEQIKVVERAVKGRVRLREEFKGLLTVSGVGPVLALTIMLETGDIGRFEGVGNFASYARCVDSDRKSNGKSKGSGNRKNGNKYLSWAFVEAANFAVRYDPVIKRYYQRKTAKTLPAVGYKAVAHKLARACYYILRDQVAFDVTRAFV

SEQ ID NO: 237414 - protein, 337 aa, unidentified
MKVTLIGIDLAKSIFQVCGVNQAGKRIFNRQVRRARLMELLIQHPDATIAMEACSGSNYWGRALQQRGFQVMLIPPQHVKPFVKGNKNDRNDAFAITEAARRPDLKCVEPRTLAQTDLIQVHRVLDRMVRQRTALINQIRGFLNEYGIVIAQGKERLLAAMPDLLEDAENGLTPSSRALYQELYEQWRQANEGIDRIEKGLKNQANTNEAAQRLMKVKGVAVKISTATIAHAGNGHGYKSGRHFSANLGLVPKEHSSGGKQKLGGITKRGNHYLRRLLIQGAWSVVRNADKNDDRMSRWARQLVERRGKHKAVVAVANKMARIMWSMLYHQTEYQAN

SEQ ID NO: 237415 - protein, 334 aa, unidentified
MQNVSLIGIDLGKHSFHVHAQDKHGHALLRKKFSRSQLTTFLSSCSASTVVMESCAGAHYMARHISAFGHQVKLISPQFVRPFVKTNKNDFIDAEAICEAASRPSMRFVAPRTEEQQAMSAIHRVRESLVRERVKTTNQMHAFLLEFGISLPRGIAVIRRLEALLEEHALPPYLARLLVRLRQHHTWLSEQIDEVEQELKNHLSDDESAQRLLTIPGVGVITASLLSTKLGDGKNFASSRDFAASTGLVPRQYSTGGKNTLMGISKRGDKKLRRLLVQCARVFMQRIEHHPGRLADWVKEQLTRHCSNVVACGLANKLARIAWAITAHRTEYSH

SEQ ID NO: 237416 - protein, 390 aa, unidentified
MIYVGIDVAKDKHDCCILGPDTEELFQVFTIRNNSDGYGELFHKIESVSKDKSQIKIGLEATGHYSYNILGSLLDHGYHTFVINPLHTNLYRKGQSLRKTKTDKVDARSIAEMLVTDKTLKPYTGTSYHSEELKSLTRYRFELVKERAKLKTSVSRLVNILFPELESLVPTLHMNSVYRLLQELPGAYFIASSNLTHLKALLADASKGHYGREKAIVIRETAKSSIGSLMPAKSMELRQTICRIDTLTSDIKEVEQSIQKIMDECGSPITTIPGIKYRMGAMILAEIGDFARFSNADQVLAYAGLSPSTYQSGQLISSYARMEKRGSKYLRYALFNAAIYASVWDERFRLYLSKKRAEGKHYYVAISHVVKKLVRTIFRMEITHTSYQPL

SEQ ID NO: 237417 - protein, 424 aa, unidentified
MKVTYQTCCGVDVHKSFLVATIVKTTGGIEPYYQKKRFSTFNNSILEFKHWLLDNDCHDVCMESTGKYWVPVFNLLEDEINVVIANPRWVKAVKGNKDDTKDSKWIGDLFRLGLVKGSYIPCKKVRILREYTRYRYKLVSCRSSEKNRYQNALTVCNVALDSVVSDIFGKSSMSIIDYLLEQSGTSINHEEIASKLLRSLKSKEDAVIESVEGYQMTDAQKYRVRLVRAHMDYITAEINDVDKMIENMISSNPDFENAVQFLCTIPGVKRDSAITIISEIGTDMSQFSSSKRLCCWAGLTPGSNESAGKKKSVRITRAGVYLKPALVQCAHAAVKSDKSPYYKKKYESLVKRRGKKRAIIAIARMILTAIYQMLSTGEEWNPSNLYKIDMPVALVEKQKAKAIKQAKKLLQREGLLPPDEPLAS

SEQ ID NO: 237418 - protein, 350 aa, unidentified
MIIIGCDFHTRYQQIAMMDTETGELVERRLEHENGEARAFYASLPKPVVVGMEATGYAQWFERMLAEFGHELWIGHASEIRAGVVRKQKTDARDALHLLHLLLEKRFPRIWIPSPAERDTRQLLRHRHKLACFRVSVKNQLHALAMSQGVCRKKKLFTARGREVLEKLSLGPWARRRCQELLGMLDQLNTVIDELDRAVQQQAESHAEAARLMRHPGVGAVTALAFVLTLGPVTRFRRSKHVVSYLGLNPKERSSGGKQRTSTISKQGNTMMRWLLVEAAQTAARYDPELLRLYQRLKFRRGANVAKVAIARKLAVKLYWMLRATASCAQLAPMQGSSRGTLVPQAGSSF

SEQ ID NO: 237419 - protein, 412 aa, unidentified
MDVLYPHCSGIDIHKKSITVCVLIRESGRKEQKQIREFGTTTAEILRCGDWLQELGITHVAMESTGVYWRPIWNLLEGRFELLLANATHIKNVPGRKTDVKDSEWIAQLMQHGLLKPSFVPDTVLRDLRELSRDRTSLVAERSRLKNRIQKILEDANIKLGSVASDVLGKSGRAMLTAMIAGNQDPQGLADLAQGQLRLKIPQLVEALRGRVRTIHRFRLQQQLARVDFIDAQIAQLEAEMEKQNAPFEEAVSLLAEIPGFDRTTAWAVIAEIGINMNQFPSANHLASWAGVCPGNNESGGKRLSGKTRKGSRWLRQKLCQSAWCSSRCKNSYFAAYFQRIAAHRGRKRAIVAVSHALLVVCYYLLQRKCHFEDLGVHYFDQLNHEKLTLYLVKRLTRLGHRVTLEPSSAVA

SEQ ID NO: 237420 - protein, 356 aa, unidentified
MKVLRQCCGIDVSMDTLDVALMILQEDFEFKTVSSGQFANTKKDIKKLMNWLKRLQLNNLPLQVVMEATGVYHEQLAYTLYDHDFQLAVVLPNKVANYCRSTDVRRIDDKISARHIAEFGLLKKLDNWIKPDDSLLKLKGLSREREQLLNERTRAKNQQHAKEHMAEVDKFTLKRAKQHIKFLDKLIDQVENQMKEIVGQTPWLKKKINYICSLKGVGFITATIVIAETNGFNLIRNSRQLVCYAGYDINNKQSGTSVNTKARISHKGNKHIRKALYFPALTAVQHDEPLSNFYNRLFDRQKIKMKSYVAVQRKLLILIYTLWKKEERYNPEYYKDKFLLEQPREAALTELDQVRS

SEQ ID NO: 237421 - protein, 394 aa, unidentified
MKLVGIDVGKNSHHFCVMDKETGEFNVTPSSFSNNKEGFDFLINSLKPYSKKSILIGMEDTGHYHVALLKFLLSNGYTVALINPKTTDLTRKMEGGITKNDKLDTITICDVLDTPERKKQYRITKVDRFDLYEQRQLTRHHHNLKEELNIYCNRLQKSIDLVFPEFNTLFGSKYGVVYMNLLKTFGSAEAIASTDIRTIRKCFEIKGRGNRISLTPEKLKECAKNSIGISSEVETIQIKHLVSQITLIKEQIAEIDKKIEEFSITNNSPILSIPGISHFSGTSILAELGDIGNYSKPSQIIKFAGVAPYHYESSQYNAQHTGITKKGSKYLRKTLYQVILPVINNNPVFKKYYRLKISQGKGHRCAQGHCIRKLLRIIYHLLETGQSFDPALLR

SEQ ID NO: 237422 - protein, 432 aa, unidentified
MSKYFFNPVVGIDVSQGFHVVSILNLTGNLFNKTFKIPNSLDGFSYLLSQIEKVERECNMKTGIFMESTGVYHLSLFHFLKKHNLEVNLINPLITNSNKNKDIRKVKNDKKDSLSIARLAKFDDIKFSDYFDLDIFNLKSLCREYYKQVDMRSAYKHKLSADMHILFPNYNKVFVDITCGTSAAILKKYSSPSAFLAAPSEEVINLIKSIAKKGLNWATNIYNKLHQVASEAIIIGIPSYAVEFKVALNLNFIETLNLGISKILSKIKEVVNSDSFPKNITNCVKYIDSIPGIDFFSAVTIVAEIGDYRRFIKPKQLVAFLGLDPSVNESGKFKGNENSMSKRGSSAARRALYSAALTSIRRKRNGELFNPVLYKYFNENLANKKPKVALGAIMHKLVNYIFAALRDQKEYELRSPHLHNQMFLYNQERQSA

SEQ ID NO: 237423 - protein, 342 aa, unidentified
MKFYCGIDLHATNSFLCVIDDKDKVLLKEKLKNDLGAILHALESFSPRPSIVVEATINWYWLIDGLQEAGFDVKLAHSMALYMITGAKVKTDRRDAFSLAKLLRLDAIPEAYIYPKAKRPIRDLLRKRKQVVRLRANAYGALRRVLLQHGIYGYSQATIKSLTEAQLDQHLEHFATQAGCHLEVQRIRFYSDQIKTLENIILSSVSDDQRFELLQTIPGVGKILALTILYESGDINRFQSAKHFCSYARVVPGIAQSSGVSKRGRGSKQGNPHLKWAFCQAAAISVRYNTGIRKFRQRHLARRRSKAKKLVTLCIVSHKLAIASYNILKNRVPFKQELMFGS

SEQ ID NO: 237424 - protein, 317 aa, unidentified
MSRTPIGVDIAKAKFDVATFVNGKYKTKSFANTPAGIQAFQTWLAAFPEPHVCLEATSTYGEALSERLADAGVMVSVVNPARIAAFAKIELSRTKTDKGDAKLIARFCALHTPEPWQPQPRSIRELRALVRRLENLLEMYQMEANRLQTADVAVQDSLQTVMTALQRQIDHVRAQIVQHIDNDPDLRGRRDLLDTIPGLGKATIPVLLSVLADPSRFGSAKQCAAYAGLTPSERQSGKYRGQTRLSKTGDPLLRKALYLPALVAWRHNPVLRPFCERLKARGMNGKAIVCAAMRKLLHIAFGVLKSNRPFDPNISLA

SEQ ID NO: 237425 - protein, 507 aa, unidentified
MAVAFFLFGSFSFFVNACGNVGNSRGSNRRGRVTNEFPNHAMVTRRLSDSARAGSQTHAQMLSFEDSAIRVAACFWRAMGRNEVEEKELEKPIRAWIGIDWADEKHDVSLSDVATGKQEALTIRQSPEALQEWLGQLRSRYEGGYVAVVLEQGRGGLLNALMGCEFLVLYIINPKSLSSFREAFYGSGATSDPVDAELMRDMVRQNPSRFRAWRPDDVMTRSLRLLTEGRRNLVNQSTALTNQLTALLKGYYPQALAWVGTLDTAWACDFLQQWPTLQSLQASSRRQVLRFYEKHPRASLNLNEQLKQIQDARALTQDEAVLESSALMVQALVSQLRPLLASIAEFDRKIAMIFHKHPDRPIFESFPGAGAALAPRLTAAFGTDRDRFQAATEMQELAGIAPVTEKSGKKSFVHWRYACPKFMRQTFQEFADHSRRWCKWAKAHYELLRQRGKSHNAAVRALAYKWIRILFRCWKNRQPYQDEVYTQALLKHGSPLSSLLAQYVENP

SEQ ID NO: 237426 - protein, 413 aa, unidentified
MDVVHPRCAGIDCSKKDAKVCVRIQGGGRRARSATVTTWGATTSQILALREHLVAAKATCVVIESTSDYWKPFYYLLDDALEVILVNAKTVRNLPGRKTDVSDAAWLADLGAHGLVRASFVPPAPVRALRDLTRTRTVITRERTREVQRLEKLLEDAGIKLSSVAADITGVSGRAMLEALITGQHDPAVIAELAQRRMRAKIPALTEALTGRFNDHHAFMARLFLDRIDAHNADIARLDARIQEAMAPFQVARDLLVSIPGFSRIVAEVFIAETGADMTVFPTAGHLASWAGLSPGSNESAGRIKSTKTRPGNRYLKGALGIAALSAARSKNTYYAAKYKRIATRRGPMRAIVAVEHAMAIAAWNLLTNGDFYRDPGPNYYTTHQPTKTRAHAIRQLEALGYKVTLAPLTDTA

SEQ ID NO: 237427 - protein, 324 aa, unidentified
MNESYPFSQFVGVDVSKATLVFAFAGGQQTFSCHNTAEEIVSQLIALIKEPQSTIVVMEATGGYERQLVALLHQHQLALAVVNPRRVRDFASGIGRDAKTDPIDAHVLAYYGQVAKPAAQVAQSAEEKKLQALVERRRQLLDLVHQESNRLEQTADSEIKEYIRHSLESLKKQVQTLDDRLAKCVAEDSANARKVEIMESVKGVGSVTVSTFLAKLPELGKLNRGEIAKLVGVAPMNHDSGKTSGQRTTFAGRSYVRRVLYMATLVATRFNPQIKAFYQRLVAQGKPKKVALIAAMRKLLTTLNTLIKNDVLWLNPHHDTRVPE

SEQ ID NO: 237428 - protein, 315 aa, unidentified
MTRLHTSFSGFIGCDVGKAEIVIHHSPEGTTTAIPNQAKALAAFAATLNPGCLVICEATGGYETALLNAMLKANIAAHRADARKVKAFIRSFGIRGKTDAIDARALAQYGRERADKLRLWQQVEVAQRRLQSLVLTREDLVKQRVANKNRLAAPGDASVKPILKTLIDCLTKQIAKIEAQLRQLIQEQPKLARDAKILASIEGVGRVVGTTLQAMMPELGTLSRREVAALAGVAPHPNQSGGRDKYRKTIPSRPLRSILFMAALSASRSKKSLGDFYRRLLAHGKTKMVAMVALMRKIIVIANAKLRDAKQMQLS

SEQ ID NO: 237429 - protein, 456 aa, unidentified
MIPSKNQPISCVCPNASQNAYVNVHAQVISICPYQAMSNMNTENEIVCGADIHRDFLVATMISRKGLKLQERFSMNQDGLLEFKSWILNHKCQRVAVESTGSYWYPIFYTLEGYVEFILANAFQIRNIEGKKTDKLDSERIAVYCLNDLIKPSRIYPKDYRDLRSITRSREALVNARSKLKNQIHQLLATCCIKLSSVISDSFGKSGRYILDRLLEGKSIDQIISGIPSKRVRNKEDELRNAIRNGLDPVQLLLIKTNLDAIDDLSEKIKILDAEISIKVKPFEEDLNILLSVPGIGLTSAATILAEMGDYRDFASADKMAMYFGIVPSVYQSAGKLRTGKITKRGSKHMRRILVEVAKAISKTKKNSNLKRFFMRVYKRSGKKNVAAIALARKVLCIIYHLLMNREDYQEPEIKKTKPKISICGSPISAMDIDEMISTLSRAGYLVEKGFKEGCG

SEQ ID NO: 237430 - protein, 338 aa, unidentified
MPLYGGIDLHANNSVVVLLNEQDQVVSQKRLANHLPTILDLLAPYHAEITGLVVESTYNWYWLVDGLMDAGDWVHLANPAAIQQYSGLKYTDDHSDAHWLAHLLRLGVLPEGYIYPKAQRPVRDLLRKRSHLVEQRTANVLSIQNIIVRNTGSRLSANRIKQLSRNDVEGLLPDADQALAVTSALVVVRCLTEQIKAVEKRVSTRMQSTPLYELLQTVAGIGPILAQTILLETGDIGRFPHVGDYASYCRCVDSTKVSNGKRKGQGNVKNGNPYLAWAYAEAAHFAIRLHPSVQRYYQRKQTKTTVPVAHKTVAHKLARACYHMMRHQVPFDAAKAFG

SEQ ID NO: 237431 - protein, 389 aa, unidentified
MKIFVGIDIAKLNHFAAAISSDGEILIEPFKFTNDADGFQLLVSKLESFDKNSIIIGLESTAHYGDNLVRYLVAEFYQVCVLNPIKTCQMRKNNVRKTKTDKVDTFVIAKTLMMQDDLRFITFFDLDMMDLKALERFRQKTIKQRTRLKIQLTTYVDQVFPEIQYFFKSGLHQNAVYSLLKEAPSPKEIASMHMTHLANLLKVNSHGHFTKEQAKELRVLAQKSVGANDSSISIQITQTIQQIELLDSQLEKIEAEMTDIMRFNDSVIMTIPGIGYINGGMILGEIGDIHRFSNPNKLLAFAGLDPSVYQSGNFQAKTTRMSKRGSRVLRYALVNAAWNVVRNNATFKAYYDAKRAEGRSHYNALGHCAGKLVRVIWKMLTDEVEFNLE

SEQ ID NO: 237432 - protein, 456 aa, unidentified
MPRARRRPTRVATPPVVHPHAAGIDVGATELYVCVPMERDPQPIRRFGTFTADLLALAAWLGEVGVTSVAMESTGVYWIPLFQILETRGFEVCLVNARHVKNVPGRKTDVQDCQWLQYLHSVGLLRGSFRPPDAVCAVRTVLRHRERLVQLAAVHTQHMQKALTQMNLQLHHVLSDLTGVTGLAILDAILAGERDPAVLAQHRDPRLKASPETLAKALVGDYRPEHLFTLRQALASFRHYQRLVAECDTEVQTLLDAFPSTVDPAAAPLPPDPRPHRRRSAAQVELRTELYRILGVDLTRVEGFATIPLALFAELGPTLAAFPSSKHFASWLGLCPDNRISGGKLLAVQTRHVKHRVAQALRTAAQSLHRSQSALGAYFRRMRARLGAPKAITATAHRLARILYRLLTTRQPYDETQVAAAEERYHRRSEARLRAHARALGYHLVPAAPSSAGGVS

SEQ ID NO: 237433 - protein, 343 aa, unidentified
MSEITTIGLDLAKHVFQVHGVDASGATVLRKRLRRNQVLAFFAGLPRCLVGLEACATAHHWARELQLVGHEVRLMPAQYVKPYVKRNKNDGRDAEAICEATSRPTMRFVPVKSVAQQATLAVHGVRALLVRQRTMAANALRAALSELGIVAAQGLEGLRALMARLEAPSEEIPEMMRDALLALARQWQALDAEERGLERQITKAARADREARRLMEVPSVGPIIASTVLAKVPDAKVFRSGRDFAAWIGLTGKDHGTGGKHRPGRISKQGDRVLRALLISGASAHLRQQKRRGISDPWLRELLARRPYKVAMVAFAAKTARILWAMLVTGEAYRDRTSTSAAA

SEQ ID NO: 237434 - protein, 356 aa, unidentified
MTASYDYHIGVDYHKSYSHLVVQDSSGKTLRSGRVKNDRQSLGGFLERYRENSHAVVEATRNWMVIYDWLDDICDDVVLAHPLKVKAIADAKIKTDKIDATVLAHLLRADLVPEAWAPSERSRDLRVALRERMFYVRLRTMTKNRIVTVFDRYPEQTAQLKTLGDLFGKAGRIQLSQVNVSEIDRIQIDRGLAFIGDIDERIKQSEATIRAMTKANPNVRLLKTIPGIGEFFARLIDAEIDDIARFRNPKKLAAYAGLVPSTYSSGGKTYHGKIIKQGNKWLRWAFVEAVTPAIASDPQLRAQYEHLKIRGTNKARVAMARKLLTIAFQILRDQRAYEPRGESIITEGASMKSRLS

SEQ ID NO: 237435 - protein, 345 aa, unidentified
MELHTIGIDLGKTVFHLVSLNLRGEVVVRKKFSRKQLLHYTANLRVELIGMEACGGAHFLGRALREQGHEVRLMPAQYVKPYVKTNKSDFIDAEAIAEAVARPTMRFVPIKTDDQLDMQSLHRVRERWVMRRTAIVNQIRGLLLERGITLRKGRRYVDAALPGILEDATAKLSGALRVLLAQLKLELDQMAGRIDEADAVLNKTARENAACQRLLAIPGIGPVTSTALIAAIGNGAAFHKGREFAAWMGIVPREHSTGGKQKLLGISKRGNTYLRTLFIHGARAVLQQRAKQTSGLKAWLAQLSARTHPNVAVVALANKLARIAWAVLANNEVYRPLVLIGSATA

SEQ ID NO: 237436 - protein, 483 aa, unidentified
MKRQQRQTTQRVCHQRATLKPWSEMNRKQRRELQRKIQSEDLSLEVVHPDAAGIDIGNEVHYVAVPSNRSSEPVCRFGCTTAELKAMADWLKQCGIRTVAMQSTGVYWIAVFDILEAAGLEVYLVNARETKNLPGRKSDVQESQWLMKLHTYGLLRNSFRPPQEIRTLRTYWRQRNDLIQGAARHIHRMQKALTQMNIQLANVLSDLSGKRAQAIIKAILAGERDPHELAALCDSRVEAREEEVARSLEGNWQVDLLFVLQQEQEGFEFCQKQMAECDRHLQAYLEHRPDRSQGATLPEEKRKGRLKKKKGNSPRFDLRAELFRMVGTDLTLIDSIDVMTAMTILSEAGWDMSKWKTENHFVSWLRLCPDNRISGERIIGKGRLPTNNRVTVALKIAASTLRSSKTYLGAQFRRLRTKLGAPVAIKAMAAKLARLVYRMLRYGMQYSDKGFEFYEAQHRKLQINRLKWKASQLGFQIVEATAA

SEQ ID NO: 237437 - protein, 354 aa, unidentified
MIYVGIDVHSKKCTATLKHGSGSVIQQSTFDNTPSGINSLITTLNAMGESKAVVESTANYWIRIHDMLEDNGIDTILANPVKTKIIAKAKLKNDKADSNILCDLLRADLVYESYVPDSKHRMLRQLVRGRLELVQTRTTLKNRIHSILAKYNHASPCQKLFSNQGLEWLRTIELTPVDRLLLDANLQTLTTLTSQIELITEQIAKHSIEDPRVKLLMTIPGINYYTALTIVSEIVDVNRFATKWKLVSYAGLCPIQRDSGMKRWRGGITREGSRWLRNALVEAANTARLHDQRLGAYYERIAKRRGPQKAQVATAKEILCIIWHMLRNNEPYRTMNPQLVEKKHKRLEWRASMA

SEQ ID NO: 237438 - protein, 344 aa, unidentified
MEVAIGVDPSKSSLAVAAVDPLGRVVGTAEFSNDPRGHRALLGWVGERGPDRVIGIECSLSYGATLSRVLLRSGEDVREVPTTLTHRQRRRRASQGKSDMVDSVAIARIVASGEVLPSAHRLEVLADLRALVEYRDQLVRARTQVANRTHADLVNVLPGYERQVPNLRAKAHRTTARSLLRGDRSVRGELVRKRLGELSRLEGEIAAMDRRIRASVQKTGTSLTSIPGVGPFIAAKILGEVGDPSRIRSKPAFAVLSGTAPLSASSGQVQRHRLNRGGNRQLNWALHYIALVQCRIMPDAQAYMDRQREAGKSHKEAMRCLKRHLSNVVYRHLVADARRAELAA

SEQ ID NO: 237439 - protein, 355 aa, unidentified
MSQEKYIGMDVHQATISVAVMDAAGKLIMECLLQTKASTIVEFIQGLQGTLSLTFEEGTLAAWLHDLLKPHVSRIVVCDPRKNALLKDGNKSDRIDARKLAELLRGNQLHPVYHGAHGVRTLKELGRSYLTITQDVTRVMNRIKAVYRSWAIPCAGTTVYAPRHRAEWLAKIREPGVRVRAERLYQQLDLLQPVRLEARRELLAESHKHSSVKLLRQIPAIGPIRSALLVALLQTPHRFRTKRQLWAYSGFAVETHDSGEYRSVRGKLQRNRERMTVRGLNDNHNRDLKNLFKSAAISASTRPGPLRDFYVARVEKGMRPTMARLTLARKIAAISLTIWKKGVDFDAKQINQQAA

SEQ ID NO: 237440 - protein, 350 aa, unidentified
MIIIGCDYHPGFQQIAFVDTETGEFQEQRLAHREEAEKFYRDLAARGGKLRVGMEASGQARWFERLLAELDVELWIGDAAEIRAKRVRKKKTDREDARHILRLLVEDRFPRIWVPSWDNRDVRQLLWHRHRMVQMRTRIMNQLQAVALNEGLRCKKRLWRENGRKQLEAFPLAPWASRRRRDLLELLDRLNPTIAELTQEIEQEVEKYPAAQRLMTHPGVGALTALAFVLIIGEAERFECGKQIAAYLGLVPEEDSSGESRRLGHISKQGSGLMRFFLVEAAQVTVRSDAEWRNKFFHLAMRRGRKIAKVAMARRLAVRLYWMWRKQWDYEQLKKFGPHADQPGTGVGVK

SEQ ID NO: 237441 - protein, 339 aa, unidentified
MVYGAIDLHMRNSQIRIVDAAGSVLRDQRIMTSRERLVKGFSDFGVMRILVETGTESEWVAQVLEAAGHEVIVADPNYAPMYGELQRKVKTDRRDVAALAEANRRGWYRVAHRVSAAQRETRQRLRTRRQLVQMRTGAVSLIRSVVKQEGYRLPSCGAERVPARLAQLALPTRLATTVAPLARLIETATAEIVALDRDLRVRAATDPIVPRLMTVPGVGVIVALTFRTQLDTIDRFTHAGQVSATLGLVPREDSSADRRHRGHITKAGPRELRSLLVQAAWVCWRSKQSAALRAWAEQLAARRGRRIAVVALARRLSRILYALWRDGSTFDRSKLAAAA

SEQ ID NO: 237442 - protein, 343 aa, unidentified
MQAVTTIGLDIAKSVFQVHGVDAAGQVVIRRRLKRRYVLTFFQKLPSCLVGIEACASSHYWSRELQALGHTVRLMPPAYVKPYIKRQKNDAADAEAICEAVTRANMRFVSTKTPEQQSCLMLHRTRHLFIRQQTAVINAIRAHLAEFGIVAPVGRNGVEELLGVVADPSDKRVPEVARTCLAALGAQLRMLKAQILEFDRMINAWHRSNETSKRLDAIPGVGPALATALVASVSDPKAFRSGRDFSAWIGLVPKQHSSGGREKLGSISKQGDRYLRSLFTAGALAVIRYAKIHGTKHRPWLTALLARRPTKVAAIALANKIARMAWAMMAKGERYKEPVALAA

SEQ ID NO: 237443 - protein, 343 aa, unidentified
MSTFYYIGLDIHKRIISYCIKAIDGRLIAQGKIEAGRRSLGEWVKGLPGPWVGAMEATIFTGWVYDFLKPYAVDLKVAHPEMLKAITAAKKKNDRADAEKIADLLRVNLLPECHMLSEEIRELRRILRYRNHIVRTAVKMQNKISGLLMEVGVSYSKKRLHGRRYFRELLERVEDIPPSVKELLKLSRSSYEMFLSFQKRLVETLRTDSLIGDRVERLMTIPGVGELTALTWVLEIGDSGRFASIRKAVSYCGLCSAQRESAGKEQRGPISKKRNKHLQTMLIEAAKLAPRWNEQLAIVHERELKKGDRNRATLAVARRLVAYMLTVDKKQADFKFPAEMQAA

SEQ ID NO: 237444 - protein, 350 aa, unidentified
MTQKRVGYHGKSVFVGLDVHKEFYQMVCRCNKVVVKKARVIADPEQTAASLCKWFEGAKIHSAYEAGFSGFGLHRVLIRHGIKNIVINPASVAQAPGDRVKTDDRDADKFSEQLEAGQLEAIYVPSESQEYDRQLTRTREQVVKKRACTARQIKSKLHYFGLMKRDDNRLITNRYLKEIENLRLDQTLKFSFGLLISDWRYQTRQLIEVRQKMQEQAKKSRDFEEIYRSVPGIGQVTARVFSNELGDLSRFPNVKALYQYLGFTPWEDSSGSRIRRGHISRQGSSRLRYLLVEAAWRAINKDANLREKFDRIAKTRGSKRAIVAVARNLIGRIRACFNAGSFYVKAPMSV

SEQ ID NO: 237445 - protein, 368 aa, unidentified
MHPDAAGIDIGNESHYVAVPPSRDSQPVRRFGCTTAELKAMADWLKQCGIRTVAMQSTGVYWIAVYDILEQAGLEVYLVNARETKNLPGRKSDVQESQWLMKLHTYGLLRNSFRPSQEIRRMRTYWRQRNDLVRAAGRHIQRMQKALTQMNLQLANVLSDVSGVTGQAIIKAILAGERHAHKLAAFRDCRVKASEEEIARSLEGNWQEDLLFVLKQEQAGYEFCQKQMTECDRQIEQYLQQREDRSRGASLPEEKRKERLKKKKGNAPQFDLRAELFRISGTDLTRIDGIDVMTAMTILSEAGWDRSKWKTEHHFVSWLRLCPDNKVSGDKVIGKGRLPTNNRVTIALKMAASTLWASNTYLERSSAD

SEQ ID NO: 237446 - protein, 320 aa, unidentified
MNVNIDPVYVEVDVAKATLQVHLRGAQIELTNAPAGRAKLCKKLQAIPGAHVICEATGGYEQDLVQSLQKAKLNVSVVNPAQVRASAQAKGQRAKTDAIDALMLTDYGQRYRPAPTPPASKVQRQLAALTQWLKQLIDVQAIAKTQAEHHSDRFVRKQHRALIEHYQSQIETTEAKLKLLMEQDQVLKQRVECLDAIEGVGLRTAMVVLTHMPELGQLNRQQVAALAGLAPWTRESGTMKGKRCIGGGRPKVRVALYMSSLSVIRCNPTLREFYQRLIAKGKLSKVALTAVMRKLLVYMNHRLKSLATQTASASGQKITA

SEQ ID NO: 237447 - protein, 427 aa, unidentified
MSYRIAAVDVHKKMLAVVVADVAGEGEYQFERRKFGATPGELHVLAQWLDQQEVEEVVMESTAQYWKPVWGALEQYWKPARQKREGASQMCGTLHLCQAKSNRGPRGRKNDFADGERMVKRLVAQELVLSFVPEPEQRLWRTVTRRKHQLTRAKVAYKNQLEGLLEQAHIKLSSFVSDLLGVSARRMLQALADGETDPAALAALADRRLRATPEELRDALGASAQLNGTYRRLLKQALEELQVIERHIEQLEREAMGLMQEHQDVVRRLAEVPGFGPDSALQMMAEVGPKAAAFRTAKKLSSWVGVCPGNEESAGESHSTRSPKGNRHMRRLLNQAAQSAVKVKGSIFELTFSRLLPRLGYQQAIWAIAHRLCRLLWLILHKGVRYEERGPAVSAKSKRTRATRMIRELKKLGYRVEGGPIPAATRA

SEQ ID NO: 237448 - protein, 396 aa, unidentified
MISVGIDVSKGKSTVCIMKPCGEILESPFEIGHTADELDSLISLIKSFDEETRVVMEDTGHYHLPVATYLSSHNIFVCCVNALRMKKFCSQSIRRAKTDKIDSIKIASFGITYWNELVKAYPSNVIYDELKFLARQYYQVTGMLVKSKVNFSNLLDQVMPKINDVLSNQGENHKLTEFVSRYIHFQNILDMGEMKFTSDYCKWAKKKGYRLNERKAAEILALAQNGIPTLPNSQSVKIAVSEAVKLIHSIEESRNTILAQMQDLCNTLPEYSVVKEMDCIGDTLAPRIIAEIGDVRRFKNKHSLIAYAGIDAPPYQSGAFHASERHISKRGNSYLRKTGYEIMQSLIKHKPADNAVYDFIQKKRSEGKCGKEAMIAGLNKFLRVYYGKVMEFYSEH

SEQ ID NO: 237449 - protein, 332 aa, unidentified
MQYVGMDLHKQDLVIAVEDERGPVGHPRRFPCRDEAAIVAHMSALRPFRAVVEASSSYRWLYDRLRPLGEVILAHPLRLRASIARPAKTDKLDAALLARLLRMDQIPEAYAPPAAYQELRELTRARARLSRSATQAKNHLHRLLAARNIHAPYTHPFGVRGQRWMRSLDLGFVGNLERDELLGRLEHYDRERERLDAVIAEQAQEFPQIEALRDIRGIGTYTALLVVAEIGEPERFSEPGQVSSYAGLAARVYQSGGHDYHGHITRQGSPWLRGALVQAAMMAIGKDRALANFYERVRKRSSRHIARVAVARKLAEICWIRLRRGHRERAAA

SEQ ID NO: 237450 - protein, 359 aa, unidentified
MQTQRKELNFEGQSIYVGIDVHLKSWSVSIFTEKLHHKTFSQPPKAELLFNYLKLNFPNASYFSTYEAGFCGFWVHFKLKEFGINNIVVNPVDVPTTQKDQVRKTDAIDSNKLGRSLRKDELKGIYIPQPETLEDRTLIRVRFTIVKDMVRHKQRIKSFLNLYGIEYPDEFQNTNTHWSKRFINWLKTVQLQFPTGTDALNLLIKEAEQQRLILLEATQKIRILSRTERYTNNIELITSIPGIGLITGMMLMAEIEDIKRFDNSDKLAGLIGVVPDCHSSGPSEKKGEMTKRGQYFMRKGIIECSWVAACKDPALSLAYYEYCKRMEPNKAITRIARKLINRIFSVLKNEKKYEFGIVK

SEQ ID NO: 237451 - protein, 338 aa, unidentified
MTVVTVGIDLAKNVFAVHGVNAAGKAVLVKPLVRRAKLLELIATLPACLIGIEACTGAHYWAREFQKMGHTVRIMAPQLVSPYRMSGRHGKNDAADAAAICEAVTRPNMRFVPIKSVEQQGQLFVHRAHQGYVSERTALINRIRGLLSELGIILPQAFKAFLSGVAQVLEDLPGYCNQVIGDLLNELYHIEEKIKNSEKLIQQLARGNSAAQLLMQFRGIGPMTATAIVASIGNGHDFKNGRQFSAWLGLTPRQQSSGGKARLGRITKAGDSYLRTLLVLGARSVLLGAAKNDDPVSRWALQLKERRGYGRALVAIAAKNARMCWAMLHLRDEFRFPA

SEQ ID NO: 237452 - protein, 353 aa, unidentified
MAHRKRPRVTIGVDTHLDVHVAHAKDQLGRRLATVSIPTTPAGYRDLLAWARGLGAVEAFGIEGTGCYGAALARFLRGHSQVVLEVNRPDRQARRRRGKSDPLDAEAAARAVQAGEVTTLPKAGNATVEMIRSLRVARASAIKARTQAINALKALLVTAPEDLREQLRGRSVVVLVRLAVALEPGKLDTPTAAAKLALRCLAARCQALDAEVATLDTELDRLTANAAPGLVALFGVGPDSAGALLVAAGDNPGRLRSEACFSMLCGSSPIEASSGKTTRHRLNRGGDRQANAALYRIVVVRLRWHQPTKDYMARRIKEGKSKKEIIRCLKRYVAREVFAVLHQMDQDTLTPAA

SEQ ID NO: 237453 - protein, 337 aa, unidentified
MKYCGIDLHSNNCVVIISDEEDRIVFSKRLPNDLGQIRAALEPHREELTGLVIESTYNWYWLVDGLMDTGYRVHLAHPSAIKKYEGLKHSGDFADAAYLAQLLRLGLLAEGYIYPREERGVRDLARKRMQLVRYRTAQILSIENIVTRQTGARLKGEAVKRLTAEQVDEFAFAPDVTLAVEANRAVSQALGQQIEALERRLKERVSLRPEYRLLKTVPGIGETLATTIMLETGCIGRFAQVGHFSSYCRCVDSLRESNGKKKGEGNSKNGNKYLAWAFVEAANFALRHCPQAKRFYDRKKSQTNRVLAIKALAHKLARACYHMLRDQKPFDVSRCFG

SEQ ID NO: 237454 - protein, 419 aa, unidentified
MSFKIIKNNCCGLDVHKTWIYACIGITDSHQRTEYKQARFSSFTKGLNELCDWLAKYNCKDVCMESTGKYWIPVFNVLEKHDLWVTLSHPKYTKPMKGNKTDRKDAKWICDLYMCGMVKPSFIPPADIRELRDLVRYRFKLTCMITSEKNRAHNCLTVSNLKLDDVFSDMFGKSSRSITEQILQHPGETFDVAPFVDGRCKTPIEEIQAAVDGALSKEQAVKLRQCLNHIDELEQHKSEIEREIFRLSEKYAAALDLMRTVPGFNKNPLTAIQVLSEIGGNMSVFPTAKHLVSWAGCCPRNDQSNQKIKSTRISRAGSYFKPVLVQVANALIKSKKHPEFVSRYRRIKARRGHKKAIIAICRMLLTAIWHILSDLKPYTPEGFLEQRPVKEDKILTTSQALNLLKQRGYTIKDEPAAAS

SEQ ID NO: 237455 - protein, 345 aa, unidentified
MKHYAGLDVSVKETTVCIVDEGGRICREMKVASHPDDLAETLKNPAWNLARIGLEAGPLSQWLFSGLAAAGLPVICIETRHTKAFLKAQVNKTDRNDARGIAQMMRVNLFRPVHVKTLMSQKRRALLTARKLLQEKAIAIENDIRGLLRNFGLKVGIVGANKFADRIRDLSGDIPELRDIMEALLTARQKLREQFTVLHERLLSIVKGDTVCRRLMTVPGVGPVVALAFNATVDIPARFKNSKAVGPALGLTPRLHQSGEDNRVGRVSLCGDAMMRTLLYEAAQVLLTVVKKWSWLKAWAMNVAKRRGRQRATVALARRLAVIMHRIWSGGSEFRWAREEATAVI

SEQ ID NO: 237456 - protein, 341 aa, unidentified
MSEFTRVAIDTSKHVFTIYAVSTAGEVVRKELRRERLLAFLAKLGPTEVVMEACGSSHYWGRELQALGHRVRLLPPQYVKPFVRRSKNDSNDAEAIWVAAGQPSIRNVPIKSLRQQADAMLLKVHEQLTGRRTAVVNALRGHAAELGFIAAKGERGLGELRQSLAVAPDAEVPAAAKRALAVLGRQIDQIETQLVEVEAELKRQFKADADSKRLSAIPSIGMIIALTLTRTVDASQFNSGRHFAAWIGIVPREHSTGGKHRLGGISRAGNERLRSLLVNGAMAVIRHFSPGRKGPLMAWLEALLKRKPRKVAAVALANKVARIAWAMMTSGEAFRLLPRAG

SEQ ID NO: 237457 - protein, 399 aa, unidentified
MNEFNITTQDLETTSALELIMQTPSAAIYPAYVGLDVHKDTIAVAVAPAGRQAPEYHGEIANKPKNIAKLVARLSQAYGGEVLLFSYEAGPCGYTLHRQILSLGHDCEVVAPSKIPSKPGERIKTDRRDALKLAASSRSGDLTAVWVPDIEQEAMRDLTRARDDMKAQQRKARQQLNAFVLRHGHAWPSNKTRWTKGHYAWLASLHFAHDWQYGVLQDYINAVQAATDRVSQLNAQLERVLPQWSLAPVVYSLVALRGIDKLAAMVLLAELGDISRFDSPRQLMSYLGLVPSEHSSGSKRRQGAITKTGNRHARRILVESAWSYRFPARQTAHMKRKMAGASPEAKAIAWKAQKRLCGRYRTLIQAGKNTKQTTVAIARELIGFIWAVVCQEMPKLQAA

SEQ ID NO: 237458 - protein, 340 aa, unidentified
MMTITTIGLDLAKSVFQAHGVDASSKVVLTKRLHRKQMLPFFSKLPPCLIGIEACATAHHWGRTLAAMGHEVRLIPPSYVKAYLKRGKSDALDAEAICEAVQRPTMRFVPVKTVEQQSILMTHRTRSLLVRQRTMAANALRAHLAEFGLVANPGIANLMKLADHAFAGEELPAYARRALEILIRRLAELTEEINELDQELAAWHAESETSRRLAAIPGVGVITATALAASVTDPDQFRSGRQFAAWLGLTPKQNSTGGKTRLGGISKQGDRYLRRLLVIGATAVMRHAKKLQTPMANWIMRMMEKKPFRLVSVALANKLARIAWVLLTRAEAYRPYAHMT

SEQ ID NO: 237459 - protein, 431 aa, unidentified
MPNEVPREQEIVAYVGLDWADQQHVICWQAADSAAVQSAVVQQRPEELQAWVAELRQRFPQGLVAIALEQSRGAVIAALMHFDFLRLYPINPKSLARYREAFASSGAKDDPDDAALLLELLVKHRDRLTPWVPDDALSRELALRVEHRRQLVNLQTKLIQQLRSHLKVYFPQALDWVGELDSLQACDFLQRWPTLAAVQKARPSQLEKFYHQHHCRRPQLIQQRLEQIRQAQPLTQDSAIVPAYSQMVLALVAQLRVLIPTLQQWQQQISQLFAQHPDAALFASFPTAGPVFAPRLQAAFGSRRDRFGSAAEVLQFSGVAPVTKRSGKSRQVQRRWARPKFLHQSFVEFTGLSIPHCCWARALYQQLRARGHRHWAAIRVVAYKWIRILFRCWQDRVPYDEQKYLKSLERRNPTLWAAIQQLPAQPSRKEV

SEQ ID NO: 237460 - protein, 366 aa, unidentified
MEKGITSVGLDAHKVAIIVAMLLPGRSVALLWECANEKASVRRMVRKVMREAPGEVRFCYEAGPCGYTLQRWIREAGAECVVVAPSLIPRKSGDRIKTDRRDARKLADLYRAGVLTEVHPPTEEDEAVRDLCRAREDAHEDLVRSRHRLSKLLLRRGWQWLEGKKAWSKGHRLWIRSLRFEHPEDQLVLDDYLLTIEQVEARLAALDQQIEKVSQQERYALVVGTLRTFRGIDTLTAMTLVAELHDFMRFDSARGLMAFLGLVPSEYSSGGKQSRGPITKAGNGHVRRLMIEAAWHYRHRPSTVSLKKRRTGQPTQVIALADKAMLRLNRRFNRLLERGMPRPKVAVAIARELTGFVWAAMRLRPQ

SEQ ID NO: 237461 - protein, 342 aa, unidentified
MDQIIRIGLDTSKQNFQLHGVNAAEEPVLRRKLRRTQMMAFFAAQPRTVIGIEAGGAAHHWSRTLSAMGHEVRIIAPQFVKPYVKRGKNDAADAAALCEAMSRPCMRFVPMKTAEQQAALMLVSLRDRLIRSRTQLTNAIRGHAAEFGVIAARGVDKIDPLLARLANDESLPALARSLFAHLGAEFAQTQGRLNQVSAALMAWHRHNELSQRLTQIPGVGPIGATLLALKTLDPSGFRSARHFAAWIGLTPKDHSTGGKTRLGTITRAGDEGLRSVLVVGATALIRQVRRSRGRPWPWLQQLLSRKPPKLVAVALANKIARIAWKLMTSGQSYDAAHGTRSA

SEQ ID NO: 237462 - protein, 396 aa, unidentified
MKTYKLNSTPVEPQNKAQPHAAPSGPALFIGLDVHNDSIALSIAPSDSTEVRRWGVIGGTHEQVQRFVKQIQAVHPDATLKFCYEAGPRGFPLVRFLRGLGHECIVVCPSRVPRAPGDRVKTDRRDADQLARLHRAGELKGIHVPEPEDEALRDLLRSRDQVRRAQHRARQQLKMFLLRHNLRYTGTTSWTPAHLRYLAKIKMPFPAQQFALQELMNQITALGQQLERFDAQLEREVAGWRWEPAVRALMSLRGVGRLNAATLIAELGDLQRFTRPAELMSYLGLVPSEHSTGEDRRQGGLTKMGNGYARRALVEAAHHYRVSARISPPLQKRQEGLPQGVTDCAWEAQRRLHHRYRQLSGPGRKKAPVVIAAVARELSGFVWAIARQMKPHERKG

SEQ ID NO: 237463 - protein, 321 aa, unidentified
MVLGIDVGKQKLSVAVFYNDKFKTKTIPNNPDGFETLWSWLSRFDRLPEHVCLEATGSYGEAIATFLHDQGLVVSVVNPTLIKGFAQSEGVRTKTDKVDARIIAKFCHSKQKTLPQWQPAPPEQRELRDLARRLEALKNMRVQEENRLNGTWGDTARKNLIEHIGYLDDQIAQLEKLIKDHIDRHPGLRRQSDLLKSIPGIADLTSACLLAEIQFDQFSTARQVAAYVGLTPSDRQSGTSVKGRPRLSKIGNHRLRKALYMPAMAAIRHNPVLSAFAHELKRKGKPGKVIIAAVMRKLLHIAFGILRSGRPFTPDYHPNFS

SEQ ID NO: 237464 - protein, 386 aa, unidentified
MQASSMDTPTAGYCGTIFVAIELSQRSWLVTMHCPDRDKISHHRLEGGDHAGLLALVDRMGERATRALGVTPAVVSCYEAGYDGFWLHRLLMAAGITNHVFDPASIAVDQRARRVKTDRIDGEKMLRTLMAYLRGEPRVVRIVRVPTPEQEDARRASRDRGRLTKEQTAHTNRIKALLRLLGMAIGNPRRRDWLSCLATQKDWQGQAVPPQIMAEIKREHARLMLVREQLEALARPLAAADLTPAAAQMAQRSELLLRLKSLGPAFATTLTHEVFYKDFRNRREVASYFGLTPSPWQSGGTDRDQGISKAGNPRARCAAIEMAWLWVRHQPDSKLTQDYRRRTLNASKRIKRIAIVALARKLIVALWRYLTTGLVPEGAMLKAVEM

SEQ ID NO: 237465 - protein, 402 aa, unidentified
MNCVGIDISKGKSMIAVMRPFGEVVVSPFEVLHTDSELSKLARLLKSLDGETRVVMESTGNYHAPVAWLLHDAGLYVSVVNAMLVHDYGNNSLRRGKTDKKDAVKLANYGLDHWLTLPRYVPEEDTRLMLKTCYRQYQQYSKVQTMLKNNLISLLDTAFPDANRLFTSPPRADGSEKWVDFVATFWHCECVCGLSKKAFTAKYQKWCRKHGYNFSQDKALDIYASACGRFGVMPKTNTAKLLVEQAISQLQTTSAALAALKQEMQSLAASLPEYPVVMGMFGVGPTLGPQLIAEIGDVRRFHSKKALVAFAGIDAPPYQSGQIDVRSRSISKRGSASLRRTLFLVMGVLLQCAPMDEPVYQFMNKKRSEGKPYRVYMMASANKFLRIYYASVKAYLDSLEHN

SEQ ID NO: 237466 - protein, 353 aa, unidentified
MKTYYVGMDVHRASIVMVVLNGAGKVVMQSVIETGAERVRGFLKQLRGKVYVTFEEGTQANWLHEIVRPLVTEVVVCEPRHNKLLQSGNKNDRVDAQKLAELLRNGALKAVYHGDNGVRALKELVRTYDCLTSDTTRVMNRLKAIYRGRALGCAGHDIYRQDRRVQWLEKLPERGAKQRASFLYQQLAALKPLRHEAKRMMVKEARRQPAYPWLMSVPQFGSVSVAQLLAIVGTPHRFRSKRQFWTYIGLAVVTRTTADHEVVSGVLRRSKRPVSTRGLNRNHNHLLKRVFKNAAKGACHSGPFKASYELRVTQGMVPSLARLTVARQLAAITLAVWKRGEQFNPERMKQQAA

SEQ ID NO: 237467 - protein, 346 aa, unidentified
MNSLPHLWASVGLDYHDLVIQVCVLDDQGNMLGNRSVPNNADAVYEFVDRAAEGRLIRAVAIESCCGAANLAEQLRKFQWDVQLGHAGICARMKQNPDKTDYSDAHLLADLVRVGYLPRVWLPPAAIRDLRRLGRYRQQLADRRRNVKLRIRAMLREERIIAPPEVGNPWTIAWKRWLKESAHLDEHSRWVMDEHLENLERVSAKIREVERRMETATADDPVVQQLRQTKGVGLVTAVVMRAEIGSFDRFQNGKQLARYCAVTPKNVSSGKRQADGGLIKAGNLCLRTMLIEAAHRLARYVPRWRQMKERLKAAGKPGSVAAAAVANRWIRGLYWEMQEIALQTAA

SEQ ID NO: 237468 - protein, 407 aa, unidentified
MDPVQQGPVFAGIDWGGGEHQLCVVDRDGRKQLEKRVSHDVAGLNELVHQLAKHGDGVPVAIERAEGLLVEQLQAHGHPVFPVSPRIAARARERYRVAPVKDDRFDAFVLADTLRHEHGHWRPLAVPSPLLAELKALTRDRDRLLEAQQGTEAQLRAILESYHPAPVRLFSSLDRQIALAFIADYPTPAVASRVRTTRMAGFLRRNGYTGRVPAQVLAERMRANLLSGSVGTVAGKAHSAKTFASLLGVMNEALAEFDDAIASAVAEHPDAEIFATFPGVGPILTAVLLAEIGEDRSRYPTPQTLLAESGLAPVTRSSGRSRSVRFRYAANTRLREAAMWWAFNSLKTSPWAAAAFRQARDQRGQRYHRALRGLAARWMRVAWRCWQDGVAYDPALHTGAAIAESST

SEQ ID NO: 237469 - protein, 408 aa, unidentified
MPEQVVTTHVVGIDIGMESCTMSCLTVDKRQVIKSTSFANTLAGFDWLFERLEGLGVARKQILVGLEATSRYGENLYHALLKRGYRLGLLHPGQIHAFAQQRGLRAKTDRLDAATIARALLSGEARFGYIPSDQVVTYRELTRLYQQLTGEVVRYKNEIHALLVVLFPEFTLVFADPSRPSALTVLKAYPSAQAMQEAEPKLLYQILREQCPGRYGRKTADKLIHLAKASVSGGVAIGARSSSMRILCDQLEHTQKNLELLQQEIERLLDSDPKARSLLAMSELGPMTVAVLRAELGDLDRFARMDQVVAYVGLDLQVKQSGKWKGQTKLSKRGSGHVRRILYLAALRSMRLPTSPFGIFYHRLVDRGLKKGMAVIAVMRKLLIVAAHLIQTQQDYDASKVGVQALRA

SEQ ID NO: 237470 - protein, 366 aa, unidentified
MKKNSTVAVGRKQILKQARLTIALDLGDRTSYYCILDAAGNVIWERSVPTTLNGIRQGFGRMPRCRIALETGTHSPWVSRQLSEMGHEVIVAHARKVQLIGQSSRKDDQLDARTLARLARIDPGLLSPVKHRSAQAQIQLTVIRARAALVSTRTALVNAARGLTKSYGQRLKKCGTEQMNRDSSEGLSQELREALDPLLREIESLNERIAEYNRRIEKIAKEVHPEVARLKQVQGVGTLIALTYVLTLDEPHRFRRSRDVGCFLGLRPGRRNSGQSEPQLHISKEGDRYLRTLMVQGAHYILGPFGQDSDLRRWGLKLAERGGKNAKKRAVVAVARKLAVLLHKLWVSGEAYEPLRNNHKGARAVA

SEQ ID NO: 237471 - protein, 313 aa, unidentified
MQNSFIGIDISKNSLDVHVLPENVSYSYPYETQKVKALIRKLKKHNPVLIVMEATGGYEISIAAQLSAAGLNIAVVNPRQIRDYARAIGKLAKTDKIDAYVIARFAQDVKPEARQQLTVKELQLKELVMRRQQLIDMRTAEKNRLSRAYAPQVIKGIQKIISTLDAHIDALEEELSNQIKSNPSWDQKVELITSVPGIGTNTAHMLLFCLPELGRLNRKQIAALVGVAPMNRDSGMLKGKRTITGGRAIVRKVLHMPILCAVTRWNKRLKELYTHFMAKGKKHKVALTACMRKLITVLNCMLKNNQFYNPNFC

SEQ ID NO: 237472 - protein, 339 aa, unidentified
MELYCGMDLHSSNTVIGIIDEKRNRLMDRKLPNNPELIRNFLKPYKAELRGIVVESTYNWYWLVDMLQEEQYRVHLSHPVANQQYQGLKYSNDKHDAFWLADLLSLGILKEGYIYPRQVRPVRDVLRKRAHLVRVRSALIVSLQHLIHRNCATKVRTGDIKRLTADLVSPFLGKEEALLLAGTTSKEVIDCLTRQIDKIERWAFQHLRREGVFMLLVTLPGVGDILGMTILLETGPIVRFREVGHYASYCRKVSSQWTSNEKIKGRGNIRNGNRYLAWAFSEAAEHARRTNETCRKFYDRKLRKTNTKVAHNALAHKLARAAYYIMKDHVPYQEEKMFS

SEQ ID NO: 237473 - protein, 416 aa, unidentified
MNAAGIDVSSRKSTVAVLRPFGEIVHVPFDVVHNTEGLASLAEQLKKLDGETRVVMEHTGRYYEPIAKALHEAGLYVSAVNPLLIKEYGGNSLRRVKTDKADALKIARYALDNWTDLRDYTPMDTIRYDLKTLNRQFQLASKQRTASSNNLIALLEQSFPGIRKCFESPVRSDGTQKWVDFAYTFWHVDCVRKQSLNAFSERYRKWCKRHGYFFKQDNAEEVYTLAKNAVVLVPKSDVTKVLVQEAANQLTSISRSVETYRAEMDRLASMLPEYPVVMEMYGVGSSFGPQLMAEIGDVRRFERKQSLVAFAGIDPMPNQSGEKNVRSNRSSKRGSPYLRKTLFNIMGIYLKCSPAEEAVYQFLDRKRAEGKPFYVYMTAASNKFLRRYYAKVRDHLATLDNLPPVDMDSTGLQGNN

SEQ ID NO: 237474 - protein, 421 aa, unidentified
MKFKAQDKQNQLIENITVHHLVIGVDIAQEFHVARAVSFRGIALGTPLEFGNHLEGFEMLGRWIHDLLKVYKLNKVIVGMEPTGHYWLNLARWLSSQSIESVLVNPHLVKKNKENRDNTPSKSDRKDALVIADMVKNGYYSPVRFHPEAYEELRILMANRDTVTKRLNSAVNQIHRWVDIVFPELRQVFKILTCTSAIATLRLFPLPEEICRLTTEQVLAGWKQYVKRHAGAKRAEQLIVLAKSSVGAKQALHAYKLHLGQLLEEYDLAKRQLEQIEHELHLTLKRIPYAQKLLEIQGLNATSLAGVLGETGDLSGYAHGNALLRHAGLNLTEASSGKWRGKMSLSKRGRPRLRRFLYLMTMCMVMTNSDIRALHHFNVEVKKLKKMKSIMKLCGKVARMLVGLAKSCEGYDSAKVFPQAA

SEQ ID NO: 237475 - protein, 374 aa, unidentified
MDVHSTSYTLCAMEPVLGGEDRIFANIQVTSDYRNVIQFIDKLKEKLGSSDSYSIECGYEAGCLGYSLYHQLTKSGVKCTILAPTTMLTQQGKRVKTDKRDAVMIAQCLSYGGYHAVHVPADKDVSVKEYLRMRDDHKVALKKIKQQINAFCLRQGYFYAGNKWTIKHLNWLKKLVLSDLYRETLNEYLTSYEEQTAKIERFDKRIEELAEDSDYQENVKKLGCLLGIKTHTALSLIVETGDFKRFRKGNTYAAFLGLAPGESSSGEKISRTGITKAGNSHLRMLLIEAARGMCRGRIGYKSKVLRSRQDGNPTEVIAYADRGNTRMRSKYYRMIRHGKKDNVAVAAVARELACFIWGLMTNNITPKEEGTKVA

SEQ ID NO: 237476 - protein, 343 aa, unidentified
MEYFVGMDVSMASISICEIDAKGTVIREGKVSSTPEAVATWLEESGRGFARIGLEAGPLAPWLYAGLSSRGLPVICIETRQMKAFASASPVKTDRRDARLISQAMRTGLYRATHVKTARSQELRMVLTHRETLVHQVRQLSNTVRGTLKAFGLKVGMARGRLFAARVRELTADNPHLSAAAEPLLLARQALLEQLDKLDRQVHAAARDDSVCRRLMTVPGVGPVTALAFRTGLDVPERFQKSVMVGAHFGLVPRRYASGEQDRSGPISKCGDAMVRWLLFEAANALLTRTRRWSWLKHWGLAVAKRRGMKRAKVAVPRRLAVIMHRMWIDGTDFQYRKEETAI

SEQ ID NO: 237477 - protein, 456 aa, unidentified
MAKRRQTKRVKQGVVDALGQINPNAAGIDIGGEEVYVAVPPDRDEESVRSFPTFTADLQRLADWLKDCHIDTVAMESTGVYWIPLYEILEERGFQVCLVNARHLKNVSGRKTDVLDCQWIQQLHTYGLLSPSFRPPEQIVAIRSLVRHREMLVQYRSAHIQHMQKALTQMNLRLTNVLSDITGVTGLKIIRAIVAGERNPRVLAGFRESGCKKSEAEIAKSLEGHYKREHLFALKQALELYDFYDRQLRECDAELEVLYQQFDPPKDPGTPPPTPRQAKRRKNQAHFDLATALYRMTGMDLTQIDGLDALTVQKVLSETGTDMSMWPTVKHFASWLRLCPNNKITGGKIIQTGVQPTQNRASSALRVAAASLKRSDSALGAYYRRMRTRHGAPSAITATAHKLARIIYFMLKERKPYHDFGADYYEQQYRTRVLRNMNRQAAKLGFRLEPVVREVS

SEQ ID NO: 237478 - protein, 345 aa, unidentified
MLKIDHAGIEVSSKELIVALRRDGKLKPWKSFPNTPGGHQAIVRYLARQGHPVRVCLESTGIYGLDLALALHAAPGIEVMVANPRAVRHFAQALMQRSKNDRLDALVILEFATRMPFQAWQPPSPAARHLCALARRLEALTELCAAEKNRLHAARATETSPSIIRRDLESSLRFHERAMQRLEEEALKVIAQEPELQHKFDLLLSIRGIKETSALQILAGLAVLSPDLDVRQWVAYSGLDPREYSSGSSVHKKTRISKAGNRHLRRALYMPALVAACREPHFRAYYEHLLARGKTKMQALVAVMRKLLHAIYGMFRHQMPFDGGKVYQLPQAVVANSASCTKEVA

SEQ ID NO: 237479 - protein, 311 aa, unidentified
MSENTADYVGVDIAADHLDYCVNETDEGRCVNTLAGRAELIAKLQHLPHPRVICEASGGYEKLVVAELLASGIEVCVVQPGRVRAFACAEGLLAKTDRIDARLLRRYGQKIQLRLAVPVDAQVATLRELLEHRRALTTELCEVEGRLRLAGATLAKLLGKQRDFLKKQIERVEKMIREHIGNDPDLRNKSERLQQIEGVGPILSATVLAYVPELGKIESAQASSLIGVAPHPKDSGKSRAPRHVRGGRAQVRHVLYMAAVCASRANPILAAFYRRLRANGKPALVCLVAVMRKLVCLMNRLIQDPNFTLAH

SEQ ID NO: 237480 - protein, 346 aa, unidentified
MRYSTTVGVDLAKNVIQISVVSGRGDEQLNRSLTRKKFAEFLGKQKPSLVAFESCASAHYWARTAERHGHKPRIIPAKAVAPFRQGHKTDANDALAVAEAARRPKIKEAPMKTVEQQGLQAMQRARELLIQECIALSNHLRGILLEFGVTIPQGFASLLRALPEVLEDGDNELPDFYRPTLHRLYGRMLELREDIEAMTREADVLVKAHPVCSRLTALEGVGPIGAMSLYAVLGSGEAFTKSREFSAYLGLTPRQLSSGGKTNIFGISKKVGNRRLRSVLIQGALAYVYRMKEPRSRKDRWLKDLIERAGPRRAAVALANKNVRTAWALVTQGTEYQRRGQLEMAA

SEQ ID NO: 237481 - protein, 456 aa, unidentified
MSQTKRSGSRTGLSAVHPAAAAIDIGATMHVAAVGPDRDTEPVRTFQTFTDDLHRLADWFARCGIKTVAMESTGVYWIPVFEILEQRGFEVMVVNARDAKHVPGRKTDVSDAEWLQRLHEYGLLRPSFRPQAEIAGLRAYLRQRERLLDYAAVHIQHMQKALMQMNLQLHHVVSDITGVTGMTIIRAIVAGERDPNVLASHRERGCQASVETICQALAGNYREEHVFALSQAIELYDVYQTKVAACDKQIEVILQRLKQSATPPASKLLPPKHRSRPPNAPSFDARAALHAILGVDLTQIHGLGPYLALKLVGECGINLSAWPTAKHFTSWLGLAPHNKISGGKVLSSKTRRTSNRAASLLRLAAVSVGRTDTALGAFYRRLAARAGKAKAVTATARKIAVLFYNTLRHGMSYADPGATYYEERHRRRVLANLQRRAKSLGYVLHQADRDPIQAVS

SEQ ID NO: 237482 - protein, 319 aa, unidentified
MQSSPMIHGVDVAKDELVALCLGQDVVCRLRNCAADIRSWLRKLPKGSIVAMESTGEYHQLLARLAYAAGMRVFVLNARRVYFYAQALEVRGKTDRVDAGVIARYVCEHGHKLHEWQPAPALHGRIDELIRRRAVLVVKRESLRQCMRGCKDVQAQFKQLDHAIDSLVSFIDRKINELVKQDERLRTARGLIQTVAGFGPQGSALLAVLLERVPFANSDSLVAYSGWDPRPADSGRKHGRRKLTKCGPSYMRKQWFMVGFSAARAKALKPLYQALLARGLASTEVFVILGRKLLRAAFAVWKTKQPFDLARFLGTPKTA

SEQ ID NO: 237483 - protein, 397 aa, unidentified
MYIVGIDIAKRKHEAAVIDGEGAVIIKPFSFTNNCSGYNRLLAMLTKAKLPLGEVSFAMEATGHYWLALFTRLQKEGFRVQVINPVQTNSIRSFYIRQAKTDPRDALLIAEVIRFGHFSESTLHPENIYELRELCRGRHAIVSMQADVKRKVVALLDQVFSEYETAFTNLFGDTSMAILQTCPTPKELSEMPFEELCHLIEVSSRKRFRMAKAQELQELARNSFGFAMAGDVFSTMIRLYAKHLDFLKQQVREMDRKIAEIMDTMDTPITTITGIGPTLGAYILSEIGDISRFPSAAKLAAYAGIDPTMRQSGEYNSVRNRMSKRGSPYLRHAIWLAASSAVLHDPALKLYFQKKRDEGKPYMASVGHACRKMVSIIYAVMRDSKAYTPCIPNEISA

SEQ ID NO: 237484 - protein, 365 aa, unidentified
MDNAYCTTIGMDVSDRTTKVCVMAKAGRDPRIVMETTIPTTKDGLARFLSTQDVASPVAFETGTHCRWMNEVAQGMGFKVYVANPCRLRMVTDSKAKNDRNDARMIARLALADPGLLHPVRLRGAEYQRMINLHEMRGLLVKQRSGIIVQLRAVAKSMGFRIAKASAASFHNLERAAWPKELRDIAWPMLKNLEQLAVTVKTYDKLIRELAGTQAFKAQVDRLMEIHCVGILVATAFVAVTGGDMDRFERPRDVGPWSGLAPKQDQSGDVDRQCHVTKAGSPLLRRLLVESAQLIMRDCSSDTDLKAKGLRICARGGKIARRKAVTAVARSLAVLMAAMLKKPDAPYVPLSERCEKELLAMRTTV

SEQ ID NO: 237485 - protein, 319 aa, unidentified
MAVLQQAPDIVLGFDVSKDTLTVFELRSSGPSPKPCTIDNSAAAIRCFLKSLKRVDLAICEPTGGHEHVLLVELMAAGIACHRVDALKVKAFIRSFGTLAKTDALDAEALARYGKDRWDRLALFQPPQTDRKMLTALVARREDLVAIKMAEKNRAKGPTAKLIKASLDAMLEAVIGQIEAIEAEIKALIEKSPQLRAAFRQMQSLPGVGAVIAATLLAHMPELGNLQRRQAASLAGVAPHANDSGQFRGHRTMRGGRSELRRLLYLAAMAASRAKGPLSDTYQRLIQNGKKRIVAIGALMRKIIVILNARLRDLNAQQS

SEQ ID NO: 237486 - protein, 430 aa, unidentified
MNVVDTIRREQFCQIKDEIRRSTDYLVVGIDVAKHKHNAFMGSATGKSLLRRLVFENNLSGYCKLLERVKAIKAQNAFSKVVFGIEPTGNYHKPLARHLIKCAQHVVLVTGVAVKNNRELLNNRWDKNDTKDAANIADLVSRGKFLYYDYPSGSISQLRQLLSLRRRLKKEEHSLRMRIRNNLLAQYFPELDPFYKACERESLAIVGWCLDPSKIAGMEFDKFFLMVTRSKRGIAQKKRLEKIHRLAVESVGCRMWPAVEFEASLLVQKLNDVRRQLDQIKDLMEDICRQFDQYPLLLTIPGFGPYICARVIASIASPWRFDSGKQLLKMAGYDLGASRSGQRSDKVVPVISKRGNSELRYALYQAAHIASIHNPDFVGYFTRMLRGRERERGIKTKMKVKLAAKLLKIAWTLMKKQEVFDPAYLYQGID

SEQ ID NO: 237487 - protein, 386 aa, unidentified
MQKLNDLSRCLTPLEPDSTLIAVIEMSLSSWLVAGIVPGVERQPLKKLAVDESVLLKLLHRWREEAEKAGYMIKRIAVAFEAGRDGFWLARWLRARDIEVHVIHTSSVAVSREHRRAKTDRLDTELLKRAFLRWLRGERDHCKMVAIPTIKDEDGKRPNRERESLVGEQSRIINRIKATLVRLGIRGFNPKLKKAAERLEGLRTPEGEPIPPNTLSELYRDMERRRLVRDQIQQIENARLDRLEHAPGEGAHAMVRLLARVMGIGIETADMLVQEVLSRNLRDRRAVARYAGLTGSPDESGKKRREKGLARSGNPRVRRGMIQLAWRFLLFQKDSALAQWFRARTENARGTRKTMIVALARKLLIALWRLVREGVVPDGVILRPVQ

SEQ ID NO: 237488 - protein, 339 aa, unidentified
MTKVTIIGIDLAKNVFQLHGVNRGGNCVLKRRVMRDQLMQVIAQLPPSLIGIEACTGAFYWQRRFEEHGHTVKVIAPQYVRPFGRGQKNDSNDAEAICTAVQQPNMRFVPNKSVEQQDIQAIHRARQRLINHRTALISQMRGLLLERGVAIAKSASRAQCLIPQIIGDPTVDITNMTRETIGILFDFLLQINEKIKGFDIKINRIFRESSVCQRIAKISGVGPKTATAIVAAVGDGRDFKNGRHMAAWMGLVPRQHSSGDRQVLMGISKRGDKNLRTLLVHGGRAVVRTAVKKKDTRSQWVNQLRERRGYNRAAVAVANKNARIIWALLRHGDEYHAII

SEQ ID NO: 237489 - protein, 371 aa, unidentified
MNSILYVGLDVHTSNYTICTYEPEFDRISRQVQVEPDYKLIKKYVDHLKNEMGKNRKVICGYEAGCLGYSLYRQLTGVGIDCVILAPTTMERPVSYPFKNDKRDAISVARCLANHGYKAVYVPTPEDEAVKEYIRMRDDHAAALKRIKQQILAFCTRHGKHFTEGKNYWTQKHLAWLRSLDLGSRLLNETMAEYMTTYYRLDEKVTRLDRRIEEIAEQSEYTERVKKLRCFLGIRSHTALSLLAEVGDFRRFPNADCFAAYLGLVPGENSSAKKQQYLGITKAGNKHLRRLLTEAAHCYNRGAVGYKSKVLRERQKGNSPEVIAYADKANERLRRKYYRMTFSGKNHNVTVTAIARELACFIWGMMTDRIA

SEQ ID NO: 237490 - protein, 370 aa, unidentified
MPKYSTAFGMDVHLRSTTVCALDADTGEAVTRRFPGNPWGEIAGWMDGFPGPSLAAYESGYLGFAPQRELAGLGVECVVAAVSKIPRSAADSASKNDRNDAARMAKAILAHDISPVWVPSPEVEGIRDLAGAYDGATARLATAKQRLLAFLAKRGFAYGGTTPAGNPRKYWTYDFLRWLDKVRPEDDGGVRTLAALRNEVEAAAEARADLLSEYRAAVDASPIAAEVAALQSIKGCAFALAAAFSAEVGDFTRFRSGRQVTAYFGLAPSQRSSGDSVRLGGISGAGNALVRKLAVEGSWCYAAARHQPKLMPRDTGVPLEIRMHGRKGSERLLRRREEMLARGMPAAKANAAELVRWLWALGMMCREGAE

SEQ ID NO: 237491 - protein, 316 aa, unidentified
MTEHTIGVDISKFHLDVFRLEDGAAQRFENSAAGFRALVKWLGGSQVARIVFESTGPYHKAFEAAFADRYPLVKVNPLQARRFAQAYGTRAKTDAVDAVDARMLARMGAAFDLERQAPSSQEARVLRDLHVARAGLIKDRTRLRNRAQTQDLTILKRQTKARLVQFERQIVELDAEIATMIAAQESTARIREILCSMPGIGATTAAAMLTLLPEIGTLERKQVASLTGLAPVTRNPANGRDSHSSQADASLCAMPSICYMPALAAIRFNPDLKAKYGHLRAAGKPAKVAIVAVMRKLIETANALVKADRKWTPKTA

SEQ ID NO: 237492 - protein, 412 aa, unidentified
MNIVYERCAGVDVHKRTVVVCVILPDKQGQRQKERRTFSTMMPDLLRMRRWFQNLGVTHVAMESSGSFWKPIFNVLEGHVEVLVVNAQHLKAVPGCKTDLKDAEWIADLLQHGLLRPSFVPPAFQRELRELTRYRTSVIEERSRTINRLQKILEDTTIKLSAVATDLMGQSAREMLATLIAGETDPLVVAGLARGRMRAKRDLLVQALQGQFKPHHRVLLSEQLAHIDALDEEIERLRAEIAQRLRPYEAQLKRLETIPGIKRRLAEVILAEIGPDMQRFPSSRHLASWAGMCPGNRESAGKRLSGKTRKGSPWLRTALVEAAHAATHCKESYLAAHYQRLVLRRGGKKATIAVGHTLLVIIYHVLAEEKDYQELGGNFFDEQDRQAVQKRLVHRLEKLGYEVTLAPASPAP

SEQ ID NO: 237493 - protein, 342 aa, unidentified
MSVSYVGVDLGSSNFHQVALNHSGTPTLNREFTTSEANLIKAFADLHGEIHVHLEAGELAPWASEIIRPLVTRVVCSHPQTNAWIARDRDKCDRIDAYKLASLLRLNEFKEVHYPREPLRRDFKTLVQHYDELTQQQARWKTKLKARLRMQGIIVRGEEVFSVRGRKAVLEQVKSNVVRTAIKQLYAVLDQSIASQTEAQTLMLRAAQALPEIKILRTAPGVGPIGACRYSAYIHTPQRFSSTRKLWKYCRLSVSHRSSNGKPLRRPRLDRMGCGRLKDVSRKAFEAAMRRRDNNGFKRAYYRALETTHDATHARLTVQRKIVSTLRAMWINQTPYCDELMR

SEQ ID NO: 237494 - protein, 471 aa, unidentified
MRNRNGTSWSGRCEGALTDKEERMDCRYAGIDWATQKHDVLVADDTGNEVLAGTFAHDEDGLTALCRTLVRLDVVLVAIERPEGVLVERLVDAGLRVLALHPNKVAAARDRFRVGRGKSDRFDAFVLCELARTDNHRFRVLEPDSDRTKALRALTRAREDLVGTRTGIVNQLRAELERFWPGPLRLFSHMDAEILLAFLERYPSPADTHGLGVGRMQAFLKREHYSGGQKPAVLLAKLRSAPLGRVGEMELAARRQLVLSFVAMVRTLNAQIKQLEGDIRTQVRAHPDGPIFLSLFKSPMSVITAAELLVEIGDSRERYPTRDALAADAGHAAVAKESGKRKTAGFRWGCNKRLRTAFCRLADSSRHWHPWAQDLYLQARQRGHEHPRAIRTVGRAWCRIVWQCWRHHTLYDPTRHQALQRHIAVTIPTTSGPRPDQAATQRMAGPGLCRPDLDSPATNTQLPAGLQPTGG

SEQ ID NO: 237495 - protein, 407 aa, unidentified
MLGLYCGIDWATAHHDVAVINDEGKVVARGRVGNDAAGLTALLALLAEAGDTAEHPIPVGIETDRGLFVAALRETGRVIYPINPLAASRYRSRYSVSGAKSDATDAVLLANIVRIDPDAHRALPTDTELAQAIRVLARAQQDAVWARQQVGNQIRDLLKDFYPAALMAFAGLPEGGLARTILAAAPTPTQAAKLTPARLRRLLTKAGRKRYLDRDVERLRDIFTDTYLHQPAVVENAMGIHLSALLAQYDTTCDAADALAEASIAHFERHPDAEIITSFPGLGTLAGARVLAEIGDDRTRFTDARGLKAFAGSAPITRASGKKTVVLHRHIKNRRLNAVGPIWALASLRASPGARRHFDARRAAGDWNHQAQRHLFNKLLGQLHHCLHTGQLYDEHVAFPPPLELAA

SEQ ID NO: 237496 - protein, 403 aa, unidentified
MNFYVGIDVSKFKHTVAIIDQNGEIRKKSFDISNSREGFNSLLNELGLLGPKEHIKIGMEATGHYMNCLVRCLISNEYQVQIYNPSLISKFRDSESVNLAKTDNLDAMLIAKYIATRPFTSSPQLSYLIGEIRKISRAKYFLYGDKTCCYNRLLRYLDEVFPEFADFFNKKEDGSKLSRGRNLFDSPTIRWLLREYPSPQKMAKMRIETGETLKRMSKGSISFNRFNQLRELAKNSIGCSSKADEQIIINLINQVRIIEEEIDKLNEMLEPLMHELKSPILTIPGIGMNLSAMIIGEIGDISRFDNHEKLIKYAGLDVKIYQSGTINYKGKIRKRGSPILRYALALSVQKLRIHSLVFSEYYYSKLRQGKATNVAIIATTRKLIRVIWKMMTSNQIFDSLRKK

SEQ ID NO: 237497 - protein, 403 aa, unidentified
MKKTDYLSTLFVGIDIGSRTNVVSAIDFNQEFLIRMKPVPNAKEGAETLESLLVDVLSAHHEFNHVIIGLESTRFYGVHIANYLSASDLLAPFGTEVYCLNPKEIAKYKESFNALDKNDGIDSFVIADFARVGRISIKPWRGAQYLALQRLTRHRLHIAECIAREKTYVLNNIFLKFSEFAMLKKEDHPFSNKYGATAEAILEQYVTNDDIIEASIEELVELIESKSRGRITEPEETAKILKAAASGSYRLDRVVAEPITLSISSSFNCIRAFEKELKAIEKAIEHTVQGLNSVEYQILKSIPGIGHVYAAGILAEIGTIKAFTSNGALAKYCGIVWKENQSGNFRAEDTKMSKAGNRYLRYYVIEATGSVINNCPEYKDFYDKKFALDYYSSAQKSTRVDLP

SEQ ID NO: 237498 - protein, 345 aa, unidentified
MEQISRIGMDTSKHIFQLHGVNAAEVPVLRKKLRRKEMVTFFEKLAPTVIGIEACSASNHWARLLHSFGHTVKLIAPQLVKPYVKRGKNDAADAEALCEAMSRPTMRFVPVKTAEQQAALMLVGVRDRLIRNRTQLSNAIRGYASEFGYTAAKGKAHLGPLLERLQADSNLPGLARELFAAQAQEYAQLQAQIDAIDAKLLAWHRADECSRRLAKIPGVGPIGAVLLTMKTPEPELFRSGRQFAAWIGLTPKDHSTAGKVRLGVITRAGDEGLRSVLVVGATAVIQHVRRGGRASPWLTALLKRKSPKLAAVALANKMARIAWKLMVTGENYAVKPAPVVLAGAA

SEQ ID NO: 237499 - protein, 351 aa, unidentified
MLIIGCDYHTRFQQIAMLDTTTGEIIERRLEHANGEARKFYAALPGPARVGMEATFDARWFERLLAEYHHELWVGDAAKIRAAEVRKQKTDTRDAQHILDLLVREQFPRIWVPSPQERDLRQMLRHRHKLVGFRTSVENQLHALAMGEGVCRKQKLWTAGGRRELEGLPLDAWASRRRQELLQLLDQLNPSIAELDKAVEKEAAQRPEAMGLMAQKGVGPVTALAFVLTVGPVERFPSSRKLVSYLGLNPSEDSSAGRQRLGAISKQGNAWMRCLLTEAAQTASRFDPELRRDYQRLKMRRGVSAVAKVAIARKLAVRLYWKLREMAQPSTAAHMQGSPPSPMVEATPSKS

SEQ ID NO: 237500 - protein, 411 aa, unidentified
MELLHPRCAGLDVAKDEVVACVRVPDGRGGRQQEVRTFQTFTSGLEALADWLAAEGVTQVVMEATGQYWKPVWYVLEERGFELLLVNARHVKILPGRKTDVADAAWLAELLEHGLLRGSFVPPAPIRELRDLTRYRKRLIQAHSSEGQRIQKTLEDAGIKLDSVAADVLGVSGWAMLEALVAGERDPQVLAELAKGRLRAKLPQLRQALRGRFGGHHALLIRLAMAHLEQLEASIAELDTHIDQVLAPFAWARDRLDTITGVGKRAAETIIAEIGVDMSVFPTAGHLASWAGRCPGNNRTGGKRRSGKPTKGNRWLGEVLIECAWAAARSRDTYLSAQYWRLARRIGKKKAAVAVGHSILVIAWHLLTDNCDYQDLGGDYFVRRDTDRQRQRAVAQLQALGYRVVLEPVTA

SEQ ID NO: 237501 - protein, 411 aa, unidentified
MQVVYMRCAGLDVHKKTVSACVSVCDAGAGKRQQTRTFGTCTGDLLELADWLREQGVTQVAMEATGVYWRPVWAVLEGQFEQMLVNPQHIKAVPGRKTDTKDCEWIADLLQHGLLKGSFVPPTPIQDLRDLTRYRVELRQSQNRVANRIQRLLEQANVKLASVASNALGVSGLRMLEAIIAGEANAAQLAQMARGKLKSKIPQLEQALEGRVRNHHRFLLAEYLDEWKSLGERIRRIEAEIDQRIRPFESAVALWQTIPGVDRVTACNLVAEIGVDMNQFPNAQHLASWAALCTGNHESAGKRMSGHTRDGNKWLRRSLCQAAWAVTRQKNCYLSAQFHRLAARRGVKRAVMAVAHTMLVIGYHMLKTGQTYHELGAAYLEQINKDQLQRYFVKRLQRLGLNVTVTPAIAA

SEQ ID NO: 237502 - protein, 420 aa, unidentified
MTELPPLAAFVGLDWADRHHEVALQVAGSATIETRRLTHDPTTLGTWLAELNRRFAGQPIGIALETSRGPLVHALLEAPFVVLYPVNPRSLQRFREAFAPSGAKDDAPDARLLLELLSKHRDALRPWVPDDSATRTLRALVERRRQGVALQTQLTLQLQATLKSYFPHALNWAGPDLTRPIALAFLTRWPTLATVQRLRPATLRQFYHQHRCRSTARIAERLAQIAAATPLTTDPAIIEPSVRYVQLLVGQLAALGPQLAAFDAAIAATFAAHPDAPLFQTLPGAGAALAPRLLVAFGTDRSRFATAADVQRWVGIAPVTVRSGRSCHVHWRWSVPTFVRQTFHEFAHHSILHCAWARAFYATQRARGQSHHAAVRALAFKWIRVLWRCWMDRTPYDDARYVRALAQRGSPVAAALATAA

SEQ ID NO: 237503 - protein, 430 aa, unidentified
MGLIEPTPMPPERDEQATSYNWYVGIDWGSQQHQVCVLDRDRHVVGERVVDHDGSSLAQLATWLWALSAGHPQRVAVAIEVPRGAIVEGLIERGFHVFAMNPKQLARFRDRHTMSGAKDDRRDAFVLADSVRTDQPSFRRLQLDAPQLLLLRELSRAEETLLEEFRRSANRLRDQLHRFYPQMLHLCSGADEAWLWDLIDLAPTPAHAALLSQEQRQRVLKAHRLRRVKATEVLTCLQASALPVAPGAAEAAQAHGAFLLPCLRVLAEQLRSCAQQAEALLHTLAEAPDETGGPSDVAIVQSLPGVGRKITAWLFAEAAQPLTERDYQVLRTQGGVAPVTKHSGKRRQVVMRRGCNPRLRHALYHMARVAMQREAYFGGVYEALRAKGQRHGQALRNIGDRLLRILIAMLHDRTCYDATRSRREPVVQMG

SEQ ID NO: 237504 - protein, 497 aa, unidentified
MPTKANIYSDCNPQVLKLFEQAGHPARVLCVALDYAKAQHMALVCNGLGDLLKGAFAVDNTPAGATQLLQQVRQCAKQRRIPTQQVFFGGEDYPTFAENFLRHLRKEKFLVVRVNAWEAKQQRSNFQASSDALDLLGIARCCLNRRGQPVQDLPVAYANLRIATRDRNELVRLATATSNRIHTYVDRLFPGFLSADKSGLAPFCQASLDLMAERFSPAEIRRRPRGALGQWLARRAVEEPHAVAAQLKELARGALGPAPEQTALLQRTLAQLVGLYRGLEGSISGLDRELAYWLARTPGALLTSISGIGITLAAGWMAELGPPQQWRAVRRICSYAGVVTKTKQTGGPDKEPMPSYVQQRCNKRLKNVVLQAVEKVRQYGPEDLRRSAQELEANGSHTEFGMAKRLVRLAKYLVVTGTIYRPKTLLDPDTPKEKLVLYYQTAWDKLLLKWKGKSDLKDVFAPAHPLGQWRQMVKELYALELRLPQQRAASTPGASAP

SEQ ID NO: 237505 - protein, 319 aa, unidentified
MSARGVFVGVDVAKDALDVAVRPSDERWSVANDEADVAALVARLRPLEPTLVVCEATGGFEHAVIAALAAAGLPVVVANPRQVRDFARATGQLAKTDQLDAGILAFFAERVRPTPRPLPDAAAQLLDAVLTRRRQLLEMLTAEKNRLGFAPKPLHRGIRAHIRWLERQLDDVTKELAAQIEQSPVWRAKDDLLQSVPGVGPIVSYTLLGELPELGTLTHKQIAALVGVAPLARDSGTLRGKRLIWGGRASVRTALFMAALCGRRWNPALKIFYERLKAAGKPTKVALIACARKLLIILNAMVRNNTRWMTPTARIQYSC

SEQ ID NO: 237506 - protein, 405 aa, unidentified
MIFVGIDWSEAHHDACVLDEQGTVLAKGRVSDDVSGVGRLHAMLADHAEDPAEVVVGIETDRGLLVASLVEAGYHVYAINPLAASRYRDRHAVSRAKSDPGDAKVLADLVRTDRRNHREVAGDSELAAAVKVLARAHQNLIWSRQRQVNALRNTLREFYPGALRAFTTAQLATTEACSVLAMAPTPTWAREKLTLARVRRSLAASGRKRNLDRRAEQILNALQAPELSAPRLVEQAYGDVVGSLVVVIDGLTHQIAKLEADLAERFEGHPDAEIITSLPGLSFVLGGVLAEFGDDPTRYDDARARRRYAGTAPITRASGTRRVVLARVARNRRLSDACYLWAFSSISASAGARRYYDAHRARGKTHHQALRALANRWVGILHGCVAGRELYREEVAWVAPVLEAA

SEQ ID NO: 237507 - protein, 359 aa, unidentified
MEYFAGLDVSIDETSICVVTDKGDVVAEASVATDPAEIAAALQHYIARLRRVGHEAGSLAPWLHAELAALGVPIVCLETRHVRAAQRNKTDANDALGIAHIMRTGWFRQAYIKTEDCYRMRLLLVQRRSLKRKFLDLENTIRHSLKVFGIRLGSVGRTGFEQAVRKAVAADPVTAGVMECMLRARAALWLEYLTLNKMVVQIAMRDELCRRLMAIPGVGPVTALSFKSAIDDPKRFRRSRDVAAYFGLTSKRWQSGSSIDVQGRISKAGDPEVRRALYEAASAMLTRFKGRDTIKTWGLHLAKTKCHAKARVAVARKLATVMHAMWTDGTCYVGDPDASEADVAASWSAKEKRLSYARS

SEQ ID NO: 237508 - protein, 314 aa, unidentified
MTDKCYIGVDVSKDWLDIARHDRADVERIENTTAAVSDFLARLGREPTLVVFESTGGYERPLRAGLLAAGVAFARAHPNEIAAFKARRGAKAKTDQIDARQLAAFGASELSARGLGPLVEGDGALREMTARRRQLVDLLQAERCRAAIAENDVVRQSLATLIAMLEKACDDIETEIDAHIAKSAELANVARLLRSLKGVGPVTVHTLLGELPELGRLTGKEISALVGLAPVTRQSGKRSFRATTGHGRPGVRRVLFNAARAAIRWNPVMKAFYERLVTQNQRPGKVALTAVMHKMLVVLNAIAKENKPWKHAPA

SEQ ID NO: 237509 - protein, 462 aa, unidentified
MKSKASKNKKQSKKVSIDAVWEPINAHAAGVDIGSREHWGCVPAEATERPVRKFGTFTADLEAMAEWFKTCGVTSVAMEATGVYWIPLFQILERSGLHVILVNARQTKNVAGRKSDVQDCQWIQRLHTYGLLQGSFRPEDPYCVLRTYLRYRSELVGARSTQCQHMQKALLQMNLQLPQVLSDVTGVSGLAIIGAILAGQRDPVALAALVHRRVRATGATIQKALQGDYREEHLFVLRQAYELYHTYEARINACDEQIVRETAALPAKVDPALKPLPARKEGRKASMDKMSGVDMRPQLYEKWGVDLTSIEGIGMQTSLVLLTEVGPNVDRFPSEKHFCSWLGLCPDNRISGGKVLSSRTRHVINRATDALRMAACSLERSPTALGGFARRMKARLGAAEGITATAHKLARIVYRLIKHGEAYVRQGLEEYEMKFKERKFNALQKTAKAMGFELIQKQALPQ

SEQ ID NO: 237510 - protein, 334 aa, unidentified
MENIALIGIDLGKNSFHIHCQDRRGKAVYRKKFTRPKLIEFLATCPATTIAMEACGGSHFMARKLEELGHSPKLISPQFVRPFVKSNKNDFVDAEAICEAASRPSMRFVQPRTESQQAMRALHRVRESLVQDKVKTTNQMHAFLLEFGISVPRGAAVISRLSTILEDNSLPLYLSQLLLKLQQHYHYLVEQIKDLESQLKRKLDEDEVGQRLLSIPCVGTLTASTISTEIGDGRQYASSRDFAAATGLVPRQYSTGGRTTLLGISKRGNKKIRTLLVQCARVFIQKLEHQSGKLADWVRDLLCRKSNFVVTCALANKLARIAWALTARQQTYVA

SEQ ID NO: 237511 - protein, 445 aa, unidentified
MVHRDAAGIDIGSREHYVAVGPDRDAEPVRMFGCFTADLQRMAGWLKECGIATVVMQSTGVYWIPVYDVLEQNGFDVWLVNARETRNLPGRKSDVQESQWLLKLHTYGLLRKSFRPAQDIRALRTCWRERAEYVQQAGTCIQRMQKALTEMNVQLSTVLSDLSGVTGMRILRAIAAGERDGMRLAEFRDPNVKASKEIIAQSLEGTWVPEQLAIVKRQLADWDHLQQQIAACDVDLQAMMKKLPDAKTEPKPPSPDPTGPRKRRRKNGRSSSNEPKFDLSAELKRVAGVDLTRIDGIKVLTIQTIITEAGLDMSKWATEDHFVSWIGFSPRNDVSGGKILKKKTRRVVSRLATALRMAATTLRKSESYLGAQFRRLRTRLGAPKAITAMGAKLARLVYRMLKYGQEYVDKGTEHYNTRYREQQIKLLQKKAAQHGFTLVPQPLPA

SEQ ID NO: 237512 - protein, 357 aa, unidentified
MSQQSNNCAIAVIGIDIGKNSFHVVGHDQRGAIVLRQKWSRGQVEARLANLPPCLIGMEACVGAHHLSRKLQLLGHNARLMPAKYVRPYSKGQKNDFRDAEAIAEAVQRPTMKFVATKTADQLDLQALHRVRERLVGQRTGIINQIRAFLLERGVAVRQGLRFLRAELPGILATQTDVLSPRMLRILEDLSTDWRHLDARIEGLSGEIETFAHQDQHCERLMTVPGIGPIISSAMVAAIGTGEVFSKGRDFGAWLGLVPKQISTGDRTILGSISRRGNRYLRALFVQAAWVVLVKLGPKQWERYGLKSWIEAAKKRLHYNVLAIALANKLARIAWAVLNKGRAFTCVKTDAMASRPA

SEQ ID NO: 237513 - protein, 342 aa, unidentified
MKRISTMGIDLAKNTFQLHAADRKGGKVFNKKVKREKLLGEIEKFDKEDDFLIAMEACGGAHHVARALMAKGYDVKLIAPKFVKPFVKSNKNDAKDAEAITEATRRPSMRFVGVKSVEQQNIQAIHRIRAGFVKRKTAMANEMRGLLLEYGITIPQGIHKLKKLIPAILSDVENGLTLDFRELLQELYSEWINCFEKVEHYDKKLSCIYNRNEDCKRLSKIDGVGLITATALVAAVGDPKAFKNGREFSAWLGLTPRQHSTGGKTTLLGISKRGDSYLRKNLIHGCRAVIYRTEGKEDRRSRWIKGKLPSKGVNKVSVALANKTARAIWAVLARKEEYRRVA

SEQ ID NO: 237514 - protein, 341 aa, unidentified
MNNIKKIIGVDIAKRVFQLHWIESGTGEIVSLQLKREQFLEYFANLVPSLIGMEACGGAQHWARQLQKMGHEVKLLPGKQVKPFVGGNKSDVHDARAIWTAMQQPGLKPVAIKSEEQQAVLALHRMRSQLVKFRTAQINGLRGLLTEYGEVMPQGKVGIKKAIAETLQRLSDRLPSVVIDTLREQWERVFILDKQVTDIERRLAQWLKQDPASACIFEIPGVGLLTATAAVATMGDAKAFKSGREFAAWLGLVPRQSGTGGRIRLLGISKRGDTYLRTLLIHGARSVLMHAKEPDPWVTELRHRRPLNVAVVALANKRARLIWALLANERAYQKGYVNQVA

SEQ ID NO: 237515 - protein, 346 aa, unidentified
MEHYAGIDVSLELSSVCIVDTQGKIVKEAKVASEPEALVDFFGSLHFAVKRIGLEAGPLSQWLHAGLRRAGFETVLLETRHVKAALSAMTVKTDRKDARGLAQLIRMGWFRPVHAKSMGSQEVRALLVARKQLLGRLIDVELSIRGILRGFGLKVGAVTRKGFEARIRELATGQATLERIAGAMLSARATLRAEYEKLHKAVLAIVREDAVCRRLMTVPGVGPLVAVTYKSAMDDPSRITKSKAAGALFGLTPKKYQSGEKDVTGGITRTGDEMVRTALYEAANVLLSRITRFSKLKRWGMDVAKRRGAKRAKVALARKIAVILHRMWVDRTTYRWTDAQPTAVRV

SEQ ID NO: 237516 - protein, 375 aa, unidentified
MNQFIKYVGLDTHKDTIAVAIADITGGKPRYYGEIANTPTALSKLMKDVSPKGEVVSYCYEAGPCGYGIYRQISGSGHDCSVVAPSLIPTKPGDRVKTDRRDSENLARLHRAGELTPVWVPDQEQEAIRDLTRAREDMKHLERQARQRLCAFLLRHGQRYESGKSKWTQAYWRWLERIKFSHRVQQTVFQEYIDSVKQQQQRVADLEEVMHEAMVDWTLAPVVTGLMALRGVRLITAMTVVAELGDITRFDSPRQLMSYLGLVPSESSSGPKTRRGGITKTGNGHVRRVLVESAWCYRFPARKTAPLQRRAEQTSVEVQAIAWKAQKRLCGRYQALSKRGLLPQKTCTAVARELTGFIWAIACELMPKNATEVNA

SEQ ID NO: 237517 - protein, 315 aa, unidentified
MTTSSGKFVGIDVAKDKLDIAVLGEKKASQVGNDEVGIAKLIKKLQALSPKLIVVEATGGYQRAVVLGLYEAGLPVALVNPSRVRQYARASGLLAKTDKLDAFNLAEFGKQMKPRRFEAKSEAGRDVSALLVRRRQLEEMLKAEKSRLRTVPPKMRGSVERMIETLKEEIKRLEKELGQFMKENEEWQAGEQILTSAKGVGRITATTLLAELPELGKLDRKKIAALVGLAPMNADSGKKRGYRKTKGGRMEVRNVLYMSTLVATRYNPLIQAQYQQLLKRGKVKKVALTACMRKFLTILNAMMRDKVPFRQRVNV

SEQ ID NO: 237518 - protein, 318 aa, unidentified
MKVVCGLDVHKDSVFCCILCANGEKIQHKFGVLTEELVTLRDLMVSEGVEECAMESTSIYWIPIWRVLEGSVKLHLVNPYFIKQLPGKKSDVNDAEWIATCLSKELIASSFVPDDKIQRLRQYDRRIFDLNVSISRNLVKLDQCIQRCNIRISNYISTTDSKGYRSIVKLISQGVTDAEVLVKELHGRTINRHGRETLVKALTGVVSETDIDIINQLVEEIELQQRHKDEAQEKMTALCMEWFPQEVENLQTIPGVKERSSTSIIAEIGTDMTHFQTPKKLVSWVGLRPRNEESAGKIKARGITHGNRFVTKVSHPNK

SEQ ID NO: 237519 - protein, 448 aa, unidentified
MAMRKREESPEVFPNAAGIDVGGSSHWVAVPRSTAEEPVREFGTMTDDLNAMADWLLACGIDTVALESTGVYWIPVYEVLEQRGLTVWLVDARQMKYVPGRKSDVQDCQWLQKLMSLGLLRAAWRPGNEVCVVRAVTRQREVLLIEQASWVQRMQKALVQMNLQLAEVLSDITGTTGQAIIRAIVAGERDPKVLASHRNSRVKRSTDEIAKALTGNWREEHLFVLKQALAMYDDIARHLDECDARLQALLDERSQHQVDLGALPRPGSKRRGEFDVRQRLANWAGVDLTRINGLGVGTVMTLLSEIGPDLSRFASVKHFCSWLGLCPGTKISGGKVLSSGTKRSANRARQALKMAAMALSHSDSALGAFYRRLCARMDKPRANTAVAHKLARMVYFMLTRGEAFVDQGQQRYEEQQQQRSVAALKRRAATLGFRLEPATEASASQFVS

SEQ ID NO: 237520 - protein, 343 aa, unidentified
MDYFAGLDVSVKDTSVCIVDDTGGIVREVKVASEPEALLAVLMNPLYRFKRIGLEAGPLSQWLFSALVEAGLPAICVETRHMRAVLKAQINKTDRNDARGMAQMMRVGLYRPVHVKTLRSQKLRMLLTHRKLLQSKAIAIENDLRATLRNFGLKVGVVGTVRFEARIRELVENHPDLTLLVEPLLVVRGVLREQLDILHRRLLAVVRDDNVCRRLMTVPGVGPVVALTYRATVDVPARFRKSKSVGAVFGLTCSRDQSGERDRPGAISRCGDEMMRAMLYEAAQSMLRSKKWSWLKAWAMKIARHRGMKRAIVALARRLAVIMHRIWVDGTEFRWTREAAAAA

SEQ ID NO: 237521 - protein, 352 aa, unidentified
MTAGLDLGDRYSYLCLIDTENGEVIEEGRLRTTPEAFRRRFASERPLRIAIEAGTHSPWASRVLEECGHEVLVANARKTRLIYANKRKTDEVDAENLARLARVDPKLLYPLKHRGESAQAHMALIRSRQALIGCRTQLVNHVRGAVKSFGARLPKCPARSFHKSASEHIPEVLGPALGPILEQIGSLTERIRDYDRQLETIAKEHYPHETDLLRQVEGVGTLTALTFVLTLEDPYRFAKSRSVGAYLGLVPATDQSGDRDPQKRISKEGDEMLRKLLVGSAHYILGPFGHDSDLRRHGQRIASQGGKNAKKRAAVAVARKLSVLLHRLWVTAEVYDPLYNTHHRRQEQKQAA

SEQ ID NO: 237522 - protein, 400 aa, unidentified
MTTVRAGVIAGVDTHADTHHAALISDTGQHLADRSFPATPAGYQALAVFITSHGPLVRVGVEGTSSYGAGLTRVLLATDMPVVEVIRPARTNRRRGKSDPIDAYAAAAAALANDKLPTPKTSADQVDAIRAVLTVRRSAVKAATATMNQIHNLLITAPNQLREQYRTLSGAKLIAALAAQTADDHHHIRTALQRLAHRHQHLTAEVTAADTDLDHLTALANPALRSGYGIGPISAAQLLVTAGDNPDRITTDAKLAALCGISPIPASSGKTNRHRLNRGGDRQANSAFHHIALIRLQHDPRTKAWAEPRQTPHNSNNKHILRCLKRALCREIHHYLLNPHDIPDITDLRPLRHTLGLTLAHAAQQLNTTTATISRLERGQHRNDHLATTYRTWLHTHPTP

SEQ ID NO: 237523 - protein, 334 aa, unidentified
MPEIATIGLDIAKNVFQVHGIDRNGKIVLRKALRRSQVPGFFSTLPPCLIGLEACATAHHWARTLMAFGHDVRLIPPAYVKPYLRRQKNDAADAAAICEAVTRPSMRFVPVKSPQQQSTLMLHRARDLLIGQRTALINALRGHFAELGIVVAQGARNTRQLIALIHDNASPDLPATARMALQPLAAMLIGIEAQIARLDKAILAAHRSDPVSTRLAGIPGIGPIVASCLSASVSDARLFQGSREFAAYLGLVPRQHSTGGKPRLGSISKMGNRHLRKLLVVGAHAALYSLKSGKTRTPLPERPWRTGPGASWSRSRSRGWPWPWPTRSPGAPGR

SEQ ID NO: 237524 - protein, 373 aa, unidentified
MQRNTLKDYSLEATPVARAKEIKDERAPKAKRIVVGADVHLRGYQAARKVDNAAIGAVANFRSETELLLYLEKQCEQTEEVVVVYEAGPLGYGLYRKLTARGVKCLVCVPDSTQQQKKRRKTNQIDARTLTSNLFNYLNGNEAALQLVRVPTPEQEQARLASRQHDQLVEERKRLGAKGNALLLSQGFGSCKNWWRPKAFSRLEQLLPAWLFEMLQTWVDLLRALDEKIQRAKAALSKRCSGPRPKGAGANSLVQLGSEVLDWGLYANRRKIACLAGMVPSEWSTGESQRQGSITKVGVPAIRRIITEMVWRIIQFQPQYPPVQKWQEVLRGTNRALKKKAVVAIGRQLMVDLWQLQTGRASAQQLNLVMIGG

SEQ ID NO: 237525 - protein, 393 aa, unidentified
MVVSVGIDVSKDKHDCFILSSEGEVLVDVFTIPNTMDGFNCLLQRIQDCTTPQGKMKVGLEATGHYSYNLLGFLLDNGLATYVLNPLRTNLYRKSLSLRKTKTDRVDARTIASMLLSDVGLKPYTDTAYHNEELKSLTRYRFDKVKERAKLKSSIARLVCILFPELEKFVPSLHIASVYALLEEFPGAKQIAAAHLTRLKTLLETTSKGHYKRDMALEIRDASRNSIGSWMPAKSLELQHTIRLIRELDHEIAEIEEQIQSIMDELHSPITTIPGLGFRMAAMILAEVGDFTRFDSPDKLLAYAGMSPSTYQSGQLKNCYPHMEKRGSRYLRYALYNATKYVCHWNPNFADYLTKKRAEGKHYNVALSHAAKKLVRLIFAMEKSRRPYCSLAA

SEQ ID NO: 237526 - protein, 350 aa, unidentified
MTRYIAFDVHAESTTCVVLSSAGKRLKEEVVETSASALISFLKTIPGRKQLVIEEGTQSAWLHETLSPFVDEFVVAIVDESNGAKNDSRDSWRLAEQLRIGAIQRTVFKRPQELAALRAAVKAHRLLTSDVVRVKNRLRALFRSRGVAVTEKVYQPNARSVKLACLPQHVRYQAEMLGKQLDLLEPLRDEARGRLREEAKEVPSVERVATLPGFGVIRAATLVAATITPNRFRTTRQFWSYAGLALVTRSSSDWVRHEHGWKRAAVNQTRGLNRNRHPWLKDVFKAAATTVAAMPNHPLHADYQRLLQQGTKPNRAKLTIARRLASAALAVWRKQEAYEPNKHKSLIATP

SEQ ID NO: 237527 - protein, 361 aa, unidentified
MKKPAQHLIAEVPRRQAKVEITIGIDLGDVWSHYCTLNQDGEVVDHGRFRTTPKAIEKWFTDVAPARVAMEAGTHSIWISAQLQELGHEVIVANVRELRAISHSDRKSDQVDAEKLARYARLDPNILRPIAHRTVHQQEALTLVRARALLVRLRTAAGNAVRGLTKSCGYRMPASATTCFAQRSLAVMPPGLAQALGPVLQQIAEMTVKIKLYDRQIQQLGQTEYPETQALLKVHGVGHLTALTFVLTLGSKERFGRSRDVGCYLGLRPRRSQSGDHDPQLGITHAGNAYLRSLLIECSNHILRPHGRDSALRQWGLRLAARGGKQARSKAVVAVARKLAVLLHHLWSTQAMYMPFYEQAA

SEQ ID NO: 237528 - protein, 319 aa, unidentified
MNRTFIGVDVCQDYLDVYVRSTGLRRRFANTPAGIAELLAWVRPLAAERILLESTGPYQKAAVGALLAAGLPAVVVNARQVRDFAKAMNYLAKTDRIDAAVIAHFGEVARTTVRPLESQEIRDLRELYDRRGQLVGMLAMEKNQRHSARVAQASAKVLRSIDQHIDYLEGQIRDLEQRMDRIIESSAAFRARNEILQTITGIGPQVSRTLLAYLPELGQYSRQKITALVGLAPFNDDSGSHTGARHIRGGRNKVRVGLYQAAIAAIRHCPRMKAFYAALKARGKASRVAIIAVARKLLVLANALVRDMVPYRAPANSVC

SEQ ID NO: 237529 - protein, 341 aa, unidentified
MRIFVLVNVLGKTYCSVVGLDDSGHVVLRRRLRRGNVEKFVGCLPTCVVAMEACCGAHRLGRVFGRQGHEVRLMSPEYVRAYVKSQKNDDRDAEAVAEAATRPTMRFVPVKSAAQSDVQALHRARERLVAARTALINHLRALLLERGIVAPQGRAKLEAELCTFADEEAASVSPRIRLLVEDLRREWRSLDRRIAAFDAEFVALAREDAAARRLTTIPGIGTINATALVAALGDARTFRRGRDMAAWLGLTPRQRTTGGKPRLLGISKRGNRYLRKNLIHGARAVLPHLVEQDTPLGRWARALSQRAHKNVVVVALANKLARIAWAVLAHGRAYDAGYEGA

SEQ ID NO: 237530 - protein, 343 aa, unidentified
MQAPRHIGIDLHRNQFTCCVRLENGRNYLTEWKLEDLPRFVKKLRPDDEIAVEMTGNTRLFRDALAPHVARVVVVDPNQFRVISHSVKKTDPNDARNLALYLEKDLLPEVRMKDKTQAQLASLTQTRDTMVKLRTALKNKINNILSAHGINLEKEALSSEKKLNEVLALPFDPMVRIELKVIVEQIRSLNQSIAELEKTIADEGSKLEGHKNLTSIKGIGPLTGSILLSVIGDIHHFADEGKLAAYLGIVPRVSKSNQTEHTGRITKRGSKLGRTALVQCALIAQRYSPYLQRYYQRMKAQTHSTGKAIIALARKLLGIIYRTLKNNWVFEDFPNFVLAEAAQ

SEQ ID NO: 237531 - protein, 341 aa, unidentified
MEQVTTIGLDIAKHVFQVHGADGAGHVLFRKRITRMRLLSFLAAQTRCVIAMEACAGAHYWAREIGKLGHHVRLIAPVYVKPFIKRQKNDAADAEAICEAAQRPSMRFVPVKTEEQQANGIVFRARDLLVRQRTQCVNALRGHLMEYGYVFPKGITHVETLVALVEDLQSSLPDGVRAILKLLVDTFTALEAQIAASDTEISQRSKSDPTARRLMTIPGVGPIASTAITALVPAAEGFPAGRDFAAWLGLTPLQKSTGGKQKLGAVSKRGERTIRRLLIIGASAVVQQASRRGAPKGSWLAQMLARKPKMLVTVALANKMARIVWALLVKGGTYRTPAAAA

SEQ ID NO: 237532 - protein, 344 aa, unidentified
MQIAILGIDLGKNSCSVVGLDNSGHVVVRRRMHRTSVIKFAGGLVPCVVAMEACCGAHHLGRLLRTQGHEVRLMSPEYVRPYVKAQKNDERDAEAIAEAATRPTMRFVELKAEEQLDMQTLHRVRDRLVGERTALLNQLRAVLLERGIAIPQGRRKLEQHLDAMLGGPESADVAPRMRRLLRDMRTEWQALDRRIEAFDEEFAVKVRTDPVACRLATIPGIGVLNATALVAAIGNGENFARGRDLAAWLGLVPRQATTGGKPRLLGISKRGNKYLRKLLIHGARAAMPSLARSGTALGAWLRGLLARAHPNTVVVALANKLARIVWAVLRHGREFERTDVVASA

SEQ ID NO: 237533 - protein, 394 aa, unidentified
MTATYTHSIPAGTLVLHVAFELGANQWKLGFSTGLGVAVRLRTIGAGNLAVLRREIELAKKKFWLTDDVPVCSCYEAGRDGFWLHRWLVEQGVSNIIVDAASIEVNRRYRRRKTDSLDAAKLVAMLIRHHAGEKLWSVVRVPSREDEERRHLHRDLEEMKAETTQHRNRIRGLLAGVGARVAEINSNFLEMLPTLQTADGREIPGELRARLLREFERLQFVEQQIRSLERQRNQKLRDGDDQEYVVKARKLMGLRAIGPHSAWVFVLELFGWRRVNNRRQLASLVGLTPTPYDSGEDEREQGISKAGNRRLRTLLVEIGWCWLQYQKSSALSQWYQKRFAGGSKRQKKIGIVALARKLLIALWKYLQRGEMPEGAVLVDWRAKLVGLGAQPLPV

SEQ ID NO: 237534 - protein, 358 aa, unidentified
MKYVGIDVHKKMCQAAILSDDGELLDEIRFPNDADGIEEFSGKLTSFNDEVRAVVESTGNLWIQIHDRLEEHGFDVALSNPSKTRLIAEAKVKTDKVDARTLAGLLRADMLPTCYVPGEELRSKRELLRHRIRLVTARTEMKNRIHSLLDKHGLRMPGTTPFSKGNIAWLRGLSLGFMDDAILRSDLAILEAVDGQVTLIEEKIATLAVEDRRVRLLMTMTGVGYFTAMLILAEVGDVERFHSDKAFASWMGLAPGVHQSGERTRIGGVSGPGNKRLRWAMVECAHTAVRHDSRLGALYERQSRRRGEGRAVVAVAHEMARIVYFMLVRGEPYRGENRGLTERKLKNMGARALNGLRN

SEQ ID NO: 237535 - protein, 385 aa, unidentified
MQAPTVSTPITDRISTIFVAIELSQKTWLVTVHSPDKDKISRHKVEGGNHADLLALIGRVRDRAARTLGAVAAVASCYEAGYDGFWLHRLLTVAGITNYVIDPSSIAVDQRARRVKTDRIDGEKMLRTLMAYLRGEPRVVRMVRVPTPEQEDARRATRERDRLIKEQTAHTNRIKALLRLHGFAVGNPRRRDWLTGLAAQRDWQGQAVPPRILTEIEREHARLMLVRKQLDALDRAPAAADPTPAAVEMTRRSELLQRLKSLGPAFATTLTQEVFYKDFRNRREVASYFGLAPSPWQSGGIDRDQGISKAGNPRARCASVELSWLWLRHQPDSDLTQWYRERTLKASKRIKRIAIVALARKLMVALWRYLTTGLVPAGAVLKSAA

SEQ ID NO: 237536 - protein, 379 aa, unidentified
MHAITLHLGLDVHKDSITIAIAQAGLKGEIRVFGTITHDLHALEKALTRIRKAHRGAPLEVAYEAGPCGFGIARRLQQLAVPCLVAAPSLIPKQPGAPFKTDQRDARSIARLLRAGELTGVYVPEPTDEAIRDLCRARTDAVDDLRRCRLRLKSFLLRHSYRYHGKANWSQPHMRYLRELVLPHPAMKAILEEYLQGIDAAHQRVQRLEASMLTLLETWRLKPAVHALMTFRGFQLVAAMITVSELGDIHRFAHPRQLMTYLGLVSVEHSSGPRQHLGAISRCGNGHARWLLVECAEHYLAPPKVSKELSRRQEGQPPEIRALSWKAQNRLHLRFTRLLARRLQRNKAKVAVARELCGFIWALLRTQDCYRQATGGAAS

SEQ ID NO: 237537 - protein, 360 aa, unidentified
MRIIGCDLHARQQTLAMLDTETGEMVNLTLLHEGNQVREFYSKLPRPVLVGIEAIGPMQWFLNLLEELGIECQVGDATKIRAAEPRKQKYDRRDAELILKLLVEKRFPAIWMPTKEQLDLRALLLHRHHWVRLRTQIQNALQAIALANGLRRGPSLWSYDGQAKIAFLPLAPHASSRRSALQATYRKMQEEIENLTEQIAEQAGQRCGARLLMTHPGVGPVTALATDVFLGDAQRFADGKALASYVGLIPREYSSGARQRLGAITKQGSPLLRFLWNEAGAHAARRDPELQRFYRRKLVQKGLGKARVAVARKLGIRLWIMLRDEIDYQEFCRRGQKQSGDACAGMPEVGYGANCHRPVD

SEQ ID NO: 237538 - protein, 383 aa, unidentified
MSIKYSVGLDVASKKIDICMSVIDCNQKVTVVASTSFPNTLKGFQSMDEWIVKKKKLQEIPLVMCMEATGVYHENCALYFSEKKYAVSIILPNKAKHYLISLGLKSKNDSIDAKGLSKMGAEQCLELWQPMGKLYYELRQYTRQYQNLQDQKTVINNQLHALENSMYMSEMMINQQKAIIELFNEQLKELEKLMKNLINSDQVLKQKVDNICKIKGIALLSVSTIIAETNGFELFKNYKQLVSYAGFDVVERESGMSVGKTKISKKGNSRIRRALFMPAFVAIKYKEKPLVSLYERTFAKHGIKMKSYVAVQKKLLVLIYHIWKKNEPYNPDYKKDSPEMNSEAIQDNSLKSGFSEVQNYEKKEDNETKDKKKEKIHSHCEVA

SEQ ID NO: 237539 - protein, 341 aa, unidentified
MSIEARITQGWALSRKGQNMSTRAIFVGIDVSKAHLDVAVRPDEIEWRSPNTDTGAREAANKLKDLDPDLVVLEATGGMEIPAASALAVLGVPIAVVNPRQVRDFAKSTGRLAKTDALDARVLAHFAEAVRPEPRPLPDEQARQLSALLSRRRQISEMLTAERNRLQSADSTVRRRLKVHIRWLERELSDIDDDLNRAIKESPVWRVKDDILKSVPGIGPVVSFTLLSELPELGRINRKEIAALAGVAPLNRDSGTLVGRRTVWGGRARVRAALYMAALVASRYNPVIRDFYLRLCAAGKPKKVALTACMRKLLLILNSMIKNKTRWNASAAEVRGTLISA

SEQ ID NO: 237540 - protein, 389 aa, unidentified
MRFAGIDIASETHVVAVVDLEGKVLVKATEFTEDAGGHARLLELLGSPTDCKVAMEATGHYWQNVFAALASAGFEVALLNPLRTRRFSEADLARTKTDAIDAVGIARFAQQKRPVPTKLPDSATQELRELVRLRDRVVQDLGDAVRRLHRVVDLGFPEFTRYVKTLDSELATAVLHEYPTAAAFPVVPRPLAKLVYDGRHKVGPDLARQLVDAAKASVGRHHGDAYRVQVRYACEDVDVARRRLRELERRIETTLRDHEVGTLLTTIDGIGPQTAARLVAEVGDFERFSGPEKLAAFVGSIPAINHSGKSKPNGAMSFGNARLRSALWMPLLTAVRKNAWLRAYYLRLVANGKLRKVALVASMRKLLHAIYSVATNRRPFVARIPEVAS

SEQ ID NO: 237541 - protein, 403 aa, unidentified
MANWIGIDVSKSTHKYRHVTDAGEPIGKAVPLPNARDAFNTFVEHLRTLDDVRIALEATGPYWLAVYDFLTNAGFKITVLNPLRGNAFRESGLRKTKCDSKDAYWIAEFLRIGYGKPMSVPGATVQTLRELSRYRFALVDEICDHKRRALGLIVRVFPEYEGLFSDVFLVSSMKLLETAATPEDILALDTDALVELLQKASRGRFGQEKAHLIQEAAAKTIGVSWLADAARVELVSILQIIRFLEMQVKQLEAELARLMESQCEFLTTVTGVGPVLGAAIVGEVLDIDRFETGKAFVAFAGIEPAVHQSGQFNGQQMHMSKRGSPHLRRALWLVASNAYKDDPDMQAFYARKKAEGKHHNTVIGAIARKMAGRIYAVWKGNQPYRLAGPAEAGTLGGDQAKAQ

SEQ ID NO: 237542 - protein, 337 aa, unidentified
MSEVHILAIDLAKRSFQVCGADRGGAVLFNRTVSRSKLQQTLRAQPPCIVAMEACATSHYWGRMSLDCGHEVRLIPPIYVKPFVKRQKNDAADAAAIAEAALRPNMHFVAVKSADHQARAVAFRAHQCFVGQRTQLINALRGHLAEFGLVVAKGPANLKSLTDMMKDESLDIPEAVREVVQLFLDQIEAITSRIDNLALRLKKATKENDEMRRLCTVPGVGPVTAGAVLAFAPNLKVFSNGRNFAAWLGLVPRQHSTGGKTRLGAVSKMGQNDIRRLLIVGAMSRIRWIVRKGVLPDNWLGRILGRKPRMVAAVALANKMARIIWAMMTREQNYRMA

SEQ ID NO: 237543 - protein, 342 aa, unidentified
MKDTMIGVDLAKNVFVLHAATMAGEVRYRKKLSRGQFLRFLSEQPPAIVIMEACGSAHYWTRELVKVGHEVRLIAPQYVRPFVKRQKNDAADAEAIVIAARQPEMRFVPPKTADQQARAVLFRARERIVRQRTELVNALRAVLYEYGQAIPQGIAHIQRIEAIVERTEIGLPELVREECRDLLAQIDEKTARIKEKAKKLVDLSRQSGIAHRLQTMPGVGPLVALAVEAFAPAMENFRCGRDFAAWLGLVPRQFSSGGKERLGRVSKAGQADIRRLLIIGAMTCVSWAGRKPPVHGSWLSRMLAKKPKMLVAIALANKMARNIWAMLTKQEDYRDPALAIMA

SEQ ID NO: 237544 - protein, 321 aa, unidentified
MDLCIGIDVSKAHLDLALMNASGAVLGTERITNESKAIRALLKRWHKQFGVTKANALFCLEPTGHYGYLLVEELMRAGLPTWLAHPLDIKHSIGSTRGKNDRIDAQRIADYARRHHDKARLLGPGSLRMNKLKQLLTCRRQLVTDKRRHQVRIKDLNRHVDRSLRALFDRLSQERIEQIDTQLEKIEAAIVDHIHADPRLREQYVLLLSVDGVGPVLAAHLLACTEGFTRFATARRLACQAGVAPYEHSSGSSIHGRTRVSPQADRVLKTLLHMAALGVIARAGELQDYYKRKRAEGKAPMLVINAVRCKILHRLFAVVQL

SEQ ID NO: 237545 - protein, 343 aa, unidentified
MGQYVGLDVSLKETAVCVLDEEGRVVWRGSCGSTPEAIAATIHQHAPEVVRLGLETGTLSPWLARGLEGLDLPVVCLDARQARAVLSLRINKSDPNDAHGLAEIVRSGWYRQVQVKSRSAYQLQALVGARAQLVKTKIDLTNQIRGLLRTFGLVVGKAGGRKFDLRVQELIVDDDALQPPIEALLSSWRQVCEQIGILDKRLLAVAKQSATIQRLMTVPSIGKVVATAYAAAIDDPSRFAKSASVGAYIGLTPRRHQTGELDYTGRISKRGDKLVRSYLYEAAGILLNRIHRPSWLQSWGKKLVKRLGFKKAAVAVARKLAVIMHRIWMDGSSFDWSRKEAMA

SEQ ID NO: 237546 - protein, 435 aa, unidentified
MLRFVGCDVHKRTAVFTMLRMDGKVEATHTVTVTRESLAHFAEHHLSGEDRLAMEATTNTWAVAELLRPHVKEIVIGNPLRTRAIAEAKIKTDKVDSRVLAELLRADYLPSVWQPGPDTQRLRRLTHRRAALVSDRTRLKNRLHSILHHCLIPLPSIDLFSKAGRTWLKELSLPEQEAAARDSDLRLLELTEQEITQIEQKLVREAWQDEKVRLLMSIPGIDYTVAQTCLAAIGDVSRFANAKKLTSYLGLNPSTRQSATHCVHGPITKQGNAHARWLLVQAAQHFGLNRGPLGQTMRSIIRRKNRKVAVVACARKLAVLVWHVLSSGEPFRYAPPKSLEAKYARLRLRATGKRRQGGVPKGSPRSAQYGQGRTRAIPSLTQVLEQNGLPAVAPLPRGERNMLAKKKLEIFYHEVQTPSRVPKPSPGGTGKPIDH

SEQ ID NO: 237547 - protein, 407 aa, unidentified
MMIKLSGSKQLPNIFKGCGFMIYVGIDIAKQKHFAAAMTADGEVLIPPFGFSNDAEGFKLLLSKIKSFKKENTLIGLESTAHYAENLICHLFELSYNICVINPIQTSTLRKTNIRKTKTDKVDCLLIIKSMIVNKPRIYSKTDIDSLRLKSLCRFREKIKKAKAKLKIQLVTYVDIIFPELQYFFKSGIHTNTCYQLLKKHSSPDDIAALHLTYLANLLQKASHGRFGKEEAIALKGLAKSSVGTGNTAVSIQITQSIAQIELLEQQLADLDRAIESIMLEMDSIILSIPGIGFLNGAMILGEIGNISRFSNPSKLLAYAGLDPTVNQSGKFNAKSTKMSKRGSKLLRYALINAAWNVSLNNKTFNDYFNLKRSQGNNHYAALGHVAHKLVRIIFKMLKDNVAFNLD

SEQ ID NO: 237548 - protein, 409 aa, unidentified
MRIIGLDIHRAFAEAVAWDDGKLKRMGRVDMRRPLLEAFAKKLSKEDVVVVEATGNASSVAAVIAPHVKKVVIANPKQVRIIAHAKIKTDTIDASVLAQLYASGFLPEVWIPDEPTQALRRQVTRRNQIVRQRSRLKNIIQSILHSHLIPSCPHADLCGASGRAWLFHQILPEDERLAVERHLREFDRLGEDLKVIERDLARSALGDEGVKRLMTIPGVDMVVGLAIVAAIGDAGRFEQSQKLVSYLGLNPSVRQSGPGPAYHGRITKQGRGHARGMLVEAAWAAARAPGPLRAFFLRVRARRGQHVAAVATARKLAVLIWHLLRKGESYAWARPALHARKLRDLELKAGYKAERGQRGAAHAYNIKSHRDEERRWVEQAETAYARFVAGWNPRGPKRARTGAANEGRQ

SEQ ID NO: 237549 - protein, 386 aa, unidentified
MPQPNDLSRSLVILEQDATLIAVIEMGQSSWLVAGIVPGVERSPLKKLAVDESALLKLLNRWREEAEKAGHRIERIAIAFEAGRDGFWLARWLRARGIEAHVIHASSVAVSREHRRAKTDRLDTELLKRAFLGWLRGERDHCKMVAIPTLAQEDAKRPNRERESLVGEQSRIVNRMKAALARLGIRGFNPKLKKAVERLDGLRTPEGEPIPPNTLAELKHDMERRRLVRSQIRDIEGTRLERLEQAPGDGPHVMVRLLARVIGVGVETADMLVQEVLSRNLRDRRAVARYGGLTGSPDESGKKRREKGLARSGNARVRRGMIQLAWRFLMFQKDSALAHWFYARTKNAPQTRKTMIVALARKLLIALWRLAREGAIPEGIVLRPAL

SEQ ID NO: 237550 - protein, 422 aa, unidentified
MKRQTEQEQFAAYIGIDWATQTHYLSLCEADSRTVERSQLDHKPEVLGQWVNELQRRYPGRRIAVALEQSRGALVYALMNYEFLVLYPVNPKALAKFREAFYVSGAKDDPIDSDLLLELVTKHRDRLRAWQPDDELTRTITLLVEYRRELVDTQTGLTNRLSDLLKLYFPQALDWAGELATIQACDFLQRWPTLAKVRQATDTELLQFYGAHGCRKAALIEQRLRQIETAQPLTTDGAVITASMAMVQSTIAQLRPLMVSIKEMDKQIAELFATHEDHELFSSFPGAGAVLAPRLLSAMGANRDRFVTAQDVQQLSGIAPVIERSGKTCFVHRRFACSKFLRQSFHEYAAQSIRWAPWARAYYDRQRQRGNGHHAAVRSLAFRWIRIIFRCWQNRVPYSEETYQQALRDRGSKLSALIVAQT

SEQ ID NO: 237551 - protein, 377 aa, unidentified
MTHQALVVPVAHKHAATIYVAVELSMSSWVIGLVDPRNGKISRHQISCSDLDRLMELISRARKAAGCERVVLCYEAGRDGFWLSRILQQRGLEVLVLDPASLPVDRRQRRAKSDGLDVEMLLRAVMAHERGEPRACSVCRVPSVEEEDARRLPRERERLQSERTAHSNRIKGLLAVQGIYHVTPLRPDFQDRLKEKSTGDGRPLPLQLLREIEREVERLRLVQEALKQVEKEMADLAMWNTRIGRIIRMLMRFKGIGPVLATVLACECLYKDFANRSEIGSYSGLVPSPWRSGGIQREQGISKAGNGRLRSSMIELGWLWLQWQPNSALSKWFHERVGDLKGRIRKIAIVAMARKLLIALWKFATTGVVPEGAILAD

SEQ ID NO: 237552 - protein, 384 aa, unidentified
MDVHTSNYTLCSLDPGYGVEKDNYFAEVQFTNNFVTNVVNYVSNLKKKLKDCEFVCGYEAGCLGYSTYKDLTKVGIKCVLMAPSTMAVQKGGKKVKNDRRDARVIAQCLAYQTYKEVYVLSEHDEAVRGYLRMRDSHNKALKRIKQQIIAFCTGHGLFSPTKSNWTVAHLKWLKDLKFNDPVEQEILNEYLSSLTFLSDKIKAMDVRIEELASEKQYCENVKKLRCIKGIETNVALTLLAEIGDFNRFSKPTDFAAYLGLIPGEQSSGDKVRGTGITKAGNSTLRRKLTESAKGYWRGRIGIKSATFKKLEKELPKEVTEYALKANTRLQRKFFNMTHVKGKNMNVAASACAREMACFVWGLITNHYEKAPAVPKTDEELLDLN

SEQ ID NO: 237553 - protein, 485 aa, unidentified
MALVLAVVLGLLILEVAMSRRKPNPTSPDPASLALLQTLHPHAAGIDVGAAELWVCVPPGAVALPHPPAVLPAHVRRFGAFTADLHAIAAWLRQCGVTTVAMESTGVYWIPLYDFLESAGFEVLLVDPRQVQRAPNRPKTDVHDCQWIQRLHSLGLLTAAFRPEEKIRVWRSYQRHRTNLIEDASRHLQRIEKALEQMNVKLTEVVSDITGVTGMSMVRAMVQGERDPKALAKLRDHRCKESMETIAQALQGTWQPEHLFALRQSLELYDYYHQQIRDCDRVIEAHLQGMALPAVTPLEPTRRVRRRKDNEATFDARQRLHHVAGVDLTAIEGIEESTALVVLSEIGTDMSRWPSEKHFGSWLGLAPNPRKSGGKVKSSATRPGVNRAAQALRLAAKNLQRSRSALGAFFRRIAARRGLAKAITATAYKLARIVYALLKYGTAYVTQGLEAYETAYRERVVRQVKRKAMELGLVVVEREAVAQPS

SEQ ID NO: 237554 - protein, 427 aa, unidentified
MSEVRAIQPEPEFAACIGIDWADQKHIWCLQTAGSEQRESGELEHTPEAVESWVAHLYQRFAQRPIAVAVEQSRGALVFMLSKYEPFHLFPVPGQMAASMRQALYPSGAKDDPRDADLLLDLLLQHRNKLRRLSPDSEATRRVQNLVEERRKLVDEKTAQINRLTDHLKVYFPQVLEWFGRLDTELVCALLERWPALEELQKASPASLRAFLRKHRCRDRERIEHRMEAIRRAIPAIQDRAVMEAKSAAVKVIVQLVRILVEGIEDLDGQIEEAAAAHPDFFIFNSLPGAGPVMAPRLLAAFGSQRERYRSARELQSFSGIAPVTESSGKRKWVHFRWACPKFLRQSFHEWAGHSIAQSEWARVYYQQQRSKGSTHHAAVRALAFKWIRIVFRCWQDGVAYDENTYLTTLVKRGSPLGAVVSIGKTL

SEQ ID NO: 237555 - protein, 344 aa, unidentified
MDLFAALDVSLEKTAICVLDRDGDVVLEVAVRSEPQEIAALLMPYAASLCSIGLEAGPLSEWLVRGLAEHQLTATLMETRHVRAALSAMIAKTDRNDARGMATLLRTGWFRPVHVKTMEAREQRALLTARSTLVRRLRDVENSVRGLLRGFGLRAPRLLRGGWDLAIRDLIAGHPALPGIIEPLLQVRAALRDQLAPVDRQIRSATKANPVCHRLMSIPGVGPIVALTFRAAVDQPERFRSSKSVGACFGLTPRRHQSGETDRSGPISKAGDASVRVALFSAAHVMMTRAAAWSSVKAWAMGVARRRGAKRAKVALARKLAVIMHRMWIDGTVFRATRHPAAAH

SEQ ID NO: 237556 - protein, 345 aa, unidentified
MVMIGIDPHKRTHTAVAIDSGERVLDERLVYATGAQVPELLEWAKRLDGGERVWAIESADGLGYLLAQQLLAAGEQVVDIPATLASRVRLLGTGRSEKNDPNDARSVAIAALRAAELVPVRVEDHATVLRLLAGRHTQLGWAYNKTACRLHALVAELVPGGIGKELVVSQARSLLADHQPVGTVAIERHALAVEMLDELDRLNTQRKTLRKRIGVAVTASGTTLTDIFGVGEVGAAIILGQVGDVTRFPTADRFAAYNGTAPIEWSSGNPKHPIRRLSRRGNRTLNHVIHIAAVTQLRHRHSPGRGFYDRKRAEGMTSRAAIRALKRRISNTIYRHLVTDATRRS

SEQ ID NO: 237557 - protein, 399 aa, unidentified
MLAVGIDISKSKSVAAILNQDGSMHTSPFEFHHTQPELDAFIKYILNSKQSATILMENTGHYHYPVLKAFQEAGLPVCMVNAYQIKKFGDKDLRKAKTDKKDAVRIARYALEKSYSLVPYTSMEQKYEDLRFLARQYNQRMLTLKTNKVFLLNLLDETMPGITNILPLTTRTPETSLSVLFINRFKSYDRIKKMGKSRFLDAFEKIARKSRNRQTKTYGLAIYEAALRNITTRGENEYTLAAQDQCLELVCESQKAADSIILKMKTLAETLPEYAVLRSMAGVGNRLGPLILAEIGDIRRFHSGKALNAYAGNDAPPYQSGTFESHNRHISKRGNAALRKYCFEVMQALKLTRPQNDPVYLFLLKKEQEGKPYNVAKMAGVNKFLRIYYARAMETLKQQ

SEQ ID NO: 237558 - protein, 412 aa, unidentified
MEIIHRCCCGIDVHAKTVVVCLIKNGKKQIRTYSTMTDDLLTLSDWLVSEDCKHVAIESTGVYWKPVFNILEGVLEVVLVNARHVKAVPGRKTDVRDCEWLGDLLRHGLLRASFIPPPPIRELRELTRHRHTLVRDQTAVSNRIIKLVESANIKLAQVASSALGVSGRAMLRALARGEQDTTKMADLARGPLREKQGQLRRALRGKLTRSQRFVLTELLDQLEQIEAAVARVSAEIREQTEENGDPFVNEATRLLQTIPGVGEHVAEVIVSEIGTDMTRFPSDKHLSSWAGMCPGNNESAGKRKSGKTTKGSNYLRAALTQAGWAASHTKMTYLAAQNRKLARRIGKKKALVAVGHSILVIAYHILKNRASYHELGGDYFDRQNVESQRARYIKRLEALGLKVSVAEASEAA

SEQ ID NO: 237559 - protein, 418 aa, unidentified
MEVMVERGCGLDVHQASVVACLLVGPAGGKSRKEVRKFSTMTASLRELAGWLRTAGCTHVAMESTGVYWQPVYGVLAGQFELVVANAHHIKNVPGRKTDVKDSEWLAQLLRLGLIRPSFVPDKPLRELRDLLRYRRKLIDGTAAERNRVLKLLESANIKLASVASDVFGVSGTAMLRALIAGQQSPAEMAGLARGVLRRKLDELALALDGCVAEHHRFLLDLQLQRIETAEAALATLDARITDKLEPYKDAHRRLMTIPGVDWSTAAVIIAELGVDMAVFGSAVHAAAWTGICPGNYESAGKRTASGARKGNVYLKTALITAAVTASRKKGSYLRDKYHRLKARRGALRAAVAVAHKILIAAYHILARGTVFQDLGAGHLDQARRIQATKSCLRRLNRLGYMVSLIPMTQPTQQPAAS

SEQ ID NO: 237560 - protein, 320 aa, unidentified
MRNAVGLDISKTTFDATAIIGGIEKSAKFYNDSKGFEQFKDWLDKLNCPDAHICMEATGNYYEGIADYIGSLYKVSVVNPLKISKYAESRFTRTKTDKQDAKLIAEYCQTAKAQDLVIRKPVINDGYKLKRLSALYAQLTADSTAQKNRLEAAKDTFVVKICQSNIKHLQRQIKAVKKELEKLTKQPALKAQTDRLATIPAIGRLTAVMLLNYLSGADFQTSNKFAAFAGLTPQIKDSGTSVRGKPSLTKYGNRRLRAMLFMPAMVAYRIKAFPDFIARLEAKNKPKKVILAAIMRKLAVIAYHVHKKGENYDPTRYKAA

SEQ ID NO: 237561 - protein, 408 aa, unidentified
MAAIEFPIYVERGCGLDVHQQTVVASIAGKDIEAQTKTFGTFTEELYQLVGWLQNNGITHIAMESTGVYWKPVYYILEDFFKILLVNARHIKNVPGHKTDKKDSEWIAKLLMSGLLKGSFVPPQHIRELRTLHRHRRKLTGQRTAEKNRLQNILEDANIKLGNVVSDVFGKTGKAIIEALIAGVTAPAQLAELARGSLVKKKDQLKKALNGKITDHHRFMLQLIVNTITHINNQIALLEAQMGIYIESMKQDVELLQTIPGVSIQIATGILAEIGNDMSVFPSHSHLSSWAGVCPGNNESAGKKKSSRVTHGNKFLKTTLIEAAWAASHSKTNPILAIKHRSIAMRRGAKKANLAIGHKILVAAYHILRDKTPFLPSERNQQILQVRRLKRIERLQKELTALKNTSEQ

SEQ ID NO: 237562 - protein, 366 aa, unidentified
MGFDSIIALDLGKFNTVACAMNAATRRHTFASVATTPRALHDFLVARAGEAGTDTARTLVVLETCDAAGWVHDLAAALGFQVNVANCCHEAWRWNKVKRKTDKDDAIKLAKMALLDQLPVVHMPSAQLRQRRRLVLHRRTLVQRRTQVKNSIRSIFSQQGLSELLPRGKKAWSKAGVAQLREHAKGLADCCVDDLWRGRLHVEIELLEAISQQVAAVEKKLDELGAGDEQVQLLQSVPGVGPRLAEAVVTSLDDPHRFRGAAEVSSYAGLVPKLIESGTMSRVGRITRRGPSLLRGMLIEVAWVVWRKNAWAKSFVARVSRGMKSRKKIAIVALARRLLVKLWAMLRTKTPWREFGPALAPAPAAT

SEQ ID NO: 237563 - protein, 361 aa, unidentified
MGWTAPPHRSPKWRTTRSRGRLATKIHVLGIDLAKNIFQLHGVDRKGRAVLTRRLRRDQLIKIIGELEPCLIGIEASTGAFYWQRQFEKLGHSVKIMAPQYVKPFVRRQKNDTNDAEAICTAVQQPNMRFVPKKTLEQQDIQALHRARQRLVNQRTALISQMRGLLLDRGIALAVSATRARRLIPKILAAPNDELTELMREIVSSLYAFMLQIDERIRAFDRKIDAIFKASEVYQRIAKIRGIGPKTATAMVAAIGDGSDLKNGRHLAAWLGLVPRQHSSGDRRVMMGISKRGSQHLRTLLVHGARAVVRTAVRKTDSRSLWVNELRQRREYNRATVAVANKNARVIWAVLTSGEPYRSAA

SEQ ID NO: 237564 - protein, 306 aa, unidentified
MSTTRVVGIDIAKSVFQVCVWMVDGSVAWNKKISRSKLLDTIRQFEPGTLVAMEACATSHFWGRTFASMGYCVRLIPAQHVKAFVRSQKNDANDALAICETAFRPGIHFVSVKTTEQQDIKALRNTRQLMVEQRTALANQLRSLLAEYGFTIPVGILRLQQQLPELIEDASNSLTFTLRRLLSSLREDMQALNERITSLDSEIAALSSQQIAYRHLLTIPGVGPLIAAAFISEVDATQFSSGRELSAWCGLVPRQHSSGGKQRLSSVTKNGNRSLRTLIIHGARSVMRCVKKRDDSLSIWLQIEGS

SEQ ID NO: 237565 - protein, 451 aa, unidentified
MKKEVVKKSVVKIGTGLPVFNPHAAGIDIGDTLHCVAINDGKGGHEVKTTSAFTCDLHEIVDYCLNNGVTTAALESTGIYWLALYILLEEAGIDVYLVNAKHVKNVTGRKKDDTDAIWIQKLHTCGLLQKSFQPDNEIRKLRDYIRQRKNLILLGADSVRRMQKSLELMNIKIHTVISDILGKTGMKMVKAIISGERDPSVLVTLCDPRIKATQEEIIKSVQGIWKEEYLFMLEQAVENYEFHQMQIKNCEEKIKQQLIKQVAIIKEGDITCLEEKKKSKATPKKNQFNFAVSPYLLAMAGVNLCKIPGINEVTALGFIAEVGLDMSKWKSPKHFAAWLNLTPNTKISGGRIISSKMMKKKNKAGQYLRQAASSLSTNKSPIGDFYRRMRGRLGGQGAALTTAHKLSRIIYTMLLKQTEYNAGMILDNQEKFREEKIKKLEKQIARLKQAS

SEQ ID NO: 237566 - protein, 344 aa, unidentified
MKNTLVAVDLAKSVFEIAVSHQPGKVSLRRRLSRDGLPKFFTQLPPATIIMEACGSAHYWGRRIEELGHRVVLLPPQYVRPYVLRNKTDRTDTSAMLEAYRNDAIRPVPIKSVSQQVLTSLHRLRSGWMAERTARINALRGLLRELGFFIPVGARQVVPRTWEIIADAESGLPEALRPALAEVCQEISELEDRVERIERQLEALAQQIPAVQRLRSIPGIGLLIATALVAFVGDVSRFPSGRHLSSYLGLTPREYSSGSRRRLGRISKRGDAYLRMLLIHGARAVLWHAKQMEQPDRLRAWALRLEKTAGHNKAAVALANKLVRVVWAVWRHDRDFEPVLERTA

SEQ ID NO: 237567 - protein, 327 aa, unidentified
MQKSKIQRILYCGIDVSGDTLDICFQTSDGELISQKITNDASGYKQLWQLTGLNYQFIMESTGVYQLPLCFFLEDKKARYSVINALQIKRYIQMKLERNKSDKKDAFHICMYGVENKPECYEMPVPLYFECRALNNAIETITTEITSFKNKIHSLSKLEVDSKVIMSGYKKILRDLQAELKKFEVVLYKKLSAWQPDLVKQVGSVVGIGKRATAILIVTTQGFRHTANYKQLISYAGLSPKEYSSGSSIRGKVRICKQGGSLLRHTLYMCALNAKSTNAACKALFDRLVAKGKNKKLAIIAVANKLLKQVFGVVKNGTLFDRGYYGK

SEQ ID NO: 237568 - protein, 342 aa, unidentified
MTYYAGLDVSLEETAICVVDAGGTIVKEGRAESAPGALHDALKRIGLPLERVGMEACSLTAWLHDGLTAAGWPAVCIETRLANAAMKTMPSKTDRNDARALAQIMRTGWFRQVHVKSPQSRRWRSLLVARRTVLNHMRSIENVVRAITREDGIKLGTPSRKDFAARVREMAGAGPELMAMLEPLLAVLASMIEQLARLTRQVLDIVKGESTCRQLMTSPGIGPITALTYRATIDRPERFARSRDVGAHLGLTPTRYQSGETDIVGKISRCGDELARTALYEAAHTLLVRSKKWSALRVWGMAVAKRRGMARAKVAVARKLAVILHSMWINGTDFRFGREAGA

SEQ ID NO: 237569 - protein, 374 aa, unidentified
MSDSITYVAMDTHKKQHSVALHYPGQEEIVRFSIKNTAREITKMTKKIIKQTPGEVKFCYEAGVCGFVLKRRIEAHGCKCAVIAPSLIPRKPGDRVKTDRRDALKLLMMFKAGLLTEVHAPDKQQEAARELTRCRQAAQENLKRVRHQLLKFLTRHGYIYSDGSHWTIKHLRWLRSLEFEEALLHDVFDNYFTEMQHCIQRLDSLGNEVEKLAKSEPYKQVVGLLRCFRGIDTLSAITIITEIFDFGRFSSPGELMSYLGLTCSEFSSGEKQKRGPITRAGNKRVRRILVEAAWHYRHPCNVSKALSDRRNGQPQWAIDIADRTGQRLRKRYRHLTNRGKVPCKVTVAIARELAGFIWSVFKEYETRRIVKQAA

SEQ ID NO: 237570 - protein, 499 aa, unidentified
MSQDTTAAERLCHLESHYAHQVAAFRRRLALLGPDNVLVILLDIGKNVHWAAVYTAGDQELVRPHRLPTTQSGLRQFFQMTNQLIVDHQPALVVLGHEPSGVYHEPWARVFLEHFQAHLHGQAQPTFEYRFFNPYQVKLARQTTYLRCCKTDPKDIAAMFDLTLRGLGQPAFLPTGIELLIRQEAGFIRAQSRLLGDLEDLLWHLLDRLWPGAVVNLKRFCQAHPNLPRPTPIVQTRPFQRQRLRVLLQYCPNPYDLCAMSDEEILTLFRQHMGRAGPALLRTLRTWAHNAVLPPQEITPPLADQLQRLFGQYLHAETLIEEGRGRLVPLLPHTPARHLPAIPGLGDMDAAAYLAGIGSAHRFQRDAQVWAFAGFDPLTDGTGDRPERIGHLSKHGDPAFRDRLYQMGYRVAQNYPPVSLTFLNAFDRGKSEVEATIHAAHRLNRICFHLVQHDEPFEDRSTPQQWAEVERRWPLFRQAKRKRPNRRTRGRRRSRKRRR

SEQ ID NO: 237571 - protein, 417 aa, unidentified
MEDWLGGFTCLTKIQYTGGVIVYNLFVGIDVSKDSFSVTGLEPKGNICFSITANMDLNGFSELFKSINSVCKDPSKVFAAMESTGCYHINLFSFLCSKGINTVIINPILISNFTKLSLRKTKTDKKDSLTIAQFILVHKDSISKFSVPQDIKDLRDIARERESLCNMIASTKNEIKRILQFTFPEMESLCNIFTQTMLNFIKSFPSARLIKIAEPKAIEKALENNFSRGRKITITAYDIIKAAQSSVASVSLAKELILPEKISTLLHLMERLDKITDILSNFCQSMMIDELEIITSIEGIDKTSGATFLAEVGNIFNFPSHKSLIAFAGIDPSVFQSGKFEGKSKISKRGNRHLRRVIYIMTVNVIRVNSFFKAYFLKRKQEGLPYKKAILATAHKLVRTIFAMLSHKTLFHVKNSL

SEQ ID NO: 237572 - protein, 336 aa, unidentified
MWYLGIDLHRLTVVMAGVNDAGEAMNTITIRCEDTEAIRDAVKGLGAFRAVIEASGTYRWLYDLLRPYGTVVLAHPLRLRAMIQRRSKTDKLDAQLLANLLRINQIPLAYIPPEPYQQLRDLTRCLARLRQEQAVAKIKLRALPARQNRQAPYRVPFGVRGLAWFRKQDFGPIENLVRDELLLRLEHYRKQLAILEAHVVALREVFPQAAVLMEIHGIGLYSALLIVGELGEVDRFHTAKQVGAYAGLTARVNQSGGHCYQGSITRQGSPWLRWILVEAAMKVVQEDVALKNFYTRVRKRSSAKIARVATARKLAEICWKRLRRWQREQTPPAASA

SEQ ID NO: 237573 - protein, 349 aa, unidentified
MSQNLNSAVAVIGIDIGKNSFHVVGLDDRGAIVLRQKWSRGQIEARLANLPPCLIGMEACVGAHHLSRKLGALGHDARLMPAKYVRPYSKGQKNDFRDAEAIAEAVQRPTMKFVATKTVEQLDLQALHRVRERLVSQRTGIINQIRAFLLERGVAIRQGLRFLRAELPRILATPPDVLSPRIVRIISDLAEDWRRLDDRIDRLSNEIAAVVQQDAGCERLMSVPGIGPIISSAMVAAIGTGDAFSKGRDFAAWLGLIPKQMSTGDRTILGKISKRGNRYLRVLFVQAAWVVLIKPMSWDRYGLKHWIEAAKKRLHRNVLAIALANKLVRIAWGVLAGDRAFEANKLQAA

SEQ ID NO: 237574 - protein, 316 aa, unidentified
MRSTAATGLVVGVDTHRDTHRDTHTAALCDLAGQALAVRQFIAGPGGYAAALAWARQEAGEAGLAWAIEGTRHYGLGLARYLTAAGEHAGEIDASKHAGKRRNGKSDALDAVRAAREMLARPVAAQMRAAGDREALRLLMCDRDNAVASAKTARTLLTSVIVTAPATVREQLRHLSRDRRATVCASLTSPPGADRQTRVLYQTLARLGQRITTFARTAADLQKQISALVEDMTPGLVAAEAGLGALTAAQLLLSYSHHGRIRSEAAFGMLPGTAPVPVSSGRTDRHRLNRLGDRQLNRALQVIAVARMRSHPPTQA

SEQ ID NO: 237575 - protein, 345 aa, unidentified
MKSTTIAVDLAKNAFQIAVSHHPGKVAETQRLPRSSFLRFFAERQPCLVLLEACGTAHSWARQIQALGHEVLLLPPHAVRPYVRGNKTDRSDAKGLLEAHRNDEIHPVPVKSVLQQTLAALHRVRSAWMADRTARLNLLRGLLREWGVCIPVGARQVVPRVRALLAEDRELPLPLRQVLREACHEIQALETRIQKVEKQLAAVAKQTPVVQRLMSIPGIGLLTATALVAFVGNVERFATSRHFGSYIGLTPREHSSGQVRRLGSISRRGDAYLRCLLIHGARAVLNAAKRYKAPDRLRAWALRLEQRRGHNKATVALANKLARIVWAVWKSDTEYASTKEIALAA

SEQ ID NO: 237576 - protein, 342 aa, unidentified
MGVVGIDTHKATLAACAIDEVGQVVAERIFPNAPAGFAALLGWLHELGDVTRVGLEGSAGYGAAAARFLLAAGLPALEVPPQLSHRERLRTRRAGKSDPGDALAIARVALREVELPPVRTADASRELKLLVEARDDLAAEATRVRNRLHADLVVIAPGYGAVAANLVAEKHRRAAGQLLRRLPGVQAELARGRLVRLGKLATEIRGLDSRIEGLVADHPLRSLWGAGPLVTAKLLGEIGDIRRFRSADAFAMLAGVAPIPASSGQTSRMRLNRGGNRQINRALHGIVLAQVRTYPPAQAFVARKRAEGKSWREALRALKRHLARIVFRLLSQPVGQVSSVGA

SEQ ID NO: 237577 - protein, 356 aa, unidentified
MASNIKYIGMDVHKESISAAVRNSVGKVVMESVIETKANMILQFIDGLRGDLQVTFEEGTSAAWLYDLLKPHVTKLVVCDPRKNKSMREGNQNDKIDARRLAELLRLDHLTPVYHGEHGLRTLKELVRSYLTITKDLGRVMTRVKAIYRSWAIPCTGKQVYARCHRAEWLGKIKEPGVRRRAEFYYQQLDALRVLRQEVRRDLLVEGKKQKAWKRLCQIPSIGPIRAAMLLGILQTPHRFRSKRPLWNYGGLGIEMHSSADHRSVDGQLQRSRKNVLVRGLNRNCNHDLKNLFKGAAAVASSKPGPFREFYTALVAKGMPPEMARLTLARKIATIVLIVWKRGVCFDAQYLKPQTA

SEQ ID NO: 237578 - protein, 420 aa, unidentified
MSKYKYRARQLHQVNWQNVQEQSGDGRVVFAVDVAKRGFFATLMKPDRTVLETLKWSHPQQTGALLGQLQWLGVQRLEAVLEPSGTYGDALLGQLSAAGVAVYRLSPKRVHDAAELYDGVPSLHDAKAAYLIGRLHLEGVSQRWAQPSEQRRRLQAELSLLEHYQERAARATNRLEARLARHWPEALEVMSLQSVSLLKLLADYGAPAALAGDATAAGERLRRSGGRWLREEKIAALLEGAGRSVGVACLEAERRLVQVLAAEVLEARAQCRALEKRLAEQVGWDAELARQGAALGKVSAVVLRCALGEAQAYPDAASYLKASGLNLKERSSGKHKGQLKITKRGPGVARRYLYFAALRLIAHEGPARRWYEAKVARDGGLKSKAITALMRKLAKAMWHVGRGEAFEQDKLFGAASVRAA

SEQ ID NO: 237579 - protein, 311 aa, unidentified
MYYIGIDVSKKDLSVFNGKDLNFINKEGLKSFKKYLKKKYRLSEIAIIFEPTGVYSLYLKEFCAENSIKAYIVNPKQSHNFARALGIRPKNDKIDARTLYKFHKLIEAKDIRVPKIDQQAKTLSSYLVSYEFALKQRISLSNHLESLRDKRLIALMKKDLKRAKMLEDKLFHDIKEYVSKNQNLREDYQRLLTISGVGEKTAIALLTLFKTYEGTNRAQITALTGLDPIRRESGSSVKYKVKISKNGKGIYRKIFYLPTVCATVHNQKIKVFYQRLLANHKPKKLAIIASMRKILLIAHAMYRDKTEYVTV

SEQ ID NO: 237580 - protein, 318 aa, unidentified
MPANQAMPHRWVGLDVHKHYLIAIAVDADLNQVLGPQRVPLATLERWIAKTLTPQDAVVLEMTTNAFQLYDDLLPHVAAVTLVHPPHVALITRAQVMTDKIAALTLARLHAKGLLTGIWAPPEAVRDLRAVIAERSKMTRLATQAKNRLHAVLQRHHLAPPEGSPFLPERRAWWLALPVSALERQRIACDLDTLAFAGQQVATLEAALIDLAATEERLILLLQLPGIGLVSGLTILGAIGEISRFPDAKHLVGYAGLGARIHASGLTTRTGRITKAGRRDLRAAMVEAAQTAANTHPHWQAELARLEPRLGRNKAIVA

SEQ ID NO: 237581 - protein, 412 aa, unidentified
MQDILTVAMGLDVHRDIIVACLIKGQIGLEPETEIRTFSTLIPEMQKLRDWILETDCRNVAMESTGIYWQPIYEMLESCFDSEINILVVNARHMKNVPGRKTDMRDAEWIATLLRAGLLKGSFIPSKPIRELRHLTRYRKSVVHDITAQKNRIVKFLQSSGFRFTAFLSDAFGASGRNIIRHLIENGSIDRAALDKCLKTKTRNRIDEILIALNGSLSVHQRSFLRMIFEHLLALEAHKIAVEDAITEEILKHEEAMNLLCSIPGIDITAAASIIAEIGTDMRSFPDAQHICSWAGLSPGNNESAGKRKSTRINKGNPYLKSMLCEVGWIISGKRTLYLSGWYWRVKQKKGAKRATIALARKLLSLIYTMLKTGVPYNEECFEERRKHSERKRAGRMINELQKLGYMVVVPE

SEQ ID NO: 237582 - protein, 340 aa, unidentified
MGELYVGLDLHSGNTFMGIMEGGSKKRVYQKRHRNNLEEVLQALEPFRDEVKGIVVESTYNWYWLVDGLMDAEYKVHLANPSAMNQYEGIKYTDDRHDAFWLAHMLMLGILPEGYIYPKEDRPVRDLLRKRSFLIRHRTANILSCQSMIERNTGKRIDGAGIKKLSTKDLEKIFTDEHLVFSGKTSTNIIDVLTHHITSIEKKVRKILKIRPGFEQLLTVDGIGDILGMTIMLEVGNISRFPGVGNFSSYCRCISSIHTSNGKKKGVGNTKNGNKYLAWAFMEASNFARIYSERANAYYQRKAQKTNPVIARKALANKLARACYYIMRDQVPYKEEALFS

SEQ ID NO: 237583 - protein, 339 aa, unidentified
MNVSTIGLDIAKNVFQAHGEDAAGNVIIQKRLGRKGMMAFFAKLPPCVVALEACGTSHYWGRTLRALGHDVRLIPAAYVKPFVKRNKTDARDAEAICVAARRPDMRPVAVKSEAQQASRALERSRELLVKQRTQLMNSLRAMLAEFGVVAAQGFRGFAELRERLASGDGLPEALIVALRLLASQLDSLTPAIEALEDRIKAIARVDPTMRRLCGVPGVGFLTAHAVVAAIGDGRQFRSGRDFAAWAGMTPRETSSAGKRRTQGVSRQGESRLRKLFALGGATLMRNARSREDRATPWQRGILARRPMKVAVLAQAAKTARIVWAVLTSGEQYAPRSAAA

SEQ ID NO: 237584 - protein, 449 aa, unidentified
MRKPQVIEDQQHERVFERVAAVDVAKASGMVCTRMPNPSRPGTRHSTVWQVPAAMNAVLALADRLVADGIEMVTLESTADYWRIWYYVLESAGLAVQLVTASQARNLPGRPKTDRLDAMWLARLTEMGMLRPSFVPPAPVRVLRDYARARTHLVQDRTRCWQRLEKLLEGALIKVSAVASKLTTVSAQDMIKAMIGGQRDPHILAGLARGRMKAKHDALVEALTGMFDDHHGELAQMLLDQIAFCDTRIATLATRIEQHLAQIRAAWGVDADGSTGPSAGTGTDAAVPPAADRLAEIPGVSAELARSIIAETGLDMSRFPTAAHLVSWAGLCPSAHQSGPRTRNGKKGQGDSYLRGYLGQAATGAAGTATFLGERHQRIARRRGRAKAQVAIARSILVVIWHLLNDPQARYADLGPDYHASRTDKDKKIRNHIRQLQALGLTVTIAPPA

SEQ ID NO: 237585 - protein, 343 aa, unidentified
MSLLYAGLDVSLEMTSICVVDADGRIVLETKAASDPEVLAGQLGGLPGGFERIGLEAGPLSQWLYFGLRDAGLPVVCIETRHAKAAITAMSMNKTDRNDARSLAQLVRSGWFKTVHVKSVESQELRTLLGSREFFVNKLRDHENEIRGLLRPFGLKVGQVSASGFAGRIRDLVADRPRLRLCMEALLTARETIMKQLAALHGELLRVTKNDELCVRFMGIPGVGPVTALAFKTAIDRPDRFRRSSDVGAHLGLAPRQHQSGEVDRRGRIAKNGDGLTRTALFSAANVMLSRSTQWTALKHWGVSLARRSSLKKAKVAVARKLAVIMHRMWRDGSPFRWTAKEA

SEQ ID NO: 237586 - protein, 288 aa, unidentified
MTEILKSMIAAIGIDIGKSSFHVVGLDGRGAVALRQKWSRGQLEARLANMPACLIGMEACVGAHHLSRRLRLLGHDARLMPAKYVRAYSKGQKNDFRDAEAIAEAVQRPTMKFVATKTADQLDLQALHRVRERLVSQRTGVINQIRAFLLERGIAVRQGRHFLRAELPGILATGCEVLSGRMVHLIADLAGDWRRLDERIEGLSGEIAALARQDAGCERLMSVPGIGPIISSAMVAAIGAGDTFTKGRDFAAWLGLVPKQFSTGDRTVLGKISKRGNRYLRALFVQAA

SEQ ID NO: 237587 - protein, 326 aa, unidentified
MATPAKPKVVGIDVSKDSLAICHLVEEKVQHLEMENSKAGFQQLVKQCGTESLYVMEATGIYYLQLAYYLYEQGAPVVVVNPVIIKRFIQMHLGKGKSDKKDAQWIRRYGEQTQVAYWQPEEQVIVECRQLEQLTEQFIKQRTMVINSLEALERQPVVSELAVKSLKQTLKMLEKQIKQIQDKLLVTLEKAFAKEIKLLSSIPGIGRKTAGMLLLFAGGFRNITNYRQLIAKAGLSPREFTSGSSIRGKVRITKMGGSLIRSKLFMCSFSAKGSNAACKALYERLVAKGKNGKVALIAVCNKLLKQAFAIVKSSIPYRPDFANISA

SEQ ID NO: 237588 - protein, 453 aa, unidentified
MKEEKQKNFPTENVKKKRFSQGLPVFTPYAAGIDIGDTMNDVAISDGATGHDVREYKAFTEDLTNLVEWLVSEGITTVAMESTGVYWLNLYLMLEEAGIEPYLVNARHVKNVTGRKKDDTDAIWIQKLHSCGLLQKSFQPESEIRVLRTYVRQRKNLIYISSDSVRRMQKALELMNIKLHTVISDILGKTGLQMVNAILQGERDQDELIKLKDPRIKASEEDIKKSLVGIWKEEYLFTLKQAYDEYVFYQSQINACEEKIKEQLLNQAASILDGDLTDIFVKKKPKKNQFSVEIGPLLKIIAGVDLTKVEGISEISTLELVSEIGTDMSKWQNGKHFSAWLNVAPNTKITGGKIISSKMQKKKNHAGQTMRMSASCLSNSKSSMGDFSRKMKSKLGKKAGVVATAHRLARIVYTMIKEKKEYDPQITATNNEIWKAKKIKYYEKQILQLRKTG

SEQ ID NO: 237589 - protein, 350 aa, unidentified
MLAGVDADTGQVLSGRQIAADDGGHLQAVRWARNLSSERVWAIEDCRHVSRRLEEALLAAGERVIRVPPKMMGASRRGEREAGKSDEIDALAVARAVVKDGVERFPAAYLDERAMEIRLLSDHRDDLVRERTRIQNRLRWHLLQLCPELEAQLPKGGLDRHVVLARIAKRLRAFAGDQRARVAREQLSRIRTLTREAGQLERELHRLVEAHRPALLAERGCGTLTAAALIGRTAGAERFPTDAHFARQAGVAPIPASSGRVVRHRLHRGGDRQLNRALYMIAITKARIDPQTKAYLERKRAEGKTKREALRCLKRHLARHIHRLLSMPAIDPDQSAPVELNAAISRRCLT

SEQ ID NO: 237590 - protein, 357 aa, unidentified
MPSSNAKYIGLDVHKETIAIAVLNAAGKLVMESIVETKASTLLDFLHGLRGELHVTLEEGTWAAWLHDVLKPHVAELVVCNPRRNALLKEGSKSDKIDARKLAELLRSGMLRAVYHGENGLRALRELVRSYEAVSKDVRRVMNRLKALYRGWGIPCKGIQVYGRRHRQQWLEKLRESGVRRRAELFYQQLDALQDLRHTVRGELLVESRKYPAVKILRRIPFIGPLRAAELVALMQTPQRFRSKRQLWTYSGLAVVTHDSAQFRYVDGQLQRAKKPQQVRGLNRNHNHAMKEILKSAAESASRRAGPCRDFYEGLLAKGIKPELARLTLARKIAAIILTLWKKGESFDAKHVKPQAA

SEQ ID NO: 237591 - protein, 405 aa, unidentified
MNAVGIDVSKGKSTVTIRRPGDVVIMSPCDIRHTQSSINALIEQIRNLDGETKVCMEHTGRYYEPVATWLSDAGIFVSAVNPILIREFGDDSLRAPKTDKADSKKIARYTLDRWAKLKQYGSMDKTRNQLKTMNRQFGFYMTQKTAMKNNLIALLDQTYPGANDFFDSPARSDGSQKWVDFVHTYWHVDCVRSRSLSAFTEHYQNWCKRKGYNFSAEKAEKVYQASCDLIAVFPKDDNTKMLIRQAVAMLNTASETVEILRLKMDGAASTLPEYPVVMALNGVGPTLGPQLMAEIGDVTRFTHRGALTAFAGVDPGKNDSGKHIQKSVPTTKKGSPYLRKTLFQIMDGLIKRSPIDDPVYAFMDKKRAQGKPYYVYMTAGANKFLRIYYGRVREYLASLSESEEI

SEQ ID NO: 237592 - protein, 359 aa, unidentified
MVYLGVDLHRKVSHVVALDEAGNVTLSRRLVNDPAEFRRVFGELEPEPIEVAFEATYGWGWFADLLADAGVAAHMAHPLATKAIGAGRVKNDAIDARTLAHLLRTNLLPEAWIAPPEVREARRLVRMRASLVRVRSRLKCQVHAICADLGLPIEVSDLFGVRGRELLESLALPAVTAGRLDANLRLIDALGGEIRLADREIVRHFRADPRIRRLTPIPGIGFLTAAMIVAEVGDVGRFGTPNRLCSWAGLTPTERSSADHTQRGHISKQGSRWLRWAMVEAAVAAARGPSLQRFFGPIKERRGTKIARVALARRLLSLAFYALRDEAGCRAFPVLAHPSRSTRARSPYGMASPDGRDFD

SEQ ID NO: 237593 - protein, 326 aa, unidentified
MTEHYIGVDLHKAFFQVCAVAPDGQRIWEARFARTPEEIGAFVARCSARDRVAVEASTPTWHFVDQIVDHVGEVRIVDALKTRLKAGYAAKTDRLDAQRLADALRRDSVVGIYYPPVAIRELRELCRGRHTLVQQRTRVVQRMRALLLRHGLVEARRLVRVDAALDTLTLPPRATASLAALRRVLALVRVEADGFEREIRRLAAVDPIGLALQQVPGVGPILALLIRAEIGELRRFATPGHLASYAGLVPRVSASAGRYHVGGITRRGSPWLRWALVEAAMHGLKRSDPTGRWARRLALRKGALKARVAIARSLCTDIFHAWPSHV

SEQ ID NO: 237594 - protein, 403 aa, unidentified
MPTVSEIRVSIDVGCHSHSVAIGLPTGEVLEEFDLQHRPEGFDLFFARVERCQRRYGGEVSVAMEGYNGWARPLDTLVRSHGYRLFNINNLKLARFKEIFPAAAKNDRIDARKGLELFQLCDHLPVARGVLQEVAATPLENDQLKRLTRRRRALVEERSRLLCRMQADLQAACPGLLAITPNADNVWFLNLLTHSDDLCKLARLRATTLLGIKGIGRKYAALITAWQKSAHFSHDVAWVGPMIIEDARRILELRAAIKALEARRAERVAQSEIAQCIDSIPGFGLVCAAEIAGELGTVARFANDGSLAVYMGMATLDNSSGKHRGSKNPKHVNTRAKAAMMVGIDRHRKQVPESQRYYEKKRTQGKTHNQAIRALGRHLCRVIFSMLKQGRCYEIREAKENRD

SEQ ID NO: 237595 - protein, 323 aa, unidentified
MSAFVGVDVAKKSFDIATPLGNGKFRTKAKLVNGQAGFQQFEDWLKRHAEPGAWIVMEATGTYHEALADFLHAKGYRICIANPAVIAAFADVELRRVKTDKADAKTISAYAQQREDSLRLWQPEPPAQRRLRALVRRLDDLKEILQMEKNRLDVAPAAVQGSIRSVMEHVELEIEETRKAIDQTIDDDPDLRQRRKLIVSIDGLGETTAALILAELGDPLKFAGPSAIVAFAGLNPMIHQSGEQVGQSTISRTGSTRLRSGMYMAGITAMKWNPVVKALAERLTMRHKAYKQIVCASMRKLLHLVYGVVKSGKPFDPQIALAA

SEQ ID NO: 237596 - protein, 483 aa, unidentified
MVTIPLRRLRYSSPAPVTLNIKEKVEGRKMARRKQRRKQFAVTDLPQHLQHVNLNAAGIDIGSDRHVAAVPVGRDEVSVREFAAFTADLNALADWLAKCGITSVAMESTGVYWIPLFELLEQRGFEVKLVDARQVKNVSGRKSDVLDCQWLQQLHTYGLLAGAFRPPDQVCVLRGYMRQREMLVQASSMHIQHMQKALQQMNLLLHNVVSDITGVTGMKIIKAIIIGERDPKVLARHRDQRCHSSAATIAKSLLGNYREEHLFALSQAVSLYETYQAKIAECEAAIAGYLGSQPNRTDEDPPPGDKSVRNRDRLRGGVDVRSQLYKITGVDLFNLPGLGADTLLTLAGEVGFDMTPWRSEKHFTSWLALCPGTRKSNGKVLSRKTKRSANRAAAAFRIAAASLSRSKTALGAFYRRIRVRVGPAEAITATARKLAVLYYSLLKYGAAYVEMGQTAYEQKYQQRRLNSIQKQALALGYQLIPAA

SEQ ID NO: 237597 - protein, 370 aa, unidentified
MSVRRILAKTIDTDLEYEAIGIDLAKNCVSTALLTTDGEVVCIDRLDYSELEKSAQALSPTTFAMEPCTEMNYLVQKLEAWGHRCLVIGGKNVQNYVENHYSGQKTDLNDAQALAFLAQDTQLRTIKAKDIEQQKYASLTTLREQYIKQYRQTIVSLKGICQAWGLNISKGISGKAQLKDLIENHAAFPEELRESLVDMVTHAQTTQKVLNKITKTLEVLAKNDKVCQLIQTIPGLGTICSCRLRATIGDIKRFKNPKDFPAYYGLVPRSIATGHNEKKGKITHRGDRTMRSLMVQGAGCVIRLATCGKLKSKQLTKWILKKQKEKMPWGKLVCAVAAKLLRIVRAILISSKPYNPKIAGVAKCSLSKGS

SEQ ID NO: 237598 - protein, 379 aa, unidentified
MMTPSIAATCFVAIDLSKSKWLVALDAPQLAKIKSVRLDGFDTAGLIDLVRATVAEASELCGPDQRPIVCFETGYDGFWLQRLLSNEGIETLVLDPTSFLVNRRARRVKTDRVDAEGMVVLLKNYCSGDRKAFRTVRVPTVAEEDAKRFHRERKRLMSERTGHINRIRALLALQGVRHINPAMVTWRKKLEGLETADGRPFPDQLMREIVRSFERLELTNKMIKALAEERDEALATESERFPEHEKAVLLEGLRGVGRHSAMLLSAEVFGREFKNRRHLSSYLGLTPSPYSSGDVERSQGISKAGNRPARTLGIELAWCWLRYQPQSALARWFRKYTAERPGVRKKVAIVALARKLIVALWRYVETGLVPSGAVLKAEV

SEQ ID NO: 237599 - protein, 375 aa, unidentified
MQENLRFLGLDVHAETIAVAIAEPDGEVRSLGTIPNRAESIRKMIRKLGPSEKLRVCYEAGPTGYVVYWQLTGLGIQCEVVAPTLVPVKAGDRVKTDRRDAEKLARCYRSGDLTAVWVPDEGSEALRDLVRAREAAKQDQMRARHRLSKFLLRAGQRPPTGIRPWTRPYLIWVAQLRFPQMAQEATRQDYLHEVEHMRGRVARLEQAITEAVKLASPALQQVINDLQALRGIADISAVTIAAELGQVSRFGSARQLMGYCGAVPSEDSSGKRTRRGGITKTGNAHLRRIVVEAAWSYRRPPCIWYGLRRRQESISEETKEIAWKAQHRLHKRYMKLGAAGKDQRKIVTAVARELLGFVWAIGTRAEIVASQQIAA

SEQ ID NO: 237600 - protein, 371 aa, unidentified
MKKNNTVKQSPKRALARETGPITIGMDLGDKISRYCVLDGEGEVQSEGSVGTTRQAMAQKFCGMRRCRIAMEVGTHSPWLSRWLSSLGFEVIVANARQVQLISASTRKNDRMDARLLARLARVDRQLLRPIRHRGEQAQADLMRIRIRATLVEARTGLVNAARGFAKAMGERLPACDTDTLGVAKLEGLPAGLQESLQPLLEQIEALTERIKKLESNIEQIARTRYPETQLLRQVSGVGTLIALTFVLTVEDRERFQKSRDVGCYVGLRPKQSESGESQPQLRISKEGDRYLRTLLVQGAHLILNRRGPDTDLKRWGLKLAERGGKNAKKRAIVAVARKLAVLLHRLWVTGEVYEPLRNSQAQRVAKKKVA

SEQ ID NO: 237601 - protein, 374 aa, unidentified
MDSVARSAGLIYLGMDTSKDKIAVAILHADKTSPDVEMIFNDEASIRRLINRFPEPGQLRACYEAGPVGFELHRLLASMGVACQVIAPSLIPTAPGDRVKTDRRDCKRLARLHRAGELVAIRVPTPAEEAVRDLCRARADLVDDRTRTRHRLSKFLLRHDRIWRGGEAWTAKHDQWLTSQRFDEPALTSTYRHYRAMLIARDAELTAIEADLAHWFDHGPFADAVARLAAYRGVAYLGALTIASEVGDWRRFPAAGAFMGFTGLVPSEYSSGNTVHRGHITKAGNAHLRTQLVESAWQYQHRPSIGVTITRRHKGLPPTTVARSWAAQQRLCARFRRLDARKTSRNLVVVAIARELAGFLWAEMTADEPQLPQA

SEQ ID NO: 237602 - protein, 453 aa, unidentified
MSRRNAPIPARADAATLLVVHPHAAAVDVHSDNHVACIGPEQVRTFGAYSADLATLADWFTQSGITTVVLESTGVYWIPLFELLEARGFEAFLIEPSQASHCGARPKTDRLDCQWLQRLHTFGLLRPSFRPPEAVLALRGYWRQRQMLVRYASHHVQHMQKALEQMNVKLTEVVSSITGVTGSAIIAAILAGERDAGKLAKLRHEKCARSEAEIALALEGTWRAEHLFALKQAWELYHHLHRQIDECDLKIAEELERLPDRRGDAPIASKPRRRGRKSNDVRFDATAKLTRAIGVDLTAIEGIDVTTALVILAEIGVDVGRFPDEKHFASWLGLCPRTSRSNKTERRRTPRKGKNRVAQALRMAAQAVGRTQTALGQFYRRIKSRIGGRGAITATAHKLSRLVYRMLRDGTEYVVRSLAEYEAQMREKLERSLRRKAEALGFDLTPKAPASSP

SEQ ID NO: 237603 - protein, 338 aa, unidentified
MEYKRISIDTSKHVFTIHGVDEKERPVLRREVGRAQVERFFAKIAPTEVVLEACGGSHHWGRVLSRMGHRVKLIPPQYVKPFVKRGKNDRNDAEAICEAASRPTMRTVPVRSVDEQAATLILKHREMLVGQRTQAINALRGHATEFGIIGAKGCANVEALITALLADTAVPDTAKSIFKDMGSHVADLDAKISALDQKLSELHKTNPVSQRLAAIPGVGPITAITMALTINAADFETGRHFAAWLGLTPREHSTGGKHRLGRISKAGNERLRQLLVIGAMSVVRFAKLGSKSASAWLLKLLERRPRKVAAVALANKIARVIWAMMVRGEAYRRQPVAA

SEQ ID NO: 237604 - protein, 373 aa, unidentified
MKSITKYVGLDVSKKSVDVAVADHGREAPRYWGKIPNCPEAVSKLMRKLGDPKELLVCYEAWPTGYDLYRQLTRMGIQCIVVAPSLTPVRPGDRVKTDRRDALRLAQLLRAGELTAVWVPGEEDEALRDLTRAREDAKKDLLAARHRLSKFLLRHGLYAPERVKPWGAAHRRWLDGLHFENKALQVTFQEYLHAIDEITERVKRLEAEIHEQASNSVHAPVIQALETLRGVAEVTAVTLVAEIGEFSRFTNPRQLMAFAGVTPREHSSGGTTRKGGITKAGNAHVRRVLLEAAWSYRYAPALKGGLRRRQEGQNPQLQAIAWKAQNRLRRKYHRLVLRGKSPAVAATAVARELLGFVWAIACKVEETRRTMAA

SEQ ID NO: 237605 - protein, 315 aa, unidentified
MNEPEDVVVGIDVAKAGLDVAVRPSGEERQLANDPAGIAVVVGWLQTIRPWVIVIEATGGYEAPLVAELGIAALPVAVVTPRPVRNFARATGRLAKTDRLDAQVLAHFGQAMRPTPRPLPDAAAQALAALVERRRQVVAMRTAEENRLGATRVAAVRARIQAHLAWLEADLGEIDGDLRQRLRASPLWREQDELLQSVPGIGPIVSLTLLAELPELGQLSREQIAALVGVAPLNRDSGSLRGRRAVWGGRRAVRTALYMGTLRATRCNPAIQPFYDRLLAAGKAKKVALVACMQKLLTILNAMVRHQAHWQAQAA

SEQ ID NO: 237606 - protein, 381 aa, unidentified
MNNNNQPILEGNRDQAIQDNPLVRVLKLGLDLHYRQVTVAMQEDGGRIKAAGKMGYEAFLDWIQKKLEAGWQVYSCYEAGASGYWLHRQLEQMGVRNLVVVPKMMDPGGKKQKTDKRDSGQLCDSLDRYLRGQDKALSIVAVPSLEQEEKRALIRYHRQIMADRGRCESRGKGLLCAQGIQVQGPWWQLKGWLELQRDARLKDWMKEQLIGWRNKILSADKEQDLLRKRIEALAAASLPKGLGAYSSVLLEYELRGLGRFKNRRQVASMTGLCPGVHLSDGRGKEGAINRCGIGLVRWTLVEAVWRLMKWQPHYPPVRRLAAGLVRSKRVRKRLAVQAARRLAIDLWRLATGQSTPEKLGLVMQSNSPEKVKQSRSTKKVG

SEQ ID NO: 237607 - protein, 371 aa, unidentified
MRFYQGQHRFYCGIDLHARSMHVCVIDHAGNLVFDKKLASRPEVLLRALEPFRDGLVIGVECMFAWYWVADFCVTHDIAFVLGHALYLKAIHGGKAKNDRIDATKLARLLRGGTFPTAYAYPRGMRETRDLLRRRTYLVRQRAQLLTHLQILNAQYNLAPFPQRLCYAANRAEMQVAERFADASVQRSAAANLAVIDRLDEVIADVERYLRRTAQVDGVQTYHRLQTIPGVGKLLALILLYEMHQVQRFASAGQFLSYARLVRCVHESAGKKLGTGGRKIGNAHLRWAFAEAACLLVQHSERAKRWKQRQGAQRGNGKALAILAARLARAVYHMLRKGEAFDEDRFWAGRPRPSATGSSSLSRPEVEHARA

SEQ ID NO: 237608 - protein, 333 aa, unidentified
MGRHGECGELALSHGNGEAEKFYRNLKEQGVKVRVGIEATGHARWFERLLAELGHGLWVGDAAEIKAKRVRKQKNDREDARLLRTLLVENRFPGVWLPDVGNRDLRQLLWHRHRLVQMRTRVMNQLQAVALNEGVRRKRGLWSKTGRAQLESFQLMPWATRRRKDLLELLDGLTPRIAALTAAIEKQVEQYPEAQRLMTHPGVGPLTALAYVLIIGSPERFRCGKQIGSYLGLIPCEDSSAGRQRLGHISKQGNSLLRFLLLEAAQAAVRSNPQWRREFLHLTMRRGRQIAVVALARKLAVGLYWMWRKGWDYEKSLQFGSHVGQPGTRYGVK

SEQ ID NO: 237609 - protein, 435 aa, unidentified
MEEVTDEPLYRDRVCGIDIGKAGLVATIRVPSDKDPARRAAETRSFGTTRRQVLALADWLRSWQVPAVVMEATGDYWKGPFYRLEAEGFECVLAVARQVKNLPGRSKRDPADSRWLAACLERGAVRPCFVATPEFRIIRLHTRYRRDLTGERTREKQRAEKVLESAAIKLSSVLTDLHGVTGRDIMDRLIAGERSPKVLAQLARAAARRKISQLEEAVEGAEFFTAGHAALLAVMLARIDRLSADIDGLSQVIEQLLAPYEDQLAQAESMPGWGRHAAQDVLAETGPDMSRFPTGAHLASWAGRAPLDHQSGTRAGRSTAKKGNRYLGAVTGETAVAAGRTQTREGARHRRLARRRGAAKACVATGNTQLRVYHKLLSSPGMRYADLGPDYYERRRDVRRQIAHHVGKLGALGFEVTLCRIPEPGPDRTGQIKPA

SEQ ID NO: 237610 - protein, 353 aa, unidentified
MPEKLIDWTGQMLYAGIDLHKSKWVITVRTLDTILKTFVCPPEKEVLLKSFQHQWPGAKIEAVYEAGCFGYTIAEYLNVNGVKTIITAPHNIPVAPGKFVKTDTIDSRKLAFELAKGSLTGIYQRNVDELYDRSLVRKRQQLVKRRVQIHNQIKGDLLFYGMTSVALNKKYWSKKTLADLKKINEGPISFRAAFKLVVEEYEFVRAQIRDIEALLTEIMASEKYQPKIERLCTIPGIGRLTAVTILLEIGDINRFASTEKFASYLGLTPSEYSSGETTRIGSLTGMGNSALRRLIVEATWVAIKTDPVLLSKYQRMSVGKPKCKAIVAVAKNLANRIRRVLKYDEPYVIGVVR

SEQ ID NO: 237611 - protein, 406 aa, unidentified
MIFVGDDWSEDHHDVEVLDEAGGRLARRRLPEGVDGIGQLHTLIAELATEPAEVVVGIETDRGLWVGALVAAGYRVYAINPRAVARYRERYGGGSGAKSDAGDAKVLADLVRTDRHNHRPVAGDSDLAEAVKVLARAQQRLVWSRQRQLNALRATLREFYPAALGAFGTDLASPDALGVLGRAPTPARGRALSRTQIGAALRRGGRQRGIERRAGEIQSALRGQQLEPPPMLADAFGATVSASVAVIGEMNRQLASLETQLAEHFERHPDADIIRSLPGLGVVIGARVLGEFGDDPTRYADAKARRNYAGTAPITIASGKKRVVRARYSGNRHLANACWWWAFCALKRSPGARRYYDEQRAKGADHDHALRALANRLVGILDGCLRHHSTYHEHTAWARYANPNTA

SEQ ID NO: 237612 - protein, 335 aa, unidentified
MNTPSVFVGIDVAKATLEAFCAELSLAPQVPNTPAGFRALCQALHPHRAKVLVVCEATGGLASPLVHALQQAQIPVSVLNPRRARDFARASGKLAKTDRIDARLLAEFGRRMQPSPTPPPEPHLQELAALVGRREELVQMRVAEQNRLHSSVHAAVRASLQRSIQRLSREIARLEGLLERLGQSRPQLAQKLSLLCAVEGVGPVSAATLLATVPELGTLSDGQCAHLWGVAPLNCDSGTWRGKRRIYGGRAFARRVLDMSALAAARANPVLAPFYRRLRAAGKPPKVALVAVMRKLLLYLNRQLRPQAEPPGFCPPKATVTALLNVERRAEQKTE

SEQ ID NO: 237613 - protein, 447 aa, unidentified
MRIVYQCCCGMDVHKDSVTACLLVTNQSGTVRTEKREFGTMTRDLRQLASWLASEGVQAIAMEATGVYWKPVWNILDAEKKFELLLVNAQHIKCVPGRKTDQKDSEWIADLLQHGLLRASFVPPVEIRRLRDLTRMRAKIRQTLASFANRIQKVLEDANIKLGSVASDVLGVSGRHMLKALLAGEQDPQKLANLAQGHLRKKLEPLQLALEGHFTEHHRLQLKFLLDFVEFGEKQLSNLDSEVQLLLTPVPSEPSVPNADDGKLAQAKDAPPQGKSGLQTAVELWDSIPGIDQLAATTLVAEIGANMDQFPSARHLAAWAGLCPGNNESAGKRRSGKTRKGSVWLRRALCQAAWAASRTKNTYLAAQYRRLIVRRGKKRTIVAVAHSMLIVAYCLLKRNCVYQDLGASYFDRLDERALTHRLVKKLIGLGYQVTLKPGRAETAPATA

SEQ ID NO: 237614 - protein, 368 aa, unidentified
MDKSTKLYVGMDVHKDSIDVATGDDAAGEVRHYGAIGGEMAAVSRLARKLESTGKVLVFVYEAGPCGFGIYRMLRAHGHECWVVSPGMTPRSNADRVKTDRRDCLKLARLARAGELTPIHVPDEIDEAMRDLVRAREDAVVMQRQARQRLGALLLRNDIRYNGKTLWSPAHRRFIAELKLPHPAQHIAFEEYAQAVDEAGQRIERLEAAIGDELTRWRWRPVVEALQAFRGIRTIHAVRLVAELGDLTRFANPRRLMGFLGLVPSENSTGNRRRQGAITKTGNSSARRALVEAAWAYRYGARVSVGIARRQSGLPKPVTDLAWKAQLRLCSRYRRLSARGLNRNKIIVAVARELSGFVWALGQQVKPL

SEQ ID NO: 237615 - protein, 342 aa, unidentified
MLYVGIDIAKNKHDVTALNVPGKTVLKPLTFSNNKAGFELLDLSLRQLNQDCLIALENTGHYAFNLLNFLHEQGYKVYTYNPLLIKEFAKSLSLRKTKTDKKDAHGIALKLLSDPNREQFQHDNRQVDLKILARHIHRLKKKQSDWKVQYTRCLDIIFPELDKIVGKHSEYTYQLLTRYPNPQKRIEAGFDKLIEIKRLTASKIQDILSVAPRSIGTTSPAREFEIIEIIKHYKRLIDKAETCVNDLMAEFNSVITTVTGIGGRLGAVILAEIRNIHAFDNPAQLQAFAGLDSSIYQSGQIDLAGRMIKRGSPHLRWALIQAAKACPRFSPAFKAYLKTKLE

SEQ ID NO: 237616 - protein, 347 aa, unidentified
MHARSTVAGVLDGGSGELRSLRVPSRCEETVAWLRSLAEPVRVAYEAGPTGYGLARACAAAGIGCLVAAPSKIPRASGERVKTDRRDAERLARLLRLGELVAVRVPDPDEEAARDLVRARADARTDLMRARHRLSKLLLRHGFVYEASAWSCAHDAWLRSLRFDSRVLSLAFDECYGAISQAKLRRDSLDRAIAELAMEAPFADVVGRLVCLRGVSTLTALALTVELGDWRRFRPESLGPFLGLTPSERSSGQRRRLGAISKTGNTHARWLLIEAAWHQRRPPRPSAALERRRSGQPATVRARADASARRLHHRWLTLERRGKPRTLIAVAVGRELAGHCWALATMS

SEQ ID NO: 237617 - protein, 429 aa, unidentified
MSYRIAGIDVHKKMLAVVVSDVEIDSEYQFERRMFSSSPEQLRSLAAWLLEQEAEEVVMESTAQYWKPVWEALERHWKPLCEKREGARRRSGTLHLAQALSNRGRRGRKKDFADAERLVKRLVAQELTLSFVPDAEQRLWRTVTRKKYQLRCDRIRLQNQLESLLEEAHIKLSSLVSDLLGLSARRMLKAIAEGETNPAALATLADKHLRATPEQLCDALAACTELNAVYRRLLKLALEELRLIDEQIGQLDQEMASLLRQHQDAVQRLAEVPGLGVDSAQQIIAEVGPTAATFPSQKCLSSWVGACPGDDESAGVNYNHRSPKGNRHMRRLLNQAANAAARTKGSIFEIVYRRSVIRLGHNQAIGAIAHRQCRLIWLILHQGVRYEERGPAVTKRSKQLRTWKMIRQLRSLGYRIELPNPQPTQAQAQ

SEQ ID NO: 237618 - protein, 397 aa, unidentified
MYIVGIDIAKRKHEAAVIDGEGTVIIKPFSFTNNCSGYNRLLAMLTKAKLPLDEVSFAMEATGHYWLALFTRLQKEGFRVQVINPVQTNSIRSFYIRQAKTDPRDALLIAEVIRFGHFSESTLHPENIYELRELCRGRHAIVSMQADVKRKVVALLDQVFPEYETAFTNMFSDTSMAILQTCPTPKELSEMPLEELCHLIEVSSHKRFRMAKAQELQALARNSFGFAMAGDVFSTMIRLYAKHLDFLKQQVREMDRKIAEIMDTLDTPITTITGIGPTLGAYILSEIGDISRFSSAAKLAAYAGIDPTMRQSGEYNGVRNRMSKRGSPYLRHAIWLAASSAVLHDPALKLYFQKKRDEGKPYMASVGHACRKMVSIIYAVMRDNKAYTPYIPNEISA

SEQ ID NO: 237619 - protein, 368 aa, unidentified
MKSILYVGMDVHILNYTLCCYDFEKDEVFAITTVQPDVRHILSYLERVKRNYPGYEILCGYEAGTLGYSLHRQLLSHGIHCIILAPTTMPRTSKQRIKTDRRDAANIARCLAYNTYGAVYVPTEEDNAVKEYIRMRDDEKDTLKKLKQRILSFCARHGKHYTEGSNWTQKHLAWINKLDFGQGVLQEAFREYLALFYRASESVALFDRRIEELAQGKNYNEKVRKLICFIGVKSHTALAAIVETGDFNRFRTADHYASYLGLVPGENSSGSSTQRTGITKAGNSHVRKLLIEAAQCYGRGRVGTKSKALAVRQAGNERNVIAYADKANDRLRRKFYKIMFRSKRNIAATAVARELACFFWGMMTGNIA

SEQ ID NO: 237620 - protein, 441 aa, unidentified
MAMRKREEQVFPNAAGVDVGASSHWVAVPSISTDAPVREFGAMTDDLNAMADWLLGCGVDVVALESTGVYWIAVYEVLEQRGLKVWLVDARQVKYVPGRKSDVQDCQWLQKLMSHGLLRAAFRPSADVCVIRAVARQREVLLTEQASWVQRMQKALVQMNLQLTEVLTDVMGVTGQAIIRAIVAGERDAVVLAQHRNRRVKASQADVIKALSGNWREEHLFVLGQSLAMYDDIARHLAGCDTKLQALLTERSRGGIELGKPPRAGSRTRAVFDLRQTLADWAGVDLTRINGLDVTSVMKILSEVGPDLSRFANVKHFCSWLGLCPATKISGGKVISASTKHSANRVRQTLKLAAMSLSRSQSALGAFYRRLCTRMGKPSANTAAAHKLARLVYFMLTRGEAFVDQGQQRYEEQQRERSVAALKRRAAALGFQVAPVAPAAT

SEQ ID NO: 237621 - protein, 457 aa, unidentified
MPARRKQSRSGGVSPAHTIDPNAAGVDVGATEIYIAVPADRDPHPVRRFATFTEDLLEAAEWLKQCGVKTVAMESTGVYWIPLFQILEARGMKVCLVNARHVKNVPGRKSDVCDCQWLQHLHSAGLLRPSFRPEQQVCAVRSLVRYRDSLVQLSAMHLQHMQKALSQMNLQLHHVISDLGGKTGMAIVEAILGGERDPHQLAQLRDPRTKASEETIAKSLVGDYRREHLFTLRQSMTGFRQNSQLIAGCDVEIESLLKQFSSGDGPGAEAVPEPQAELKRKPRRNEMSFDLRTQLHRIFAVDLTEIPGINTLTAHALFTEVGRDLSKFAHVAAFTSWMGLCPDNRVSGGKILHARTRRVNNRVAKALRMAAQALSRSNGWLGQFYRRMRAKLGGPKAITATAHKLARIVYHLLTTGQAYDETVFAQQEAQNKQRNENRLRHQARKLGFELTLIPAQM

SEQ ID NO: 237622 - protein, 350 aa, unidentified
MTTQLETITAVTAGVDTHRDVHMVAALDQRGAELGVQAFSTDPAGHQNMLAWLERFGPVGLVGVEGTGTYGAGLTRFLQRNDVVVVEISRPDRQERRSHGKSDEVDAIAAARAAQSGKATAQPKTRTGNVEAIRALRMVRRSATRDRTSAINQMRALVVTSPDDIRETFRGLTTNKLVSVAARLRPSDPTTVHGATKFALRELARRVQFLNAEIKQVNDILSPLITATAPELVARHGIGIETAATLLVTAGDNPNRLHSEAAFAHLCGSAPINASSGLITRKRLNPRGDRLANEALWRIVMVRMSSEPRTRAYVQRRTIEGKSKREIIRCLKRYVAREVFKDLKQPLDNQ

SEQ ID NO: 237623 - protein, 432 aa, unidentified
MKFNQSNKQNQRISRISETTLVIGTDIAKHNHVARAFNYRGIELGKRCLFQNDENGLLNLLAWAESIKQEHGLKDVLLGVEPTGHYWFPLFHFLKQRGIEVVLVNPHHVKKSKELDDNSPTKNDIKDAKVVAKLVIDGRYTQPQLPEGVYAELRVLMNQRDRLCGDLNRVKGRIHNWLDRFFPEYTQVFKDWEGKASLITLQNFPLPQDVIAAGETTIVSTWKKGDVKRAVGPKRAELLYRKAQKSIGLTEGATAAKHELAMYLEQYAMLCRQIDQLMELVASLVEQIPGATHMMSIPCIGLITVAGFLAEVGDLSGYDHSQQIVRHAGLSLRENSSGLHKGETTISKRGRCRLRALLFRAALTMVAKNPEFRALHLYFTTRRENPLKKKQSIIAICNKLIRVLFELGRKQKNYDASKVLGSHREAQLQAAA

SEQ ID NO: 237624 - protein, 361 aa, unidentified
MNRALKDNQDAFAGQEFYIGIDVHQKQWTISVQSNKLPLAKPLTIDPSAGSLSSYLKRQYPGGKYHAVYEAGYSGFWPARDLLSHEVETIVVNPADIPTMHKERSTKTDSVDSRKLARSLENKELRAIYIPERKAEEYRLLNRYRSQLVRDETRIKNRIKAILAEFNYRVPVELEGNRWSGAYVRWLQTNTFETPYAQIAYNERLEQLAESRKRLAKVLRELKLMATQEPAIASLVKLLQSVPGVGFLTAILLVVELIDMTRFKRFDELASYIGLATSIHESDERSYSRGLTKRQHHELRSRLLESAWIAVRKDPVLTMKFGQLCKRMNKNKAIIRIAKMLLSRIRTVWKTETPYVYGVIE

SEQ ID NO: 237625 - protein, 402 aa, unidentified
MNCVGIDVSKGKSMIAVMRPFGEVVVSPFEVRHTANELSELAGLLKSLDGETRVVMESTGNYHAPVAWLLHDAGLYVSVVNAMLVHDYGNNSLRRAKTDKKDAVKLANYGLDHWLTLPRYIPEEDTRLMLKICYRQYQQYSKVQTMLKNNLISLLDTTFPDANRLFTSPPRADGSEKWVDFVATFWHCECVCGRSEKAFTTQYQKWCRKHGYNFSEDKALDIYASACRHFGVIPKTDTAKLLVEQAISQLQTTSSALAALKQEMQSLAASLPEYPVVMGMFGVGPTLGPQLMAEIGDVRRFHSKKALVAFAGIDAPPYQSGQMDVRSRSISKRGSASLRRTLFLVMGVLLQCAPMDEPVYQFMNKKRSEGKPYRVYMMASANKFLRIYYASVKTYLDSLEHN

SEQ ID NO: 237626 - protein, 448 aa, unidentified
MSTPQVIDDQEHERVFRRVAAVDVAKKDGMVCTRLPHPSKPGVRQSVVWSVPATMNSVRELAARLTGLRIQKVTLESTSDYWRIWFYVLAAAGLDVQLVSATQVKQLSGRPKTDKLDAQWLARLTEMGLLRPSFVPPAEIRVLRDYTRARADLTRDRTRCWARLEKLLEDALIKVSSVASKMATVSVRDMIEALIAGERDPQVLAGLARTRMRARHAALAEALTGMFDDHHSELARLLLDQIDLCDRGIARLDILIDEHLCQLKACWGIDADGSTSPLAGNEPDAIALPAVVRLDEIPGISAEVAASIIAETGLDMSRFPTPGHLVSWAGLCPRTIQSGARKHDGKKPGNAYLRNYLGLAAVSAAGTATFLGERYQRIARRRGKRKAQVAVARSILVIAWHLLNDPAARYHDLGPGWYETKIDTKRKARSHIRQLEALGYRVTLAPAA

SEQ ID NO: 237627 - protein, 344 aa, unidentified
MQNDTLVAVDLAKTVFQVAVSHHPGQVSKNRRLSRTQFAEFLAQLPKATIVMEACGSAHFWARRMQALHHTPVLLSPHTVTPYVGRNKTDRNDTKGMLEAHRNEEIRPVPVKTLAQQALCSLHRIRAGWIAERTARINTLRGLLREFGIAIPVGAQHAVPNAWLHIEDAESELPDSIRPALAEICTEIRELERRIKMIETQLAALAAQTPAVARLMTIPGIGLIIATALVAFVGDIHRFPSARHFASYLGLTPKEHSTGSRRRLGAISKQGDVFLRTLLIHGARSVLNAATRQKTPDRLHAWALSRHAARGHNKAATAVANKIARIVWAVWKRDQPFHSVPVAA

SEQ ID NO: 237628 - protein, 355 aa, unidentified
MSGLKHQMEKRSMEHFVGLDISVKETSVCIVDDAGKIVRETRVASEPEALLQVLSKQAYRFKRIGLEAGPLSQWIYSVLAEVELPVICVETRHMRALLKAQINKTDRNDARGIAQMMRVGLYRPVHVKTVRSQQLRMLLTHRKLLQSKAIAIENDLRATLRNFGLKVGMVGTAKFEARIKQLIENLPDLAVLVEPLLIVRRTLREQTAILHRRVLSIVRDDDVCRRLMTAPGVGPVVALTYRATVDVPARFRNSKAVGAVLGLTPSKYQSGEIDRTGRISKCGDEMMRVMLYEAAQIILFRSEKWSWLKAWAMKIARHRGMKKAVVALARRLAVIMHRMWVDGTEFRWTREVQPA

SEQ ID NO: 237629 - protein, 347 aa, unidentified
MDHIGMDVHKKESQICILAEGGELIERRVRTEPERFTAILGDRPRGRILLEASTESEWVARCLETLGHEVIVADPNFAPMYATRTRKIKTDRRDARALAEACLLGAYRRAHRLSDPQRHVRGRLLVRDALVRTRTCYISLIRALLRQHGYRVPSGSAEAFLRRVLALSLPGRLLSQIAPLLAVMRHVNRQLSYSDQVIEDVTAQDERVQRLRTVPSVGPMTAAAFVATIDDVRRFRRAHEVEAYLGLVPRELSSGESQRRGRITKAGHARMRWLLIQAAVSILRRRPPQAEALHAWALHIAARRGKHVAVVALARRLAGILYALLRDGSVFAPGRSRHPGAALALPA

SEQ ID NO: 237630 - protein, 340 aa, unidentified
MNTMTLLGIDIGKHSFHLHGQDAKGHQVLRKKTNRGQLLSTLAQVPSCTVVMESCGGAHWLARQIGALGHEVKLIAPQYVKPFVKGNKNDFIDAEAICEAASRPAMRFCSIKTAEQQTLSALHRVRESLIGHRTVATNQIHGFLLEFGISLPIGVTALHRVPALLDDPQHPVPVRLKGVVMRLHRQIQQLNDEIKDIESDLKQQLKEDDAGSRLQSIPGIGPITASAVLADVGDASNYRSGRDFAASLGLVPKQYSTGGKTVLQGISKRGDKHIRQLLVQGARALMQHIDKREDALGPWVRELLTRRHANVVACALANKLARIVWAVLAKGGQYDPHPNV

SEQ ID NO: 237631 - protein, 439 aa, unidentified
MIAASPPLAPDAAVFAAFVGLDWADQKHDVALYDQRGGRPECSVLKHTPEAIDDWACGLRERFGGRPIAVCFEQSQGGIAYALLKYDFLMLFPLPPARLAAYRESFSNSGAKDDPSDALLLLDYVLRHRDQLRVWQPDTPATRELQLLTEAGHRRGAVVGDAVDQRTRLSNQLTAVLKRYFPQAISLVGCDVDTPLACDFLAKWPSLAAVQRAAPATLRKFYYAHHCRHEERIVQRLELVRSAIPLTTDAALIQTGVLQVHCLIGQLRALAKAIQKYEQRLSQLMDEHPDAALFLALPGAGPALAPRLLVAFGSDRQRFQTAAEIQAFSGIAPVTKRSGKRHTVHRRWACPKFLLQTFHEFAKCSCKKSAWARAFYDLQRSRGKGHHTSLRALAFKWIRILFRCWKTRTSYSEQRYLDALHARNAPLLAFLSNPATSSS

SEQ ID NO: 237632 - protein, 359 aa, unidentified
MMVLGIDPHKKSHTVVALEAATGEPVAELTVAADRRGHERLIAWARRLTPERRFAIEDCRHVSGHLERALIAAGEPCVRVPPKLMAQTRRSARRRGKSDAIDAACVARAALREPGLPEARLAGPERALRLLVDHRSDLVGERTRIQNRLRWHLHDLGLGLEVPPKALGRACWLARLEEELAPLPGVQARIARELVARCRTLSAEISGLGREIAVLTEELAPELLALPGCGALSAASLVGETAGAERFASAARFAMHAGVAPLPVSSGQSNRHRLNRRGNRQLNAALHRIALTQLRMHEPAQAFVARKRAEGKSTREALRCLKRHLARIVWRELRNAEARRELLPVCGDPPARAALPLAS

SEQ ID NO: 237633 - protein, 387 aa, unidentified
MDNRKSTASAVVSDVATVYVAIELSMKNWLAAVRSPRQEQASRHKLAAADARGLWSMIERERAALLRCGHSEVRVVTCYEAGRDGFWLHRFLVAHGAESRVVDPGSVLVNRRARRAKSDRLDVEGLLRLVIRHDAGDRHLGRMVAVPSVAEEDARRPGRERQRLLSERTAHSNRIQGLLATHGAYGYRPLRTDRWVQLAALRGADGQSLPAQVHDEIVRELHRLEYVQAQIAAVEKQRASALGEAAADDRGARHAIALLRLRGFGMEFSNMLAREVYYREFANRRKVASYIGLTPSPFQSGGIDHEQGIAKAGNRRARSTAIELAWLWLRHQPDSELSRWFHARLGANKSGRLKRILIVALARKLVVALWRYLTTGLLPQGARLKPS

SEQ ID NO: 237634 - protein, 402 aa, unidentified
MQTSSIDVFIGIDVGKSDHWATALDRDGERLFDKALPNDETRLRDLYERLSHHGRVLVVVDQPATIGALAVAVAQDMGITVGYLPGLSMRRIADLTPGNAKTDARDAAVIAQAARTMPHTLRAINGSDEDAAALSMLTGFDLDLARQVNQTSNRIRGMYTQIHPALEKVLGPRLEHDAVLEVIASWPTPAALRKAGRARINAKLKAHGARHHEAWADEIISALKAQSVVVAGTDAAGIVLPHLARQLIALHAQRSDVAAKVEALVEAHPLYQVLTSMPGIGVRTAAVLIAETLGRDFATGAHLASYAGLTPVTRHSGSSIRGEYTSHAGNKRLKRAMFLSAFASLRSDPASRAYYDRKIAQGKRHNQAVIALAHRRILTLHAMIRNGTLYDPQPTHQLPAAA

SEQ ID NO: 237635 - protein, 312 aa, unidentified
MTKTICGVDVSKHRLDAHVVPSGVFASFDNDAAGIAMLVGFCRQHGVDLVAIEATGGYERTAFLLLWEAGVACGMTNPKNVRHYAKAMGISEKTDRIDAAVIARFAVAKDLKPTELPTISQQRLKALVARLRQVTDDLTVQKQRRSSTMNDEMTASINEVIALLKRQTKTLEGEIASMIDDDPLWSHLDAALRSTKGVAGRTVAWLLAELPEIGIYSNKAVVKLAGLAPLVDDSGERTGKRHISGGREGIRSILFLVARIACRFDKSLDAFHRKLIEAGKPKMVARIALARKFLVRLNAKTREAREQYALAT

SEQ ID NO: 237636 - protein, 324 aa, unidentified
MQHHIGVDISKKDFYACFNEQDEPIKFNNDHVGIRNFIKYLNTNQYSIHDTVIGVESTGAYHLPLSLICSQNNYPIKVINPLLITKKQNQTGVRRVKNDKKDSRLIRHCLTTGAGYQFCETNDSLILKNLVRQRDYLSDTKRRLNLKQQDISYKETYLKCKITTVNSEISLIIAKKIKQIEKELKQYDPATQKLLRSIPGIGPITAVSFISEVANIQRFKTSKQLTAYIGLDSRVHQSGTSIQGKGYITKRGNKILRTRLFNAASVAVLHPNMFQSFFQKKRSEGKPYRVALVATMHKMVKVVFAVWTRNTPFVDQLPPTQKEG

SEQ ID NO: 237637 - protein, 419 aa, unidentified
MTRSKAYRAVAVKHVDLDALLASHAGCPARVGLDISKDEVRAVLRWPEGQFERPWRSDNPGQVGALTDLLRRLGQGRALVVALEPTGTYGDALRQALHDAAVVVHRVSPKVAHDYAEVFDGVPSQHDGKDAAVVAELSATGKSVVWPFTRNAADQEMAYWVDRLDQQRRLLAMSYGRLEGLLARHWPEVTRLLPVRSGVLLRCLERYGSPAAVAADAQALERLRRWGGPLLSEAKARSVLATAATRVGVRTEAFDVRRLREHAGQARQVRQDQGVCRRRLAELAVGNAVLTAQASVVGAATACVLWVQVGDPRGYGCGAAYRKAMGLNLTERSSGRWQGGLHISRRGAGEARRWLYYAAMRLVRSAGVRGWYEAKKERDGGRAGRALVGVTRKLALALYHVGVSGEVFDPRRLFAGSAK

SEQ ID NO: 237638 - protein, 429 aa, unidentified
MRTESTPGARGPVFCGVDTHADSHWLCVLDWRGRKVLSRQFPADAAGYEALAGAIAAAGEPACIAMEGTSSYGAGLTRHLASLGMPVREALSPARMQRRRPGQGKCDEADAERAARAAMSGSRLGTPKSQDGWVDGVRCMLAARSGAVKARTSAINTARSLLTTAPEGLRSRFRGMGGPRLMEELPSVRAEGALGAALGALADLWAAARDAALDMERAIEASLEENCPALLAMYGCGPVSAAKLAVAAGDNPGRLRSEASFAAICGACPIPASSGKTVRHRLNRGGDRQANSALYEIARQRVMRDPETAEYAERARARGKSDREVMRCLKRYVAREAYRALMRPHEIRRPEDASELVAARRAAKVSQVRAASILGTSEKYISMLERGQRELKPIRRAYEAWVEAGLPLDWDRQAFEAERKMDSKKGLAI

SEQ ID NO: 237639 - protein, 340 aa, unidentified
MGSVTTIGLDFAKNVFQVHGVDAEGVAVIRQRLTRGRMLRFFAKLPPCLVGIEACATSHHWARELVALGHDVKLMPAQYVKPYVKRGKNDAADAEAICEAVTRPTMRFVGTKSPEQQSAMMLHGVRLILNRQRTQLSNAMRAHLAEFGIAAPIGRNGIEQLLNVIANPTDERVPADARFCLEMLAAQLRIVKEQFLENERRILASARATELGRRLMEIPSVGPLLASAIVATVPDPAIFRSERDLAAWIGLVPRQNSSGGKERLGGITKAGHQYLRQMLIVGAMAVVRFAERNGAKRPWLVQLLARRKAKVAAVALANKNARMIWAMMASGERYREPLAP

SEQ ID NO: 237640 - protein, 343 aa, unidentified
MKIYALGIDLGKTVFHLVGLDASGQVVVRKRCSRTQLLTFTANLQVQLIGMEACSGSHFLGRALRAQGHEVRLMPAQYVKPYVKTNKTDYIDAEAIAEAVQRPRMRFVPIKTEEQLDLQALHRVRERWVMRRTAVVNQIRSVLLERGLTLPKGRSHLDEQLPRILEDAELNLSDSFRVLLAQLKLELEQLAARIGEMDRVLQKTARENEACQRLTEIPGVGPVTSTALIGAIGNGSAFGKGRALSSWMGIVPGEHSSGGKQKLLGISKRGNKYLRRLFVQGARSVLQQRHKQVPGLSEWIAQLLARTHQNVVVVALANKLVRMAWAVLCKNERYRAPVFAGTI

SEQ ID NO: 237641 - protein, 400 aa, unidentified
MDKDRIVAGLDVHKDTIYLCVMDNTESVIFAKVYGTLTPDLQLMCSDMVSHGVTEAAMESTSTYWVPVWNALCESMSLKLVNPYFIKQLPGSKSDVKDAQWIAECLLKNLIRGSFVPDKTVQDMRKYNRRIFDLNEDLTYNTNKLDAALQRCGFRLSNYVSRVNGKSYQKCVRAIITGITDPEELVKLIHGKTLRKYGRNIIKDAVTGDFHQADICLLKQYAELIEVIERQIEECRNALIAMCQEHFPKQFKRLQSIPGVKERAASAIIAETGADMKPFEKATNLVGWCGLKPRNDISNNKVKSNRTTHGNRFLRQILIEISWVASRTRNCFFSNFSYVQCTQRHKNKMKIQVAIARKLLVAVWHMLTKDEDFIDVYLKRLEKEAEWQNDIQALESLWVG

SEQ ID NO: 237642 - protein, 349 aa, unidentified
MSPKLNSGIAVIGIDIGKNSFHIVGLDRRGAIALRQKWSRGQVATRLATMPPCLIGMEACVGAHHLSRKLTSLGHDARLMPAKYVRPYSRGQKNDFRDAEAIAEAVQRPTMKFVATKTAEQLDLQALHRVRERLVSQRTGVINQIRAFLLERGVAVRQGLRFLRAELPRILATPCDALSPGMMRVIEDLAGDWRRLDERIEGLSSEIEVVARRDAGCERLMSVPGIGPIISSAMVAAIGSGDAFTKGRDFAAWLGLVPKQISTGDRTILGKISKRGNRYLRVLFVQAAWVVLINPKSWQRHGLKPWLEAAKKRLHHNVLAIALANKLARIAWSVLAHGRTFEASRIQVA

SEQ ID NO: 237643 - protein, 316 aa, unidentified
MATTPVFIGIDVSKDRLDVALRPTSDRWAVANDESGVAALVARLALLSPTLIVLEATGGLEVPLTGALAAAGLPVVVVNPRQVRDFAKATGKLAKTDALDASILAQFAEVIRPALRPLPDAATQALSAQLARRRQLIEMLTAEKNRLGPAPPPLRKGIRAHITWLERQLARTDDDLAQAIRESPVWRAKDDLLRSAPGVGPVLATTLLAGLPELGTLSRQQIAALVGVAPLNRDSGTLRGRRRVWGGRAHVRAVLYMAALTATRYNPVIRAFYDRLCAAGKAKKVALTACMRKLLTILNSMVKHRTRWQENIASTP

SEQ ID NO: 237644 - protein, 351 aa, unidentified
MRYIGVDVGKKRCQACITDEEGVILDEFPFTNNGEGIQRLLGQVGDVNCKAVLESTGNLWLRIYEAMEDHGVEVKLANPYKTKAIASARIKTDKLSARVLAHLLRADLVAECYVSSREVRRVNALLRQRASLVRMRTMVKNRVHSLLDRYGYSSPWSDAFGVAGTRWLRGLEVDPVDRCILDTHLRHLECLDGEMGVLDSWIASRAMVSEDALLLMTLTGIDFHSALLLACEIGVIGRFPSPRHLVSWMGLCPSLYQSGNSLVMGRMKKDSNGRVRWVLVQAARTASRTDPRMRELYLRVAARKGDKKAVVRVANKMGVIVWHMLTERRPYEQVKEGLYRSKLKKMKRVAS

SEQ ID NO: 237645 - protein, 316 aa, unidentified
MTASLLFAGIDVAKATLDIAVRPNAQTWQVIYDDVHVEALVTQLNDLSPTLIVVEATGGLERPLVVALLTAGLPVVVINPRLARDFAKATGRLAKTDRIDAQVLAHYGEAIRPSCRPLPDADTQQLRAMVDRRRQLVDMMTAEQSRLSAAPARIHDAIVSHLTWLRQQLASLDNDLDEMLQASPIWRQRDDMLQSTPGVGPVLSRTLMSQLPELGDLNRKEIAALVGVAPFNCDSGAWQGRRTIWGGRAAVRSVLYMSTLAATRHNPVIREFYERLLAAGKAKKVALTACMRKLLTILNAMVKNQQRWQPRVAKRM

SEQ ID NO: 237646 - protein, 344 aa, unidentified
MLMVRNVVGGVDTHADAHVAAVVDSNGGLLGVESFPADEAGFEDLFGWLVGFGPVLRVGVEGTGSWGVGLARFLAGADVEVVEVDRPNRQQRRKVGKSDPTDAVSAARAALSGAAGGIPKTRNGPVEEMRVLLVARRSARTQRIQTLNQLRHLVFCAPEPIRVRFKDRYKTGLVTEAAAMRPRKGSDPVEFTTNTVIRSLARRIQGLNAEMRAIDQALVVLINQTAPTLLELYGAGPDSAASLLVAAGDNPDRLRSERSWAHLCGVTPIPASSGKVIRYRLNRGGDRNANAALYRIVLTRMSSHQETRTYVARRRAEGLSTPEVMRCLKRYVARQVFKQLPRAA

SEQ ID NO: 237647 - protein, 343 aa, unidentified
MGTQIIGGVDTHLDVHVAAVLDEHGGLLGTASFATTPDGYDALGEWLSSFGEVALVGVEGTGSYGAGLTRRLRAAGMKVVEVDRPNRQRRRRAGKSDTHDAVSAARAAFAGDALGAPKLRQGNVEAIRVLRLARTSACRDRTKALNQMRALVTTAPDELRTQLRGLTIPKLLRTAAGFRPAGRADVISANRLALKTLARRALALAAEIQALDELLGPLVAETAPGMIERVGVGSDTAGALLVAAGENSSRIRNERSFARLCGAAPLDASSGKQQRHRLSRAGDRQANSALWRIVITRLSYDPSTRRYLRRRCAQGKTKAEAIRCLKRYVAPEPYAYLPHQTLD

SEQ ID NO: 237648 - protein, 362 aa, unidentified
MADGIRLVGLDVHAHESTVAIFDQGTGELVTRRVVGRPHELLPWLRGVPRPARAVYEAGPTGYGLARRARAEGIEIAVCAPGRTDRRPGDRVKTDKRDTIRLARLLAAGELSLVTVPSVEHEQLRDLVRCREDIRGDLMRARHRLGKFVLRREIYYEGPGRAWIHKHRAWLAGLRFADRASQLTIGDYLHAHDVLLARRDHIEAELEQLAKDSPWKVVIARLRCLCGIDTLSALGLCADVGNFARFDHPDGLSAYLGIVPSERTTGERRRQGAITKAGSTHARRLLIEASYHYRRQPGIGQTLEYRQRDQPPQIINIAWRAQRRLNARWRALKDTRKKPNGIVVVAIARELAGYCWEIALAD

SEQ ID NO: 237649 - protein, 368 aa, unidentified
MDEISAFVGLDVHKATIAVAIADSGRLGEVRHVGNIENTPIAIAKLARRIGRQHETVEFVYEAGSCGYNVQRQLTALGFTCRICAPSLTPRKPGDRIKNDRRDAIALARLHRAGELTYVWVPDILHEALRDLVRARHAAGQDVRRARIRIQAFLLRCDLRYEGKSWSYRHRMWLCNRQFAHPAQQIAFQTYLNALEYEEQRKAELEKQIQDLLETSHWAALLTALQALKGVGPVVAATIIAEVGDFTRFAHPRQLVAYFGLAPGEHSSGSTVRPRGITKAGNAIARTVLCEAAWNYRTTPKVGQWMKQHRPPTSKEVIAIAWKAQLRLHKTYKRLTSRGKRSVVATAAVARELLGFVWSIGRLVPLGA

SEQ ID NO: 237650 - protein, 369 aa, unidentified
MTDLTLFIGLDVHKKTISVAMVEGSAGAAVRFYGTIANTPDSLRTFCRKLSRSGQQLHFCYEAGPCGYGVQRQLTRLGHHCDVVAPALIPRKAGDKVKTDRRDAMMLAQTLRAGQLTAVWVADEAHEAMRDLVRLRVQAVRDLRKMRQQLLSFLLRHGLISPYGHWTKMHRRWLGELVFAHPAQHLAHEEMLQRIERAEALCDRLKAAILELVPQWSLAPVVEAIQALRGVSLIVASGIVAEVGNFGRFDSPRQLMAYLGLNPSEHSSGATIRRGAITKTGNTLARTCLVEAAWTYRFPARVTQIIRNRLQGLPEPIRNVAWKAQVRLSARYRRLAAAGKPAPKVVVAIARELVGFIWAIARMVEPKFA

SEQ ID NO: 237651 - protein, 344 aa, unidentified
MDHFAGLDVSVKQTSICIVDDTGRIVREVKVASEPQALLKVLGNQAYRFKRIGLEAGPLSQWLFSALAEAELPVVCVETRHMQAVLKAQINKTDRNDARGIAQMIRVGLYRPVHVKTLRSQKLRMLLTHRKLLQSKAIAIENDLRGTLRNFGLKVGMVGKVRFEARIQELVENIPDLALLVEPLLIVRRALREQIVILHRRLLAIVREDEVCRRLMTTPGVGPVVALTYRATVDVPARFRKSKSVGAVFGLTCARYQSGEIDWSGKISRCGDEMMRTMLYEAAQSMMHSKKWSWLKAWAMQIARRRGMKKAIVALARRLAVIMHRIWVDGTEFRWTREKTAAAA

SEQ ID NO: 237652 - protein, 364 aa, unidentified
MKTVYHVGLDVHKETVEMSVFKNRETEPEYEQKMNNEHRAILSHLRRLQERGEVQVCYEAGCMGFILHRTLREAGIECRIIAPGKVPRRPGERIKTDRRDARNLAKLLRAGDATGIHVPTEEDEATRDYLRAREDVKLELKRAKQQMQKFLLRLGHRYETKRYWTGAHWKWMHGISFSQPMHQETFATYCARIRELENRIALMEDRIVEIARSERYRDMVDLLRCFKGIDYLIALALVCEVGDFRRFPSAASFMAYLGLVPREHSSGEKRRQGGITKSGNGHLRRLLVESGWHYRYVAPPSKALISRRMGRGAEVIAYADKALRRLQRKFSRMLFKGKSSNAAVTAVARELAGFIWGMMNDKIA

SEQ ID NO: 237653 - protein, 400 aa, unidentified
MLSIGIDVSKGKSTVCGMKPGGEIVYAPFEVQHTREGMSELVSLLRSSGEEVRAVLESTGSYHCPVVAALLENGIFVSVVNSLRMKRFCSQSIRKVKTDRIDAMQIALYGLAYWQELQPARLPEDTYRELQLLARQYYQMTSILIKAKVDFNAICDQVLPGMQELMSDHAGRHKLSDFVLRYRHTTHILEMGETRFRKDYCKWAEKKGYRNCERMAALIFATAQNGIPVLPNAPSTQIVITEAIRVLHTVEASRDAILTQMQALAKTLPEYSLVREMPCIGDTLAPRLIAEIGDVRRFHSKRALIAYAGIDAPPYQSGKFCANNRHISKRGNRYLRKTGYEVMQSYVMHKPANDPIFTFIEKKRGEGKSGKLAMVAGLNKFLRVYYGKVTELYRSLPAIE

SEQ ID NO: 237654 - protein, 355 aa, unidentified
MRILAVDLGKMKSVACDYSSETGEHTFETCRTTPEALEDMFVRRYPDRVVIEVCPSAGWITDLAARVQVELQVANPSHEGWRWRSVKKKTDRVDALKLARLSAVNQLPLVAVPSKVVREWRSLIQYRQSLVARRTAIKNTIHSILARQSLGMPTGKKGWTNAQRRGLDRLAGAGDDLAAFWASLEPEEWWRGQLAEELRQLDEVGCAISSVEKRLNAYVAQNRPAQRLRSTPGIGPRLSEIVVAMIDDPHRFKNGRQVAAYAGLVPRVFQSGSMDRNGRITGAGNRYLRSMLIEVSWLGLRTNPWMKQVFDRVCRGCPSRRRIAIVAVARRLLIWCWAMMRDDQDWEPKTALAAA

SEQ ID NO: 237655 - protein, 438 aa, unidentified
MSNKVIFNLDELFISVGIDVGADFSWMSIALPNQQFVGKPYKILHSSIDSLTTAVSKIKEAEELYSLESRIFLESTGIYHYPLFCYLRDKGFNCSVINPIITKNSTNINIRKVHNDRFDSKKAALVGLKPDLKVSLMPPDLALNCRNLCREYYDLMDNRSAYVNKLQGELRMAFPQYLGIFSKVTINTSLTLLETYTSPSAFLEADKQEIIDIIKSTARFGLTYAQNKYNAIIQAATDANQFGYIIDSNIKRIRLYISFIRKYDEEINSILESLHELVDANEDTDFVKQIHLIKTFKGAGFLSAVSIMGEIGDFSAFSKPKQLFAYFGLDPAVKQSGKFEGTKVQMSKRGSAIARRVIHTLTLQSISISRNGEAKNPVLREYYLKKCDSKPKLVAMGAVSHKVCNMIFAILRDNKPFKIIAPQEHIKQYNAAKCDMTA

SEQ ID NO: 237656 - protein, 334 aa, unidentified
MKNYLFHVGIDISKLKLDVNLLNSQSLKSEHFVIDNNPKSIKDFIKLMIKRKIDVNQILFCCENTGVYTNHLSYNLLSLELDLWIVPAIEIKRSKGISRGKNDKTDAKDISYYSFRNIDKLRLYKLAEIDIQKLKMLYTEREKVLKSLLLLETTKENSEFVNKEVFKEVSTINRALITSIKKTIHKIETRIKEIIKSNQELNKQYTLIKSIPGIGEQTSLYFIIATKGFSAFKNWRQFACYSGVAPFEYSSGTSIKGRTKVSHMADKKMKSLLQMCAMTTLKYDPQLKEYYMKKKEEGKNSMLVLNNIRCKLISRVFAVVNRETPYINTYKFAS

SEQ ID NO: 237657 - protein, 319 aa, unidentified
MIAELTIFGIDVSRDWLDGFSLPGQERFRQPNTAKGHVALISMIEHLSGQVRVGFEATGGQEWALWRELVPAGISAVQLPPAQIKAYARSRGTRAKTDRIDAELITRFMAFRPEAGRELPDKNLRVLRTLTTRRAQLVDMRKRFIAQTNARKKQEIPADVEGLDDDLKAVLNAQIDEIEQRIKSVIAHVETFAIKAGLLQSIPGIGPVSAAMLIAELPELGKMTAGEAAAMTGLAPVPRDSGMMRGRRTIAGGRRSLRHVLYQAALAAAYHNPVLKPVATRLKERGKPHKLVIVAIARRLVTIANAIIKTGILWKVQRG

SEQ ID NO: 237658 - protein, 417 aa, unidentified
MDDEAYYERCAGIDVHKKLLVVCLRIGRKSEVREFGTLTHEIREIVAWLKDNGCQMAAMESTGSYWKPLYNIFEQEGLPAMVCNAYHIKNVPGRKTDVNDAQWIAKCLRQGLLNPSFIPDREQRELRDMIRFRKSQIEDRSRNINRMQKFLEGANIKLGSWLSSIEGKSATALLELVIGKPDFTVDEVAARMHTNMKSSAEELFLSLEGSITPTQREFFTHVMAVIREQTAQIEKTDAMIQRSLNANYVAAVEALDALPGIGRISAEQILAESGADMSRFKNQHSLCKWAGVCPGNNESAGKRKSGKTPPGNKTLKSTLTQCAQAAKKNKQSFFSAQYSRLVSHRGKNRATMAVAHSLLIAVYFVLCGVPFKDLGPDYYNQFNREKKINSHVKQLSKLGLTIPDHILRAAFQPPPDG

SEQ ID NO: 237659 - protein, 401 aa, unidentified
MICVGIDIAKGKSTVCFLKPGGEVLRTPYDIPHTAEEITKLIRDIRSYDEEVRVVLEATGHYHLPVVAQLLEADIFVCVVNALRMKKFCAQDIRKAKTDKIDAAKIAAFGLTYWQDLQRAKPTDEVYRELRLLSRQYFQLTSMLVKAKISLGNLLDNVMPGIADVLQDRDPHHKLTDFVLKYLHFDKITAMGEKKFVSGYCSWAKKQGYRMYERQAEEIFALVQNSIPALPMTPSTTIVVKEAIRVVREIETSRTSILTQMQAFAKSLPEYFLIREMACVGDTLTPLVIAEIGDVRNFHSKHALIAYAGIDAPPYQSGGFNGTERHISKRGNGYLRHVGFEIMQCKLRLKPDGDPVYEFIQKKRSEGKCGKEAMVAGINKFLRIYYGKITELYNSIDEELN

SEQ ID NO: 237660 - protein, 316 aa, unidentified
MVSVKGKAHKAKTFENTASGHKAIIQLLSKLKSRVCIEATGVYHFDLAVALSRAEGIEVMVINPKASHNFAKVLMKRSKTDAIDAEILAIYCERMPFEAWQRPADENIALRAIARRVAALTKLKTQTKNQLHALKATEETPVLVIEYTEELIEVLDKQIQVHRDSAVKLIQQHDELAEAFALITGIKGIAAASAVQMLGELMILPKDMSAKQWVAYAGLDPRQFESGSSVAKKTRISKVGNKFVRRALYMPALVATCHEPHIKGYYAHMVKDNGLKKIQAVCAVMRKLLHAIHGMLKAKKEFDGTRFYKLPVEVKS

SEQ ID NO: 237661 - protein, 344 aa, unidentified
MNKVTTIGLDLAKNVFQVHGVDEEGGVIVVRQLRRSQMLAFFKKQPPCLVGMEACATSHHWARQVIELGHEVKLMPPHYVKPYVKRSKNDAADAAAICEAVTRPTMRFVSVKSTDQQGVLMLHRTRELMVRQRTMLVNAIRAHMAEFGIVAPVGIPRVKQLFAVIADGDDDRLPPIARTCLEGLVRQFLLLHEEINVTEKRIHAWHRSNEVSQRLETIPGIGPIIASALTASITDPEVFRNGRELAAWIGLVPRQNSTGGKQRLGKISKQGDQYLRWLLVAGAMSVILHAKRKGTTNLPWLADIIARKPTKVAAVALANKTARIVWALLKQGGIYQKPIAALEA

SEQ ID NO: 237662 - protein, 326 aa, unidentified
MSPFHLGIDVSKAKLDCALRLPDGRIRHKVVPNTPAGFEQLHSWLAKQAVGALHVCMEATGTYWEAVAEYLARIEGMTVSVINPAQIKAFGVSQLVRTKTDKVDARLIAQYCHERRPAPWQPPRPVEQALRALVLRVDALQTMRVQESNRLEVARDAVRAGIVEHLGWLDQEIARLLKQIHDHIDADPPLRDMRTLLDSIPGLGERTIAALLAYYADTQRFANARQAAAFAGLDPRQHESGSSVKGKARLSKVGHAFLRKALYMPALVALYKTDWGRGFRERLAAGGKPPKLIIGAMMRKLVHVAFGVLKSAKPFNPALHNRLTNA

SEQ ID NO: 237663 - protein, 357 aa, unidentified
MKTNKINFNGQDIFIGIDVHKKSWSIAIVVHGYLTERFSIDPKPKILKRRLNELYPNGNYYSVYEAGFSGYWADRELRSLGINNIIVNPADVPTKSKERRRKTDRVDAIKLAKQLSVGNLEPIYVPSREEESLRSLVRLREQLKKDRTREKNRIKSLLNFVGITVPVEDEKEEKHWSKGYIETLKNLDIEYPELKQTLDEDIIKLENTRSQIARVIKSLRETVKANQQIREIIDLLLTIPGVGFITAITFYSEIIDINRFRRLNELAAYVGLAPAVVSSGEKEKTLGLSKQRNKYLRNLLIEASWKAIKKDRCLQNSYGKLLNRMSKQKAIIRIARKLLNRIARVWRERQPYQTEIC

SEQ ID NO: 237664 - protein, 372 aa, unidentified
MQKILYIGLDVHKASISVTTAEEGRDGEVRFIGTIANTPTDVAKLAKRLANEGHRLAFCYEAGGCGYGIYRQLVDLGHGCTVAAPTLIARKPGERIKTDRRDSQKLALQHRFGDLTEVWVPDPVHEAIRDLVRARMDAVMQLMRARQQCLAFLLRHGRTYGTGKKNWTLRHRRWLATQEFDQTTHQIVFQDYVEAVWSAQDRRDQLEARISAMLSDWSMAPLVEALRTVRGIDLISSVIFVAAVGDLGRFESPRQLMAYLGLVPSEQSSGSRIRRGGITRAGNREARRMLVEAAWSYRYQPRVSSGKTDVVERQPKPVRDIAWKAQVRLCSRYRKLAAAGKKPTVVVTAIARELSGFVWAIGQTVRSPMPVV

SEQ ID NO: 237665 - protein, 327 aa, unidentified
MYSIGLDISKATINVYIPINDLDIVINNDLKSLISLYSKLKKYYKKEIEKLIFVFEPTGSYSFLLKKFCSNKGIKSFIVNPKKSSNFAKAIGLRNKNDEIDARMLSQMSITARESEIKVPIIDKIAEEIKDLIVYYKLLTKQKTQNKNQLEAITTKDGSSIVIKNLKQEIKLLIKKEKDILLEIKKIIAKDEKLHNAFLNIQTIKSVGEVSAIVLLHHFIQYPEANQKQIVSLVGLDPTLKESGTSVRGKSKVSKSGSKLCRGILFMAVLNAVRNNEELKSFYNRLKDNGKHTTVAQIAVMRKIVVLAFTIYKNNVVYDEERFMNIY

SEQ ID NO: 237666 - protein, 330 aa, unidentified
MDTCVGIDVGKATLVVVLLRGAEPLRVTVDNTPAGHGSLLNWLAKHHRRLAVGQVQVCLEATGTYGDEVAVRLHQAGYGVSVVNPARIKAFAERRLSRNKTDAVDAWLIAEFCRTQAPPAWSPPAPEVLTLRRLARHLDDLQTMRQQEVNRLAAGRLDPSIRQRLDAHIAFLDTQIAAVWQDIHDHIDHHPDLKRQRDLLDSIPGIGDISACLLLAELPDLSRFDRAEQLAAYAGVTPRQHTSGTSIRGHTRMARQGNPTLRTRLYFPALSAKTHNPLIRPLAQRLKDQGHCALSIIVAAMRKLLHQIFGILKSGQPFDPNFLNQRLANP

SEQ ID NO: 237667 - protein, 431 aa, unidentified
MQVRRCSAAPRRREVTAAVIYVGMDLGKRQHAVCFMNEAGQPVAKPLRVPHTGRGLRQLHAQLASLSGPHQVIMEASGAHWMGIARKLRAAGVTVHIVNPLQTAGLRKVGIRKTKSDTKDALVIADLARMGRARPSYVPDDQLLELRELERFRWHLADQLGDAKRHVLGLLDKVFPEFADHLGDPFGATGRALLNRCASAIEFAALELGDLEGWIRQASRQQLGRQRAEELQAAAQDSLGLDCLGTAARLELQALLAQITLLEQQIATLDAELAGRLQALPDYLLSVPGMAGLLAVTVLAELGDVQRFDNVKQVVAFAGLDASVFESGDFHATRQHISKRGSPHLRRALYLAALSAIRTDPELAAYFQRKQAEGKAFRVALIAVARKLLARIYVVLRDQRPYAPPSPAQRVTSPSLAKPITSDPDTFLTSP

SEQ ID NO: 237668 - protein, 396 aa, unidentified
MSKLFVGIDVSKDSSTAKGLDKEGHSQFYVEFKMDLEGFLKLLKALTTHCEDLSQVTVAMESTGCYHINLFAFLTEKGIKCFVINPLLITNFARLSLRKTKTDKKDASTIAQFLLAHEDSLCKVTFSQDLQDLKDLARERESLVVLISALKNDIKRMLQMTFPELESLCPIFSETMLKFLMKFPSARLIKTAKPKAIARALIHEDKRKRVSLSSEAIIKAAKDSIASPSRAKELILPEKISTLLYLMEKRDKMTKALVEACEAIRVQDLEIITSIGGIRDTLGSLFLAEIGDYKAFKSYKHLIAFAGLDPSVHQSGQFQGISKISKRGNHHLRYVIYNMTFCVIRLDNVFRAYFLRRKKEGLPFKKALLATAHKLIRVIFAMLSNKSHFRPEVVNK

SEQ ID NO: 237669 - protein, 370 aa, unidentified
MLYAGVDVSKDKVSVAVLTSGGTKLTGGDFDITTEGLRLLELTLKNLKDEISMFIEQTGTYSMPVILYLMERVEGLRIYLVDGLNFNRFIKLEGRKKQDKADAVSLAEYGRRGLPARLITDKDIKAYGLKVLISQREHLLKVKNQMENRLRQLIETIFPDSKTLSKQVFWSEIRKGKAILNWKSLTDKAEVLSTILRERKIWLEIVHSLEETEREINAFLRAHYPEDVEILKSFGFSETTIAYFISVYVDIGRFKDVKAFKSYMGLGLRIYQSGKKEKNVVNSYTNKYIRKLLYMYVIQAVRERSNHRRVKDYYLRQVEKSGSKKKAIIKTAGKVIEWVYYCLKHKETFKWETNYETQQEDLSQVNSEQA

SEQ ID NO: 237670 - protein, 388 aa, unidentified
MEARFVDTTSTARNDAPARCLIAIELSKASWVVGVQTPLSNKTSQYRLTAGDWKSLLKLIERIRRQVGGELGRPVEMLSCYEAGYDGFWLHRLLEAHGVRNHVLDPASLLVNRRARRAKTDRIDVERMLRALGRYLRGEPDACSVVRVPSVEQEDARRLHRERHRLIRERVQHVNRIKGLCATQGIYDYEPLRSDRKAQLEGLRTGDGRALPARLKAEIIRELHRLELVLKMVAEIEAERDAIVTEAAPQHLNAGKIKALANLKSIGPEFATTLVGEVFYRSFDNRRQVGSYPGLAPSPFSSGSTDRDQGISKAGNPKARSTMIELAWMWLRYQPDSTLSIWFRQRVGDRKGRVRRIAIVALARKLLVALWRYLETGLVPAGAVFKTR

SEQ ID NO: 237671 - protein, 341 aa, unidentified
MGEVTIIGLDIAKSVFQAHGADAAGSVVFRKKLGRGRLLAFFASQPRCVVAMEACAGAHHWGRELEALGHTVKLIPPAYVKPFVKRQKNDEADAEAICEAAQRPTMRFVPVRSREQQASGVVFRARDLLVRQRTQIMNGLRGHLAEFGYVAPKGVMYVERLIAEIEDPHSQLPQAARVSLQVMVRMLAGLETEIASLDAEIARRSKEDPVARRLMTIPGIGPVTASAMVALAPGAETFRCGRDFSAWLGLTPVQRSSGGKQKLGQITKAGERTLRRLLVIGASAVIKQALIRGAPPGSWLAQMLARKPRMLVAGALANKTARIIWALLAKGGVYRAPALAA

SEQ ID NO: 237672 - protein, 402 aa, unidentified
MANGPTRFFGLDIHKEYFVGVGVNVQREVIFGPQRVSNYQLAEWAERVLTLEDAVALEMSTNTYLFYDTLVPHVRSVIAVHPPSVALVTNAQVKTDKKAALALAQLHAAGMLTGVWIPPHEGRDLRALIARRDKMVRLSTMAKNRLHSTLQRNHLVLPEKPFSQEQRSWWKNLSLSTTEKFLVLSDLDTLEFAQKQVEQVEECLKQKSAEDERIPLLIQLPGVAMLTAITILAAIGDITRFPNAKKLVGYAGLGTRVHDSGMTHTSGRITKTGRKDLRRAMVNAANHAVVHHIHWKKEFERMEPRLGRSKAIIAIARKLLVAVWHVLGKQVADRFAEPRNVANSFFAHAYRIGVKNLPDGQSALAFTREQLDRLGIGKELQEIGWGMKPRKLPPSKMLLQKK

SEQ ID NO: 237673 - protein, 313 aa, unidentified
MSTEIFVGIDVSMDRLDVCILPGADKAAFENNDRGAKALVDTLADKAVKLVVLEATGGLEKRVVAHLVAGGIAVAVANPRRVRQYAQATGMLAKTDTLDAQVLARFAQDIRPEQRPGRSPQEELIRELVARRSQLMGMRVAEMNRMPRMTDKGVVASIKSAVKFLDRQIAAVDERIDDLITNDPTWKQTDDLLKSVPGVGKKTSRMVMAALPEIGTLSEKEAASLAGLAPFANDSGKMRGKRMIRGGRAGVRKALYMATLVAIVHNEDIRTFYHRLRDAGKSGKLAVTACMRKLLITLNAVVARGSKWEPKRA

SEQ ID NO: 237674 - protein, 341 aa, unidentified
MKVSTLGIDLAKNVFQLHGVDHEGRTILRKKLTRAKFVQFVIQLEPCLIGMEACSSSHYFARLFTRYGHEVKLIPPQYVKPYVKTNKTDAADAEAICEAVTRPNMRFVQIKTEEQQAVLALHTERGILIRERIACANSLRATLAEFGITIAAGQSHLTRELPAILEDGENGLSPFVRTSIYRQSKHIRELEEQVKQVEEALASWYRTQEACQRMAKIPGVGMLTATYVVAAVGNARQFSTAKQFASWLGLTPKEHSSGGKQQLGGISKRGDGYFRYLLVHGARALTAWVNRNGAVEENSWLQGLLERKHYNVAVVAMAAKTARIMWSMLSHNTEYQPRQLA

SEQ ID NO: 237675 - protein, 348 aa, unidentified
MAMTIVEAGRTIVGGVDTHLDVHVAAALDPIGGVLGVESFVATPKGYTALLEWMTAFGTISKVGVEGTGAYGVGLGRFLARAGIEVVEVDRPNRQMRRTKGKSDPADAVEAARAVLSGRCIGAPKSRDGNVEAIRALLVAKRSAREGRLRAVHQMRQLSYTAPDQLRCRLKGLATTEFVAEAATLRVRAGGDAVVAATKMALASLGRRVHALEEEAGHLDERLGELVAATAPNLLELFGVGIDTAAVLLVAAGDNPERLRSEAAWAHLCGVAPIEASSGKVTRHRLNRGGDRSANAALWRIVMTRIAKDPRTRAYLERRTKEGRSKREVIRVLKRYVAREVFKHLPRA

SEQ ID NO: 237676 - protein, 340 aa, unidentified
MIIGCDFHPRFQQIAVVDLETGEYGERRLSHPEEAERFYRSLAGSQVRIGVEATGNFRWFQRLINELGYEFLLGDPSEIRASNPRRQKTDKRDARHILKLLEEDRFPAVWQPGMENQELRQLLLHRCRMVRLRVRIKNQLDSMGKNEGLVGSRGWSAKRRQQIEGLPLSGWYKRRRADLLGLHDQLDKQIEPLEAAVVEAAENNAQSCLLMTHPGVGPVVSLAYVLIIGDWKRFARSKELTSYLGLVPAEESSADKRRLGHISKQGNTLLRWLLVQAAIKAQGRDARWHRQYLRLSLNKHHGVAKVAMARKLAVRLYWMLRSGQNYNQIMERGSHAGQSV

SEQ ID NO: 237677 - protein, 347 aa, unidentified
MRFYQPSTEFYCGVDLHAKTMYLCILDRQGTILLHKNLRTDPEAFLRAVAPYRASLVVAVECLHCWYWLGDLCAREGIPFVLGHVLAMRAIHGGKTKNDKIDSEKIARLTQGGLLPQAYAYPAAQRGLRDLLRRRLRLVRLRAELYEHVQTLHRQANRPLSGAAAKTAAAEAALPEPFADAAVQRNALADLAMAGHYDAIIYDLEHHLLAAARDTRAKELALLQSIPGVGPILALTLLYEVDRIDRFTTRQQFCSYSRLVYPRQESAGKQAGCKGRKMGNAYLKWAFSEAAVYAARFYPRLAAYLQRLEGKHGPGKSKSLLAHKLGRAVYHMLRKGTVFDEEKFLRG

SEQ ID NO: 237678 - protein, 354 aa, unidentified
MAHATAAQPITVGVDTHLDSHVAHANDQLGRRVGTRSVPTTPTGYQDLLAWARGLGQPIAWGVEGTGSYGAALARFLAANGQVVVEVNRPDRQARRRRGKSDPTDAEAAARAVQAGQATVAPKAGTGQVEMIRSLRVARQTAIRARTQTINALKALVVTAPAELREQLRDLPTATLVAAAAALVPGPITSPLAAAMLALGTLARRHQALNLEIKALTAELDRLTATAAPKLVALFGIGQDNAGALLVAAGDNPQRLRSEACFAMLCGSSPIQASSGKTVRHRLNRGGDRQANAALYRIVLVRLRYHQPTKDYLTRRLAEGKPKNEIIRCLKRYIGRQSLATPQPLRGPFLTPPT

SEQ ID NO: 237679 - protein, 425 aa, unidentified
MTRISVGVDVSKNRSTVCIMDQDGKVIMRPFLVWHSTEELDFLADTLKRLNGEVRVIMESTSVYQYPIALQLKERGLFVSIVNAYEMKQFANTDFRGGKTDKKDSRTIASYGISYWDKLVEWQIPKDTYFNLDLLNRTYMNAKKHRQIILQELQHYIDCAMPGMDKELHSLNLNTKKDFMLDFVEKFWHRDEIVNMTEAEFTEVFTAWAKEKGYRPGKGKAAKIYAIAKSCIPYYPANPTVKTILQCIVDKLSGVNRTLVTIVTQMIEEAKKLPEYQIVREMPGVGDPLAARFFGSAGDIRRFKNSKTLVAYAGIDSPPDESGDFSSTHRHITKKGSKVFRDTGYEIMMALRAQKRTWEKVRKNPEVYDYMLKKEAEGKPRKVAKIAALNKFLRIVYARIKELCDNMALAERAKTKTRAKTKVTA

SEQ ID NO: 237680 - protein, 297 aa, unidentified
MDYFAGLDVSVKDTSVCIVDSTGKIVREVKVASEPDALLAVLRNPAYDFKRIGLEAGPLSQWLFSALAEAELPVICVETRHMRAVLKAQINKTDRNDARGIAQMMRVGLYRPVHVKTLRSQKLRMLLTHRKLLQAKAIAVENDLRATLRNFGLKVGVVGRVKFEARIKELIESFPDLVALVEPLLVVRRVLREQIAILHRRVLAAVRDDEVCRRLMTVPGVGPVVALTYRATVDVPARFRKSKSVGAVFGLTPARDQSGERDRPGAISRCGDGQRSMKPPRSCCYVRQNGPGSRPGR

SEQ ID NO: 237681 - protein, 350 aa, unidentified
MNNNLLQSVGIDMAMEKFDVCFKELKDGSTVIKGTKGFDNNHEGFKDLMQWCNKRRKKGYTLLFVMEATGVYYENLCYFLHSQEEEVAVQLPQKIKYYSKSLNIKTKTDKVDAKVIAEIGIERPSSLKRWTPPSKQFKEIRDLTRELARLKKAKTAICSQLHAMKAAHETSQDVIDVIKKHLEFTEKLITDLDKVLIKTVKKDKELYERVARIEKVKGLGIATIVKVLAETNGFHLFENIRQLVSYAGLDIVQNQSGKYAGKTTISKKGNAHLRQALYMAAVAAGNHNLTLKPFYERLKEKLPAKKQGQVAVMRKLLILIYTLWKSGEDYNPQHQWQGAKRKREVLLPAQ

SEQ ID NO: 237682 - protein, 310 aa, unidentified
MDVIIDKGCGLDVHKETVVACVMGEGIKKEIRTFSTMTEDLFCLKSWLLDKGITHVAMESTGPYWKPVFNVLEDSFEVILANARHIKNVPGRKTDVKDSEWICKLLRSGLLAASFVPPKAIRELRDLTRYRRKLTQAISSEKNRVQKVLEDANVKISSVVSDTFGVSASRMIESIMVGNLDTESISDLAVGKLRGKKEELKKALVGNFQEHHRFMIQASLDHIGSLEKIIAGLDQEINRKLKDYHREFELLQTIPGVKEQGAASIIAEIGADMGRFPSEGHLSTWAGMSPGNNESAGKKKVERRPTAIRI

SEQ ID NO: 237683 - protein, 343 aa, unidentified
MVAIGVDTHKANVAACAIDEAGRVVAERSFANSPAGHRVFGRWLRTLPLPRRTGVEGSGSFGAGLSQYLLAAGEEVREVPAILTHRERRRTGRPGKSDPADALAIARVVLREENLPLVRGPHDYRDLKLLVDYREQLICEQTRVRNRLHSEMQVLMPGFGVGLGDVRRASGVSAVRRLLAPHRGVAVELIEARLVRLEALAAEITANRLRIEGLLAGEHVALIAICGVGALTAARLLGETGDARRFRSAAAFAMACGVAPIPASSGKIQRVRLNRRGNRQLNRALFMVAFTQMREYALAQEYMERKRLEGKTWKEAMRCLKRHLADVVYRAMLEDCRRESLTT

SEQ ID NO: 237684 - protein, 311 aa, unidentified
MTDHTIGVDISKSHLDAFRLEDGAAQRFENSAAGFRALSKWLGKAPVARIVFEPTGPYHKAFEAALGKTFPLVKVNPLQARRFAEAHGTRAKTDAVDAQMLARMGAAFDLAPQAPCSKNALFLRDLHVARAGLIKDRTRLRNRAQTHDIAVLKRQTRARLAQVERQIAELDAEIAALIEAQETTARSRDILCSMPGIGAVTAAAMLILLPEIGTLERKQVASLAGLAPITRQSGQWQGKAFIGGGRKPLRDALYMPALVAMRHNPDLKAKYEDLRAAGKPAKVAIVAIMRKLIEMANALVKADRKWTPKTA

SEQ ID NO: 237685 - protein, 292 aa, unidentified
MRVIGMDIHRVFAEAVALLDGKTTRLGRVDMRRDRLEEFARSALTHDDHVVVEATGNAAAVAEVLGPHVGRVVIANPKQVRLIAQAKVKTDAIDAAVLARLYASGFLPEVWVPDERTGALRRQVSRREQLVRQRTRIKNIVQSILHAHLVPPCPHADLFGRSGRAWLAQQVLPEDERLAVERHIRTLDRLLEDLRVVEGDIARHALDDEAVQRLMTIPGIDVIVAVGLAAAIGDVARFTSAEKLVAYLGLNPSVRQSGNGPARHGRIAKQGRGQARGLLVVGRQGKPIRRRH

SEQ ID NO: 237686 - protein, 398 aa, unidentified
MTESSDYESVQVFIGVDVGKDTHHAVAINRSGKRLFDKALPNDENKLRSLISDLKQHGQILLVVDQPAIIGALPVPVARSEGVLVGYLPGLAMRRIADLHAGEAKTDARDAAIIAEAARTLPHALRTLKLADEQIAELSMLCGFDDDLAAQTTQASNRIRGLLTQIHPALERVLGPRLEHPAVLDLLQRYPSPEKLASLGEKKLAAQLCKLAPRLGKRLAADIAQALAEQTVVVPGTNAAAVVLPRLALQLITLRKQRDEVALEVEQRVLAHPLYPVLTSMPGVGVRTAARLLTEVACRAFASAAHLAAYAGLAPVTRRSGSSIRDEHPSRRGNKALKRALFLSAFAALRDPLSRAYYTRKMSQGKRHNQALIALARRRCDVLFAMMRDGTFYTPQGS

SEQ ID NO: 237687 - protein, 340 aa, unidentified
MKEVITVGLDIAKHVFQVHGVDQKGDTVLRRKLRRSEIISFFDHLPPCLIGVEACATAHHWARVLINLGHEVRLMPASYVKPYVKRQKNDASDAEAICEAVTRPTMRFVPVKSEEQQSVLMLHRARELLVRQRTMLINALRAHLAELGIVMRQGPTGVSTLIGLIEDDEHDLIPAFTRRALTPLVEQLRDLYRRIAELDHEIIQWHRTSELSRRLETIPGVGPVTASALSATIADASLFKSGRQMAAWLGLVPRQNSSGGKERLGRISKQGDPYVRKLLVIGAHAVLRFSRKEGTGPKKWAADLLVRKPYNVVAVALANKMARIAWAIMVSGERFRSIPA

SEQ ID NO: 237688 - protein, 355 aa, unidentified
MHDITPDAVVIGIDTHKDVHVAVAINGLGARLATASFPVTSKGYRQVAAWATEHGTVHAFGIEGTGSYGAGLARALAAKGWRVIEVGRINRQLRRRYGKTDTVDAESAARAVLAGDAGGEPKLGDGTVEMIRHLKIARDTALKARTQAMVTLKTMLVNAPQALRERFISMTGKMTLIHAIAALRPGALLSTTASAKMALRALANRWLMLDAEIKEHEAVLEQLVRAHAPALMDAPGVSTGTIADMLIVLGDNPQRIRSEAAFAKLCGVCPVPASSGKTNRHRLNRGGNRRANAALYRVALVRMRHHPPTREYIQRRTAEGKSPREIRRCLKRYIAREIYQHLCTEKPLPAAAKGS

SEQ ID NO: 237689 - protein, 339 aa, unidentified
MKYTPVGVDIAKHLIQVHFINEHTGEVVDKQLRRQDFLTFFSNREPCLIGMEACGGSQHWARELKKLGHKVRLLQARFVKAFVMGNKNDVMDARAIWMAVQQPGKEIAVKTEEQQSVLVLHRTRQQLVKFRTAQINSLHGTLLEFGETIHKGRAAMEREFPAALERMKEKLPPYLITVLEEQFYRLNELDLRIDGLEKQLNSVARQNETCKRLMEIPGVGPLVATAAVATMGEASAFKSGREFAAYIGLVPKQTGSGGKVRLLGISKRGDTYLRTLFIHGARAAALLTKEPGPWITELKKRRPTSVAIVAMANKLARTVWAIAAHDRKYDKNHVSIRPY

SEQ ID NO: 237690 - protein, 399 aa, unidentified
MLTPQSLHLRVGVDVGSRCHSVAIGLSDGSLLEEFEIPHRAEGFREFFARVEACARHHGVPIAVAMEGYNGHVRPLDSLVRARGWRLFNVNNLKLARFKEIFPAAAKSDRIDSRKTLELFQLRDHLPMAGEVLQEVMATPEENDVLKRLSRRRRRLVNERGRVANALQADLQAVCPGLLEITREVGNLWFLNFLTCRKGLIKLARVRRASLLKVPGIGTHFANAIQAWQDRAYFAPDASLVGDMIQQDAARILELKQQIKALEEQMAQVAESSPIAGQLASIPGYGAVCSAELAGEIGTVERFRGEASLALYLGMATLDHSSGKSRSSKPPKHVNARAKAAMMFAIDHHRKLVPQSQRYYERKRAEGKKHNQAIRALGRHLCRVIFKMLTQDRPYRIEP

SEQ ID NO: 237691 - protein, 319 aa, unidentified
MNCINNQKEITIGVDTGKFQLDIHIRPLDIYFTVDNDEKGIKEAIKQIKPHKPTRIVIEATGRLEHAFIMACSQADLPFTVANPAHVKKFAGAIGRKAKTDKLDAQLIAHYGEAIKPPLSTLKPENMQLMSDLLSRRRQLMTMQTMEKNRLQIMPKEISSAIKPVLTAIKNQIEKIDSKLSKLIEKCSEYKAKNTIIQSMPGIGNVVAFNLLSDMPELGYLTNKEAASLIGVAPFNKESGSYEGQRNIRGGRHKIRTVMYMAMMSAMQCNPVFKATYQRLLAAGKPKKTAIIACVRKMIIILNSMVRDGVMWDPKMNSN

SEQ ID NO: 237692 - protein, 408 aa, unidentified
MRLFVGDDWAEDHHDVELMDATGRVLARKRLPEGVAGMAWLHELTGGQLGQDAGGDAEVVIGIGTDRGPWVAALVAAGYVVYAVNPLQASRYRERHGVSGAKSDRGDAHMLADMVRTDSHQLRVVAGDSADAGAVKVVARAHKTLIWERTRQVQRLRHQLREYFPAALEAFDDLDASDALELLAKAPDPARAAKLTRAQVSAALKRARRRGIPDKTTAILAALHGAQLGQTPAITAAYAVTARSLIAVITTLSEQVKTLQGQVEADFGRHPDAEIYLSQPGLGHILGARVLGEFGDDPGRYVSGKARKNYAATSPLTRASGKRKVVAARFIRNDRLTDALMAQAFAALSASSGARALYDAERARGTEHNAALRKLANRLVGILHGCLKTRTLYDETTAWSHRENKLAA

SEQ ID NO: 237693 - protein, 428 aa, unidentified
MKVLYERVAGIDVHKDMIKVAIRSPGEKPWTRKTEILEFRTFYGVLQQMARELRKRGVTHVVMEASGVYTEPVFYALAEQDFTEVAVINPAHAKALKGHKTDARDCARLAELFECGLLRGSYIPAPELKEVRDLTRYRMKTVQARTSEIQRLAKALESAGIKLGSVASSITGTSATAMIEALIDGERRGGVLADLARGRMRAAGKLADLSMALTGRFTEHHALLCRLHRDRIAGFDVAVAGLDERIAGKVTRWQREADLLTSVPGFGDVVAQAWLGEIGPAPHRYFPSHEKLASWVTLCPGNNISARKRKHGRTGDAGTYIKPMLVQAAWAAIRVRGRLQARYNRLVRRFGGDKNPAAKKKAITAIAHTLLKIAYQVLKSGTPYQDLGADFYTRRESPEQKQAWLERQLHKLHPGCTVTITISPPEAA

SEQ ID NO: 237694 - protein, 465 aa, unidentified
MELTLGIDLACRAAHQASLARSDGTFVWTGRKFFTRPADLDALWAAVGLTEADTLRVVMEPTRNAWAPVASWFRRRGAKVSMVPTTQSADLRAYYSKHTKNDHLDSKLLARLPLLHPEGLRDHTGDGPAEPLRRAVKIRSSIVKRRTAVFQRLDAQLELLGPAWYDALGSNYGKAALAILARYADPHALIRLGQARLTRFLIRHSRGAWRDAHAQALITAAKQSIELWGADGIDFAELAADIAVEAEQAQVLTEQIEDLDERIANLYAEADPAGVIASAPGVGPVTSGIIAGRIGDPHRFTSLAAIRAYSGLVPKVAQSGQSHHQHGLTKAGDPLLREALFTAADSARRTDPQLAAKYKRLMSTDRHHDSATCHIATVLLTRIATCWRTGQHYVLRDTDGRAITPEEGRNIVKTKHQVDQKTRDKAAHARMSQRRKGRTSRESQESPSAPTSRPANTSIRATQVA

SEQ ID NO: 237695 - protein, 371 aa, unidentified
MGESSKMLFVGLDVHKDTIAVAYAPEDRGADVESLGAIGTRQCDIDKLIRRLESKGATLVFVYEAGPCGYWLYRYLTRRGFSCAVVAPSLIPRKAGDRVKTDRRDAVTLARLLRSGDLTSIYVPTVADEAIRDLSRGREDAVGDLKRSKVRLKAFLLRQDIRYEGRANWNAAHLRWLARVVCPTPAQQIVFQEYVHTVTEQSERLRRLESELHTAVKTWRLYPVVEAVQALRGLDLTGAGTLIAEVGDLTRFDTPRKLMSYLGLTPSEYSSGAHRRQGGITKAGNGHARRALVEGAWAYRYPAKVSRHLQLRLEHVPPQARAIAWKAQVRLCKRYRLLSARGKHVNQVVVAIAREMAAFAWAIARTVPVAS

SEQ ID NO: 237696 - protein, 445 aa, unidentified
MSERTTACEAPCIRVTTDSAAVRATKGKVMKPWIEITHYAGFDWARDHHDVVIVDRQGQIVADFRLEHSFTGWQQFRDKVKNYPALAVAIETSQGAAVDQLLQLDCTVYPVNPLSAKSYRERKAPSGNKTDHLDGWSMAEALRTDGQHWKALQPLDPLTQQLQLLCRDEISLIEQRTALVNQIQQALVEYYPAALQAFEDWTHPFCWDFIIQFPTPEKLAAAGRRRWEKFLHTQKLWRPETASKRLEIFQHAGQFCGSAPVTLAKSLLAVSLAKLLNALQLQLDQYRQHIEALFAQHPDHDLFGSLPGAAQTLGPRLLGEVGGHPHRFQDTATLQCVAGTAPVSFQSGQIHRVRVRYQCNKVLRHTVHLWANCCRAVCPWAEVYYRQKRAEGKSHACALRCLGQRLLKILWKMVQTRKPYDADLHAKNQQAHGSWVLKLAPKTSA

SEQ ID NO: 237697 - protein, 403 aa, unidentified
MQNAPFPLHDAVDVFIGVDVGKGHHHAVALDRNGRSLYNKALPNDETQLRALINELKAHGQLLFVVDQPATIGALPLAVARDAGALVAYLPGLAMRRIADLHAGEAKTDARDAAVIAEAARAMPHTLRSLRLADEPLAELTMLCGFDDDLAAQVNQTSNRIRGLLTQIHPALERVLGPRLDHPAVLDLLERYPSPAALAAAGQKTLANRLIKLAPRIGKNIAADIAQALSEQTVVVPGTHAATLVMPRLAQQLAALRKQRDEIAAEVERLVQSNPLWPVLSSMPGVGLRTAARLLTEVAHKAFASAAHLAAYAGLAPVTRRSGSSIRGEHPSRRGNKVLKRALFLSAFAALRDPISRAYYSRKIQQGKRHNQALIALARRRCDVLFAMLRDGTLYQPKTAPCA

SEQ ID NO: 237698 - protein, 347 aa, unidentified
MRFYTTQHPFYCGIDLHARMMYVCLLDQSGEILVHRNMKTDPDTFLKAIAPYRQGIVVAVECMFTWYWLADLCADEGIPFVLGHALYMKAIHGGKAKNDKIDSQKIAALLRGGMLPQAYVYPAKMRATRDLLRRRMHLAHKRAELLAHVQNTNSQYNLPAIGKKIAYKANREGVAERFADAAVQKSIAVDLALITYYDELLRDVELTLVKTAKHHDPNTLYLLQTVPGIGKILSLVLLYEIHDVNRFPRVQDFVSYCRLVKCARESAGKRYGTSGAKIGNAHLKWAFSEAAVLFLRDHPAAQKYLARLEKKHDKGKALTILAQKLARAVYYMLKRQGAFDKDKFFQR

SEQ ID NO: 237699 - protein, 413 aa, unidentified
MKKNSNSQTKSGQKTKPTKTRGPVQRDSKEVMAELVAKLSERLEQKPAQAKATEGKPQSAPGPNGDRLTVGVDLGDQWSNYCILGLEGETLAEGQLRTTREDVAKFFRALAAARVVIEVGTHSAWVREVVVGCGHEVLVANPRLMEGTKRRKRKNDRIDAHKLARLGRVDPQSLFPIQHRSTEVRQDLVVLRARDALVSVRTELINTTRGLVKSMGARLPKCSSPSFPKKVEEALPAEVREALLPLVRLAEELSDCIKDYDERIEKLGREKYGHTELLRQVKGVGPLTSLAYVLTLENPDRFRKSRDVGPYLGLVPKQDDSGDSQPQLGISKAGDMMLRRLLVGSAHYILGPFGPDTDLRRYGLQLCERGGKNAKKRAAVAVARKLAVLLHRLWISGEVYEPLRQGAPKAEAA

SEQ ID NO: 237700 - protein, 343 aa, unidentified
MKIIRVGVDLAKSVFQVHGVDRCEKVVWRKKLSRSEWLPALLEKIEPGCEIGMEACGGAHHWARQLQKHGFAVKLIAPQFVKPYLKSNKNDANDAEAICEAMSRPSMRFVAVKSVEQQNLQAIHRIRAELVSQRSAKGNQIRGLCSEYGLVAPREMIQLRAAIPLWLEDLENGLTQRFRRLLRGLWLDLLNLELRVKELDQEIEIAASTDPVATRLQQLRGVGPIIATAIVANVGDAKQFSSGRQMAASLGLTPRQNSSGGKERLLGITKRGDAQLRTLLIHGARSVLRTAASKNDRMSRWATHIAETRHHNIAAVALANKTARIAWAMMTKGTDYQPGAVAF

SEQ ID NO: 237701 - protein, 392 aa, unidentified
MRFVGIDIGAETHLVAAVDEAERVLMPPTKIGEDADGYQRLLERLGEPHDTLVAMEATGHYWKNLFAALAARGFAVALLNPLRTARFASEDLARTKTDAIDALGIARFAAQTRPAATRLPDRVTEELRELVRLRDRLVQDFGDRVRQRHRLVDLGFPEFTRYVRRLDSELAAAILHDYPTAAAFASVSVRRLAALRYDGRHRVDDELAQALLTAAARSVGRHHGEAYRIQVRYACEDLDLLRRRLRTLEGDIERMLDRHEVGSLLTTIDGVGPPTAARLVAELGDPASFRSAGALAAYVGVVPSRRQSGKRSATRAGLTSIGHAALRASLWMPVVTAVRKNPWLRAYYRRLRARGKLPKVALIAAMRKLLVAVYTVAKQRRPFVPALAEARP

SEQ ID NO: 237702 - protein, 348 aa, unidentified
MKNKSFVGIDISKNVIDVSIFREDTNIKMFPHEVFNNTRKGFGDMCSWLKKSRVVLSQALFGMEFTGCYSLDLEKFLTSKNYSFCMLSTRIVKHHPMGTIDKRDKNDSAKIADFLYRYDGTECAKPYKLPSKAMQQLKQLVNERKFLVEQRTNFMNRMQMFETKEDSAMYESYIKKLNHDIEKIDQAECELMSKEEDVFDTFQNLLTIPGIGFVNATNIIAITRNFTAFDTARQYARYVGVAPCSHTSGTSVKWRARPSAHCNGQVKADLSMAALRAVEYDVEMQMFYNRKLGGRKDSDTKRKALNAVKFKLIRRMFAIGKQKRKWEVLNTSDDRKNLHIEKSKASEL

SEQ ID NO: 237703 - protein, 371 aa, unidentified
MKSNSTFIGMDVHKNSINIAIAQQGRKGQVRHYGKIEGTLSALDKVVRKLVSKGDPLHFVYEAGPCGYQIYRHLTAQGFDCSVVAPSRVPKQSGNRIKNDRRDALMLARLHRSGELTAVYVPLAEDEAMRDLTRAREDAKGNEKKSKQRLRAFLLRSGHRYSGRSPWSQAYMRWLSDIKMPHQAQQIVLQEYIDTLSECKARVHRLTEQIRQLLPQWQLFPVVQALQSLRGVSLIVAATTVSEIGDLKRFQDPAELMSYLGLVPSEHSSGENIRRGSITKAGNGHVRRVLVEAAWAYRYRARVSRALLKRQENLPQPIRDIAWKAQLRLCSRYRHFWAKGKAKQVIVTAIARELCGFMWAIANETEGSAAI

SEQ ID NO: 237704 - protein, 347 aa, unidentified
MRFYNTQHPFYCGIDLHARMMYVCILDQSGEVLVHRNMKTDPEAFLRAIAPYRPDIVVAVECMFTWYWLADLCAEEDIPFVLGHALYMKAIHGGKAKNDKIDSQKIAVLLRGGMLPQAYVYPSEMRATRDLLRRRMHLARKRGELLAHVQNTNSQYNLSAIGKNLAYQANRDGVAERFADPAVQKSMEVDLALVSHYDTLLRDVELTILKTAKQHDANTLYLLQSVPGIGKILSLVLLYEIHHIDRFPRVQDFASYCRLVKCAKESGGKRSGTSGSKIGNAHLKWAFSEAAVLFLRDNPDGQKFLARLEKKHGKGKALTILAHKLARAVYYMLKRKVAFDMKRFLSD

SEQ ID NO: 237705 - protein, 370 aa, unidentified
MKQYDEAFIGIDTAKNKHAVAIADAGREGEIRYLGEIDSAPATVGRIIRKLAGRYKRLHFCYEAGPTGYGLYRQVRALGHDCIVVAPSLVPKRPGERVKTNRRDAVALARLLRAGDLTTVWVPDAVHEAVRDLVRARAAASQDLRRKRQQLLSFLLRHGRIYNGRKHWTRAHLRWLAQQQFAHPTQQIVFQDAVDTIEDAATRLRRLDEQVAAIVPSWSMAPVVEAYQAKRGVSFLVAVTFVAEIGDLQRFDNPRQLMAFLGLVPSERSTGERVRRAGLTLAGNKRARRVLVEGAWSYRHQARVSQTLQARLEGLPKAVREIAWKAQIRLCARYRRLTAAGKKRPVVIAAIAREMAAFLWAIAHHVPPAA

SEQ ID NO: 237706 - protein, 405 aa, unidentified
MNAVGIDVSKGKSTVTIRRPGDVVLMPPRDIPHTKSAINELIKQIQSLDGETKACMEHTGRYYEPLAAWLSDAGIFVSAVNPVLIRDFADDSLRSPKTDKADSKKIARYTLDRWAKLKQYGSMDKTRSQLKTMNRQFSFFMAQKTAMKNNLIALLDQSYPGANDLFDSPARSDGSQKWVDFVYTYWHVDCVRGKSLSAFTEHYRKWCKHKGYNFSAEKAEKVYEASCDLIAVFPKDDNTKMLIRQAVAMLNTASETVENLRIKMDETASALPEYPVVMAMNGVGSTLGPQLMAEIGDVTRFTHREALTAFAGVDPGKNDSGKHVQKSVRTSKKGSPHLRRTLFQIMDGLIKRSPIDDPVYVFMDKKRAQGKPYYVYMTAGANKFLRIYYGRVREYFASLPETGEN

SEQ ID NO: 237707 - protein, 410 aa, unidentified
MDLIPLHERVVALDVHQAVITACAIIAEKDGVRVEERPFETFKRGLRALVDWCLAIKPEVVVMESTGVYWKSAHAWLERAGLKCVVVNARHVKNVPGHKSDISDPRWLATLARAGLLKPSFVPPEKLRFLRIVSRQRQKLVGMLAAEKNRLGKVLADAGVRLGVVVSDIHGKSARQMIAALLAGATPEEALQFASPQLQAPRDEIAAALEGEISAEHRFVLQRIVRHIAFLEEDIAAFNARLLAGLDSPEEKTALALLQTVPGIDLIGAAMLLVEIGTNMALFAGSDRLASWAGMCPGNNRSAGKRKNERQRKGNTYVRRLLCEFVQAARKSPCAFQAKHRALAIRRGTKRAIMACAHKMLRVIWAMLLRKEPYRDSTVDYEALSVRRNAPRWIRALQRFGYLRPGAATR

SEQ ID NO: 237708 - protein, 341 aa, unidentified
MHPIYYIGFDIHKRTIAYCVKRFDGVLIQQGAVSAERGALLQWLSGIPGCWIGAMEATMFTGWVYDFLKPHALELKVAHPEMLKAITTAKKKNDRADAEKIADLLRIDLLPECYMAPQELRELRRILRYRNMIVRTAVRMKNKISGLLMEVGATYDKRRLHGKSYFNSLLERVEDVPASVKELLKLSRGSLEMFTAVQKKLLKALKENMLIRQRVQRLMSIQGVGEVLALTWVLEIGEVSRFSSSRQAISYCGLCSAQHESAGREHRGPISKKRNKHLQAMLIEAAKLAPRWNDELAFLHEKELARGNCNRATLAVARKLVKYLLAVDRRESDFETLQQAV

SEQ ID NO: 237709 - protein, 355 aa, unidentified
MEHFIGCDAHKKFSVFASINEEGEYGPTKRVGHDREGFREFLKDLPPHSKIALETSGCYYWIVDDMKAAGHEPHLAHAKTAKRRMEGRHKTNEKDARGLAMLLRNGTLPTVWIPPSELRDEREMLRWRMCLSDIRAGVKNRIHGVLQRYNVDIAVSDLFGEMGRAELQSRLEEIPVHSRKSLLDQLVMVDTLKMHIEDCEGSMKEMLTSNVDRDLLDSLPCVGVILSSVMALEIGNIERFAGPDRLVSYAGVVPVARESADWKRKGRCPRDCNVYLKWAYVEAANLIATHRRAEGWKNSHVVQLYERVLLSSKKHGKAAMAVARHLAEASYWILTKQEVYQEPRSKRRVLSSTHG

SEQ ID NO: 237710 - protein, 368 aa, unidentified
MRKNLRFVGLDVHKDSISVAVAESGREPARLLETIPADESLLLKVLDRLGPKSRLRVCYEAGPTGYGLARRLNEQGICCVVVAPSLVPTQKNRRIKTDRRDAVRLAHFLRSGDLVEVTIPQAQTEAMRDLERAREDAIRVERVARQQLDKFLLRHGRRWSEGKKWTLKHGRWIKLQEFPEEASRRVLGDYLHTAEQALARVQRLTADLSELVERWTLGPLVRALQALRGVDLVTAVVLAAEIGDFQRFRTPKQLMAYLGLVPSEHSSGSDRRQGGITRTGNRHARWVLVEAAWNYRFRPCASQRINARRQRVAAAVRTIAQRAEQRLSRRFRRLIDRGKSSQKAVTAVARELVGFVWAIAQEDTLLAA

SEQ ID NO: 237711 - protein, 345 aa, unidentified
MTIVEARPVTGGVDTHADMHVAAALDSIGGLLGVKEFPVTPAGYAGLLGWLGGFGTVVLVGIEGTGSYGAGLARHIAAAGVRVVEVDRADRQDRRRQGKSDPLDAVSAARAAQSGRARGAPKGRDGAVEAIRALMVAKRSARSERIQTVNQARSLIVTGPDDLRAQFTGHAVAALVSELAALRPRPGDVAGYATRIALRELGRRAEFLDGQLGRLDELIVPLVTARAPGLLALHGVGPDTAALLLIAAGDQPARLRSEAAWAHLCAVAPIPASSGKVTRRRLNPGGNREANHALWRIVITRMSSHAPTRAYVQRRTAEGLSKKEIIRCLKRYVARQVYPHLRPAT

SEQ ID NO: 237712 - protein, 355 aa, unidentified
MDNRKYIGMDVHKEAIAIAVLNAAGKLVMESIIETKANTILEFLKGLRGELHLTFEEGTWASWLYDLLQPHVKRVVVCNPRRNALLKEGSKSDRVDARKLAELLYTKMLRPVYHRDHGMRAVKELARSYVTISKDQARVMTRVKALYRSWGIACSGKQIYTVRHRASWLGKIKEASVRRRAEFYYQQLDGLRSVRRQVRRELLLESGKHKASKLLCQIPSIGPIRAALLLALVQTPHRFRTKRQLWTYSGFGIETHDSAEYRYVAGQLERSKKPQQVRGLNRNYNHDLKNLFKSAATNAIAKSGPLQEFYLALVKRGIRPEMARLTVARKIAAITLAIWKKGVSFDAEHLKQQTA

SEQ ID NO: 237713 - protein, 408 aa, unidentified
MSQVIIGMDPHKRSATIEVMAGDETVVGGGRFATDAAGYRAMLAEARRWPERTWAIEGCQGIGRHIANRLLAAGEDVIDVPPKLSARTRVFATGQGRKTDATDAHSVALAATRMPGLRRVAADQQLAVLRILADRRRSLGEDHTRMISQLHQLLLELIPGGAKKALSAAQARALLAHVRPRDAAGKARRRVAAELISDLERIYQRKKDANKELTALLRATGTTLTDLHGMGPSGAARLLVEVIDITRFPTRAHFASWNGTAPIDASSGDQVRHRLSRAGNRQINRVLHIMAVVQLRNQTEGRAYFDRKVAAGKTPMEAMRALKRRLSDIVYHQMITDARAAGTGPGGHLGAATGSSAAGLHPSAGTSEKSLPGPATDDLTPGKPAHSPGRSRHSPSAPDRRRRQAQSA

SEQ ID NO: 237714 - protein, 345 aa, unidentified
MLYAGLDLSRKRLDVEVRDGDGAVVAVTAVSPDAGGLRTLVERLEPFGRVRCAIESMNGARFVHDELELLGWQVEIADAQKTKGLAPLACKTDKIDAGVLAELCRLALVPAIWLPDPAVRGERERARFRLHLVRHRVALKNRIHATLIAFGKPCPVSDLFGVGGRRLLAQLALPEPWSHTVEASLRLVDQLDQQISECERDLRRRGADHPYVELLTTMPGVGWVLGYTIAAEIGTITRFSSPTKLCGYTGLCPRVYQSGSVDRRGPLAKNGPRYLRWALIEAAQHAARSVYYQPLYERTKTRLGRNRGSKIARVTVARKLAEASWHMLTRNQPFAPAGATSVLTA

SEQ ID NO: 237715 - protein, 343 aa, unidentified
MDHFAGLDVSVKDTSVCIVDETGRIVREVKVASEPDALLAVLTNPAYHFKRIGLEAGPLSQWLFSVLAAAGLPVICVETRHMRAVLKAQINKTDRNDARGIAQMMRVGLYRPVHVKTLPSQKLRMLLTHRKLLQSKAIAIENDLRGTLRNFGLKVGMVGTVKFEARIKELIANLPDLAELIEPLLIARQVIRDQFAILHRRLLAIVRDDEVCRRLMTVPGVGPVVALTYRATVDVPARFRNSKAVGAVLGLTPAKHQSGERDQTGGISRCGDEMMRMMLYEAAQVMLMRSVKWSWLKAWAMKIAKHRGLKKAIVALARRLAVIMHRIWVDGTEFRWTREVTAT

SEQ ID NO: 237716 - protein, 342 aa, unidentified
MRVMIGIDPHKATHTAVAIDDSEVMLDELRVRACNSQVTRLRSWAEPYEDRVWAIESARGLGYLLAQQLVAAGETVIDVPAVLSTRTRLLGSGRGQKNDPNDARSVAITAMRVDGLQRVSADEHAQVLKLLAKRHRDLGRLKSKAACRLHALLMELLPGGMAKEMTVNRANALLDQVVDHGQITQHRVEVAREFVADVAHYETQMKASMKRLGAAVAATGTSLTDIRGIGVVTAAMIIGQTGDVSRFASAGHFASYNATAPIEASSGEHRRHRLNPRGNRQLNYAIHIAAITQLRYPCPGREYYDRRCSEGKNTKEAIRALKRHISNAVYRALVADARRLDR

SEQ ID NO: 237717 - protein, 450 aa, unidentified
MGKAKPQVIEDQEHQRVFERVAAVDVAKASGMVCVRLPGRDGRPRASKVWEVQAVTSAVTELGRGLLKDRVQMVTLEATSDYWRIFYYLLEALGLAVQLVSPAQARQLKGRPKTDKHDAMWLARLTEWGMLRPCFVPPAPIRALRDYTRARTDYVRERTRCYQRLEKLLEGALIKLSSVASKLTTESAKDMVRALIAGERDPHVLAGLARTRMKAKHDALAEALAGMFDAHHGELAQLELDQVKFLDQTITQLQARIRDTLAAIPQAQGVDADGTTGPAAGTGPDAPVRPAAARLAEIPGISPDLAATIIAETGLDMSRFPTAAHLVSWAGLCPAAHQSGPRARAGKKKHGNAYLRGALGQAALGAARTGTFLGERYHRVARRRGKAKAQVAVARSILTIIWHLLADPAARYTDLGPDYVASRTDRDKKIRNHVRQLQALGLQVTLTPAA

SEQ ID NO: 237718 - protein, 329 aa, unidentified
MMIIGVDYYPSFQQIALFVEETGEYGEQRLNHEGGEAERFYRGLQQRGIRVRVGMEATGYARWFERLLAELGFELWIGDPAEIKAQRVKKRKTDREDARLLLRLMREDRFPQIWVPSPENRDLRQLLWHRHRMVQMRTRIMNQLQALAMNEGKRWKSKLFSQEGRAEFEKLAFAPWASRRRRELLELFDQLNPSIQELSAAVEQEVQKRPEALRLMTHPGVGPITALAYVLIIGTPERFARGRQIGTYVGMIPTEDSSADKQRLGHISKQGSSLLRYLLVEAAQAATTLQPALAASVPALGRAPTPEHREGRQGTPTRDSVVLDVAKWL

SEQ ID NO: 237719 - protein, 415 aa, unidentified
MIYQVSAKYVCGIDLHAKNLTACVMDKKGKIQKKKTMVCSKKMVLDFLSPREKDITVGVESTCNWYWLIDLLTENNIPCRLGHALYIKRKISSKHKTDTADARGIADLLRTNQFPVAYAYPKEMRTVRDLLRRRHFFVRKRAATFTHVQNSLHQDGCIEPLRNKLQYKSARWLLVDKTENIDLKNILTADLEYIAALDTLIENLDKKVIEKARLHNNKHYEALQTMPGCGKTTALTIIYETQTIQRFRTPRRYSSYSRVVRAENESAGKNLGGTTNDKIGNPCLKWAFAEIGYSMIRNYPVICEWHQKQAAIHGKSGAHARLRHKIAVTVYHMMKNDTVFDLVKFLGKNNDRVENHSQQWLETSGHQSEPVLKNENPSGLSQPKRKKYKRNDSVKRKPGRLSLRTTGKRKVLTKS

SEQ ID NO: 237720 - protein, 428 aa, unidentified
MKCRNPTVVLAVGVDSSKFSHCLVAMKFPEQILLEKQVPNRPDAIEKIDVEINQMAEAQGLEVIYGLEDSQTYGRVFSDCLLPLGRDLREVNPLKSNRQKDFYGQDKADPIDAQAIAVVVLRCCETLPQVVAPDAILASIRETERHLWILTRQKTQNLNKLHMQLTQVYGGCYKEFFANLDSGVALQFFHTYPTPQILNRASRSKLAHFLYKSSKGRLRRHSKHPDPKVRAKQTAEVVLSAVKCFQTEPANPVLRLKATLIQQLCQLVITANEAIDVLVKKLDTELLPRSGQKLRTLKGIATIQEARILGEILTPDRFHSRHAFAKYNGTAPAKDASGIRHRHRARKACNHRLKLTFYFIALSAATHDPISRAYYEHLLSKGMPKKEALKRVARRLSDIVYAMLKTKSAYNPRIALASMERRRTQMAA

SEQ ID NO: 237721 - protein, 475 aa, unidentified
MRRLQGIAPRAALSGYKEASMGKRGEKRERRSAILEPDAAGIDIGAEEIYVAVPPDRDEQATRRFSSFTCDLYALAEWLECCRIRTVAMESTGVYWIPLFQILEERGFKVYLVNAHSLKTVPGRKSDVSDCEWIQYLHSVGLLKASFRPPEDICAVRTLWRHRGSLLQMAAEHTQHMQKSLSLMNLQLHHVLSDITGASGLAILDEILAGNRDPLCLAHLCNIRVKSPRETVAQALVGDYRPEHLFTLKQSLDGYRYYQKLIAELDDEIARLMHTLPNATEHPAPIPKRTKRTAYQRMGNDPLFDLRSELYRIAGVDLTDIPGVSAIAAQVILTEVGPDVSRFRNASAFAAWLGLCPDKRISGGKVLSTKTRKVKNRVAIVLRLGAKSLSRAKDYFGAFFRRMRARLGTAQAITATAHKLARVVYHVLHSKEPYTETIFHRCDEQEQQRAEMRLRKHAAQLGFQLLPISTNSAAS

SEQ ID NO: 237722 - protein, 414 aa, unidentified
MERLYTCCAGLDVHKQTVVACLLRPDDAPARKEIRTFGTTTGALEELRDWLSAAGCTYVAMEATGVYWQPIYHVLEGYDELLVVNAAHMHAVPGRKTDVRDAEWIADLLQHGLLRASFIPSREQRELRDLTRTRTSLTDERSASVNRIQKVLEDANIKLAGVATDIMGKSGRDILAALIGGEADATAMADLARGKLRRKQEALEQALRGRMSDHHRMLIALHLEHVDLLDEQIDRLSAEIAARLRPYEAALVRLETIPGVGRRTAEILAVEMGLDMSRFPTAGHLASWAGMCPGVHESAGKRKSGKRREGNKALRRALTEAAHAAARTKKKDRTYLRGQYRRLVVRCGKRKAAVAVGHTILRIAHYLLSHETTYQEQELVYLDERRRARTQQRALDQLKALGYEVTLAPKAPAA

SEQ ID NO: 237723 - protein, 319 aa, unidentified
MTDSNVFVGIDVSSTSLDLCCSNKPMIRNFSNDAAGIASLVEMLAALTPKVIVVESTGGLEKALVLALLQADLPVARVDPKRVRQFAYGIGQMAKTDAIDARVLMQFAALASPRLAQKKARNQAELAELLTCRSQLIDTRTAHQNQLARTSSKIARKSLESVLSHLRSRIAKLDREIEKIIDNDDDMRGLDELLRSFKGVGPVLAATLISQLPELGKLPHSKIAALVGVAPYNRDSGSYSGKRAIRGGRPRVRKLLYMCTVAALRHNPILKQTYQRLRAAGKLAKVAVIACARKFLRILNAMVRDNQIWAPKLLLETCK

SEQ ID NO: 237724 - protein, 349 aa, unidentified
MPEQRVSYPGERVYVGVDVPKETYTVTCVCRKQIVKTATVPAEPARLAASLLRWFPGAPVASAYEAGFSAFVLHRALPQGGITNLVVNPASLAVAANDKVKTDRRDAKKLARDLADGRLQGIYIPTEAEELARLLPRTRAQLVEPRATLARQIKAKLHQCGLITPKGQRMISHQYLQEIATWALPSELRVSLTLLAEQWRLTTRQLIEMRHLLREQAQAQGEIEKVSRSVPGIGAVVARTFATELGDMSRFANERALCSYTGLTPSEYSSGAAIRRGPISHQGSSRVRHLLVETAWRALPRDKVLQESFDRVAATRGKKRAIVAIARRLIGRIRACFREGTLYAVGTYV

SEQ ID NO: 237725 - protein, 415 aa, unidentified
MKKHSNSPKKSESRSKRAKLRGPVQQDTKEVLAELVGKLREKLDPKVGAASAGEEHQQGRPRPNLDRLTVGVDLGDQWSQYCILGLEGETLAEGQLRTTKQDVSEFFEALNAARVVLEVGTHSAWIREVIHSYGHEVLVANPRLMEGSKRRKRKNDRIDANKLARLGRVDPQSLHPMQHRSAEVRQDLVMLRARDALVAARTELINATRGLVKSMGTRLPKCSSPSFAQKVEEAVPAEIREALLPLVRMTAELSDCIKGYDEKIEKLASEKYGHTALLRQVKGVGPITALAYVLTLENPERFVKSRDVGPYLGLVPKQEDSGESQPQLGISKAGDTMVRRLLVGSAQYILGPFGPDTDLRRYGLRLCERGGKNAKKRAAIAVARKLAVLLHRLWVSGEVYEPLHHAKSVPIAAAA

SEQ ID NO: 237726 - protein, 466 aa, unidentified
MENNYILYVGMDDSKGKADAAILKVSDRRSVKPKFLRKKLSFKFVKSEVTSFLETVRSYSDDNCTSICFALEVTGIYSTNVYNFIKDSLNDNESIRFLNTDFVNQWRNAHNIAKSDPLDAQTISTIIGTDSDVQYVNDNVFENKNGYQDLKALVHRHYQIKKIYSQEINRLIAQCDCLFPELQYVFEPKSAAFIAVLSSYPTTHDIINTSRLEVFNVVYEATKHRCSMDKIDKLFELCHDTLVPDNISSYGRSIILELVENIKTIKGQLKMIERYIRDVASLNPAYKLLLSITGCGPLTAATVIAETGDIKRFKNADCFVSYSGTSPRNKRSGTSVETLGKISKKGSRYLRHAIYMIAEFARRHNPVLKHQFERIKNGNKKRHKLANIAVANKIARYIYSIMKNESSFVILHEHIMRLPKETRDTFFNSISLDFPKNTRKQIYQYSDINGEVHKFVYTKLEETMII

SEQ ID NO: 237727 - protein, 349 aa, unidentified
MLHVGLDLSRRRVDVCLISSEGELVEHFRAPADRDGLYGLTRRVAVYDEPVRGVVESMNGARFVHDELVRYGWEVLVADAQRVKGLAPLACKTDRVDARVLAELSFRDLVPAIWLPSPELRAERERSRWRLHLVKHRSILKNRVHASLIAFGHQVPMADLFGAGGRRLLAELDFPEPWLSHVRASVELIDDLDRRIAEIERWLQRSGADHRYIPLLMSAPGIGWVTGFTIAAEIGDISRFSSPVKLTGYTGLCPRVNQSGDMDRRGPLSKHGPRYLRWGLMEAAIHASAHPLYKERYQRTKRRLGRQRGAKGAQIELVRKLTEAIWYMLTRNQPFKPFAPASAINRLTA

SEQ ID NO: 237728 - protein, 425 aa, unidentified
MNFNTNEKINQVSENTLVIGIDIAKHKHFACAVDDRGRVLQKSFPIFQSRIGFEALYERLLALKQAHEKQEILVGFEPTGHYWMNLAAFLTQYGIPFVMVNPMHVNRSKELDDNLQTKNDQKDALVIARLMRDGRFSYPRILEGVEAELRNGATLRAKIQEDLNALHNRMIRWLDRFFPEFTHVFKNFGKMAFAVLEKTPLPIDIQGKTPEELLFLYRQVEGMKNPHLTKAKQLIELAPQSIGLQEGLVMARFEIATLLTQYHMMQAQLDDLSNKLSELAHQMTDYDYLASVPGIGDVTIVELLSEVGSLTQYEHPRQLIKLAGLTLRENSSGQQKGQKRISKRGRRKLRALLFRVMMPLIRHNPAFKQYHEYYTSRTVNPLRKKQSIVVLCGKLLKILHALCKKKQRFNEQQMMNDFTTLQAAA

SEQ ID NO: 237729 - protein, 341 aa, unidentified
MTVFAGFDVHRAQITFDALDTETGEVTRGRIDSGPAAVERWVARFPGREIHVAVEACTGWLFVCQALDRSGAIAHLAEPVETSALRGRKRRAKTDREDARWLRELLAEGRLPESWIPPEHVRQWRTRARLRKTLVDERTAWHQRIRATLYHHGISGSPEHLSTLAGREFLAEQALPIDATERITVALEMIDLLEIQIARVESEIRKLARRQTGCRALMTLYGMGELTSLITLTELGDVSRMHASRQAVRCAGIDIGVHRSDRTARVGKLTYQGSAELRWALYEAAQSACRPSSPDHQDYLALKERGLSHTRASLTIARKLARRSYHVLRELGPAALEPVSQ

SEQ ID NO: 237730 - protein, 327 aa, unidentified
MNHNTIYVGMDVHKENFSLCAYTLEAEKASYHQRTEADYKEVLKYLEFLRSIYGNDANFICGYEAGCLGYTLYHQLSANNVNCVILAPTTMLEQRSKKRIKTDKRDAEIIAKCLAQHNYSSVHIPTAKDEETKEFLRMRDDHKLALKKIKQQILAFCLRHSYRYNGKSHWTAAHLKWLRSLTPEALYKEILDEYLLTYQNLSDKLERMNKRIEELASLEEYREAVKKLCCFIGVRTHTALSVLVEVGDFKRFASAKNFASYLGLVPGENSSGENQTRLGITKAGNRHIRLLLTEASQCYARGKDWIQIERIEITTVRKHTGNHSLCR

SEQ ID NO: 237731 - protein, 431 aa, unidentified
MAGVMIGIDPHKGSHTAVALDGREKRLGQLRVRASRRQVEGLLEWAGYWPRRTWAIEGARGLGQLLSQQLIAAGERVLDVPPKLAARVRLLNTGQINKNDDNDARSVAVAALRARELPELAAEDHTMVMRVWARRYHDLGRLRTQAVCRLHTVLCELVPGGVRRQLRTSQAVELVDRIVADSPIARAKLELARELIADLQRIDTQRREAKRHTARAVDASGTSITSIYGVGPIVAGTVLGYVRDVRRFPTRDRFASYNGTAPIEVSSGDRRIYRLSRRGNRQLNHAIHLAAVTQIRHRGSEGRTYYERKIAKGMGGRAALRALKRKISDTLYEHMIDDVHARNKRIGKDPGGQSGNDAVSSVAGTHPDRPALRTSHSRANANSRTAATGGVLRSGPAPHRRRTSRSAAGVQVEPRPGPRRRGHGQSGSQSV

SEQ ID NO: 237732 - protein, 364 aa, unidentified
MKRKVYVGMDVHKETIQIAYLTSNSKEILKEQQIKHNEVQIKKFIKKLKTEWNEIHCCYEAGVTGYPLYRYLKSLGVNCILVAPGKIPRQNTDKIKTDKRDAIKLARLMRSGELESIHVPSEEDEAVRDYLRSRDSLRLDLGRNRQRLMKFLLRKDIKYSTTKYWTVSHYKWLNNLHFNNEILQETFNDYYSRVRVQEENLKSMDKKIQEIAESEPYREKVGILRCFRGVDYLTAMFLLCEVNDFKRFKTAGSFMSFLGLVPGEYSSGSKRKQTGITKTGSPRLRRILTEAAWQHRFPGTGSKIITARRSGQPALVVALSEKASPRLHKKFRNLQLRGKTPQVMITAVSRELSGFLWAAMNLVA

SEQ ID NO: 237733 - protein, 335 aa, unidentified
MEGSPAQLSATHSPVATRPVAFVGIDLAKQSFQAATDADTPAARFNASFSYDAAGMAQLLERLKTFEVALIVMEATGGLERKLAAELSDAGHAVAVINPRQARDFAKALGTLAKTDKVDAAVLAQLARILKPQARPLPSAEQIRLKDLAARRRQLIHMRTQELNRAQQATLKDVSKSIKHLITTLDREIAKIEKQVADLIDSNSDWKKKVDLMDSVKGVGIDTAHALLAELPEIGTLSKRQVTSLAGLAPHAFESGKFKGKSKIWGGRATVRSALYMGTLAATRCNPAIKRFYDRLLADGKQKMVALTACMRKLLTILNAIVRTGVKWNPELVNG

SEQ ID NO: 237734 - protein, 355 aa, unidentified
MKYYTSTTEFNCGIDLHARQMYVCLMDRDGKKLVHTNIKNNDFEYFLKLIAPYRHDLTVCAECMFGWYWLADACQAAGLPFVLAHALYLKAIHGGKNKNDRIDSEKIAHLLRSNLIPPAYVYPAAKRPLRALLRQRLYFVWRRSELLARIHSHQLAHNRSPQKQTRRSRDSWAAQVLAAENDPLRQLALQNDLAMIGHFDTQLAQLEAELQRQAKKSAAREYALLQTVPGIGENLGMTILCEIGDIARFPTVKDFLSYSRLVKGTVASAGKIKGLRGAKLGNPYLRWAFGEAAVIAKRDHAVIGPLAQRLEVKMNGNKFKANTVVAIKLARAVYFMLKSKTVFDPDRLVAALSRN

SEQ ID NO: 237735 - protein, 346 aa, unidentified
MRLAQSGFAKSVFQIHGVDANGTVVIRKRVSRARFLEFFADLPPCVVGMEACATAHQWARELKKLGHDPRLMPPTYVKAYVKRGKNDAADAAAICEAVTRPSMRFVPIKSVEQQSALMLHRTRDLLIRQRTQLINALRAHLAELGLVAAKGHEGLQQLVIAVTESSDERLPSNARFACQSIVAQLHAVQTQVNGLDKRIIQAHRANADSKRLDAIPGFGVILSTAVVATMTDPKAFKSGREFAAWIGLVPRQNSTGGKERLGSISKQGDRYLRRLLVVGAISIVRTARMRPDKYPWVIELLARRPAKVVAVALANKMARIAWAVLTKGETYRAPARSGNVATAAAA

SEQ ID NO: 237736 - protein, 427 aa, unidentified
MSEERSVELRVSVDVGYRRHSVAMGLSSGEVLEEFEIDHRPEGFQEFFSRIEKHQKAKSCTVAVAMEGYNGHARPLDSLVRQRGYRLYNLNNLKFARFKEIFPGAAKSDRIDARRGLELFQLSDHLPLAKEVLQEVRGTPKENEVLKRLTRRRRRLVNERVRVVNNLQADLQAVCPGLLEITSEASNQWFLNFLVSADSLSQLARLRKSSLLKIPAVGRKYAGLIQDWQKRAHFSEEAGWVSEMIQEDAKRCLELEEKIKTLETKIEQVAKDSKIAKILLSIPGFGPVCTSELAGEIGTVERFNKEGSLALYLGMSTLDNSSGNYQGTKAPKHVNTRAKAAMMIALDRHRKYVPESQRYYEKKRIQGKGHNQAIRALGRHLCRIIYKMLKEQREYQLRSKEGDTQARVRSRSCVKTKIRRSKISRRG

SEQ ID NO: 237737 - protein, 351 aa, unidentified
MPMLADLADAVVGADTHRDTHTLQIAHPSGAPIAECTVSNDDDGYAQAIAWALRHAPGPRLYFAVEGTRSYGIGLARALTAAGWPVLEIAPPARGARRGKGKNDTIDAGLAVVAALRSDVDRLPTPRSDGDREALRILLGARQEMSTTRTRQVNRLRALLLAGDETDRQQARSALTRERLRALAAPTAHISHNRHDNVRQAEIQRLAAAVAQADINLAANQRELTALVTDMAPNLLTRRGIGPISAAQAIVSYSHTSRCRNEAAYASLAGASPIPASSGQTIRWRLNRGGDRALNRALHTIAHSRMTSCPKTHDYIAKRRAEGKTTAEIRRCLKRYIARELFKALNKSLNG

SEQ ID NO: 237738 - protein, 421 aa, unidentified
MLAETQDHEEIIARVAALDTGKAELVCCVRVPREDRPGRLQEVETYSTMTRSLLGMAGHLRGLGVTRVVMEATEDYWKPAFYLLEAAGFETWLVNARDVKHLPGRPKTGKLDAIWLCKVAGRQMIRPGFVPPPEIRRLRDVTRYRADLVAVRTAEKQRAEKLLEDAQIKLSVVASDIFGVSGGQMMAALIAGERDPKVLAQMTRAAMRGKITALQEAFTGHFTGHHAFLLEKMLARVDATDADIAALDARIEEMITPFAAAAQRLDEIPGINAIAACVVLAETGIDMSRFPTAGHLVSRAKFAPGVQESAGKKKGRNSTGHGNSYLARVLGNAAVSAGRTGTFPGERYRRIARRRGRKKAVVAVGRSILVISWHLLADPGARCTDLGSSFYETRINPERRKHGHIRQLEALGYKVTLQPAA

SEQ ID NO: 237739 - protein, 339 aa, unidentified
MCKQSMVLPGRLFCGIDVSAVSLAVAVQREEQPIEEREFPNNASGHKLLITWLRKRKTAVRVTLEATGIYSFDLSVALHATDGIELAVLNPKVANRFAQTLRRSKTDSADAQVLAEYSRRMPFTAWCSPNHNELQLRTICRHVESLTVQHTRDQNRLYAAQGSISTPRCVIQDLKHALAAGERRIHKLRREAMTLVRSDENLRQRYDLLISIPGVAQISAMQLLGELATLSPDMTVRQWVAHSGLDPAHEISGTSVRKASRISRAGNRHLRRALYMPALVASRCDPHGKAFFESLLARNKARLQALIAVARKLLHAIYGMFRSGLKYEGTKLFPRISLS

SEQ ID NO: 237740 - protein, 518 aa, unidentified
MITIPVVKERCAGIDVGKRGLAVAVMTGPADKEAAIQTRWVGTTVPELEALRQWLIQEGVTSVAMESTGSYWIPVKNVLENGLQVVLVCSQKHHPKKGEKTDFRDAIQLAHLHRHGMLTASYMPERGVVELRDLTRRRKKLLGNLGAEKNRIQKILEVANVKIGNIMSDVFGISGQEMLEVLLSGREVEAEEIAAMAKRRLRTKIPELIETLKGHQLNDHHRWLIQQSIDHIVLLDRQLEELEDKIMIKIEPYRRQFDLMCTIPGIKEMNGAAILAEIGPDMSVFPSGDNLSSWGGICSGNNRSAGKSKSGRVKKANKFLRCALGQAARGAVKKKDCIMRRKFQRWARRMGGRKANVAVGHSLLKVIWCVLKTGQPYREPDAGVMHEMERQKLVRHHARRLRALGADQNAVEQIVERLLCPTPPTAAENQNSPTIETASSEKQTPVAAPRKRKTACLPKGRGEVCRGKLGFRARQTRNQYTVFKEQPEKRSRPTSTDLPSSSTRKRSRRRKGSDTAPA

SEQ ID NO: 237741 - protein, 431 aa, unidentified
MLKINPLSTLYVGIDVSSKSNYICALDFFKNKYINSSFANNQPGAEELALKILECLKEHPDITTIVAALESTSVYSIHIANYLSSCEELMRFKPYVFVLNPKCTANYKKSYIGLGKSDPIDAFVIADYARAGNIESEPWRGSQFLALKRLTRHRLHLVECMTREKTYLISNLYLKFSELQMLEGDDQPFCDIYGATSSSVLMEYFSPEEILDSSEEDLIAFLAKKSRNRIKDISKTADLLKKAARDSYRLDKALYEPLNVSIASSFNCIETFKREIKVIDNAIEKEIKGLNPNAFIILQSIDGIGPVFAGGIIAEIGDITAFHSSDALAKYAGLTWKSNQSGDFDGEDTPMIKAGNRYLRYYLGEAANSMRKHNVEYGTYYRKKYNEVPKHQHKRALALTSRKFVRLVYGLLARNQLYSGVSLDTSIKDSN

SEQ ID NO: 237742 - protein, 355 aa, unidentified
MNQEKYIGMDVHAATISAAVKNAEGKLLMECVLETKAATILEFIQGLRGTLALTFEEGTSAAWLHDLLKPHVSRLVVCDPRKNALMRDGNQNDRVDARNLAELLRTNQVKAVYHGEHGTRALKELGRSYLTLTQDTTRVMNRIKSVYRSWAIACAGTSVYSRRHRAEWLAQLVEPGVRIRAEHLYQQLDSLEPVRQAARRELLRESRKHAAVKLLRQIPAIGPIRSALLVAILQTPHRFRTKRQLWAYSGFAVQTYDSGEYRFVRGKLHRNRERITVHGLNRNHNHDLKNLLKGAAISAIQRPGPLQDFYAALVEKGMRPSMARLTLARKIAAITLTIWKKGVSFDPKQLQRQTA

SEQ ID NO: 237743 - protein, 350 aa, unidentified
MKYYAGLDVSVKETSVCIVDESGKLCREKKVVTHPDDLAAVLSDPAFHFERIGLEAGPLSQWLFEGLAKAGFAVVCIETRHTKAFLKAQQPNKSDRNDARGIAQMMRVGLFKDVHVKTLTSQKRRALLTARKLLQEKAIAIENDMRGLLRNFGLKVGTIRAFKFDERIRELVEAVPDLADIVEPLLAARQKLREQFAKLDRKVRDEARVDPVCRQLMTVPGVGPIVALAYISTIDIPSRFRHSRAVGAVLGLTPVLNQSGESSRIGHVSLCGDGMLRGLLYEAAQVLLIRVKKWSWLKAWAMNVAKRHGIKKAIVALARRLAVVLHRMWVDGSEFRWTREATPTTTDATA

SEQ ID NO: 237744 - protein, 347 aa, unidentified
MVTDSLDVVIGVDTHRDTHSLALVRCRDGVLVAEQELPANRAGYRAALRLGKRLGPRRLWALEGTGSYGAGLARFLAERGERVCEVERPARAGSRHRLKSDSLDALRAARTALAGQALASPRAAGRREALRVLLQTREGAVKTRRCGLNQLRALLVSAPEELRERLRGRGRDALVGACTRLRPQRRSQPERYATALALRSVARRVEQATREAAELESELRRLVSELCPQLLSLEGVGPISAAQVLVSWSHRGRFRSEAAFARLAGAPPIPASSGKLVRHRLDRGGDRRLNRALHTIVLTRRRGDAATIAYIARRVSEGKSERDAVRCLKRYLARQLFRLLEATPTVA

SEQ ID NO: 237745 - protein, 478 aa, unidentified
MKSKPEEKNKRATQHHWHEMNRKQRRETIRKMQSEDLSLEVVHPDAAGIDIGNESHYVAVPPDRDSQPVQRFGCTTAELRAMADWLKRCRIRTVAMQSTGVYWVAVYDILEQAGLEVYLVNARDTKNLPGRKSDVQESQWLMKLHTYGLLRNSFRPSQEIRVMRTYWRQRNDLVQSASRHILRIQKALTQMNLQLANVLTDISGATGQAIIKAILAGERNPHKLAEFRDPRVKASEEQIAQSLEGNWQPDLLFLLKQEQDGYEFCQRQIAECDRQLAQYLQQREDRSQGAPLPEEKRKGRLKKKRGNKPRFDLRKGLFRMTGTDLTRIDGIDVMTATTVISEAGYDMSKWKTENHFVSWLRLCPDNRISGGKVIGKGRLPTNNPISIALKMAATTLRQSKTYLGAQFRRLRTRLGAPIAIKAMAAKLARLVYRMLRYGMKYVDQGAAFYEAQHRQVQIKQLKWKAAKLGFQIVQAPAA

SEQ ID NO: 237746 - protein, 339 aa, unidentified
MVDYIGLDVSLKETAISVRRDGKRLWRGKCASDPAVLAQVIGKRAPDAARVVFETGPLSTWFYHALTALGVPAICIDARHAKAALDMAPNKTDANDADGLAQLAEVGFYREVRVKRYDSMLTRTLLAARMLVIRSGVELTNHIRGVMKTFGLVVPKGAGRVFEGHVRELLGANAGLARIVLPLLEAWRALRGQATELNRQLVTAARVSRSCRLLMTIPGVGTVNAAAFASAIEEPGNFTNARAVGAWLGLTTRRYQSGEVDYDGHISRRGDRYLRGLLYEAAAVILTRTGTDSALRRWGLALRERIGFKRAAVAVARKLAVIMLCMLRTGEPFRREVTG

SEQ ID NO: 237747 - protein, 315 aa, unidentified
MVVGIDVSKDWFDAAWLVDAQVRCQQFAYTDEGIEQLLEQTPAGATFVMEATGTYHARLALRLFEAERRVSVVNPLVIKRYGQMKLLRVKTDRADAQLILSYGQSEAPSLWTPASEQIQELQQAHGWLNDLITERTRLLNRQQAHARRAKPSVFVVSQMELQFKQLQQRIDECEQHLEALVKKSFAELYERLTTIPAIGVKTALELIIITDGFTRFDDVKQLCAYVGVSPTTFCSGSSVKGRGGIAKLGQGRIRQLLYLCTWTAKSCNPACKKLYQHLKAMGKPAKVINIAIAHKLLRQAYAVATQNTRYDPNFA

SEQ ID NO: 237748 - protein, 344 aa, unidentified
MSYFAGLDVSLRSVSICVIDEDGKIAFERSVPFEIEDVVACLRSVDGIVEQVGFEAGVMSQYLYRGLETAGFDTICMEARQVAAALSAMRNKTDKNDARGIAQVLRSGWFSEVHIKSCDSHYDRALLTSRKTVLRKCIDLEQEVRGLMRAFGVRLPSTLSHRKFEETVLPIIEDDDRIAYALMPMIEAWRSLYASFLELDRRVKATARKDPICLLLMTAPGVGPMTALTFKAAVDDPSRFKSSRIVGAHFGLTPRRFQSGEKDQTGHISRAGDADVREALYSAANSLLMRTKTPSHLKTWGMRLVRSRGRRRATVALARKLAVILHRMWVDGKEFQLTGMEVHT

SEQ ID NO: 237749 - protein, 388 aa, unidentified
MPQPNDLSRSLAPLDQDSTIIVVVELSQSSWLVGGVLPGIERQPRKKLEPSPERLLALLHRWRDESVRAGRTITRIVVAFEAGRDGFWLARWLEARGVEAHVIHPSSVAVSREHRRAKTDRLDTELLKRGFLGWLRGERGHCSMARVPTIAEEDAKRPNRERECLVKERTRLVNRMKGTLARLGIRNFKPTLRQAAERLATMHTPEGTPVPPNASAELQRDLARLGFVVGQIKQIEKARQKRLEQPESENGPQAMVRLLARVVGIGIETADMLVHEVLTRRIRDRKAVARYAGLTGAPDESGARRREQGLSRAGNARVRRGMVQLAWRFLRFQKGSALALWYQARTADGRASTRKTMIVALARKLLIGLWRFVTTGELLEGVILRPAG

SEQ ID NO: 237750 - protein, 353 aa, unidentified
MGMDTSMREIVCGVLRPGMEVPAVDRIPNDEESVRRLIGKLGDRRRLAVCYEAGPSGYELHRLITSMGVACEVIAPSLVPKGASERVKTDRRDAVRLTLALRAGMLTAVRVPSPAEEAVRDLVRARGDLLDDRRRTQQRLSVLLLRHGRIWSGGSKWTIAHRLWIERRFGEPALQEALDAYRGALEAREAELRAAEARLSAWAGRDPLAESVARLSAYRGIAELTALTLAVEVTDWHRFPAARAFMGFTGLIPSEYSSGARTRRGSITKAGRGEVRTALVESAQAYRCRPAVGARLRRRQAGADAGTLARSWKAQQRLHATYKKMTARGKPHGVVVTAVARELAGFVWAEMTS

SEQ ID NO: 237751 - protein, 387 aa, unidentified
MFYVGIDVASEKHDCCILNEKKKIIRSFSFLNSPVGFQSLLSALSGIQPDEIKIGLEATGIYSENLSVFLRRKGFNVTTINPLLLKKHQCATTLRKTKTDKADAKGIALFIAEEGFQPDLPVSYHIQELKSLTRARFSFVQDRSALKNKVKRLVVLLFPELLEQFSDIFGASATALLKQYPSAEKLAACHTDALAALLRKSSRGRFGRSKAAYLKQLAKCSIGNHSPARVMELKMLLARIDLLSEQIRDYDKQIKIIMDEINSPILSIPGINYRMGAMITAEIGDFSRFDSPDKILAYAGFSPSTYQSGKLDGAYSHMEKRGSRYLRYALYNATKYVCHWDSTFAEYLAKKRAEGKHYNVAISHAVKKLVRVIYHLEQTNQQYTTTA

SEQ ID NO: 237752 - protein, 358 aa, unidentified
MQTQGTKIDFHGQNIYVGIDTHLKSWKVALFHDDISLKVFSQEPDPLLLVKHLRKHFPNATFKCAYEAGFSGFWLQKALTREGLDCIVVNPADVPTTDKEKRLKTDKRDCRKIARSLRSQELEAIYVPSDEGLEERQVIRFYRDMIKSRTKTKNKIKAFLNFYGIVYPEEFKNPAYHWNRSFLSWLKSLKVKTGEGNWVLQSYIQEYEHASDKVKEALKQVHQLSQSDKYTSKVKFLRSIPGIGIVSAMTILTEIEDIHRFNTLDELCGYVGLIPNTDSSGEKENTGGITNRGNTHLKAVIIEAAWMAVRYDPALLLSFQRLKSRMEANKAIIRIARKLVNRIRFVLKNEIEYQTGII

SEQ ID NO: 237753 - protein, 403 aa, unidentified
MFKFGIDWSENHHNLCIRNDKGAIVSQIEFKHTLDGFQRFDDERRKLGVPSSECLVAIETAYNLLVDFLLDRGYIVYLVPPQATRGYRNRQRSTGAHSDDSDAALLSSILHTDLDSHRRLQPNSALTQQILAQVRLIDLLRRSIQRQCNQLRAVLFRVYPQALGLGKLTAHINLHFLMAFPSAQEAQALSQPAFEAFCREHRYCRADLISRRYAHLMDPAPQANPIAVAAYRDQIRILTELLLPQVLRRTEALSSLAHLLSQHPDAFIFDSLPGVGQLLAPALLAKFGDHRDRFPTAASVQALAGTCPVTQQSGKRKIVIFRRGCDREFRRIAQHFAKASVRQSGWALAYWRDVRPHCRSDSDAYRRLANRWLAIIWKMWQDGKAYDESYHIQQRAQRRRPKS

SEQ ID NO: 237754 - protein, 446 aa, unidentified
MSEASSMAAASEPEWAAFAAIDWADQKNFWRLVPAGSQRHEHGELENTPEAVEVWAAALQERFGGRPIAVCLEQSRGALVYMLAKYAHLVLFPVHPTTAARYRETFCTSGAKSDPSDTASLLDLLLRHREQLRQLRPDTTETRLLQFLVEERRRTVNEKTRYSNRLTGCLKLYFPQIVHWFDDVAGPLVGDLLERWPSLQELQRAHPGTLGKFFHEHNCRGKERIQERIDAIYQAIPATTDTAVLEAGAMIARGLVALLATLRSQIAVFEQRIEELVASHPDGALFASLPGAGAALVPRLIVAFGTHRDRYQSAYQVQCYSGIAPVKEASGKSEWIHFRFTCPKFLRQTFHEFAVHSIGQSKWAKAYYNHLRNDEKKSHHAAVRALAYKWIRIIYRCWKDGKPYDEELYLKSLRRRGALLAGALGLATSAGWKTVAGFQKFSAENA

SEQ ID NO: 237755 - protein, 334 aa, unidentified
MTTAIERTTLALDIGAKSHAYCCETRGEVEQGTLANEPEVLRRFLQARLARTGALRVLVEATGVYFLDVALLAHELGAEVTVINPKAAHHFAKALGQRSKTDRLDAAMLLQCLKRMPFKAWEPPRKALLQLRCYGRYLVQLTEQNTANKNRLHALSATAASPAKLRADMKRAITAMDKRIDRIRAEAIALIKADPELLKPFQALVTVIGVADTSAVSLLSELMVLPFTLRARACVSHAGLDPRLFESGTSVHKATRISKHGNKYLRQALFHPALSASIHDPYAKAFKDRLLARGKRKMQAIVAIMRKLLTAIWAIIRHPNPYDAKLLYTTLKTA

SEQ ID NO: 237756 - protein, 411 aa, unidentified
MRLFVGDDWAEDHHDVEVMNEAGKVLAKKRLPEGVAGMAGLHEMIGRHLGEDADDAEVAVGIETDRGPWVAALVAAGYTVFGVNPLQASRYRERHGVSGAKSDSGDAHMLADMVRTDSHQLRAVAGDSAEAEGLKVLARTHKTLIWERTRQVQRLRHQLREYFPAALEAFDDLDAADTLELLGKAPEPARAARLTRAQVSAALKRAGRRNITDRATAILAALRGEQLGRPPTVTAAYAVTVRSLIAVITTLNEQVKELQGQVEQHFGRHPDAEIYRSQPGMGAVLGARVLGEFGDDPHRYADGKARKNYAATSPITRASGKKKVVAARFIHNDRLVDALNAQAFAALNASPGARALYDDLRDRGIEHNDALRRLANRLVGILHGCLKTRTLYDEAIAWSHRENLPQSSVAA

SEQ ID NO: 237757 - protein, 359 aa, unidentified
MAKGNTGHEREVGGLDLGDRYSRLCILDGATGEVVEEGRIATTEAALRRRFESVERMRIAIEVGTHSPWVSRLLSECGHEVIVANPRKVRLIYKNRRKNDAIDAMYLARLARTDPALLAPIHHRGQEAQKNLAMLRGRDALVKSRAQLINHVRGAVKATGKRLPRWGSEAFARKATGALPPELVTALGPVIEVIASLTAQIRTCERALEVLAEAYPETLLLRQVKGVGPITSLAFVLTLEDPTRFAKSRAVGPYLGLVPAQRDSGESKPQLRISKEGDAFLRRLLVGSAQYILGSFGEDCDLRRHGMKLGASGSKKDKKRAVVAVARKLAVLLHRLWQSQATYDPLYNAKRTVSTSLAA

SEQ ID NO: 237758 - protein, 408 aa, unidentified
MKLFIGIDVSSEKLDTCFLDSEDHVLLEISLSNNLVGASKIKDHIITFTEHIHYDRIIVGMEATSVYSFHPSTFLAEDTELKSLGIEVVVMNPKTIHRFKGLFEEDKTDKIDAYRIADFLRFDRFNTSLIKEEQYMALQRLTRSRYQLIGQLTEMKQHFLENLYYKCNTLTKEVDTSVFGSTMMDLLTDSMSLEDIANMSLEDLAAALQQKGRGRFSNPQKLAKSLSKAIRDSYRLGKVMQNSVDVVLASYAMMIKTLKKQIKELDKAIQSLFEILPESKSLLSIPGIGPVYAAGIIAEIGQIERFDDEAKIAKYAGLYWKRKQSGNFESQRTTMTKTGNHYLRYYLIEAANSVMRNEPVYRQYYLKKYHEVPKHQHKRALVLTARKFVRMVDVLLRNHQLYAPERSV

SEQ ID NO: 237759 - protein, 355 aa, unidentified
MTSTKYIGMDVHKESISIAVRNDAGKIVMECVVETKASMILQFIDGLRGDVHVTLEEGTWAAWLYDLLKPHVTKVVVCDPRRNALLQEGNQNDRVDARKLAELLHNNQLRSVYHGDHGLRTLKELVRSYLTITQDLSRVMTRVKAIYRSWAIPCTGKQVYAPRHRAEWLAKINEPGVRRRAEFYYQQLDALRCLRQEVRRDLLAESKKHQAWKRLCGIPSIGPIRAAVLLGILQTPHRFRTKRQLWTYGGVGIETSSSADHQVMKGQLERKKKQVEIRGLNRNYNHDLKNLFKGAAIVAATKPGPFAEFYAELLAKGMRPEMARLTLARKIATIVLIVWKRGVRFDAQHLKPQTA

SEQ ID NO: 237760 - protein, 407 aa, unidentified
MDVCVGVDWGCGSHAVCVIDVKGSVLDQFDAGHDRDGLAGLVARLKRHGSPGKIPVAIERPTGLLVDHLVEAGFVVVPIHPNAVKACRPRYRAVSAKSDPGDAYILADMLRTDGHRLRPLQPQSDAIRALRALVRGRDDLVATRVALANQLTALLEGFWPGGVAVFANVASPIALAFLDRYPTPDSARRLGRARLASFLAQHRYSGHRSPEALLERLRAAPLGQAGEAERQAKGEMVRALARTLSALVDQLGQITRKIEDNVAALPDGRIVMSFPRAGKICAAQILAELGDVRERFQTNDQLAAEAGVAPVTYASGKSRGVGFRWACNKRLRTALTCFADNSRHQSSWAAGVYAQARTRGCDHPHAVRVLARAWVRVLWRAWTDRKPYDPEKHAPAQTRTGSSLTIG

SEQ ID NO: 237761 - protein, 321 aa, unidentified
MEHELHYIGIDTAKEKLDVDVLRPDGRHRTKKFANTTKGHDELVSWLKGHKIDHAHICIEATGTYMEPVAECLYDAGYIVSVINPALGKAFAQSEGLRNKTDTVDARMLAEFCRQKRPAAWEAPHPLERALRALVVRHQALTDMHTQELNRAETAREVQRPSIDAHLLWLEAELKRLEKQIKDLTDDDPDMKHRRKLLESIPGIGEKTSAVLLAYIGLKDRFAHARQFAAFAGLTPRRYESGSSVRGASRMSKAGHVSLRRALYMPAMVATSKTEWGRAFRDRLAANGKKGKVILGANDAQAGTGGVWSAEVRRAVRCVTA

SEQ ID NO: 237762 - protein, 475 aa, unidentified
MNNKGKKKKNQVITANIFEQQELLAKVEAIKSNLKALTWRELETKGKFSKNEKLTFISDDMLILGCDIGSETHHVRAIDTRGRELSKTAFSFSNSSEGFHSAKEWAIKLAAINDKTQIVLGLEPTGHYWFCLATWMVANGISVVQVNPYAVKQTKEIEDNSQLKDDTKDPKLIANLVKDGNYGMPYLPEKLYADLRRLSMFRDQLTEDRIRALNRVHREMKIYFPEYKDAFGKINGAFCLEVLKQAPFPDDLKTLGVDGIRDIWHAAKLRGRGYSRAGKIFEYANESVGLKDGAGISKEAVKWFVRKIIEIDEQLAEIESQMEEKCLKIPHTGKILEISGIGENTLSGILAEMGDISRFDDVKEIQKLSGLGLVACSSGKHKGKTKISYRGRKRLRYWLFQAAKSLVAHSEAFKELHVYYTTRPENPLKKMQSLIVIACKVLRVIYTILTKGVKYDPKKMLMDIRRPSKQEVLAA

SEQ ID NO: 237763 - protein, 336 aa, unidentified
MFCGIDVSRETLAVAVLAPDQPIEHRAFANTAGGHKGLIAWLGKKRAVVRVSLEATGIYSLDLALALDGAEDVELAVLNPKLVNRFAQTLRRSKTDKADAEVLAEYSLRMPFQAWRRPGQTALALRAIGRHIEALGLEHTRALNRLRAAEGTLTAARCVVADLRRCLAGLERRMVKLRREARKVIDGNEQMREQFRLLVGMPGIGEISGLQILGELVLLVPEMKARQWVARSGLDPVHRESGSSVHKPARISRAGSRHLRRALYMPALSAVRCDPHLKAFYEALLCRHKTKLQALIAVARKLLHAIYGIFKSRTPYDGQKLFPALRIGCAIESTSR

SEQ ID NO: 237764 - protein, 369 aa, unidentified
MAEYSEVFVAFDVAKRKHAVAIAEGGRTGEVRFLGEIENSAATIERVIKRLAGRYDRLHVCFEAGPTGYELYRHIRDLGHDCMVVAPALIPKRPGEHVKTNRRDAITLARLHRAGELTAVWVPDAVHEAVRDLVRAREAAADDLRRKRQQLLSFLLRRGRIYSGGGHWTLAHRRWLAKQAFEHTAQQIVFQEGIDAIEDAVQRLHRLEQQMAAIVPSWSMAPAVAAYQAMRGASFLVAVTFAAEIGDVRRFDTPRQLMSFLGLVPAESSTGDTVRRKGLTLAGNRRARRALVEAAWTYRYPARVSETLRARIEGLPKTVRDIAWKAQLRLCARYRRLSAAGKKLPVVVAAIAREMAAFLWAIAREVAAM

SEQ ID NO: 237765 - protein, 352 aa, unidentified
MAQSTGREVVLGVDTHLDAHMGVVIDGVGKVLGTLIAPAGIHGYQQLLQWSRSFGACTRAGVEGTGTYGAGLARVLRDAGIEVLEVNRADRSKRRLKGKSDPTDAENAARAVLSGEATAIPKLQSGVVEAMRAITVARRSAVKAKTQAINQLRSLLVTAPDPIRSKLMKSKPEHCVQACMRMRALGTTPLLEALSRTLRILAKRWTVLAAELRELDAMLEALARRAAHRMLERFGVGPYTAATLMVVAGDNPERLRNDAALAALCGASPLPASSGKTQRHRLNRGGSREANNALWTIAMVRMRSDARTRAYIARRTALGRSPKEIQRCLKRYIVRELYPLIVADLRDAIVTA

SEQ ID NO: 237766 - protein, 341 aa, unidentified
MKVSTLGIDLAKNVFQLHGVGCNGQTVLKKKLTRDKFLPFLMQLEPCLIGMEACASSHHFARVLRQYGHEVKLIPPQYVKPYVKTNKTDAADAEAICEAVARPNMRFVQIKTAEQQAILVLHTERNILIRERTACANSMRAILAEFGIIMPRTLSQLYKKIPEILEEYDNELSPFVRCSVARQLEHLQGVEDQITLIEQELSRWAKTQPACQRVMKVPGVGLMTATYLVASVGNGQQFHSAKQFAAWLGLVPREFSSGGKQRLGRISKRGDRYFRYLLVHGARAVAAVIERHKDNMPWLYRLLNKKAYNVAVVAQANKTARILWSMLVSSYGISNLIRGLR

SEQ ID NO: 237767 - protein, 347 aa, unidentified
MKITRIGLDLAKNVFQVFGVDAQDKRVLSRQLKRKDMQAFFQALPACLIGMEACASAHYWAWVLTEMGHSVKLIAPQFVKPYVKGNKNDANDAEAICEAVSRPGMRFVPVKTIEQLHLQARHRVRTELIKQRTAKANQIRGLLAEYGIVVGLGVRCLRHHLPEILEETENRLQEDFRVLLTGLREDLVYLDERIKTEDKAIGTLANTHASARRLQQLRGVGPLVATALIAALGDGRQFRNGRQASAWVGLVPGQHSSGGKQTLLGISKRGDTYLRTLLIHGARAALRAARTKTDPLSLWLQGLCARRNPNVAAVALANKTMRLAWVLLRREEDYDPLHGHARPAQPA

SEQ ID NO: 237768 - protein, 356 aa, unidentified
MAVYVGIDVHKHYCQAALMDDSGQVVKELRFDNTSQGTSSLVTLARSIAPKVEAVVEPSANFWVRIYDRLEEEGVRVKLSNPLRTKAIAEARVKTDRIDAKTLAYLLRGDLVAESYVPSRKNRERRALIRHRTSLIHMRVDIKNRIHALLDKHELTHNYTDLFGKQSLEWLHNLQLPTPDQQILQSSLQVVETLTEQIRSMDLQIAKDATSEEKTKLLMTMPGVDYYAAMVLLSEIGDVHRFSSDEKLVSWVGLAPQVHQSGETSWTGHISRKGSKRARWILGQCAQSARQHDPRMREFYERIERKHGSQKAVVAVARKMLAIMYVMLIRNEPYHGENPELTERKHKRLDMLANGA

SEQ ID NO: 237769 - protein, 338 aa, unidentified
MKYAGVDLHKNQFSVHWRTGKGKGIFKEYPMTAKGISGFKKNLDKDTEVGLEATGNSKYFYDSIVNEVSKVRVINPLQFKIISESVKKTDRKDAEAISLYLSKGLLPEVRVMDKETRELRSLIQTRDKLVKLRSALKNKIHGILMEHGIQSHREMFSSQKALDQLKDAPVSETSQFELEVIVNQIKSLTESIQKIEEKINQKGEGLKGQKNLQSITGVGKLSSTIILANIGNIDDFESSKKLCAYAGLVPSTLESNENVRHGHITKRGDKIFRTTMVQVALVVIRYNSYIRSFYERIKYKKGSGKAIIATARKLLSIIYDTLRNDWVFEDFDKFVLQN

SEQ ID NO: 237770 - protein, 408 aa, unidentified
MEVVHERCAGLDVHQHNVVACARTVASGRIEQEVRTFDTTTKGLLELSDWLSERGCTHAAMESTGVYWKPVWYVLESSFELVLANAMHIKNVPGRKTDVNDAMWIADLLAHGLIRGSFVPPTPVQELRDLTRTRKQLVREVAQHTQRIQKTLEDANIKLTGIISDVLGKSGRAMLEALIAGETDPEKLVALTSRRLKATRAELVEALRGRIREHHRFLLKLHLGQVDALRTAVREVEARVGETLQPFCDLAELLTTMPGVSDTVAHVILGEIGIDMSRFPSAAHLVSWAGLCPRSDESAGKRRSTRVRKGAPWLKTVLVQAAWAATRVKDSYLRAQFLRLKGRRGPMKAIIAVAASMLTAAYHMLRDGVAYQDLTASYFDTRDRTKLAKRLIRRLEDLGLTVEVRAAA

SEQ ID NO: 237771 - protein, 368 aa, unidentified
MKKLLHVGLDVDDKSFHIGAFCSETGEVFELTCKPNFGNLLKKLDKFREQNFEIKLCYEATYIGYTLCRSLRKESIDADIIAPSLIPELSSNRVKTDRLDANKLAKYYASNLLTKIHVPTEEDEHERDFIRSRGFLVDQRKDLKKHILSCCRRNNLNYKQENATTSHWTSMHLNWLTDKVNKLSGPLRATLELLIFQLQKLNECIDNFDQKIKDLSETEKYKKKKDSLNCFRGVNTLTAMTLITEIGDVKRFKHPKQLTSYAGLDVSEYSSGGKERKFGITKMGNKRIRTAVVESCQRVEKPNLLSKRLKAHRQGQDIKVIDVADRCTKRLKMKSNRLLDLGKQRNKVKVACAREFLNFIWEALMIVA

SEQ ID NO: 237772 - protein, 435 aa, unidentified
MEKIKENVAGIDIGAREVFVYVEGQGVKSFLTFTEDMEALKKYLISNGIKEVAMEATGVYWSILYEILEEAGIDVWLVDGRETSQVPGRKTDIKDCQWIQELHSCGLLKRCFVVRDDIKELRSYQRLRQDHIQSASMHINHMYKALIQMNIRLKETISQIHGVSGLKVIEAILKGERDNNVLLHLCDARIIKNKKSEVLKALNGKYTKAGLFALQQAYDAFNFYQKQIAQCDQEIEKIIHHMGNNSNDKDLSQKRKPIRHNKPEVKNLGANLLDIFEGKDATVISGITDYTWMQLLSETGVDLTRWHTQKHFTSWLGLAPGQHWSGKKKKNRRKQGRPKAGQIFREIAQSLINSKDVALGAYGRKLRAKKGPGKAIKAMARKLAEIYWKVMVKGMEYVENGVKKYEEQLLQKKRQSFIRLAKELNYQFVINEPVG

SEQ ID NO: 237773 - protein, 348 aa, unidentified
MIIIGVDYHPSFQQIAFMDQETGECRERELKHSDGEAEKFYRELKQRGISVRLGMEASRWFERLLAELGFEVWIGDAAEIKTKRVRKKKTDREDARLLLKLLLENRFPRIWVPSPEDRDLRQLLWHRHRLTQMRTRIMNQLQAVAMNEGYRWKKKLFSERGRGLLEKLSLAPWASRRRKELLELLDQLDPKTAELTAAVEQEAKKRPEVVQLMTHPGVGPIAGLAYVLVIGTPEQFPCGKQIGSYVGLVPCEDSSAGRQRLGHISKQGNTLLRFLLVEAAQAAARCNPDWRRRYLHLMMRREKRITKVAMARKLAVRLYWMWRNGWDYSQLVEFGSNAGKLVIGHGVK

SEQ ID NO: 237774 - protein, 346 aa, unidentified
MIIIGCDYHPSWQQVCWLDQESGETAEQKLVHASGDAEKFYKQLPAPALIGMEATGNCQWFVEMVTAAGHQVWIGDAAKIRASDVRQQKHDKRDAALLLKLLLEGRFPRIWTPSSEQRDMRQLLIHRYKLVRLRAQAKNELQRLAMNQGVQKKRRLWSKAGQELLRELPLQPWASRRREDLLKVMALLDAQILSLDMAVKQAAETDANARLLMTQPGVGPITSLAFVLTMGDVRRFQRGKQVASYLGLIPREYSSGGHQRLGSISKQGNRFMRMLLVEAAQIAVRCDPRMRAEYLHRCHSKPKGVAKVAAARKLALRLYWMLRTQKRYPEIVAIESSSRVALAGAS

SEQ ID NO: 237775 - protein, 343 aa, unidentified
MKITTVGLDLAKNVFHAVCFDEHSKEVKKRMLRRNQLRSFFTQLPPCKVGMEACASSHYWGRELKALGHEVKLIPAQHVKPYLLGNKNDFNDARAIAEALTRPHIRGVALKTTEQQDIQATHRMRSQCLRDRTALCNSVRGLLSEYGIVLGKGIPILRKSIHGLLEDAENGLSLIFRNLLARRYEQLVELDGHIDFFTRELEIQSRQDDACQRLQEIPGYGPIIASAFYSTVGNGEGYSRGRDVAASIGLVPGQHSTGGKNVLLGISKRGDGYLRGLLIHGARAVVIHASKKKDQLSQWINRIVTDRGKNKAAVAVANKMARIGWAVLRNNSHYQAALTVSSL

SEQ ID NO: 237776 - protein, 359 aa, unidentified
MTSLTDSIDLREVVDVVIGVDTHVHTHSAAVVDARTGGVLGEITVEATCEGYAELIEFTERHAALRAWAIEGTGSHGAGLTRVLSERSEVVIELDRPVRAKRRNGAKSDPLDAIRAAREALARPRLGTPRTGGDRQALAVLVTARRSAIQAAGDAQRQLFALIIAAPEQIRSRFRGQQLKTMIRTAAAMRTHTTWDLETTTTVTTLRTLARRSQHLQAEADDYEKTITAIVKSWRPDLLDQPGIGPITAAIVLCAWSHPGRIHSEAAFAMLAGAAPIPANSGQTTNRYRLNRHGDRQLNRALHTIAITRQRCHQPTRDYTARRATEGKNPREIRRCLKRYIARDLYRRLENPPSPLDAT

SEQ ID NO: 237777 - protein, 435 aa, unidentified
MCRHLQDGPAKEAFPRLTADEEPCGLSTPQRLPPLRYKTADLCKRTGDASFSARPGSLAFRGDGTQMNPVAHPSPHQAASQPAASPLIPNQRRPHLFHIPPDRPILGVDVSKNRLNVTFDARSGKLRETACPNTPAGIQRLLKTTPPQCCWVLEPTGRYGDAAVDLARTAGREVLMADPRRAKAFMRSGPERAKNDPLDGRGLTEYAATRPLPRYPRPTPVTERTRQLLSARKGLSQSLSRLNQQRTQLKLAAAALEPACQALQAQIQSIDAELAALVQDPTHAEEVGAAPRLDAVPGVGPVTATAASACLQTRHFGHPDQFIAYLGLDVTVRESGQRKGKKQISSQGDAELRRLFYLAAQANLRVKHSPFRTQYDRERAKGLPHTGAVCAVARKLAKVCWSLVKHGGKYDPERVYVQPKPKNRTDPGDPSQTSS

SEQ ID NO: 237778 - protein, 427 aa, unidentified
MSYRIAGIDVHKKMLAVVIADVAVDGEYQFDRRRVDTSPSALRGLAEWLVAQEVQEVVMESTAQYWRPVWDALERDWQPRRRQQEGAGPMSGTLHLAQAQSNRGPRGRKKDFPDAERLVKRLVAQELTLSFVPEAEQRLWRTVMRRKYQVTRNRVQLQNRLECLLEEAHLKLSSLVSDLLGASARRMLQALADGETNPATLAALADQRLRATQEQLRDALGACQDLNPVYRRLLKLALEELRLVEDHISQLDQEMAGLLSPHQPVVQRLAEVPGLGVDSAQQIIAEVGVAAATFPSAKHLSSWVGACPGDDESAGVSYSHRSPKGNRQMRRLLNQAANAAVKTKGSIFQLVYRRLVPRLGHAQAIGAIAHRLCRLIWKILHEGIRYEEGGPAVIKRRTQARAAKMIRELRNLGYRVELVPSQAGTPA

SEQ ID NO: 237779 - protein, 445 aa, unidentified
MTNRTIGIDLAIRGDHVAQIYDDGQPVGRPIRFRHVPGSLDHFVAQAVANLSPGDNIQAIMEPTGMSWFPVAHRLADCGVSVARVKGKRVKALRRYLSEHAKTDLADAHVLAAIPGFGGPRLDTVHIPAPKNHALQRLTKQRGRFQDAIAASKRRLLDLVRWASPVLERILPDFGTCLSVAILQRWIDPEAVLKARKSTIARFIAQNASGNHPHTGPFVDALIDGLRQAAREARDLHRNHVDFAGLQAEIAIEIDVMKANMAARSELNRRIEALYAELQPVDVLRTIPGVGRHLAPVLFGLFHSAQRFRSERHFRGFCGLFPRRSDSGGAERPGQKITQGGNNRIKCALILAADTARKIDPDLAEVYWRMMTGKGHHHKQALCAVANRLVNRIYSVMRSGRPYVLRDHEGCEISVAQAKALIAQRYSVSESIRASRRANRLQTSA

SEQ ID NO: 237780 - protein, 449 aa, unidentified
MSRPQVIDDTEHERVHDKVAAIDVAKDSGVVCTRTPHPSRPGTRQSRIWTVKARMGTIRALGRQLNKDGIEKVTLESTSDYWRIWFFALEAAGLAVQLVNAAQAKNLPGRPKTDKLDAQWLARLTEMGLLRASFVPPKAVRDLRDYTRMRARLVQERTRCWQRLEKLLEGALIKLSSVASKLTTISAQDMIKAMIAGQRDPKVLAGLARTGMKAKHDDLVAALDGMFDDHHGELAQLLLDQIAVLDGKITQLDTRIGQAVAALPAAWGINADGTTGPGAGTGPDAAVLPAVTRLAQIPGVSENLARAIIAETGLDMTRFPAAAHLVSWAGLCPSARQSGPRTRAGKKGQGNTWLRGSLGQAALGAARTTTFLGERYHRIARRRGKAKAQVAVARSILVIIWHLLADPAARFTDLGYGYYQDRTDKDRKLRNHVRQIEALGFTVTLIKDT

SEQ ID NO: 237781 - protein, 408 aa, unidentified
MNAVGIDVSKGKSMVAALRPMGEVALLPQEFLHTEVGLEQMAYAIVALGEDTRVIMEATGRYHEPVAAALHEYGIYVCVLNPLFIKQSGGGSIRKVKTDKADAMKIAKYGLDNWVDLREYTPMDTVRQQLKLCSRQYNLYMKTVVSLQNNLISLTDKTFPGVNELFSSPERADGHQKWVDFVMTFWHCDCIYHVSEKAFTERYQKWCMRKGYHFSAEKALDVYAGSCGHFTTLPKNDNTKLLITTAAQQLLAGKMTLAALRAEMTRLAKQLPEYDTVRAMYGVGETTAAQLMAEIGDVRRFPRRSSIVGFAGVDPAVDQSGKHEAKSTPTTKRGSPHLRKTLYQIVCTYLKRSPVDEPVYQFLDKKRSEGKPYFVYMTAAQNKFLRIYYARVKECLEAFDERQDTVQN

SEQ ID NO: 237782 - protein, 318 aa, unidentified
MANQVAVGIDISKKTMDVAIGHEQSTAIFSNDGAGHQALIAALKNHPVSLIVMEATGQYQLACACALQAAGFAVIVINPRQARDFAKAMGRLVKTDSVDARMLAELAQVLNQRPDRDRFIKPMPDQVQQHLHALVLRRRQLVRLLVSERQRKHMAHPEVVQDIAELMDMLATQLEALDRRIAEHLAQYQSDLATLLKSVKGVGPATAATLISELPELGQLKAKQICALVGVAPMNRDSGQARGKRIICGGRATVRSALYMAAIVAMRHNAVIRRCYERLLAAGKPKKVAIVACMRKLLIIMNAMVKTGRPWNDQPAPA

SEQ ID NO: 237783 - protein, 326 aa, unidentified
MGIDISKATLDAALIIKEGEVVGQTKVANNSHGFNDLASWIRKLKVKLSDVLVCAEHTGIYGYDLQIWLDDMQISFAFVPALEIKRSLGIRRGKNDAVDALRIAEYAYIRRESISLSHKPSDVIFQLRALLGERKQYVRMRAALLARKDALHQYESKESIDRREKIIDKYAEYIASVDKQMRGLMEHDDEIKRNYELISSVKCIGLVNAINTLVYPNNFTSFQTPRQYACYCGIAPFEHTSGTSIKGRTAVSKMGNQQLKCELTMAARSAIIHDPWMKQYYKRKMMSKGNAPGAHGIVLNAIKFKLIVRMFSVVKSGIPYKVMAYC

SEQ ID NO: 237784 - protein, 455 aa, unidentified
MPKRTTGDRPELNPVNVGAAAIDIGSKMHMAAVDPTCTDAPVRAFGTFTQDLHDLADWFKACGVTSVAMESTGVYWIPAYEILEQRGFEVILVNARYAKNVPGRKTDVSDAAWLRQLHSYGLLRGSFRPDGEITTLRAYLRQRERLVEYAAAHIQHMQKALMEMNLQLHHVVSDITGATGMRIIRAIVAGERNPDVLAAYRDVRCHSSVETIRAALVGNDRDEHVFALTQSLELYDTYQAKMLDCDRKLESLIAALTDRGAKPVGKLSRPRVKTKQVNTPSFDVRAALYGVLGVDLTEIHGLGPSLALKLIGECGMDLRAWPTAKHFTSWLCLAPGNKISGGKVLSSRTRRSSSRAAALLRLAATTIGRSDTALGAFYRRLSSRAGKAKAVTATARKIAVLFYNTLRHGMTYRDPGADHYEEQYRSRVLANLKRRAKLLGFVLQAVPCDTEVAVS

SEQ ID NO: 237785 - protein, 349 aa, unidentified
MKTIVKQVAGIDVAQDELVVCLGKMYDDWTPELCAHKTFANTAKGFVSFTEWVNRLADVSVPVRFVMEATGVYHESLAYYLDEQGQEVSIVVPNKISNYARTLTVKTVTDKTASEAIARFGLERKLDQWSRPKGLFKKLRQLTRERSQLVDERTVLKNQLHAEQAQAEPYKKSIERIKKRIILLDKQEKEILEELRSLIKTDNEMQQLVILLCSLPGIGILTAATVLGETNGFDLIRNKRQLTSYAGLDVKEKQSGTSVKGKPRISKKGNKHLRKAMHMPALAAIRHDERFKAIFARLISKHGIKMKAVVAIQRKLLEMMYILYKTNKSYDKNYLQNKTVQSIDNTIKN

SEQ ID NO: 237786 - protein, 360 aa, unidentified
MCRVGEPVSNLLSLTVECNKMTIQSKQKIVDKSMALFAGVDVGSSELILLIRKNGTSYKSQKFTNTSADRARLVNKLVKLPGVIVCLEATGVYHFDLSVSLHDAGVALMVVNPKASHNFAKVLMKNSKTDAIDAETLAQYAERMDFVAWMRPSDEKIAIRGFSRRINALTRQKAAAKNQLHALTASKETPKEVLCDVKLGISQMEKRIHTLTQGALVLVEKHPQLQRVFNLLVGIKGIAETSAIALMGELLLLPPGLSHREWVKFAGLDPRTFDSGKSVHKQARLSKGGNSHIRSALYMPALSAKMHDPYVKAYFQHLVDNGKKPLQAVCAVMRKLLHAIHGMLKHDKPFDNSRFYALPA

SEQ ID NO: 237787 - protein, 458 aa, unidentified
MRKPSNRKQGGRQNTKDWDTLPALNRNAAGIDVGNAEHHVAVPAGRDEQPVQKFGSFTADLHRMAAWLTACEIDTVVMQATGVYWVALYQILEEHGLQVNVVNAQYTKTLPGRKTDVLECQWLQKLHTFGLLNNSFLPPDKIRVLRTYMRQREKLVTAASTAVQHMQKALTEMNVQLANVISDISGLTGMAILRAIVKGERNPDKLADLKHTRIRASSQEIAQSLEGNWREEQLFVLEQSLALYDLYYQKISECDQRIASHLRTMDSKAGQPTVEPEIPPRRSKKSSGFDLRAQLCRIAGVDLTRLDGVDVGTAQTVISEVGVDMNRWKTEKQFASWLGLCPDHRISGGKVLKRGTRHVVNRAATALRMSAWSLIRSQSALGANFRRLRRRLGAPKAITAMAHKLARLVYRMLKFGKEYVDKGTTYYEDKFRQHQLNWLTKQAASLNLQLTPIMDIRS

SEQ ID NO: 237788 - protein, 319 aa, unidentified
MTTTPIVVGVDVAKDRLDVAVRPSGEAWSETNDDAGVRALVARLRPLGPTLIVCEATGGFERAAIAALAAAGLPVVVANPRQVRDFARATGQLAKTDQLDAGILALFAERVRPTPRPLPDAAAQLLDAVLTRRRQLLEMLVAEKNRLGFAPKPLHRGINAHIRWLERQLDDVTKELAGLIEASPVWRAKDDLLQSVPGVGPIVSYTLLGELPELGTLSHKQIAALVGVAPLARDSGTLRGKRMIWGGRASVRTALFMAAMCGRRWNPALKVFYDRLTAAGKPTKVALIACVRKLLTILNAMVRQNACWQSSRTTLQYSC

SEQ ID NO: 237789 - protein, 417 aa, unidentified
MKKHSNSLKQSEAPAKRRKLGVVVERKPQEVMAELIVKLAGQLDVEIVPAVEGKKDGRDAVHPNLDRLTVGVDLGDQWSNYCILGLGGETLVEGQFRTRKQEVAEFFQALAMSRVVVEVGTHSAWVREIMAGFGHEVLVANPRLMEGSKRRRRKSDRIDAEKLARLGRMDPKSLHPIEHRSTEVREDLVILRARDALVKSRTELINSVRGQVKSMGGRVTGCSSVAFSQKAIAEIPEEVHETLQPLLRLIATLSEEIKTFDQRIEKLAAEKYMQTQLLRQVSGVGPVTALAFVLTLETPLRFARSRDVGPYLGLVPKQEDSGDIQPQLGISKAGDRMLRKLLVGSAHYILGPFGPDTDLRRFGMRLCERGGKNAKKRAAVAVARKLAVLLHRLWASGEVYEPLGHGSVTRPAQAVAA

SEQ ID NO: 237790 - protein, 487 aa, unidentified
MNDVLEKLNVENGAEVRPLCDYGVGIDTHRDFIQVCVLVRAGSVIRRYESEHLTTWKGLVNAGKWIIDTIEEESIPTIEPEPLRYTIESTSTYHLPVIKAIKGKPCVVNPVLAGSTKKKTDVLDARLLSYQSLTGLWPVSFVVPPEIEEFRLLMRQRHYHCRECTAISNRINNYILRFGHTLGSYKSVRSIDNRAVIEDMCEEDYVYKDNYPGIEAGLFICPDGLPLEVKKIIKSMFTEYDFHDEKVKHYQKLALLAAKNIYWETDSGYVKGDLLIKNLMTVPSVGELTALVWLSEILTPLRFSTAAQLAAYCGCDPSLKVSAGKVTSQTRRNGNAKLHFQLSKIAGSCINRHREPFGRWGYAISKKHAKGGYKKASGAVARRIAVSLYFVHKQNEPFSYDNYNFYKIDVPNVHLSDMGFPKRLENILLSNGLTDSKAIADSYIVGKIHELKGLGKKSTLDIDTWIQLNKNKNYKSKGAINNDQKRM

SEQ ID NO: 237791 - protein, 303 aa, unidentified
MNNLSYIGVDVSKAHLDVASDLAAQRHPNHPTAIAAWLKKLPPQGHLIVEATGGYERPLVRACHRAGRPISVLNPARVRSFARARGCLAKTDAIDAAVLREFGRALQPKASPEAAPAQRKLAELVSARDHLVVVRTQLVNGLEHAELPLVRQCFSTQLRSLERRILKLEKALADAIQSSAVLSRRHDLLRDQPGIGLLSAATLLALLPELGAANRNQIAALAGLAPYNRDSGQHHGPRFTGHGRPRLRRALYMATLSAIRSPGDIADFYRRLRLAGKPAKVALIASARKLLCFLNSSLKAASA

SEQ ID NO: 237792 - protein, 418 aa, unidentified
MSWSNLKGAGDMMFVGNDWAEDHHDVCVMDGEGTILAECRFDEGIEGLTKFHALMGGFVSDPGDVVIGVETDRGLWVEALLGAGYQVFAVNPLSVSRYRDRHGVSGAKSDRGDAMVLADMVRTDRHMHRQVAGDSDLGHDIKLVARVHQTLIWDRLRHVSRLRAALREFYPQGVAILDMCPLRDGVAVLGAAPDPVRGARLTKSQIVKVLKRGGRQRYLETTALKIQGLLRGEYLEASPGVIAGLSVTTSATVAIITTINEQIARVETELAPRFEQHPDAAIYLSMPGCGVTLGARMLGEFGDDPERYADAKARRNYAATSPVTIASGNYRNVKARWVRNDRLHDPVMQWARLAICNSPGARTMYDEQRAKGAGYHKAIRAVANRLVGCLHGCLKSGTHYDENTAWAHRQPKENLKAA

SEQ ID NO: 237793 - protein, 386 aa, unidentified
MQKLNDLSRSLTALEPDGTLIAVIEMSLSSWLVAGIVPGVERQPLKKLAVDESALLKLLHRWREEAEKAGRRIERIAVAFEAGRDGFWLARWLKACGIEAYVIHASSIAVSREHRRAKTDRLDTELLKRSFLGWLRGERDHCKMVAIPTIKDEDAKRPNRERDSLIRERSRIVNRMKAAFVRLGIRGFNPKLKRAAGRLDGLRTPEGEPIPPNTSAELRRDMERRRLVSDQIRQIEEARLERIEQAPSDGPHAMVRLLARVIGVGIETADMLVHEVLSRNMRDRRAVARYAGLTGSPDESGRKRREKGLARSGNARVRRGMIQLAWRFLLHQKDSALTRWFRARTENARGIRKPMIVALARKLLIALWRLVREGVVPDGVVLRPAQ

SEQ ID NO: 237794 - protein, 341 aa, unidentified
MSKVTVYVGLDYHKASIQVCIMDQDAKVLANRRCPNDAEALDRLARSFGEQVRGAIEACSGAAELADELVARHGWDLDLAHPGYVNRMKQNPDKSDYSDAKMLSDLVRVGYLPRVWLAPHDVRQLRTLVRYRQQLVNERRAVKLRITALLREARLVEPDLRRWGRPWLAWLATAQGLGSQARFVVDCHLADVRRLDEQIVRVEVRLATVTEGDPVIAQLLAQRGVGPVTAWALRAEIGRFDRFRTGKQLSRYCGLSPRNASSGQRQADAGLIKAGSELLRATLIEAAHRLIRLDPRWRSLAATLRAAGKPACVVAAAVANRWIRWLYSQVEGGSITLKTVA

SEQ ID NO: 237795 - protein, 320 aa, unidentified
MDGKRVIGVDIGSRWLDVAREGVAKVERHSNDAATIAQLVSSCDVVRDIVVFERCGGYERALEAALAAAGVAWAVVHSQAVKAFRQARGIKAKTDAIDARLLRDFGRDRLHAGSLRLGRAQDVTLAALMARHNQLKAALHAERCRKATAAIGLVASSIDRMISHLEAELAAIAAELAAREANDPQLARKQQVLCSRIGVAQLTARALLTELPELGLLNRKEIAALGGLAPRVHQSGNTQRRRGLAPGRTAVKAILFNPARAAMRFDPDIRAFCAKLRSRGKPGKVIMVAVMRKMLVKLNALLRDALNADNAHAPAASAAA

SEQ ID NO: 237796 - protein, 431 aa, unidentified
MKRIYVGIDWADDHHDIHVTDDTAEVLDSFTIPYNYEGMEKLRERLAKFSSSPENVLVAIESNEGLLFWNLLEEKYQVYLINPKAMSRYRDRYRISSSKSDPEDAMVLANILRTDLHLYKPFSKDSWADARLKHLTRAHKSLIQEKVKLVNQLTTQLKNYYPVVLQIFSHLDQEITLAFLQQYPSPEKAKTASLEELQDFFRKEKYSHPDKVLFIHKSLHRPSLKAPRELAEIYEMIVLSLVPVLHCLLGQIKGLEKRIALVFEENPAHDMFSSLPAGPIIAARLNAEVGSASARYPTRESLQTEAGTAPVTKRSGKSIIVCFRWQCNKHLRNAVQSLARESVHKCPWARRYFANQLRLGHKASRAYRALGNRWTAIIWKMLQEGQCFSQARLEDSLTKALHSSIGINKVLATLQKSGSRGLDKGSPSPSW

SEQ ID NO: 237797 - protein, 348 aa, unidentified
MKVTTSGIDVAKSVFQVHGVDERGNAVLRRQVRRSQLLLFFSKLEPCLIGMEACASSHYWARKLTALGHTVRLMAPQFVKPYRKNDKNDGNDAEAICEAVQRPSMRFVPVKSPEQQAELAVHRIRRRLMGKRTALINQLRGLLAEYGLVLAQGANHVRSKLPALLEDYSEWLPPLAMELFRDLYEELVELEQRIGAYERRVERLYRGNPLCQRLGQLEGIGALTATAFVATVAHAAQFKNGRQCAAWLGLVPKQDSTGGKTRLLGISKRGDVYLRTLLVHGARSAMRHTPKRNDPKSRWVEQLRKRRGENIAAVALAAKHARILWALMVRGESSAQPASFDRLEQPTV

SEQ ID NO: 237798 - protein, 401 aa, unidentified
MKYGVGIDISKGKSTVAIISCAGEVIAEPFEINHDQNGMSQLEEKIKEIPKEDLKIVMEETGTYHLPVLGYLLDKEYFVVAENALKIKKYLDRGIRKAKTDKKDAYKLAEYACDNWYKLNKVRESDEIYTNLRFLSRRYLSNISIQINQKVNFSNLCDLLFPGYYQLLDENIFILGLEIFKKYYHPELVLNKKQSQFINEIDKLAKKLGHKGAGITLAKKIYNLATQTISPYPNNKYSQLSAISCADELILTIKTSNEIISNMDELARELPEYYVISEIPGVGRKLTSRVIAEVEDIRRLKNAGSLIAYAGLDAPPYQSGQFEAINRHISKRGNKYLRKTGYEVMKAIKSSCKLDNELKSYIIKKENEGKLKKVAKIAGLNKFLRMYYGIVKKKYKELNIW

SEQ ID NO: 237799 - protein, 375 aa, unidentified
MSNLSEAFVGLDTSKLRNSVAIAEGGRTGEVRFLGEIDTTPAAIRKLVKKLATKYERLSFCYEAGPTGYGAYRQITGLGHDCIVAAPSLIPKKPGDRVKTNRRDAVTLAKLHRAGELTAVWVPDCGHEAMREVTRARETAMTDLRRKRQQVSAFLLRQGLHYAAEKKTWTKAHMDWLAGQKLEHVEQRIVFEEMMLAVHEAQARLERLADAIRVAVPEWSLAEGVTALMAMRGMDLVAAATFLAEIGDLSRFQGPRELMAYLGLVPSEASTGDTIKRGPITKTGNRRARRMLVECSWSYRHPPRVGRTKQEKVAAAPQAVREIAWKAQCRLHSRYRSLIRRGKLKTVANTAVARELAGFLWAVNRAITKTGAAAG

SEQ ID NO: 237800 - protein, 329 aa, unidentified
MTSIGQWEMAQTCSKLESHAVVVGIDVSKDHLDAAQYPSGDLIQTSNDTKGLRTLLRWIGRQHAVHVVFEATGPFHRQLESHLAKAGIPFSRINPRHARKFAEATGKLAKTDRVDAMMLARMGALLEPRTSTICNELQSALQELAAGRRNLTRDRTALLNRQQNLQLSLLKRLTRYRLRQIEAQIATIDQAISELISTDESLSRKRTILVSIPGIGEATAAMLIADIPELGTLENGQVAALAGLAPVTRQSGKWQGKSFIRGGRIHVRNALYMPALVAMRHNPDLRSIYLSLTDKGKHAKVALTALMRRLVILANVLLRNDRLWEPRHT

SEQ ID NO: 237801 - protein, 357 aa, unidentified
MTPGTRSTILAIDLGKFKSVACVYTAQTGEHTFGTIPTTPAAMHDLIVDVQPDRVVIEVGPAAGWVKDLCEALAIPIQIANPNTEAWKWKNVKRKTDKDDALKMAQLSAMGQLPTVTLPSSGVRQWRALIAYRHALVGRRTAIKNHVRSILDRQGLTHASGKSGWTRSAIEALGELARPLSQVGGEDLWRGMVHVELAALGQVQQLIDEVESKLESLADADARVALLRTIPGVGPRLAETVVAIIDDPHRFKNAKQVGAYAGLVPRQIESGTMSRTGRITGRGNKLLRGLLVEVAWLMRRFNPPLREAFDRVCRGSKTRRKIAVVATARKLLVICWAMLRDGTTWREPTPPATAAWT

SEQ ID NO: 237802 - protein, 359 aa, unidentified
MDVSKERPKTTAGLDLGDKYSYLCLIDQADGEVIEEGKLRTTPDALRRRFASEQQLRIAIEAGTHSPWVSRVLEECGHEVLVANARKLRFIYANKRKTDEVDAENLARLARVDPKLLHPLRHRGEGSQAHLAIIRSREALVSTRTQLVNHVRGAVKSFGARLPKCPARSFHKRAPEHIPEALLPALGPILEQIGSLTERIRQYDRKLEAICQEHYPETDLLRRVEGIGPLTALTFVLTLEDPYRFERSRSVGAYLGLVPATDRSGDRDPQKRISKEGDQMLRRLLVGSSHYILGPFGSDSDLRRHGEKIASRGGKNAKKRAAVAVARKLSVLLHRLWVTGEVYDPLYNTHRRQEREEAA

SEQ ID NO: 237803 - protein, 444 aa, unidentified
MLRIINKRVAGLDVHKKTVVATRMRVTEEDRVEWETKTFGTMTLDLLELHDWLYEWELTHVSMESTGDYWKPVFNILEDSFEVWLVNAQHVKHVSGRKTDVKDSEWLAELMLHGMLKPSFIPPPPQRALRELTRYRTRLVQERARVINRVQKLLEGANIKLSSVATDIMGVSARAMLTEIVAGQTDAELMADLARGRMRSKIPELEKALTGLVQPHHRFVLAQQLEHIDFLDEKVEAISLRIEQQLESMSWPDEPAEPDAGEGTEEEAPVADASELPLTWNAAVALLDTIPGVNRRIAEVMLAEMGLDMSRFPTSDHLASWAGLSPGNHQSGGKRYSGRTTKGNKFLSSNMVQGAWSAARTKDTFLKARYHRLAARRGKKRAIVAVAHSMLVSAWHMLTYQQPYQELGGDYFDERKKESKVSYLVRRLEKLTGGSVSIELQPAA

SEQ ID NO: 237804 - protein, 339 aa, unidentified
MKLFIGLDVSSQKLDTCFLTDSKEILFEGSLSNDLIGASEVKQKILEYQETFGFYQIVIGMESTSVYSFHPSMFFYLDEDLKQLPVEVTVENPYRIKQYSRMFDQDKTDKIDAQIIADYLRVDLHTLSPIKEEIYVGLQRLTRSRYQLVTQMVEAKQHFLENLTYKCNTLSKELANEDNKTSVFGTTIMNLLTEDITLDEFSEMPLEEAAELLQKLGKGRFKNPEQLVKSIKKAVRSSYRLGKVTKNSIDLVLGIIANEIKFLKKQIKEIEKAIIALLETIPEAQCLLSVPGLGPVYTAGLIAEIGQIERFDDQSKLAKYAGLTWTKNQSETLNLKTHH

SEQ ID NO: 237805 - protein, 472 aa, unidentified
MYEEERIRHARYCQLRREIRGSGEYLIVGIDIAKDKHHAFFGTATGKVLLKRLVFHNTKEGIMKLMGQVEALQIRHNLSEVVFGFEPTGNYHKPLGDHLVKNGHLVVLVSPAAAKKNRETMDGRWDKNDTRDAANIADLISQGKCLFYEYPPQGIRDLRDFLSLRRRFKKEEHRLRMRIRNNLVTKHFPEFDRFFGESEAESLSIVKWCLDPQKIHSLDFEKFFVMVTSKRRSLEQERRLRAIHCTARDSIGCTIGEAGGFESGTLVNQVKEVRAVIKDIESRMEEISRGFAEYEFLLSIPGFGPYISSVVLASIGNPWRFQNSSQVIRLAGYDLNASRSGKTSDKAVPEISKKGNAELRYALYQAALIGSTRNRDIMDYFTRKLKGRSREKGIGTKMRVKLAVKLLVIAWTLMKKKEPFNPEYLKDSCLVKQSGVSHILEEKRAVAMVRSRASVSSSRRDRRPLIANRSAG

SEQ ID NO: 237806 - protein, 405 aa, unidentified
MNAVGIDASKGKSMVTILRPFGEIVSSPHEVRHTTDQIDDLVREIRSLEGESRIVMEYTGRYHEPMARWLSDAGLFVSLVNPKLIKDFDNDSLRKVKTDKADSVKIARYTLDKWHKLKQYGAMDELRNQLKTMNRQFGYYTKLKTAMKNNLISLLDQTFPGANTFFDSPARSDGSQKWVDFVDTYWHVDRIRSMSLVAFTEHYQKWCKRKGYNFQPDKSAEIYESVRNIIPVLPKDEVTKFIVRQAVKQVNTASAAVEELRTRMNDIASQLPEYPVVLAMKGVGTSLGPQLMAEIGDVTRFEHKGALTAFAGVDPGKNDSGTYSQKSVRTSKRGSAPLRKTLFQVMDSLIKTMPQDDPVYMFMDKKRSQGKPYYVYMTAGANKFLRIYYGRVKEYLAALSEASEN

SEQ ID NO: 237807 - protein, 393 aa, unidentified
MKTIVGIDVGKFSHKATILDDAGQSLGGTIHFANTAIGFERLRAHISKQTESVEKQDILVALEATGHYWLPLYLFLLDKKYKIQVFNPYQSDALRKVYLGRAKTDTIDAELIARLARIGNQKETILPGEGILTLRNLSRFRMELVFQASDVKRKVITVLDVLFPEFEKLFSNVFGKSALAILRESPTPEEIVAIDDEKLITLLELSSKGRLGKQTAEKLKSAAQHSIGATFGQSALVFELKLLLSQVQFLKEQLTELEKEITMLLANVDQKLTSIPGIGPMLAAIIIGEIGDLTRFPNVSSVIAYAGLDPTVTESGTITKKRNISKKGSKYLRTAIWQAAVYSLVHNPTLRAFYDKKRSEGKPRQVALGALANKLTRIIYGILRTNKEYQAVM

SEQ ID NO: 237808 - protein, 393 aa, unidentified
MFFVGIDIAKNTHEATIIDDHGNTFVKPFKFKNSVVGFEKLLVSLNNLSPTVTDFEFGMEATGHYWLNLYTKLVESGYSVHVINPVQSDALRGLYIRQTKNDAKDAFIIAELIRFGRYSETTLADGNLISLRELTRQRFYLVDCVSDAKRKVISFIDKIFPEYQTLFSDTFGVTSLELLSNYTSPDVIAELDIKQFSNFLKSVSHGRFGLTKAKEIQSVAKNTFGSFLFADSAALAIRQFIRQIQLLEEQISELDAYIAEKLSMFDTQLTTIIGVGNTLAAVFVAEVGDINRFDAPDKLAAFAGIDPSVKQSGEFNGTRCRMSKRGSPYLRRAFWLAAIAGIKSNTALRALYDKKRSQGKAHAVAVSVVMRKLCNIVYAVMKSGQPYHMDLPD

SEQ ID NO: 237809 - protein, 406 aa, unidentified
MISIGIDISKEKFTACALEQGNKVIWKSYDVMNSKSEIEKFLRRMADVTDVRIVMEATGKYHLPILYTLKANGYFVSVVTPLKMKQFCRSISFRKAKNDRLDAKQIAEYGLIYWNTLENYNLDNTNYQELKHLNRSYQHYMELRVCQINFIDHIIDQTFPGIKKLIPHGSQDFSKDKLLDFLEKWWHKDKVLELSEEEFVKKYQIWAKEKRYHPNTQKAKSIYSLAQEGISTQPSNSPYIEADVQESIKLVKGINQSLHHILSQMIELAEPLEEYQEAKKFSGISDKLAVQITAEFGDLSKFRNKKCLISFVGIDAPPYESGNFKATQRKISKRGNSILRKVGYQAMKCMMSAKNQDNEIYLYMIKKEKEEKPRKVCKFAGLNKFLRIYYAKVMQAKLRTEQRKAA

SEQ ID NO: 237810 - protein, 438 aa, unidentified
MSNKVIFNLDELFISVGIDVGADFSWMSIALPNQQFVGKPYKILHNSIDSLTTAVSKIKEAEELYSLESRIFLESTGIYHYPLFCYLRDKGFNCSVINPIITKNSTNINIRKVHNDRFDSKKAALVGLKPDLKVSLMPSDLALNCRNLCREYYDLMDNRSAYVNKLQGELRMAFPQYLGIFSKVTINTSLTLLETYTSPSAFLEADKQEIIDIIKSTARFGLTYAQNKYNAIIQAATDANQFGYIIDSNIKRIRLYISFIRKYDEEINSILESLHELVDANEDSDFVKQIHLIETFKGAGFLSAATIMGEIGDFSAFSKPKQLFAYFGLDPAVKQSGKFEGTKVQMSKRGSAIARRVIHTLTLQSISISRNREAKNPVLREYYLKKCDSKPKLVAMGAVSHKVCNMIFAILRDNKPFKIIAPQEHIKQYNSAKCDIAA

SEQ ID NO: 237811 - protein, 418 aa, unidentified
MEVLHERCAALDISKRDVKACVRVPNPRRRGARTQQVKTFASMTNALLALRDWLLAERVSVVSMEATGDYWKPVYYLLEGAGFELMLVNARDAKGLPGRKSDVSDSIWLCQLTECGLLRASLVPPEPIRRLRDLTRYRTVTIHERSREAQRLEKVLEAACVKLSVVATDILGVSGRAMLAALIGGERDPEALAGLAKASLRNKHGALVESLTGRFDEHHAFLCRIILRRIDELTAVVDEVTSRIDIELVPFQDAMSHLVTIPGVDRKAAAVIIAETGADMSRFPSAGHLASWAGVCPGSHESGGIRKSGKTRNGCKPLGGALGTAALSAARTKNSYLCARYRRIVAHRGKQRAIVAVEHSILTAVWHMLSNNIDYHDLGPDHFTRRDPDRVLRRITQQANTLGYTVRFDPIPQAGTSN

SEQ ID NO: 237812 - protein, 311 aa, unidentified
MTILTSQTVVGIDIAKAEIVVYRSDLQTTDTIKNDRTALKRWLKTLPAQSAIAVEATNIYHLDTIELAHAMGHQVYVVDAYRVSNYRRGIGQRAKNDPCDARLLARYLTNEQDGLRIWSPPPKAYTSLKSLLHRRATLIQNHAGLMLSWANEPLLKKVQAAQQKAFKQADQAIQKLLRKVSKEAGIEENIDRCKAIEGVGELTATGLATTFMRGDFANSDAFIAFLGMDLTVDDSGKKNGPRYLTKKGDPEVRRLAYNAAMAACRSARWKPFYESYLARGFSKTQALVALARKLCRVAFALMKNQSEYQPT

SEQ ID NO: 237813 - protein, 412 aa, unidentified
MNRLIERCAGLDVHQASVTACVRVPGGGGDRHQEIQTFATTTTGLLGLGDWLQSFGVTLVGMESTGIYWRPVFYLLEDHFECWLLNAEHLHNVPGRKTDVADAAWICQLIEHGLIRPSFVPPKPIRELRDLTRYRKALIEERARQVQRVHKVLEDAGIKLSSVASQVLGISGRAMIEALVQGTRDPEVLAELAKGTLRRKIPQLREALQGRFGSHHALLASEMLALIDHIEESIKRLSDQIEEVIAPFAEEVKLLDTIPGVDRRTAEVIIAECGPDMTRFPSASHLASWAGMCPGNNESGGKRRSGKTRKGSKWLRKALVEAAHGAARSKGTYLSAHYARIRGQRGPAKAAVATGHSILVIAYHLLSNNQPYSDLGADYFVQRQTKTAYKNRLVRQLERMGYDVTLEPVEAA

SEQ ID NO: 237814 - protein, 334 aa, unidentified
MQENQQHNSVDVFIGVDVGKGHHHAVALDRTGKRLYNKALPNDETKLRALITELKAYGQLLFVVDQPATIGALPLAVARDEGVLVAYLPGLAMRRIADLHAGEAKTDARDAAIIAEAARSMPHTLRSLRLADEQLAELTMLCGFDDDLAAQITQTSNRIRGLLTQIHPALERVLGPRLDHPAVLDLLERYPSPAELAATSEKTLANRLTKLAPRMGRSLAAEIVQALSEQAVIVPGTQAATIVMPRLAKQLASLRTQRDEVASEVERLVHAHPLWPVLTSMPGVGVRTAARLLTEVAHKAFASAAHLVAYAGLAPVTRRSGSSIRGEHPSRRGN

SEQ ID NO: 237815 - protein, 420 aa, unidentified
MSNSNIWTARVQEPGQRLYAGVDLALEKNAVVILNQAGQVVDRFQFTQDREGYAYFEQRGERVRQREQAQEIEVAMEPTNYFWKLLAQELEEKERVYRLVNAYTVKKHREGNQLDRSKDDWRDAREIAELARQGQCTQTHLQKGVYEELRQYATLYWQVTRAMQREKAIVCGLVGQVFPEFFCVFQKATSETAQAILQSGVAAVEICEGSLEEFVAGVRAVYPGRRLAVTKLRRLYARAATSIGVRQGVPAIQFALRLHLRILNNLDQQCKQLRAALQGCLSQVPDAAYLLSMPTVTSVTVALFFAEVGDPQRYRTAAQWVKLAGIQPVPNRSGRKQRSQTPMSHQGRPHLRTLLYYAALQLINHDPHFIQLYTHLQRRSTNPLTRMQALGVLMNKLLHVWWALIQQHTLYQSVLSPAKA

SEQ ID NO: 237816 - protein, 354 aa, unidentified
MSQTPSTAIAVIGIDIGKNSFHVVGHDTRGTIVLRQKWSRGQVEARLAKLPPCLIGMEACVGAHHLSRRLASLGHDARLMPAKYVRPYSKGPKNDFNDAEAIAEAVQRPTMKFVATKTAEQLDLQALHRVRERLVSQRTGIINQIRAFMLERGIAVRQGIGFLRTELPTILATRTDALSPRMLRVIEELTGDWRQLDQRIDSLSGEIEALARQDQACSRLMTVPGIGPIISSAMVAAIGTGEVFSKGRDFGAWLGLVPKQISTGDRTILGKISRRGNRYLRVLFVQAAWVVLVRIKNWERYGLRSWIEAAKKRLHHNVLAIALANKLARIAWAVLAKGRAFELTRTNDAGVRPA

SEQ ID NO: 237817 - protein, 343 aa, unidentified
MQAVTTIGLDIAKSVFQVHGIDAEGKVLIRRQLKRRYVLAFFEKLQPCLVGIEACATSHHWSRELKALGHNVRLMPPAYVKPYVKRQKNDAADAEAICEAVTRANMRFVETKTPEQQSCLMLHRTRQLFIRQQTSVINAIRAHMAELGIVTPVGRKGVEQLLAIATDASDRRLTEVARACLAALGAQLRMLKAQILEFDRRIMAWHRSNEMSRRLDAIPGVGPALATALVASVANPKAFRSGRNFSAWIGLVPKQHSSGGKDKLGSISKQGDRYLRSLFTAGALAVIRYAKIHGTKHRPWLTALLARRPTKVAAIALANKLARMAWAMMASGERYKEPVALAT

SEQ ID NO: 237818 - protein, 312 aa, unidentified
MNAKYVGIDVSKLTLDVDSLPEKAAKQYSNDEAGIAALLTHLCDSGVERIVLEATGGYETTVACTLSAAGLPVVVINPKRVRDFAKAKGILAKTDKIDAGVLASFAQLIAPEIRPLPSEEQRELTEMLDRRMQLVHMRAQEKARLSTVLPVAKRDIKEHIAWLDKRIDRHDHDLSQRLRSSEVWKEKVDLLNSVPGIGKVSIFTLLARLPELGSLNRGQIAALVGVAPFNDDSGKRRGQRYIRGGRIDVRNVLYMATLTAKRWNPAIRQYFDRLTATGKPFKVVMTACMRKFLVMINAMMKNKQTWNNSMPA

SEQ ID NO: 237819 - protein, 343 aa, unidentified
MQTITTIGFDIAKSVFQVHGVDATGQVVIRRQLKRRHVLAFFEKLPPCLVGIEACASSHHWSRELQAIGHTVRLMPPAYVKPYVKRQKNDMADAEAICEAVTRANMRFVPTKTPEQQSCLMLHRTRHLFIRQQTAVINSIRAHLAEFGIVAPVGRKGVTELLHVVADPSDKRVPEVARACLAALGTQLLSLKEQILEFDRLIMAWHRSNQTSKRLHYIPGVGPMLATALVASVADPRTFRSGRNFSAWIGLVPKQHSSGGKDRLGSISKQGDRYLRSLFVAGALAVIRYAKIHGTGHRPWLMALLSRRPTKVAAIALANKIARMAWAMMAKGERYKQPVALAA

SEQ ID NO: 237820 - protein, 422 aa, unidentified
MSYCPVAGIDVSKRFSDMCILSPDNKIFAQEKIYHDETSINRANALLQKAERLFFSKPVIVMESTSHYHLILFQFFSEHGYDVIVVNPLQSNSMKDFSIRKRKTDRVDAFKLAMMYRTKTLRPSQIPQTATRALRQLCRHRAELMNDVSSYKNRLTALLDQTFPGYDKVFSDVGGVTSCAVLVRFPTPTILLVEEESELVEVIAAASKSGYSFAKKKAGLLISAAQKAQTLGIHSCADETLIVCTIQMLRTLSESVLQIETAIDNLLAQIKEMRNNVSLLQSIPGIGSHSAALLLGEIGDISLFKKPKQLAAYFGLDPTERQSGSFRGTKNKLSKRGSSYARAALHMGIVNSICKRGKDSAANPVLLSYYEKKCKNKPAKVAQAASMHKLVFIIFAVLRDQKPFELKTPEQHAVEQGFVKAA

SEQ ID NO: 237821 - protein, 328 aa, unidentified
MAQIGIDVSKDKLDVAWLRDSDTLKVKTRVFSNNQKGFKELIAWLLRQTQASIEDIQVMMEATGIYHEALAYALYEAGAQVHVANPAHAKDFAKSLGRRSKTDRKDSITLARFLASRSHRLWQPEPQEIRHLRALLARLEALDKDIRREENRYEKAEIQRVAATVLTYIQTVLATLKQERERLIKEIDDHIDGHRNLKKDKQLLETMPGIGKVLSVELLAMLRSRNFTSAGQCAAFTGLIPIAHESGDSVSKAPHLSKTGAARLRAKLYMGAVVAKTHNVLIKGQYERLTNRGKSSMCALGAAMRKLVQIAFGVLKHQTRFNPQVAIT

SEQ ID NO: 237822 - protein, 344 aa, unidentified
MSIIKTLGIDLGKSTFHVIGRDFSDIPIFRKKFNRQSLLHYLATLPECLVVFEACGGAHWLGRQCKALGHQVKLIPPQYVKPYVKGNKNDFIDAEAISEAATRPNMRFVSLKTEEAQVIAAIHRIRQGYIKERTACMSRIGALLLEFGMSLPTGHATMKKLFAWLAKQKVFIPPLLLQELVGQHEYYLSLSNRIAEQDIKLNQVVEHNPVGQLLKSIPGVGDMMASYCLAEIGNITDFKNGRNMAAWIGLVSKQYSTGGKPTLLGISKRGNKTLRTLFIHAARAVLVRAEQTGAIFGPWLVKLKATKPFNVATVALANKLARIAWAVMTTKQAFNGKHLQANLQ

SEQ ID NO: 237823 - protein, 393 aa, unidentified
MYLNIGIDVAKDVHEACILNDKGEQIGKYIRVKNFKSSIEKFRQRVESIASELDLIPRIGMEATGIYWYTIYCELSKYYEIHLFNPSQVRGFAAVNVRRVKTDKIDAKTIAGMLRFGEAPKIRYGDKMRLELKEYCRFRFKLTSLMSNLKKRLTRNIHIIFSGYDQLFSSIFIKTSIAILNEAPRPSDILEMGEERLYELMRKTSRNHISPEKARELLEMAKDSISLDFIEEALLFEVESLLKLIEYIEGQIKKVETRILAAWETVKDKHNMQTIPGVSNLMAAMIWAELGDIENFNHPDQIVAFAGYDPKVKESGNKKVILGPNKRGSKVLRWVLGIAVVQAKMSNPVIEQYFKKKISEGKHYNTALCAAAKKLIRIIWSVEKNKRAFRIPT

SEQ ID NO: 237824 - protein, 325 aa, unidentified
MNKCKEFVGIDISKDTFDVCYSDYRHQQFSNDQKGFIAFVKELSQNTHCVMEQTGNYQKPLAIYLQDCGFIVSVVNPLVIKRFIQMNLRATKTDKADAKHIMEYGRQFEPKEWKRSKKYITECKQLRSLVVLYQKQSVALKSQRHSFKISGESSLGLIKLIDKEINQLGKKIKELEKRMEELVKSHEQTMLTNISSIKGIAKRTAILLIIHTNGFTDFESSKQLSAYFGLCPQIRQSGTSLMSRGNISKSGNKDLRKMMFMCALSASVYNKGCKDQFERLVAKGKCRKVALIAVSNKLLKQALAVAKSGIPYDPEFVSKKGKKKL

SEQ ID NO: 237825 - protein, 378 aa, unidentified
MTSENTVHVAIELSFSSWLVAVRLPGAEKSRPHRLKGGDTTALLALIAELRSCASTNLGRAVDVACCFEAGRDGVWLHRLLTAHGIAAYVLEPTSILVNRRARRAKTDRLDAEGMLRVLAAWLAGDRQMCSMVRVPTPEEEDAKRPHREREHLVQERLRIENRIEALLFTQGIRGRPSLRSWGRDMVELRTGDGRALPPLLRTELDRLRRRLVLVLELIRELEAERAAAIAAAADDAMVQKIIVLQRIRGIGPNFAAVLVREVLYRSFANRRQLASYVGITPMPYQSGGVDRDRSISRAGNPRARTTLIQLAWLWLRYQPGSTLATWFRERVGTLQGRTRRIAIVAMARKLLIALWRYVETGVIPDGVEIRAHSEVTA

SEQ ID NO: 237826 - protein, 354 aa, unidentified
MTRQSSKIVTTLGIDIGKNSFHLIGLDERGAIVLRKKLTRSQLEPFFANLPPCLIGMEACVGAHHLSRRLKALGHKTKLMPARYVRPYSKGQKNDFRDAEAIAEAVQRPTMKFVATKTQDQLDLQAMHRVRNRLVRQRTSVINQIRTFLLDRGVAVRQGSRFLRAELGTILATRTDVLSPPMIHLIEDLALDWRGLDERIERISAEIEGVADKDAGCGRLMAVPGIGPLISSATVAAIGKGDAFSKGRDFAAWLGIVPKQFSTGDRTILGSISKRGNCYLRALFVQAAWVVLGKPKSWERHGLKPWIEAAAKRLHPNVLAIALANKLARIAWAVLAKERTFEVVTTDEMAAPSV

SEQ ID NO: 237827 - protein, 412 aa, unidentified
MADIVACIGLDWADERHSVHLQPSDGRIEHFELEQKPAVLHEWVAQLQQRFAGGNIAVALEQRKGAVIHALLMYDCFVLYPINPKALARYREAFTTSGAKHDPRDSELLLDLVVRHRDKLRAWVPDTVESRTLQALCEQRRKLVNQRVALTNRITSLLKQYFPQALDWVGDVASVQACDFLVQWPTLATVQQTRPSTVRRFYQDHNCRKKAVIDARLAAIASARPLTTDAAVIEPLSLSVQAYATQLRTLIGAIDKFDARIAAVFAEHADHDIFGSFPGAGDVCAPRLAAAFGTDRSRWDSAAELQAHSGIAPVTERSGKTLFVHHRLACPKFVKQTFHEFADQSIRFSRWARAYYDQQRARGNDHHAALRALAYKWIRILFRCWKERRPYDEDIYIDALRRRGSPLAKNFA

SEQ ID NO: 237828 - protein, 400 aa, unidentified
MSERRARVWAGIDAGKSHHWAAVVDETGATLWSKKIDNDESAILTALGEILDLADKVSWAVDICGTSSALLLALLAAHGQQAVYVPGRTVNRMSGAYRGEAKTDARDAYVIAETARHRRDFATIDVPAQLAADLALLTAHRTDLVADRVRMINRLRDVLTGVFPALERAFDYSSHKGALILLTGYQTPAAIRRRGRARLTAWLANRSVRGADAVAATALEAAQAQQTALPGEDVAAQIVAELATQILALDDRLKRIDKQIREAFRDHPQAEIIESLPGMGPILGAEFAVAAGDLSAYADAGHLASAAGLVPVPRDSGRRTGNLHRPKRYSRRLRRVFYMSAQTSMMRKGPNRDFYLKKRGEGCKHVQAVIALARRRAGVLWALLRDGRVFTSVPPATQAA

SEQ ID NO: 237829 - protein, 352 aa, unidentified
MKINKRKNAEVYCGIDFHKNTSTLCMLYPDGEEAEPITTIKTSLLVRFLANRKHWKIGIEATGGVNHLVEQLKVQHEEVVIINSNKFRGIGIGGKKTDERDARALAEALRLSFVPEVHHRSKYSRQIKSLLTTREHIVQARVDSMNHVRGTLREYGITMPAGAENFYEQARAKIDLVDCVGIRDSLVLVLENVVRYLAQEKAVEDKVKELTKNDERVARLQTIPGVGIITTLMMISVIDDIGRFPNAKEFASYLGLIPSVHASANMRMMGAITRSGSEMLRRYLVHGARAWMRYSPKNDKNRIWAEKVKERRGMNKATVALAHRMARICFALLRDGSQYRMPTAGTIQKAAA

SEQ ID NO: 237830 - protein, 344 aa, unidentified
MTTIDYIGLDIHKKTISFCAKAQDGTILDEGTIPALRKTLLAWAQARPRPWIGAMEATLFTGWIYDFLKPWAQALKVAHPPMLKALTAAKKKNDKVDARTIADLLRCNLLPECHMAPCAIRDLRRVLRYRNLVVRQATRIKNRIAGLLMETGTPYNKRRLHGKAYFGELLGSLQEVPPSVVELLKLSRGQVEFFAAMQRRLLKGLKEDAELNQRVMRLQTIPGVGEILALTWALEVGEVKRFSSIGQAASYGGLTSAQRGSAGKEQREPISKQRNKHLQVVLIETAKLAPRHNPQLAAVHKRELQRGDRNRATLAVARKLVAYLMAVDKSGQPFTMRASTQEAA

SEQ ID NO: 237831 - protein, 428 aa, unidentified
MSGRDYNRQAVRRQRISKRTLIVGVDVGKAFNAVGFMNKDGKVLGSCAKLYNNREGFEQFLEVIEGLKARYRLRDVLIGMEPTGHYWRKLAYFAKGHGYEVRFVRTTALKHHRELDESSSAKSDQRDALTIANITREGKYIDTVIEDGVLRQLRTLSKARERLLRYSVSAKNSLHAALDDYFPELHEIFWSMGSRSLWVILDQCPFPHDVVLMKTSTLQEMIARSSRKKAGSARKAKALYEAAQKSIGVKQIGTADRYRVRMCLEEVKRTVLTLKDMDRQLKCMVKDIPSASYLMSIPGIGPLSAAVFLGELGDPAHFHNARQIVKYAGYDPQESDSGSWVGRKFISKKGRWLLRKHLFFMSMRVVVLTKYFQDYYHRKLEIKNRVGQQPRRKEILCAVAIKLIKVIFALLRDKRSFEDTASAAVAIA

SEQ ID NO: 237832 - protein, 426 aa, unidentified
MAYRIAGVDVHKKMLAVVVADVEGESEYQFERRQFGTTPEHLRLLSEWLVELQVEEVVMESTAQYWKPVWGALERYWKPTCQKREGAGPMSGALHLAQAQSNRGPQGRKKDFPDAERLLNRFVAQELTLSFVPDTEQRLWRTVMRRKYQLTCDRVQLQNRLESLLEETHIKLSSLVSDLLGLSARRMLQALADGETNPTSLAALADKKLRATPAQLCDALSACTELNPVYRRLLKMVLEELQFLEQQIVKLEQEMASLLIQHQEAVQRLAEVPGLGVASAQQIIAEVGAKAATFASQKPLSSWVGACPGDDESAGVSTSHRSPQGNRQMRRILNQCANAAVRTKGSIFEIVYRRLALRLGHNQTIGAIANRLCRLIWIILHRGVRYEERGQVVCERLKRTRTARMIRQLRSLGYRVEPLTVQVNPA

SEQ ID NO: 237833 - protein, 570 aa, unidentified
MIKNKNPYRGVWGDAGRHLRVFFIRAILYLATTLVAWEKSIMGNRRTRRKRKQHINKVQGQRLAAEFKGQDLSRVLVVAIDGAKKSHKALLADGFGEIITDTFGFPNDLAGAKMFAGSVRKAAVDINAFKIIVGLEPTGHYAENLVAYLLEQGFDVRQVNSFAVSREREAGLTWSKTDEIDLCAIGQLIINGKSSPLGHTEAIYDNMKYAARARRSTIQRTVLLESQIHAYMDRLFPGFLDRDLFSDPFGLTSMAFMARYSSANAACRAGATRIERWLSSRRGVSNPHEITQAVVELAQGALRRPADHEEALIEALRFRLREHDLLEEQIGNLNIRLAEYLVETPGIWLLAIDRVSVVSAAEYLGELGPTSQYDGANQIIARAGMVPRETQSGMIAYSGGITKLGHPKLRYILGVIGHNLLTSNRYFQAFYNRLVDRGGKNERLAKTAVAGKFVRVSWAMMNLKGAFEAPTWCEDDLKKDIRTKMERFLKQFGASQIYRNSIGPRLDKVLVSGGQPSTSNSITGSHQLPSASGTHEEHDRASTKPIHIGSLIPVVLGQMAAEQDVEAHMA

SEQ ID NO: 237834 - protein, 416 aa, unidentified
MEKEPAIFVGVDWASTEHQVCMIGPSGPVQRAFAHDAGGLGAMVDWLCAQTANPSDIVVAIEVPHGPVVEALMDRGLFVYAINPKQLDRFRDRFSPAGAKDDRRDALVLASSLRTDRHCFRRLEVLDPVIVELREWSRMAEELKEERNRLTNRVRQQLWRYFPQALDLSEDPGAEWFLDLWALAPTPAAVSKLTEKKVARILIAHRIRCIGAADALAILKRRALTVAPGTTDAAKAHIAAVAERLRLVNRQLKEVVHRIDLLVNRLAVSEYQPGQIAEQRDAAILRSLPGVGRIVLATLLAEAHQAVQTRDYRALRTLTGVAPVTKRSGKSRRVEMRQACSIRLRTAVYHWARVATIHDARSRARYASLRGRGHSHGRALRGVADRLLAVACAMLESRTTYDPLKVSAVTAALKTA

SEQ ID NO: 237835 - protein, 340 aa, unidentified
MGKISMIGLDLAKSVFQVHGVDGSGAAVLKQKLRRERVLGFFASLDPCLVVMEACGSGHYWAREIAKCGHETKLIPASYVKPFVKRQKNDAADAEAICEAASRPIMRFVAGKSEAQQASAVVFRARDLLVRQRTQIINALRGHLAEFGFVVPKGPAHVTRLLAIVEEDAALPESIRAPLQGMVAALRVLEAEIAKLDKEIAARAKSDADARRLMTIPGVGPITATALLSIAPPAAAFENGRHFAAWLGLAPRQHSSGGKDKLGRITKAGDKTLRRLLIIGASAVLRHAAIKPPPAGSWLARMMAGKPRMLVAVALANKMARIIWALLRNGTSYQASSAAA

SEQ ID NO: 237836 - protein, 327 aa, unidentified
MQKSKIQRILYCGIDVSGDTLDICFQTSDGELISQKITNDASGYKLLWQITGLNYQFIMESTGVYQLPLCFFLEGKKGRYSVINALQIKRYIQMKLERNKSDKKDAFHICMYGVENKPECYEMPVPLYFECRALNNAIETITTEITSFKNKIHSLSKLEIDSKVIMSGYKKILRDLQAELKKFEVELYKKLSAWQPDLVKQVGSVVGIGKRATAILIVTTQGFRHTANYKQLISYAGLSPKEYSSGSSIRGKVRICKQGGSLLRHTLYMCALNAKSTNAACKALFDRLVAKGKNKKLAIIAVANKLLKQVFGVVKNGTLFDRGYYGK

SEQ ID NO: 237837 - protein, 341 aa, unidentified
MIGVDLAKEVIQVCIYTNQSVHSNKEMTHNDFLLWLFNTKPTVIIFEACGTSNYWKQKAIEAGHNARLISAKLVATVRQNQKTDKNDALAIVQAAHLPEISFIKGKSEEQQQLQSVLRLRELAIKQKTALSNQLKALLLEFNIRSSNRNGGLKGIIESTLEDAENGFSCEFRQALDIAWTQYVQLLESIKVYDECLESSVKEQNDCKHLLKLEGVGAVNAIKLYIALGCADLGTFSKGKDASACIGLTPLQYSSGGKTKLGSIGKHVKNSRLRSDLITGAMSAISQIVKRNAKTKKEEWIQELVARRGKKCAAVALANKTVRTAFAMLTQGTEYKAELLAA

SEQ ID NO: 237838 - protein, 384 aa, unidentified
MTPDRTDTPAMGEYATVFVAFELSKSKWQLGVIAPGSEKMSRYTVAGGDLAGLGQLFATVRAKVERGGQPVRIMSCYEAGFDGHWLHRWLTDQGVINHEIDPSSIAVNRRARRAKTDRIDLDLLMRAFLAHLRGEPRACSVVRVPTAEDEDRRRRTRERERLIKERTAHSNRIKGLLHAQGIRDAMPLKPGFLSDLDRLCTGDGRPLPPQLKDEIRREHERLCLVCKQIKTIEAQHQAAHRAPAPGSVEAKIVQLAQLKGIGPVFAQVLGNEVFYRRFANRRQLGSYLGLTGTPFDSGDSRREQGISKAGNSRARASAIELAWLWLRHQPDSALSRWFRARVGALTGRMRRIAVVALARKLVVALWRYLESGLIPTGAVLRPSF

SEQ ID NO: 237839 - protein, 370 aa, unidentified
MQNTLTTAVSKGNGEEATQEDTVARVLNLGLDVHYRQVTVAMQEDGGRIKAAGKMSHGAFLNWVRAKLAEGWRIESCYEAGASGYWLHRELVELGVRNLVVVPKAMGGPEAKRQKTDKRDSAQLCDALDRYLRGQDKALSVVGVPTLEQEEHRGLIRYHRQLIKDRTRAEARGKGLLCAQGIEVGGLWWQGKGWVAVHSDPRLKDWMQEQLADWRKKILRAQAEEKPLRERIEALAPESLPKGVGAYSAAVLHYEMKGWERFSNRRQVASYTGLCPGIHLSDSRGKEGSINRCGNRTVRWTLVEMVWRLMIWQPHYGPVRQLAAVKSKRAKKRLVVKAARRLAIDLWRLETGQTTAEKLGLIMRLRTSSN

SEQ ID NO: 237840 - protein, 390 aa, unidentified
MRYFIGIDVAKFKHTACVIDTYGTVLVESFDFTNDIIGFQSLLKNIKPFLKKKHLVGMEDTGHYGDNLRNFLLEKQYKVVMLNPIVTSHIRKASNKAKNDRIDCFVIANTMMNPNFYRDQHAQSIDYATVRQLTRMHHTHTEEINRYKCQLQKSIDIVFPEFNSLLNTKYSKTYLEILDTYHSAHTIANTDIRLLRNTLKNVGVGRSVSISAEQLKKAAKESIGQHNLAIEMDIPFLISLIRRLTSILGEIDKKIEEFSHQLNSPILDISGISHFSAMSIISELGDITYFSSKKKLIKFAGVNPCAYESGTYSMTHTRLEKKGSKYLRKTLYQIIDVVIRFNPIFQAFYQKKISQGKSYRCAQGHCIHKLLRVICKILSTGERFNPEKLK

SEQ ID NO: 237841 - protein, 372 aa, unidentified
MVGSAGRAGTPSRRGGSSGTLELATATPLRRKKVPVTREYVGIDLHRRRSVIVRKNADGELLSKVHIDNSPWALAQAVSAAGPEPEVVVEATFGWYWAVEVLEQMGARVHLAHPLGNDWGNRRVKNDERDANDLVDLLRLGRLAEAWIAPADVREARELVRYRHKLVELRSGLKAQVHAVMGKHGVLPSRTDMFGLGGNAQLDALELPMGYSVRLESLRDLIGVYDREIAGLDRRIAQHFKDDPGYRAIQALDGVGPVLAAVFVAEIGDVTRFSSPDRLASWAGLTPRHRESDNKVRRGSISKQGSKLLRWAAVEAAAKNHAGGDFKSAYRRIAQRRGRNVAKVAAGRKLLTLVYYGLRDGHIRCLANADRG

SEQ ID NO: 237842 - protein, 325 aa, unidentified
MSDSVTVGIDVSKLTLDVHVSPAQLRQTLSNSDAGFAELKTLLSMQQVSLVLLESTGGYEDAVVCFLQSLGYDVSVINPRQARDFARSMGRLAKTDRIDAELLAQLASVIDSRPDRARFVKKITDDRRRKLASMVARRRQVVNMISTEQQRKSAASVYSTESINRVLSFLRSELKSIDADISLHVRSHFADISGLLASFKGIGPATIGVLLGEAPELGRLNRRQISALIGVAPFNRDSGIMRGRRTVWGGRTMVRNALYMPTLSAVRFNPVIREFYTRLISQGKPRKLAQVAAMRKLLCIINAMLSSGTMFNPALHLHSVQEAQQ

SEQ ID NO: 237843 - protein, 420 aa, unidentified
MTSANIIPADAVLVAIDIAKVRNEVLIEDPRHKRRRRLQVLNNRAEHDRLIEVLQTYGRSVVCGFEATGNYHRPIAWRLAEAGFEVRLVSSLALARTREALHNSWDKNDPKDAQVMLHMLKIQATQFYHDPLRAGINDAQELSKTHEAIARAKTEIQHRILTHYLPLYFPEIERFRGNSRSDWFFAFLDAFPTPASIVVLSKEEFVKAAWGVVGRKVSKTQILMDIYETASTSIGLPLPLEAPAVRMFRMVVAEARSLIRQRNEIEAQADELLRHSQDYQLLRQIPGVGPIIALTIIAEAGDLRRFHHHRQFLKFCGLDLSTQQSGQYRGQTRLSKFGNARLRRALWIAGQVAIRQRENGFRHKFERYIAKDRDNPDLRRKALTAITAKMARVVHAVIKSGSDYRPFVEGRVPGGRTSLS

SEQ ID NO: 237844 - protein, 349 aa, unidentified
MASYVGIDLHRRRSVIVVLDEAGERVWSSRIENSPMNLELALEEIKALCEAPVEVVIEAAWGWYWAADVVAGAGCGMHLAHPLGIKGFENRRVKNDDRDAFLLADLLRLGRLPEAWVAPPEIRELRELVRYRRKLSRLQAGLKAQVHQTLGKEGAIPPMTSIWYSGGQRWLDELEMADAYTNRVESLRDLLEVHHREIATLDGLIHRTITTNDQLRDGYEAIQAIGGVGRVLAGVFVAEIGDVGRFPNPKRLCSWAGMTPRHRESDDKVRRGKITKQGPVLVRWAAIEAVTGRSTEPYLKTAKRQIGERRGVNIGKVAAARKLLTLVFYGLRDGEIRCLQEPHPAPVAV

SEQ ID NO: 237845 - protein, 378 aa, unidentified
MHSMKHHDTLVIGGVDSHADTHHAAAMDQRGALLATKGFPTTTPGYRALLDWLCAFGEVDVVAVESTGSYAAALVRYLREHGVRVLEVNQPHAHTRRRRGKSDPIDAEMAARLALSGKATTVPKQTDGIVESIRLLRAARHSAVKSRTAALVQLGGLIITAPQELRDQLADRKTIRGKASLCRRLRPSTDELWRPAHAAKFALRSIAQRINVLDDEIAVLDRQLEQLVRVAAPRTIQLLGISTGHAGRLLVTAGENIDRLRGEGAFAALCGASPVPASSGKTTRHRLNYGGDRQANRTLHLIVVCRLRYCERTRAYAKRRTAEGKTKPEIMRCLKRYIARETYHTLLADLTALQLPTPPATTTINCGAGPIGITRHRT

SEQ ID NO: 237846 - protein, 320 aa, unidentified
MQTPSAVLNIGADVGKDEIVVACAEESFSPRKITNRRAEIMAWLKTLPPGSRLGMESTGSYHELLAETAHQLDFVVYVLNPKDTRHYAKAMGLRGKTDRVDARLIARLIGREHEQLHPWIMPTAEQRQIERMIKRRAKLSAIRASLSQSLKGLAGFATELKALRRRLDKLIARIDVRIKALIEANADRKQDYARLRKIPGVGSIVGGSLVNTLERVPFKKGDAFVAFTGLDPRPDESGHHIGRRRLSKRGPAELRRLLYLGAMAAAKTKTWKPLYERQRAKGLSTTEALVILARHIARTAWSIYTHKTDFDPQRLTPGLT

SEQ ID NO: 237847 - protein, 394 aa, unidentified
MIYAGVDIAKTDHVIGAVDERGAEMCRPMPFKNTEAGLERAVAWLEGLAGSPSDVVVGMEATGHYWMACYSFLVARGYSVAVINPMQVKAVRKLKKLDKVKNDRIDAWLIAEALRIGQYDETRLATDEVASLRSLSRYLQSLRGMAAELKTQCVCLMDAHFPEYAGIFSDMFGAGSRAVLSKSPLPFELARRRADSLARDIAEASRRGGRSAGYAAKIKAAARSSIGVRLGQEAASFQVKSLIRQIEFAESECAKVEARVRALLDEVEPLVLTIPGVSYVTGAQIVSEIGDVSRFRNASALVSYAGLNSSVSQSGQFDSGGGPITKHGSPYLRRALWLAANRARQYDPGLRAFYEKKRAEGKPHRVAVTAVARKLCHIVFAVMRDQAPYDPERE

SEQ ID NO: 237848 - protein, 386 aa, unidentified
MLFVGIDISKSNHSCYIIDSEGTIYENNLQILNNLQGFKTLSQKIHSICQIHNYKNVKIGLESTGHYSTNITNYLYSEGFEVIIFNPIITNNKRKGNTLRKTKTDKTDAKVIATMLFTDRSKSYSPISYQIIELKSLTRYRHRMVKQRSKFKLSYTRLITIIFPELADHVSTVHQKSIQKLFFEFPTAKAIASCHLTKLTNLLKKNSKGKYLKDKAIELKELASKSIGSSNRATAFELQQTIKFIQFLNSEINIIDQKIKDLVDEIKTPLITIPGIGYTLAATIIAEIGDINRFSKPSKLLAFSGLDPSVYQSGKYDASHTMMVKRGSKYLRWAILQAARTVTMRDKTFKDYLNKKLSEGKHYFVALSHVGKKINQSYFLFIKEKY

SEQ ID NO: 237849 - protein, 347 aa, unidentified
MRFYNQQHKYYCGIDLHARKMYVCILDQKGKTHVHKNIKTDPMLLFELIFPYIDNIVIGVECVFCWYWVADLCSEHKVTFVLGHALYMKAIHGSKTKNDKIDSYKIALLLKGGNFPTAYPYPAKWRATRDLLRRRMYLSRRCSELVAHILNTNTQYNLPGFNKKLSRKYNHEGVAERFEDPQVRKSVEVDLEVINSLNQVLKKLEWHIEKTALQHDYHTLYLLRSIPGVGQILALVILYEIHDIKRFPRVQDFSSYARLIRPVKESNGKWAGHSNKKIGNHHLKWAIKEAAILMLRDSSQAKKYVAKYERKYNKGKALGIFTHKLGRAIYFMLKNKEAFDMKQFFGQ

SEQ ID NO: 237850 - protein, 355 aa, unidentified
MKYYTSTTEFNCGIDLHARQMYVCLMDRQGKKLVHTNIRNNDFAFFLKLVAPYRHDLTVCAECMFGWYWLADACQAAGLKFVLAHALYLKAIHGGKNKNDRIDSEKIAHLLRSNLIPPAYVYPSAKRPLRALLRQRTYFVWQRADLLARVQSVQLAHNRTPHKQTRSNRQPWEALLLADEPDPVRQLTLQNELAMIRHFDAQITAIETQLRQQTKRIAARDYALLQTVPGIGENLAALILHEIGDIARFPTVKNFLSYCRLVKGTVASAGKIKSLRGAKLGNPYLRWAFGEVAVIAKRDHLLLKPLAQGLEARLGGNKFKANTILAIKLARAVYFVLKNQTGFDADRLVARLAPK

SEQ ID NO: 237851 - protein, 386 aa, unidentified
MKGQTFIPTDYNVFAGLDVDKRSISVTFTNNEGFIRSLRMPYSVEHLLNYVRKHFSDQKIAFAYEAGPTRYGLYDGLVAQAYPCLIAAPSMIPKAPGQRVKTNRLDSRGLSENLRGGQLRSIHVPSAIYRELRHLTQLRDTFVSEMVAMKQRIKSLLLFEGIEFPPAPAGNGQWSFMVKDKLRKLPCSSTVRFKLDQLLESLEFSEKQVVKTTKEIRRFCQTDPELSQCIKYVMTVSGIGWVVASQLLARIGDWRELKNVRQLGGFLGLVPTENSTGDRTDRGSITHTGDGRLRSKLIQASWSAIRQDGELREFFRSVCQTHPRHLASRVAIVAVARKLSTRISAVLMQQRPYVVREKVHSAPLTQEETVPQETTRRQAEPGEKNS

SEQ ID NO: 237852 - protein, 371 aa, unidentified
MKEFNKYVGLDVHKETIAVSVAEANGGEVRYLGEVANAPEAIEKLVKQLRKGGADLSFCYEAGPCGYGIHRQLTDLGWECQVVAPSLIPKKAGDRVKTDRRDSLSLARLHRAGELTAVWVPDGVQEGLRDLTRAREDMKHLQQQAKQRLLAFLLRHGRRYSGKSNWTQTHYRWLEQMKFDQPVQQIVFQEYVDTVKAMSHRVDAMDKQIESAAAESVFWPVIEGLMALRGVNLLTATMIVAEIGDLRRFAGAPQLMAYLGVVPSEHSSGGNKSRGGITKTGNGHVRRVLVEAAWTYRHPARKTTALQRRAKRAPEVVQEIAWKAQKRMCARYRMLEARGKLKVQVTTAIARELTGFIWAIGQALPPPVANA

SEQ ID NO: 237853 - protein, 424 aa, unidentified
MREEGLSVAEEIEWFVGIDWASQSHQVCLVDARGECLGERAVAHGGPGIEELCDWLIARTGATPEVIGVAIEMTQGPVVEALLERGFCVYGINPKQLDRFRDRFTVAGAKDDRRDAHVLGDSLRTDRHAFRRLSNDEPVIVKLREWSRMADDLQQERARLASRMREQLWRYYPQMLELADDLAADWFLDLWNQAPTPAKAARLRQTTIERFVKAHRLRRWQAPEVLRILKQKPLSVAPGVVEAASDHIRTLTVRIRLVNQQLKAAHRKLDELCAQLVPSEEDEPGQQCEQRDVVILRSMPGLGRTILAVLLAEVWQPLRRRDYHALRSLSGVAPVTRRSGKTCVVVRRYACNKRLANALYHWARLATQHDELSRRRYAALRQRGHSHGRALRTVADRLLSVACTLLEQQTLFDPSYQVRDAAGA

SEQ ID NO: 237854 - protein, 379 aa, unidentified
MQKEEHYMESILYVGMDVHNSNYTLCTYSIETDKEFGLVKFGPDYLNIVRYVRRLKEHHGQDIRIICGYEAGGLGYSLYRSLTANNIECVIMAPSTMPKAPNERKTDYRDAAKIARCLAYNSYRSVYIPDTEDEAVKEYIRMRDNTKDHIKQLKQRILALCTRWRKEYTETKKFWTVAHMKWLQHLEFENLIAQEAFDEYVIQLNEANARLKRYDERIEKWAKLPRYAEKVSKLTCFCGIKTHVALATIAEVSDFNRFPNANRFASYLGLVPGEYSSGNNVNRLGITKQGNSHIRKLLTEAAQCYSRALPGKPSAGLLKRQQGNDPKVIAYANKGNERLKRKYRSIALRKPRPLAVTATARELACFIWGMMTDHLEQVY

SEQ ID NO: 237855 - protein, 418 aa, unidentified
MTVNSVAQKRSVIKPDTLVIGIDLAKHTHVARARFYDGSYTKPVKVPNTRAGFLALSEQIGCWKSRPDSSVIVGVESTGSYGVNLVRWLSERGCQVVLVPSLHVCREKELPDNGRGTSDAKAALIIADLVARGQYLGFVTLSGACLELRSLVNLRARLVREQTGWLNALHQTMDVLFPEFETVFPDLKRPTVRLVLGRFGTVAAARAHSPVEMHRFLAQDGAARVSLARLRRLAAAADESIGPLEVNAGQERSLHEMLETLAMLERRIAGLEAEIVRLLAQLPEARYLMSLKGVGAMTAAVILSETGGLGQYSCAAAVQKLAGLNLYQNSSGQYRSGRRISKRGRSQLRRALYMVAVQHAKRGWPLQPYYAALVARGKPKNVALTAVCCRLVRLLYALVRDGRCYSECPPEAGRPQAA

SEQ ID NO: 237856 - protein, 403 aa, unidentified
MNAVGIDVSKGKSMVAILRPYREIISTPFEIKHTASDIHALVEQIKSVEGESRIVMEHTGRYYEVLAHQLSQANLFVSAVNPKLIKDFDNDSLRKVKSDKADAVKIARYALDKWQNLKHYSVMDELRNQLKTMNRQFGFYMKHKTAMKNNLIGILDQTYPSANTYFDSPARSDGSQKWIDFTSTYWHVDCVRKMSLNAFVDHYQKWCKRNKYNFSQAKAEEIYGTAKELVPVLPKDEVTKLIIKQAVDQLNSASETVENLRTLMNETASKLPEYPVVMKMKGVGPSLGPQLISEIGDVTRFHSKGALTAFAGVDPGVNESGTYAQKSVPTSKRGSSDLRKTLFLVMDALIKTMPQDDPVYLFLDKKRAQGKPYYVYMTAGANKFLRIYYGRVKEYLSTLPESN

SEQ ID NO: 237857 - protein, 442 aa, unidentified
MGAQSAETALTESRDGAAPTGTALFVGIDVGRHHHQVTAIPRERMEDSAWERAGVRKIAANVIGFRELLAWLESSGLPPDTIRVGIEPTGGWYSRTVVAWLETYGYQIDWLQNWAVHERRQLILGKQTKTDALDARLIARLLYERERLGQSRAFLRPAYSGTESLRMLVRNRLKLVNFRTRYRLQLGAVQDVLFPEFKLFFQARSTGRTARLLLERFGTPAALATATPEEVSAVLVGEARAYALGRRISELQHLAASSAGLTDDIDQLVRIQGWLLRQLSIIDKEIEVAEQTLGEALESWPVQARQILHSFPHMSILRSAVLLSAIGDVNAFKTDRQLRKHLGWYPEAAESGTSVFRHRLGQKGNRLARREIWLWVMTLIKPDCHPATFRSYYRRLRGRGVTGKVAAGHVAGKLISVLFFCLRNGEPYDPDRHARALGISDA

SEQ ID NO: 237858 - protein, 366 aa, unidentified
MKKNSTVAIRRKQIFRRKTLTIGMDLGDRFTYYCILDEAGEVMVEQKLPTTKQAMEHVFGAMPSSRVALETGAHSPWVSRQLTQLGHEVIVAHARNVRLIGESSRKDDRLDARMLARLARLDPGLLSPVQHRSAEAQIHLTVIRARAALVGARTALVNAARGLAKSYGERLRKCGTQQVSKNLAAGLSAELRAALEPLLAEVASLNQRIAEYDRRIEQIATEVHPEVALLKQVKGVGTLIALSYVLTVGDPHRFRHSRDVGCYLGLRPGRRNSGHSQPQLHISKQGDGYLRTLMVQGAHYILGPFGQDSDLRRWGLKLCERGGNNAKKRAVVAVARKLSVLLHRLWVGGEVYEPLRNHSGVAGAAA

SEQ ID NO: 237859 - protein, 424 aa, unidentified
MLGVGIDWAETFHVVALGRPGEGIVQVLRVEHDKPALEALLEQLRVLEPDPGEVRVVLETRHGLLVERLVEAGFVVVPVNPDLIARRRGPAKKKDDVEDARIACLLALDPFAPLRPLIPHGELAAELRVLGRDDERACQDERRLLNRLRADLLAVFPAAVQIAGPDMGAPTFLRMLQRWPTAAALAGTSRHDLVAFARAAHSGYPDRFADCVHQALGREHFTARQALAQAKVDTIQLTVAQLLLIGTQRRTWERRMGQLLLGAPRPRGGALPAQADRDRAQAVPGGEIYLSFPGLGDRLAARIAGEIGDHPEQFQTPNSLPCYAGQAPVTRRSGKRELRITRRLACNRHLPDAVHKWAFASLRRSTWAKDYYDSQRDRGKDHHAALRTLGNRWLENPLALPPAPGPYNEAVHVANRTQARQPAA

SEQ ID NO: 237860 - protein, 354 aa, unidentified
MSQKLESAIAVIGIDIGKNSFHVVGHDERGAIVLRQKWSCGQVEARFANMPTCLIGMEACVGAHHLSRKLKALGHDARLMPAKYVRPYSKGQKNDFRDAEAIAEAVQRPTMKFVATKTADQLDLQALHRVRERLVSQRTGIINQIRAFLLERSIAVRQGQRFLRAELPRILATPPDVLSPRMARVIEDLASDWRRLDERIEGLSTEIGVLARADSGCARLMSVPGIGPIISSAMVAAIGAGDAFNKGRDFAAWLGLVPRQMSTGDRTILGKISKRGNRYLRVLFVQAAWVVLIKPTVWERHGLKPWIEAAKKRLHHNVLAIALANKLARIAWSVLARGRAFEVRKLDEAATQPA

SEQ ID NO: 237861 - protein, 412 aa, unidentified
MRSVGLDVHRDFCEVAIIDAVGARSRGRVPSTREALQLFAQSLARTDRVALEVTGNAWEIARILEAHVAGVVVVSPTDTGIRQARAKTDRLDALALARLLAAGSLDGVWMPDEPVRAMRRRLARRSQLVNARSRVKNEIHAVLVRRLKGRPPASDLFGRKGLAWLAEQQLPVEERESVDAGLRQIAFLDGEVAEVERVIALQAIGWPQIGRLMSVPGVNLIVAATFLAAVGDIRRFESASKVVGYLGLDPKVRQSGEGPAKHGRISKQGSAHARHALVEAAWSAVRQPGPLHAFYQRVRARRGHQIAIVASARKLACLFWCMLTRGEDYAYAQPSLTAKKLRRLELTAGAPKAQGTSAIWSTNLAMRDAERALAEQAELAYKRTVADWAATRPAKAGASATKGHASKEPSKG

SEQ ID NO: 237862 - protein, 353 aa, unidentified
MVILAIDLAKAKSLFCWYQTSDGTHELRTIASTPRAFHDALVRQKVDRAVIEVCDMAGWVQDLCRTLEIPLQIANANTEGWRWRNVKVKTDKTDVLKLASLSLSNQLPLVNLPDRFTRQWRSLILYRQKLIERRTRVKNRIHALLVSEGRAMGAGPAAWTEQSLSKLSELARPIEQCGKDQLWAGQLWMELQSLSHLMDQVRQLDKTLNTLGDADPRVIRLQTIPGVGPRLSELVVAVIDDPHRFKNARQVSAYAGLTPRRYQSGVMDRNGRISKAGCAKLRKLLLEIAWGMLQRNAHGRSVFLRISKGQKTRRKQAAVALARRILCWCWAMLRDGTDWRDPSGTVQTPAVVT

SEQ ID NO: 237863 - protein, 443 aa, unidentified
MSELAVLDPRAAFVDVGSEKMHVSIAGGPPALFGTVTSQLHALRDYLAEHQVRSVAMEATGVYWLPLYGVLEAAGMEVVMVDGRQTRNLPGRKTDMKDCQWGATLHAHGLLRAGFVPPASIRRLQDYLRLRGDHIAAAAGHVQHMQKALERMNIKLHEVISSLTGASGLTVIRAILAGERDPQVLLGLCDIRIRNVKAERVVESLRGDWAEEHLFALAQAVQSWDHYQGLIAACDRQIAVVLRQMPDAKVPPPAASTKTGKPRTRPGVNAPDIADLREILAQICGAKDLTTLPAHSEYSVLQLIGEVGTDLTKWRTEKHFTSWLGLAPGSAQSGKRKASVKRRRNRAGQIFCVMARALARSKYVALGGFYRRMAARRGGLVANKALARKLATLFWRVMVKGLDFVETGVAQYEARVLETKHRILHRLARQLGQQIVPNPAAVV

SEQ ID NO: 237864 - protein, 383 aa, unidentified
MRKIQETLQAQSTTDQDVMYIAFELSNSTWRLAFSDGNKKRHVTIKARDLKQLEREIEKAKRRFGLKDNVQIKSCYEAGRDGFWIHRYLLSKGIDNLVVDSSSIEVNRRKRRVKSDRLDAGNLLRLLMRYHGNERQVWKVVTAPTVKEEDARHLHREIETLLRERTRYRNRIRALLVQHGLDVKNPSRKNFLKVLNTLRTWDGQALPESMKARVVREHERLRMIEDHIKLLKKEREQRVKSKETASLRQVAQLRELCGIGANSSWIFVMEFFGWRKFRNRREVAALAGLTPTPYDSGGSQREQGISKAGNKRIRTMAVEIGWCWLRFQPHSKLSRWFNERFASGGSRMRRIGIVALARKLLISLWRYLEHGVIPEGAIIKSSS

SEQ ID NO: 237865 - protein, 408 aa, unidentified
MNPLYVGIDVSSKNNVIYLMLPNGDKHSSFSLANSHDGSTQLVKRIFTAMTSNNIDSVLIGLEATSVYGDNLVYFLKEDTTLASFDRKIHVLNPKQVNKFKESYNDLPKNDYVDAFVIADCLRFGRINKEVYMDDYRYKALQNLTRARYFAVTNLTKEKQRFINVLFKKYSTMTQEKVFSDTFSTTALAVYEKFESAETLAKMDLQELTAFIMEKGKNRFPDPDAVAKALQKAARSSYRLPKTVNDSVNQVLAISITSIRALESQIKAFDKAITKQMELLPNVLISIPGIGPVLSAGIMAEIGDINRFQNQAALAKYAGLAWQQHQSGDFEAQTTRMIHSGNRFLKYYLCEAAFSLVRCDKEYSRFYHLKYKEVKRFQHKRALALTARKFVRLVFALLKDNRLYRPAE

SEQ ID NO: 237866 - protein, 397 aa, unidentified
MYIVGIDIAKRKHEAAVIDGEGAVIIKPFSFTNNCSGYNRLLAMLAKAKLPLDEVSFAMEATGHYWLALFTRLQKAGFRVQVINPVQTNSIRSFYIRQAKTDPRDALLIAEVIRFGHFSESTLHPENIYELRELCRGRHAIVSMQADVKRKVVALLDQVFPEYETAFTNLFSDTSMAILQTCPTPKELSEMPLEELCHLIEVSSHKRFRMAKAQELQELAHNSFGFAMAGDVFSTMIRLYAKHLVFLKQQVQEMDRKIAEIMDTLDTPITTITGIGPTLGAYILSEIGDISRFSSAAKLAAYAGIDPTMRQSGEYNGVRNRMSKRGSPYLRHAIWLAASSAVLHDPALKLYFQKKRDEGKPYMASVGHACRKMVSIIYAVMRDNKAYTSYIPNEISA

SEQ ID NO: 237867 - protein, 337 aa, unidentified
MIVVGVDVHKQSLTAVAVDEVGRPLAELTAGSGEELVAWSTSLAAERLWALEDCRQLSRRLERTLVNAGEQLVRVPPKLMAPQRRAGRVRGKSDPIDALAVARAALQEPRLDHPRPGEQRLRELKLLVDHREDLVDERRRAQQRLRWHLHELDPQLTVPPGALDRAVWLDRLARRLARQEQTILIRIARELVGRCRSLTRTILALERELEQRTSETAPALLALPGCGALSAAKLLGEIGPIERFDTDAQLARHAGVAPLEASSGTHRRHRLDRGGNRQLNCALHRIAITQARIHPPARAYLGRKQAEGKSRREALRCLKRQLARPVYTTLKSEPLLT

SEQ ID NO: 237868 - protein, 343 aa, unidentified
MQTTTANTLYAGADLHGNNIFLSLCDETGNNVFRRRVKANLEAVNAALNPYWDRIKVLGVESTFNWYWLVDGLRAQGRNIKLGNPAKMEQYNGIKVTNDLTDADWLAEQLRLKIFPECYIYPEKMRTVRDALRGRQLFVRRRTQVLLSFQGLIERYGMKAPSAYKAAKWKSSDVHDLGLEPFVVLKLDALLSSIHHSDMLAKKIEKEVLKTVKPTEEYEWIQQVPGIGIVLGMFIMLESGDFKRFASAGRFASYCRTVKSSRSSNEKTKGKNNSKNGNKYLAWAFIEAATYAAMHYPEIKSWYERKKRRRNISVAKKALACKLAKSVWHVMNGKDFDMKLMFG

SEQ ID NO: 237869 - protein, 468 aa, unidentified
MSKLSQPNPSLTEARPFASMSQVNPRAAGVDIGAQEIMVCVPGDENSQLVRSFGTYTADLHAIAAWLKEHHIESVAMESTGVYWIPLFETLEAAGFRCHLISARALRRIPGRKSDVLDCQWIQTLHSYGLLESSFRPEADLVALRTLLRHRAQLLEHRAPHILHMQKALLQMNIQLPQVLSDVTGQTGLTIIRAIVDGERDPHKLAALRNYRCKKDEEEIAKALTGTWREEHLFVLKQSLEMYDFYTRQIEACDAEIERTYAAIRPDWPDPHPDDQQPLPPNKRGSNSKNLPKDSLVHVRQHLRRITGIDLTAVDGLSLDLAQKIISEIGSDMSRFPTEKNFCSWLKLAPDNQITGGKIIRSSTGKSHNRARQAFLQAAASVARSNCAFGAFYRRLKARVGPAQAQVATAHKIAHVVYHMLKYKVEYQQMSAQEYEQQFRERQIRHLHRKAARLGFSLTPIAAAAPVS

SEQ ID NO: 237870 - protein, 342 aa, unidentified
MQIAVLGIDLGKNSCSVVGLDAGGRVVLRRRLNRNGVAKLVVGLPHCVMAMEACCGAHHLGRRLSDQGHQVRLMSPEYVRPYVKAQKNDDRDAEAIAEAATRPTMRFVELKSEEQLDMQSLHRARDRLVGERTALINQLRAFLLERGITVPQGRRKPELSLETLLAADQALISPRTRLLIEDLRAEWHELDRRIQAFDEEFAHQARTDETTRLLSTIPGIGPLNATALAAAIGRAETFGRGRDLAAWLGLVPKQMTTGGKPKLLGISKRGNVYLRKMLIHGARAVLPTLSKSETRLGEQLRGLLAQAHVNTLIVALAAKLARIVCAVLRSGQQFEIKAAAMS

SEQ ID NO: 237871 - protein, 388 aa, unidentified
MTQAPGARPTPAVLDYERTLILAIELSNTSWVLAAQIPGLPGVKAKRSIEPTPEALMAAIASYRARAETAGRNVDRVVTVYEAGWSGFWLVRWLAKYGIETHVIQPSSVPVDRRARRAKSDGIDAELLLRTLLAWLRGEPRVCSMVPMPTEADEDARRRVRERAELVTERFGLVNRIRAILATLGAGEYNPLRRNRRQRLDELRTALGDSLPTHAHAKIARMLDRLELLLIQITELEQSRDAVLEDKAPDRAASMIQQLAKLRGVGVQTATVLVREGFVREFANGKALGSYAGLTATPYSSGGIEREQGIGKAGNARLRTVMVELAWLWQRYQPDSAQVSWFRERIRGTGRRMRKVMVVALARKLLIALWRFATLGVVPEGAVMKPAS

SEQ ID NO: 237872 - protein, 345 aa, unidentified
MKHFAGLDVSLEETAICVVDEEGRIVTEARVASEPEALVAFFRGLGLALERIGLEACSLSAWLYEGLAAAGLPAVCIETRRAKAAMGAMPNKTDRNDARGIAQIVRTGWYRAVHVKSPACRSWRALLAARRLVLNKLRDLENGVRALLREAGLKLGTPGRKRFAARVRELAAEDAVLVGLAEPLLAIIATMTHELAQLTRRVLAIVRAEPVCRRLMGVPGVGPLTALTFRATVDRPDRFRHSRDVGAHLGLTPKRYQSGETDVQGGISRCGDELARTALYEAAHSLLVRSRKWSVLRAWGLRVARRRGMARARVAVARKLAVVLHRVWADGAEFRWGKPNAAPAV

SEQ ID NO: 237873 - protein, 359 aa, unidentified
MAVIEGRERRIVGGVDTHKDLHVAAVVDEQDRVIGTRSFATTRQGYRQMLAWMRSFGDLQRIGVESTGSYGAGLLRFMQQAGIAVLEVTTPDKQDRRRRGKNDDLDAQNAAHAAFAGQRTVTPRSRDGMIESLRVLMACRKTAVSARRVALQLIQNTIVCAPDGLRDQLRSMTRMQLVRTLAAWRPDLTAYRDVDAAYRIAFKSLARRYLELHDEIADLDAMIAAIVDELAPNLVARNSIGHTGAAQLLLTAGDNPERLRSEASFASLCGVSPVPASSGKTVRHRLNRGGDRAANSALHIIAIGRLRTDQRTKDYVARRIAEGHSKLDAIRALKRYLAREVFTLVTQRRREINATRIAA

SEQ ID NO: 237874 - protein, 429 aa, unidentified
MTRISVGVDVSKNRSTVCIMDQDGKVIMRPFLVWHSTEELDFLADTLKRLNGEVRVIMESTSIYQYPIALHLKEKGIFISIVNAYKVKKFANTDFRGGKTDKKDSRTIASYGISYWDKLVEWQIPKDTYFNLDLLNRTYMNAKKHRQIILQELQHYIDCAMPGMDKELHSLNLNTKKDFMLDFVEKFWHRDKIVNMTEAEFTEVFTAWAKEKGYRPGKGKAAKIYAIAKSCIPYYPANPTVKTILQCIVDKLSGVNRTLVTIVTQMIEEAKKLPEYQIVREMPGVGDPLAARFFGSAGDIRRFKNSKALVAYAGIDSPPDESGDFSSTHRHITKKGSKVFRDTGYEIMMALRAQKRTWEKVRKNPDVYDYMLRKEAEGKPPKVAKIAALNKFLRIIYARIKELYDNMALAERAKTKTRSKTRAKTKVTA

SEQ ID NO: 237875 - protein, 354 aa, unidentified
MRIVCALDVHRGQITYLTLDVGSGEVSRGRISPATRQSVRAWLAQFDGVDDLHFALEGTVGWRFVVEEIERAGHRAHLADPAETAARRGRKRRAKTDRTDCELQLRLLLAAELPESWIAPAQILELRTRVRLRKTLIDERTAWQQRLQAQLFHQGAPAGLKPRTRAGRDALASVELSPAGGELVGLALRMIEAIDRELVPLDRTLALYGRRQPGCRALIGRLYGVGPVTATAIVAELGDARRFGRSDDAVRHCGLDVTVHQSDRKRAPGHLSHEGPELLRWALFEAALQACRPASPDYEYYRQVARRIDHNRACLSVARKLCRRAYHILRELDDEALAPIEPAPIVEEVVAAAA

SEQ ID NO: 237876 - protein, 313 aa, unidentified
MQSEVNVGVDTGKQRLDIYIRPLDIYFSVNNDKEGIKEAIQTLKKHHPNRIVIEATGRLEHEFIFACAKANLPFVVSNPVHIKRFAGAIGQLAKTDKLDAKLIAHYGEALKPALSQLKPETMRLMSDLLARRRQLISMQTMEKNRIQIMPKELASSIKPILTAFKNQLQKVDAKLLKLIDNNDEYRTKNEIIQSMPGVGNVVAISLLSNMPELGLLSNKQAAALVGVAPINRESGSYQGKRYIRGGRAQIRTAMFMAMMSAMQCNPVFKQHYQKLLKAGKPKKVAIIACVRKMVVILNSMVRDGTYWKNNMPA

SEQ ID NO: 237877 - protein, 494 aa, unidentified
MVLTPFERITEPDSHARPVFSIELSEFVMAKKQRPKKPNRRSSRGGFPIDNAPLPKSLGQVNLNAAGIDIGSTQHYVAVPDDRDDARVRCFGTFTSDLESLADWLHQCRIETVAMESTGVYWIPVFELLESRGFEVKLVEPGKLKSVPGRKTDVLDCQWIQQLHTYGLLAGSFRPNEDICILRSYMRQRAMLVSNASEHIQRMQKAMMEMNVQLHHVISDITGATGLAILDAILAGQRDPDKLARLRDPRCKNDESTIAKALQGNWRDEHLFALKQSLDLYRFYGSKIAELDVKLEGHLGTFEDQSDGKRLPKLKAPKAGSNSPRFDMRNHLYRMLGVDLTGIDGISGQTAMLLISEIGTDMSKWLTEKHFTSWLCLSPGSKKTGGKLLSGKTRTSANRAASALRTAAASLARSNCALGAFLRRIRARLGSPKAITATAHKLAKIVYGMLKYGKEYVDVGKDYYEQQYEERARRNLEKRAAALNLQLIPKTANG

SEQ ID NO: 237878 - protein, 346 aa, unidentified
MTIVERTRLVTGGVDTHLDVHVAAALDEIGGVLGVESFEATPAGNDKLLSWLASFGTVCRVGVEGTGSYGAGLARFLRSAEVDVVEVDRPNRQTRRRTGKSDPADAVEAARAALSGRSQGAGKTRDGNVEAIRALVVAKRSCRSTKIRTLNQIRHLGFTASDDLRERFRGVSRFHLGATAAALRPRATSDTVTYATKTALSILGRRVLALDEEKERLDALLAELVTATAPQLLELHGVGIDTAAALLVAAGDNPGRLRSEAAWAHLCGAAPVPASSGKVTRYRLNRGGDRQANAALYVIVITRMNSDPRTRAYVERRLAEGKAKSEIIRILKRYVAREVYRHLPRN

SEQ ID NO: 237879 - protein, 407 aa, unidentified
MKVYIGIDWSQNKHDLCFLNEAGAHLAQLIIPHTPAGFWKIDETRKKLGVPIDACQIGLETAHNILLDFLWDQGYSQVFVLHPKMVKGSRGRFRSSAARDDTSDALLIADILRTDQGYLRAWQPDTSLTRQIRSRIKFTQFLTTEIVRLTNRQRAVLLRFYPVVLDLFSSLNTLITQHFIREYPAPQAAARLSRDEFENFLKRHRYPKKGLSPRILAQLQQPYPKAAAGVIEACYPEAQSLARMLLEMISAKKKMLKELGQLFTQHPDHEVYASLPGTGTFLQPALLSKFGDDRARFPTADCVQALAGTSPVTISSGKRRRVQFRHSCDHEFRHIAQQWAKSSLRASIWANAYYTSIRPHCESESHAFRCLANRWLAILWRLWQDGQPYDETYHLRQRTLRSQPRII

SEQ ID NO: 237880 - protein, 372 aa, unidentified
MKKIRFLGLDVHAETIAIAVAEPDGEVRSLGIIPNREESVRKLVKKLGPAEQLQACYEAGPTGYVLYWQLTALGVKCEVVAPSLVPVKAGDRVKTDRRDATKLARSYRAGDLTAVWVPNQEHEALRDLVRAREAAKQDQLRARHRLSKFLLRHGRRAPAGIKVWTQKHQHWIKEQVQFEQPAQEYTLLDYLHEVEHTADRIRRLEQAIEEAVKLAPPRMQGVIQALQALRGVAQISAVTIVAELGEISRFDGARQLMGYSGAVPSEHSSGKRIQRGPITKTGNTHLRRIAMEAAWAYRHRPTVGPALRKRQEGLSEEVKGIAWKAQHRLHKRYRNLVAAGKEKQKVITAVGRELLGFIWAIGVQVERNSRVA

SEQ ID NO: 237881 - protein, 352 aa, unidentified
MVMTIGIDVHKNTHCAVVVDEAGRQLGSSVTVRATDAGHRQLLRWATRTFSDDQVEFAVEDCRHVSARLERALLGAAAVVIRVPPKLMAQTRSSARTRGKSDPIDALAIARAALREPTLPRAEHTHASRELKLLVDHREDLVQARTKAQNRLRWHLHELDPEFDVPARSLDLRRHQDRIQARLEELPHSLVRRLALEILTDIRELAGRINALEKEITGLVTQQAPQLLALPGCGPLTAAKLVGETANPARFRSEACFAMHSGTAPIPASSGKTDRHRLARGGNRQLNAALHRIAITQTRLDGLGRAYYQRRRAQGDTTLEALRALKRRLARIVFNLLRPTDQTAAATLPQAA

SEQ ID NO: 237882 - protein, 410 aa, unidentified
MTKEDFIYVGIDLHKEIHTAVMIDCYNNKLGEITFPNRPADFPKLVTKVKKCNTDAKEVVYGLENAYGYGRALAVWLIDKGYFVKDVNTAISHRQAKHRGAMYRKSDSDDAEAIALATLNMLDKLPDACPNDAYWSLGQLVHRRDNIMKQRTRLVNQLHEQLHISYPSYKSFFNDISRPTALYFWENYPSRKYLKGKSVEDLREELVPVSHNKCSTKTCQAILDAVAGDKVKNIDYQDARDMVTLSIVSDLQHYDSQLTEVDKMLEQMYKMLGCTLTTIPGVNVITAVKILAEIGDIKRFSNANKLAQFAGIAPLHLSSSGKGKDVATKQGNRRLQATIYFLAIQMVQVSSKGTPRNSVVRAYYEKRKAEGKTSQQALICISRRLISIIYGMLKHGTEYRMPVVESAGEK

SEQ ID NO: 237883 - protein, 340 aa, unidentified
MNATTYGLDVAKRVFQLYWVDAQTGEIANRRFGRDDLIAFLAQRPAGRVALEACGSAHWWARKIQALGHEVVLLHAQFIRPFVQTNKTDAADAKAIWTAVQQPGMRTVAAKTEDQQAMLSLHRMRSQLIKFRTMQLNQLRGFLYEFGVTFRTGRAAGLAEVRQRMAELEDALPASIMLNLQDQLRRINAFEDDIDQLEKRIGAWQKQEVACRAISDVPGIGRLTATALVATIGDARTFRSGREFAAFLGLVPRQSGTGGKIRLGSISKRGDPYLRTLLIHGARSVLCHTKVPTAWQKGIQERRPANVAAVALANKIARTAWAILAHDSSYEANHVSVRPA

SEQ ID NO: 237884 - protein, 398 aa, unidentified
MFYIGIDIGKRHHEAGLINDKGDHVGKTIRFANSKDGSEKLLQFINQYKLTPDNSVVGLEATGHYWLSTFSFLHKLGFKSTVFNPLQSDALRHFYIRKTKTDVSDAYLIAQVIRIDSPDETPFLEEDLLQLRHLERLRFSFVDQCSDLKRKVISLLDQVFPEYEKIFSDVFGMSSTEVLLHSPLPEDLLNIDTKKLADLLNQVSKGRYGESRALTKANKIQESALNSFGVTVGSDVFKLQIKLLLEQIKLIEDHLKTIEQTMIEISNRQTHFLTTITGISDVTACVILGEIGSISRFERPEQLVAFAGLDASVHQSGDFNSNRTRLSKRGSPYLRRALWQAAFVASNHDPALSLHYQKLRQRGKAHGTAVGAVARKLTHIIFAILRDNKAYKPRPTLE

SEQ ID NO: 237885 - protein, 347 aa, unidentified
MLIIGCDFHPGFQQVAIFDNRMGEIEEKRLQHRAEGEQFYRSLAGQEVRVGMEACGHYPWFERLLAELGFELWFGDAAQVRAGVVRKQKTDRRDAEHLLQLLMENRFPQIWVPSLEVRDVRQLLVHRHKQVQARTRTKNQLQAMALSHGVQKEYKLWTKAGRIELEQVPLLPYAAERRQKLLATLDQLEVEISELDRRIAEEARQRPEVVLLMTHPGVGPVTGLAMVLTLGPAERFESAKQVGSYFGLIPSEDSSGGKQRLGKISKQGSSFLRFLLVEAGQTAARYDPQLKRFYKRLATRKNRGVAKVAVARKLATRMYLMLREGWTYAQLSAAVMSVSPSHSVDGQ

SEQ ID NO: 237886 - protein, 340 aa, unidentified
MEIKTLGIDLAKTLFQVHGVDEKGRTVFQRQVRRRQLMPLVAQMQPCLVAMEACTGANYWAREFAKHGHEVRLMSPRFVRPYVKSNKNDARDAEAICEAVRRPSMRFVAVKSQAQQDMLALHRVRSLLVRERTALMNQMRGLLAEYGIVIAQGALRFRRALALITGDRDSGTSELLRELLTEMSERLRLFDERLKRYDQRIAEFARADERAARLMAVEGVGPLTATALIAAVGNARQFRSGRELSAWLGLVPRQHSSGGRSILLGISKRGDRYLRTLLIHGARATLRFAARKRDPRNRWISAVRERRGTNIAAVALASKNARVLWALLARNQSYRVPAAA

SEQ ID NO: 237887 - protein, 437 aa, unidentified
MSKRLQVGFDIHQKHNHVCLMTKDGQMVAPHQRFDNNWPGHHEFVDMLVSVLEEGQFEGVDIAGESSGLLWFYPLYYLAQAEELTLFDPHIYLFNPRTVKHFKKVLAERDKVDPKDAYAVVERLRFGGRMPHELTFDERYLPLQRLTRYRYHLSHTLAREKTYARMVPIYLKASDYTRKPKPFSDLFGATSRHILSEYATTDELAAMPLDDLADELDRIGRRRFSDATDNARRLKHAAAQSYPLLSCLVEPINVILDSLLAHIRFLEEELKKLDSLIETTLIDVPGAPYLRSVKGLGLVYTAGLLAEIQDTDRFIRGYKRDKEGNLRPKTKHDAQASLARFFGLWWPRGDSGEFQAEDRRLPKTGNPYGRYYFVEGANSLRRHNAEYTAYYQRKYDQSLKHKHWRATILTARKLVRLVFALLHDEEMYRPPEVRSSS

SEQ ID NO: 237888 - protein, 412 aa, unidentified
MNIVYERCVGIDVHKRNVVVCAITPDAQGQRQKEQRTFSTMMPDLLRMRQWFQSLNVTHVAMESTGSFWKPIFNVLEGHMEVLVVNAQHLKAVPGRKTDLKDAEWIADLLQHGLLRPSFVPPAFQRELRELTRYRTSVIEERSRTINRLQKILEDTNIKLSAVASDLMGQSAREMLAALVAGEADPTVLAQLARGKMRAKHDLLVQALQGQFKPHHRVLISEQLAHIDTLDEEIERLSAEIAQRLRPYEAQLKRLETIPGIKRRLAEVILAEIGPDMQRFPSARHLASWAGMCPGNRESAGKRLSGKTRKGSPWLRTALVEAAHAATHCKESYLSAQYHRLVLRRGGKKATIAVGHTLLVIVYHVLADAKDYQELGGNFFDEHDRQAVQKRLVHRLEKLGYEVTLVPTSPAA

SEQ ID NO: 237889 - protein, 430 aa, unidentified
MEIVYPRSCGVDVHKSFIVAVICISESVKPKYIKKRFSTFNNQLIQFRDWLIENNCQNVCMESTGKYYIPVYNALEGHISNVVVANPKWVKAIKGEKDDNKDAKWIADLFKFGIVRSSYIPEKDIRILREFTRYQYKLVNMRSSEKNRFQNALTTGNCKLDIVFSDIFGKSASAIVDTILSNNPYTSEDILSKVHARCKASHEDILSAVDGIQLNQFQKARIQIVQKHMEYLDSLLDEIQHHIDLMVANYEEYIQILCTIPGINRKSAITIISEIGTDMSQWSSHRKLAAWAGLAPGCNESAGKKKSVKISKAGVYLKPCLVQVAHAAVTDKNCDYYADKFNKISKRRGKKRAIIAIARKILIAVYHLLKTGEVFNPTDMADVETTKKQRIEYVKNNLRNAFNQLSRTGLSEAEILQLIRKESPNSPQIE

SEQ ID NO: 237890 - protein, 438 aa, unidentified
MSNKVIFNLDELFISVGIDVGADFSWMSIALPNQQFVGKPYKILHNSIDSLTTAVSKIKEAEELYSLESRIFLESTGIYHYPLFCYLRDKGFNCSVINPIITKNSTNINIRKVHNDRFDSKKAALVGLKPDLKVSLMPSDLALNCRNLCREYYDLMDNRSAYVNKLQGELRMAFPQYLGIFSKVTINTSLTLLETYTSPSAFLEADKQEIIDIIKSTARFGLTYAQNKYNAIIQAATDANQFGYIIDSNIKRIRLYISFIRKYDEEINSILESLHELVDANEDSDFVKQIHLIETFKGAGFLSAVSIMGEIGDFSAFSKPKQLFAYFGLDPSVKQSGKFEGTKVQMSKRGSAIARRVIHTLTLQSISISRNREAKNPVLREYYLKKCDSKPKLVAMGAVSHKVCNMIFAILRDNKPFKIIAPQEHIKQYNSAKCDIAA

SEQ ID NO: 237891 - protein, 457 aa, unidentified
MKSFYLGSDVSKGYADFVILDSTKQQVMKNFQLDDTFEGYCRLHDILSQFLMVYPDATLFAAVESTGGYENNWYNALVKFQSTLNIQTARLNPLGVMHNSKADLKRNITDKISAQNIAEYLITHSEKVTYQQQDQMATLRKQWGFIKMLTKQSTQLLNQLESLLYTANTELLGYCKNGTPDWVLKVLLKYPTAAKLARARVPALARIPYVTSERAQELVISAKRSVASASDRITEKLVAATVKQILNLKKTIDEQAELMVKECSIPEVDILKTFTGISDSSAIGLIIEIQAIERFKTVKRLSSFFGIHPVYKISGDGSGSFRMSKKGRKEPRKILFMVTLTAIRSNPLIRNIYLERTDKGMEKMAAIGLCMHKILRILYGMLKHGKPFDPQIDLDNRQRSVKKKPAGQRDKSRRFQDYDSNAPISRRQNKKRLERKQSHSVSDTKFGINAPVPELVS

SEQ ID NO: 237892 - protein, 329 aa, unidentified
MKVLQIIGADLSKKTIDFATPEAAHLKVSNDPPGYQQFMGWVKKQKINSSQMMIVMEHTGLYSYRLEQFLHKHRLSFTKVPAYAIKHSMGMVRGKNDKVDAIRIARYGAEKRDSLVAETPVNKALERLQMLHSTRDHLVRNRAGIIRSVKEFRDSCGLKKDDIVIRTQRNVIKTLDREIAKLDDAIAGILQSEQTLKQNDQLLQSITAVGKVVSVATIIKTRNFTKFNDARKFASYCGTAPFENSSGSSIRGKTKVSKLRDRDMNRLLDLAAKSAIQYDKELREYYLRRTAAGKSKMSTINIVRNKILYRMFAVIKRQTPFIKDYLQTA

SEQ ID NO: 237893 - protein, 372 aa, unidentified
MKADEKRGRRKGCDMNSIVAGIDLGDRESLATVLSPVGDVTDRFSFSMNEEGYAFFSSRVPKDARVAFESTIMAYPIMRALKMHGYGDVTVAHPKTLAWIVRSKKKNDRVDSLKIAKLHMAGMLPESHLLDRDEQIARDLLVQRVKLGVEIGRLKSSVIGYLKREGLHDVLPKTKDNFSAARRQAIDSLRFHDERDLVLKTMMDRLRFLEDQCIPLESCIKENAKENDDVKLLMSVPGVDYYLASLLCSFIGDVNRFPSDDHLASFFGIVPASRDSADVKRRGRMTKDGSSIARWTLSIMVDTVMHYNKPIRGHYLSVKKRTGSGKLAHVSTMRKLTRMLYHMLKTKQRWKWENPHLTERKMTRLQGGGDES

SEQ ID NO: 237894 - protein, 355 aa, unidentified
MSSEKYIGLDVHQATISVAVMDSQGKVVMESILETKASTMLEFLAGLRGSLFVTFEEGTGVAWLYDLLKPHVTEVLVCNPRKIPLLKQGNKSDKIDARKLAERLRLHDLKPVYHGETGVRMLRELARSYLTVVKDLSRVMNRLKALYRSWAIPCAGRDVYYTRHRSQWLGKIPETGTRRRAELLYQQLDMLQHLRQQARRELLAEGRKHTITAKLRQIPALGPIRSVLAVALIQTPHRFRSKRQLWTYSGLGLETRDSGEYHYVRGQVRRRKKQATIRGLNKDYNHDLKGLFKGAATRASVQPGPFQEFYQRSLAKGIKPTMVRLTLARKIAAITLTLWKKGEDFDVNKLNSQVA

SEQ ID NO: 237895 - protein, 328 aa, unidentified
MVAKMSDSILGIDVSKETLDAYCARGQRKQGRTFANSPDGWKLVRAWLKAMGSKQAHVCMEATGRHSLGVALALHDAGHVVSVVNPAQIRDFARTKLGRNKTDKVDAALIREYTELFKPEPWTPPSPAMRRLCELQTVRAGIIRSRAEWKNRIGSGLGDTTATKLAAATIEHFTTQLEAIDRAISETIDQDAELHARCDLLVSVIGVGDTLAALLMAKMPEPGVLHRSGEIVAYAGLNPSHHRSGTSIDRPTRISKIGNAELRSALYMPALSAMRFNPAVAILVARLKSAGRLKPKQIVVAAMRKLLVLCFGVLKTGKRFDLAIAMPA

SEQ ID NO: 237896 - protein, 415 aa, unidentified
MALKIVYKICCGIDVHKTFVVACVASTSDKGITSYESHRFSTYTSGLKTLLQWLIDRNCKDVCMESTSKYWIPVYNILEKGCSIVLAHPKYVKAIRGKKTDKKDAKWIADLFKHDLVAGSFMPPSDIRQLRDLMRYRFKLTCFKSSEKNRLQNCLTVSNIQLGNVVSDTFGKSAQAILDKLLENPADTSFDLEPLVYKSLKKKLPELRDAIDGFITPEQAGKLKIIKDHYDNLESRKAELEELILALAAPYQQELTILQTAPGISSNFTAIGIISEIGTNMEAFPSAKHLCSWAGLTPTNNESAGKKKSVRVSKAGCYIKPLLVQCANAVVKSTKHPEMRNRYLRLKKRRGHKKAIITIARMLLTALYHMLKNGENYNPELYQKTDLPPVDREIIIEQALMLIRNQGYKIKSATT

SEQ ID NO: 237897 - protein, 407 aa, unidentified
MEVVYRCCCGIDVHKRMIAACLNKGGKRELREFGTTTGEIRGLANWLTEAGCEMVAMESTGVFWKPLYNLFELMGLDAIVVNASHMKALPGRKTDVKDAEWIADLLRHGLLKASYIPDREQRELREVARYRKSLIEERAREINRLQKVLEGANIKLDSVVTNINGKSARKLLERIVADKTPDADEVARIIHSRMLPKLEQIMQSIEGITTPLQRKMIAQIVDHIDDMTRRIAKMDDLIKGYMEQYEAAIAAIDALPGIARRSAEVIISEIGIDMNRFPSAAHLCSWAGVCPGNHQSAGKRSNGKTTKGNKTLKSILTQCAHAAKNCKGSYFSAQYQRIAARRGKNRATMAVAHSMLIAIYHVLKNGVAFNDLGSDYYDNFNRDHKIKGYLKRLHALGWTPDAEAAHA

SEQ ID NO: 237898 - protein, 343 aa, unidentified
MQVITTIGLDIAKSVFQVHCVDAEGHVVLRRQLKRRYVLVFFQKLPPCLVGIEACASSHHWSRELQAIGHTVRLMPPAYVKPYVKRQKNDATDAEAICEAVTRPNMRFVATKTPEQQSCLTIHRTRHLLIRQQTSVINAIRAHLAEFGIVAPVGRNGVDQLLGIVADLADKRLPEVARVCVAALGAQLRMLKAQILEFDRMIRAWHRSSEASRRLDVIPGVGPALATALVASVADPRAFRSGRDFSAWIGLVPKQNSSGGKDRLGNISKRGDRYLRSLFTTGALAVIRYAKIHGTRHRPWLTALLARRPTKVAAIALANKLARMVWAMMARGERYKEPAALAA

SEQ ID NO: 237899 - protein, 383 aa, unidentified
MYYIGIDVSTKESALCILDGKGKIVRETKLPTDPEIIARFIAATGVTIERIGLESGCTAAWLFAGLQRHGWPVICIDARHAAAALQAGFRNKNDRNDARGIADLMRVNKYRPVWVKSPKAQQQGRLLTARATLQSQLVGLENTIRGLLRQEGIGLTDRRTAFEAAVREAIGEDCLLQAALHPLLETRNAVLRHRAALDREILRIVRADPVCRLLMTAPGVGALVSLAFKVAVDDPRRFSRSRDVGAHFGLTPREYSSGEVSYHGRISKMGDREVRRLLYIATSRILRRDAALWCPLKVWAVRLAQRVGIRRARVALARKLALAKVLRACAFRPKAVPPFHQQRIARTLVQSLYLKMCLRCYHFSVNTVSGRLVKPSTRLKSGS

SEQ ID NO: 237900 - protein, 349 aa, unidentified
MNNIITIGMDLGDKFHMAVVFDSDGNELETTKVTNTKIGVSKFFKPYRSAQVAIEASTHSPWISRLLNEMGLTVYVGNPRKLRCIWDSIDKSDAKDARMLGMVCRLEPRLLHPIHHRSSQAQADLTTIKSRDMLVKSRTQLINHVRGIVKANGDRLPKCSATSFANRCGAHISKKLWSAMAPLFKIITQLNNQIKELEKEIEQLSIKKYPETKYLRQVPGVGPITALSYVLYIEDPARFTKSRQVGPFLGLTPRRDQSGDVDKQLSITKAGNKYLRHLLVGCAQYIMGPFAPESSLRLHGLAIAARGGKNAKKRAAVAVARKLAVLLHRLWITEKEYQPFYSIHNKQAA

SEQ ID NO: 237901 - protein, 346 aa, unidentified
MTIVDSSRPNVGGVDTHLDNHVAAVLDANGGVLGVESFPATTAGFAELRDWLCAFGPIERVGVEGTGAYGAGLSRYLQSCGLVVIEVDRTNRQVRRMFGKSDPVDAIEAARAALSGRASGIAKTTDGNVEAIRALLVAQRSGRQARARCLNQIRHLGFTAPDQLREQFRDVPKAHLADRAAALRPRVDGDPVLHATKLAMRTLGRRALAISADMHDLDQGLAELVASTAPALLACHGVGVDTAAILLVAAGDNPERIRNEAAWAHMCGVAPLPMSSGKHRRHRLSRAGNRQANHALWRIVFTRMGSDARTRVYVERRTDEGLSKPEIMRVLKRYVARETYQLLPRS

SEQ ID NO: 237902 - protein, 455 aa, unidentified
MKLGMDVVNFNASGIDVGSRSHYVAIGQELEDVREFGVYAEDLTALCKWLLDASVTTVAMESTGDYWQNLYVELISFGFEVVLANGKFTKNAKGKKTDVKDCRWIQKLHTLGLLSGSFLPDLTTEQLRTFCRQRGNWIDLAASATHKMQKYLKLLNFRLDVVVKDVCGLTGMKIIEDICKGNLNPQSLAEHRHYNCRKPKEEIARALHGNNRPDYLFGLQQEFECYKFFQKKIADCDKKIQHFIKQELKEHPERGKMKTTEKPHKRINKNAPQIRDLNQVAFRYFDGVDLFAIEGLSHSTVLTLMSEIGPEGFHKFGSSKQFSSWLRLAPNNKISGGKILSNRVPKGSNRLKIALRQAANAIGNLKDTHLSDFFRRVAYRKGRHSAVSATARKLAVIIWNMVTKKITYQPPKQYLFLDQKRKLGLVNRIKKQIDKFELKPEDLGFENNPNTNNLI

SEQ ID NO: 237903 - protein, 370 aa, unidentified
MTSIIYVGMDVHTTNYTLCCYSITTDKIFATVTMEPDYRNILKYLKQTESNLGGDCHFLCGYEAGSLGYSLHNQLKEQGVDCVILAPSTMATTKKKGIKTDKRDASNIAKCLAYNTYSAVYVPTDEDNAVKEYIRMRNDAKDTLKRIKQQTLAFCTRHDKRFTEGRSNWTKKHFDWLKKQDFGNAVLQETLQEYLTLYHQAVDKIEMFDKRIAEFAHSERYEEKVKKLSCLIGIKTHTALATIVEIGDFTRFQTAQNYASYLGLVPGEDSSGDTVRRTGITKAGNSHLRKLMVEAAHCYSRGAIGAKSKALKERQFGNDPKVIAYADRANERLKRKCYRIMFNSKRNIAVTAVARELACFIWGMMTDNIA

SEQ ID NO: 237904 - protein, 411 aa, unidentified
MIKENYIYVGIDLHKETHTAVMIDCYNQKLGEITFPNRPADFPKLVAKVKKCNTDGKTIVFGLENAYGYGRALAVWLIDKGYLVKDVNTAISHRQAKHRGAMYRKSDSDDAEAIALATLNMLDKLPDAYPNDAYWSLGQLVHRRDNIMKQRTRLVNQLHEQLCITYPSYKQFFNDISRPTALYFWEHYPSRKYLKGKSVEDLRAELVPVSHNKCSTKTCEKILDAVASDKVKNNAYQDARDMVTLSIVSDLQHYDKQLAEVDKMLEQMYKMLGCTLTTIPGVNVITAVKILAEIGDIKRFSNANKLAQFAGIAPLHLSSSGKGKDVATKQGNRRLQATIYFLAIQMVQVSSKGTPRNSVVRAYYEKRKAEGKTSQQALICISRRLISIIYGMLKHGTEYRMPVVESAGENR

SEQ ID NO: 237905 - protein, 333 aa, unidentified
MSAVLGIDVDSKKLVTCIVVDKKKSNAVWRDFENKESDFPNILEYLKKNKISRVIMEATGGYEQKIFHFLWLKSFDVHVVKPNQGRDFAKAMNILAKNDKIDAFVLGRLGQVADLPTPIKANETQLKIKPLVMRRSQLKEIITQERNRLHIANESTKEDINGHIQFLNERVSELETRVENHIKSDPQLKKMQQVIIKTIGYAEVTAAVILGLLPEIGRLSNKAVAGLAGLAPMDDDSGNRKGKRFIKGGRWHLRKALYMPAYSSIRHDPVINAFHKRLIENGKPKKVATVAVMRKVLVRTNAIVRNYLKAEQEKYEDNARQDEIYFNKNKKSA

SEQ ID NO: 237906 - protein, 425 aa, unidentified
MRFAGLDVHKKEVEAVVVEETGAVLLRQRLATEGEKLEEFARRHLSDCRVALEATTNSWAIAGILAPLVKEVVVSNPLRTRAIAEAKIKTDRVDALVLAQLLRCDYLPRVWMPEAETRRMRQRSSERANLSADRTRVKNRIHAVLQQRLLQPPVQDLFSQRGRIWLERLALDAESAATLGRQLGMLALIEQQIAELDQELAEAAYQQPEMKLLLTLPGVDVTVAQTVLAALGDVSRFANPDKAAAYLGLVPSTRQSGHHCYHGRITKQGASHARWMLVQAAQQVARHPGPLGVFFRRLLKRKNRNVAVVATARKLVTIAWHMLKNNEPYRYAQPKTVQAKLSRLRVRATGKRRKGGFAKGQARPAHYGSGARTRALPSLDQIYAGEQLPALAAFSPGEEAMLAQHGVTAYAACIRKSHRVRRSSE

SEQ ID NO: 237907 - protein, 357 aa, unidentified
MNQEKYIGMDVHDASISVAVKNAQGRLLMECVLETKAATILEFIQGLRGTLALTFEEGTLAAWLHDLLKPHVSRLVVCDPRKNALMRDGNQNDRADACNLAELLRTNQVHAVYHEKHGIRTLKELGRSYLALTQDTTRVMNRIKSVYRSWAIPCAGTNVYSRRHRGEWLAKLVEPGVRMRAEHLYQELDSLEPLRQAARRELLRESRKHAAVKLLRQIPAIGPIRSALLVAILQTPHRFRTKRQLWAYSGFAVQTYDSGEYRFVRGKRQRNRERITVRGLNRNHNHDLKNLLKGAAVSAMERPGPLQDFYVALVEKGMRPSMARLTLARKIAAIILIMWKKGATATPLGWLYESETL

SEQ ID NO: 237908 - protein, 375 aa, unidentified
MKNKVRFLGLDVHAETIAVAIAEPDGEVRSLETIANRAESIRKLVKKLGSVEQLKACYEAGPTGYVLYWQLAELGVACEAIAPTLVPMKAGDRVKTDRRDAERLARSYRSGDLTAVWVPDEGSEALRDLVRAREAAKQDQLRARHRLSKFLLRMGQRPAAGMKAWTAPYMAWVRQVHFTQVAREATMLDYLHEVDHMGERVKRLEQSITEAVKPATPAVQEVVKGLQALRGIAEISAVTIMAELGSITRFDTPRQLMGYSGAVPSENSSGKRKQRGSITKTGNAHLRRIVVEAAWSYRYRPAIGPRLRKRQEGVSEPIKEIAWKAQVRLTKRYARLAAAGKDQRKIITAVGRELLGFIWAIGVKAETAVTQQMAA

SEQ ID NO: 237909 - protein, 332 aa, unidentified
MDNFYFIGVDVSKKKLDFCVLFEGKVLREEQVSNHQQAVARLIGELKNDLEMDNEQFLICAEHTGQYTFPLVCACKSVECKLWLENPSQIKYSSGMQRGKNDKVDAKRIAIYASRFGDKVKYYDRPSEEIERLKQLERERALYVTDLAKYKGQMYDQKDFMPAALYRKKTKRMKGLIQELQAAIDAITAEMEKIIGSTEVLARQMELLMSIDGVGKVVALNVIIETEAFTRFDDPRKFCCHAGVAPFSYTSGSSQHSKNKVSHRANKNIKKLLHMAAVSVTHRKEGELKAYYMRKVEEGKNKMSVINALRAKIVARMFAVIKRNEVYTPIYS

SEQ ID NO: 237910 - protein, 346 aa, unidentified
MAIAVLGIDLGKNSCSVAGLDGTGRVVLRRRLTRESVLRLAGTLPACVVAMEACCGAHHLGRILREQGHEVRLMSPEYVQPYVKAQKNDERDAEAIAEAATRPTMRFVELKSEAQLDAQILHRARSRLVGQRTALINQLRAVLLERGIVVAKGRRRLEEYLIGLLDEDGDRRATLSLRTCLLIEDMRLEWSELDQRIAALTAEFVARAREDQAARRLATIPGFGALNATALVAAIGTGETFRRARDLAAWLGLVPRQATTGGKPRLLGITKRGNTYLRTLLIHGARAALPSLSASQSPMGEWLRGLIGRAHKNKVIVALAGKLARIAWAVLRSGETYVKEGRPVAA

SEQ ID NO: 237911 - protein, 349 aa, unidentified
MSQNLNSAVAVIGIDIGKNSFHVVGLDNRGAIVLRQKWSRGQVEARLANMPPCLIGMEACVGAHHLSRKLKGLGHDARLMPAKYVRPYSKGQKNDFRDAEAIAEAVQRPTMKFVATKTADQLDLQALHRVRERLVSQRTGIINQIRAFLLERGVAIRQGLRFLRAELPRVLAKPSDVLSARMVHVIESLTEDWRRLDERIDQLSGDIAALARQDAGCERLMSVPGIGPIISSAMVAAIGAGEVFSQGRDFAAWLGLVPKQISTGDRTILGKISKRGNRYLRVLFVQAAWVVLIKPQSWDRHGLKAWLDAAKKRLHRNVLAIALANKLARIAWSVLALGRTFEASKLQAA

SEQ ID NO: 237912 - protein, 367 aa, unidentified
MTIVEAARGITGGIDTHGEVHVAAALDEVGGLLGTESFDATPEGYAALLGWLAGFGEVKKVGVEGTGSYGAGLARFLARAGVDVIEVDRHNRQARRRQGKSDPIDAVEAARAALSGRAQGKAKSRDGAVEAIRVLVVAKRSARQARVKALTQMRQLTITAPDQLQGKIKGLPTPQFIAATKGLRPTRSSDPVTAATKAALSSLAHRIGELDDEVVELDVRITSLLQAHAPGLLAVYGVGIDTAATLLVTAGDNPERLRSEAAWAHLCGVSPLQASSGKVARHRLNRGGDRQANRALWIIVISRFGCDHLNRPHRDHPIWPHLALSDGGVHPVSTGGLKPWTHDSEVEGGTVRGDPQGECRSGQPVDS

SEQ ID NO: 237913 - protein, 367 aa, unidentified
MQKVRFVGLDVHKESIAIAVADGDGSAPQDVAIIPNDTALVLKRLKKLGSGGTLKCCYEAGPTGFVLQRVLVAAGIECVVVAPSMVPRTASDRIKTDRRDALKLSRFLRSGDLTEVHVPDAATEAMRDLERCRDDAKRAERTARHQLSKFLLRHGRIYEGKTAWTGMHLDWVRSQGFEHEAHNRVLVDSVQAVESATARVEQLTKDIVELVESWSLRPLVMALQALRGVQVVTAVILAAELGDFARFASAPALMAYLGLVPSEHSSGETKKRGRITRTGNGHVRRILVESAWSYRYRPAMSRAIRQRNEGVAPAVQAIAWKAQHRLHGRYKKLLGRGKNKQQTVTALARELAGFVWSIARQPQLLAS

SEQ ID NO: 237914 - protein, 430 aa, unidentified
MEEVTDEPLYRDRVCGIDIGKAGMVATVRVPSEMNPARRMAETRAFATTKRGVLALADWLRCWQVPAVAMEATGDYWKGPFYRLEAEGFECVLADARQIKNLPGRPKRDSSDSAWIAVCFERGSITSCFVPTEEFRLIRLHTRYRRDLTGDRTRDKNRVEKLLESAAIKISAVLADVHGMTGRDIMQQLIAGQRDPKALAQLARRRARAKIPQLEQALEGADFFTEAHAGLLKAMLERIDRADEEIARLSQVIEQLLSPYEEQLQQAESMPGWARRAAQDVIAETGVDMSRFPTPGHLASWAGRTPLDHQSGARRGKARRKHGNRYIGAVTGETAVAAGRTDTREGARHRRLARKRGKGKACVATGNTQMRVFHVLLSNPGMRYTDLGPDWYADERQAARRLTRLVGALDAMGYEVTLCRKPEPQDSPAA

SEQ ID NO: 237915 - protein, 415 aa, unidentified
MERLYSCCCGLDVHKQTVVACLLRPAEGGQRRKEVRTFGTTTPALRSLADWLRAAGCTHVAMESSGVYWKPVYNILEGHCTVLLVNAQHIKNVAGRKTDVADSEWIADLLQHGLLRPSFVPDRAQRELRDLTRTRTTLIDERSAAVNRLQAVLEDANIKLAGVATDIMGVSGRDMLAALLGGESDPAVLAALARGKLRRKRAALEQALAGRMSDHHRRLVALHLEHIAFLDEAIAQLSADIAERVRPCEEAIVLLDSIPGVDRRTAEIILAEIGVDMSRFPSAGHLASWAGMCPGQHESAGKRKKAPARKGNRALRRALTEAARAAARTKQAGRTRLAGQYRRLVVRCGKKKAAVAVGHTILRLVYHVLTHNEPYQEPDLSYLDERRRAQAQHRALTQLRALGYEVTITPKEPAA

SEQ ID NO: 237916 - protein, 319 aa, unidentified
MFVGIDVAKVELVVSILPSAERFTVANDERGVRTLVERLRAVASTLIVLEATGGYELLGVAALAAAALPVVVVNPRQVRDFAKATGQLAKTDRIDADVLARFADVVRPAVRPLVDDAAQELDALLTRRRQLLEMLQAERNRTGQVFGKGKRLVKKSLKAHISYLERELRITDTDLGAMIKASPVWRERDELLQSVPGVGPVLSRTLLADLPELGQLSRRQIAKLVGVAPLSRDSGTLRGRRFVQGGRATVRAVLYMAALVATKRNAVIRAFYRRLVAAGKPKKLALVACMRKLLTILNAMVRTSQPWSTHGVSSMLASA

SEQ ID NO: 237917 - protein, 343 aa, unidentified
MKHYAGLDVSLEETSVCILDETGKICREIKVASHPEDLRRILQDPAWQFERIGLEAGLLSQWLFNGLAEAGLPVVCIETRHTKAFLKAQVNKSDRSDARGIAQMMRVNLFRPVHVKTLTSQKRRVLLTARKLLQEKAIAFENEIRGLLANFGLKVGVVGAAKFEERIYELLGDLPDLAEIMEPLLDARRRLREHFSTLHCKLLELARGDEVCRRLMSIPGVGPVVSLAFVATIDTPARFRTSKAVGPALGLTPVRSQSGQTERIGRISLCGDALMRTLLFEAAQVMLRRTTKWSWLKAWAMKVAHRRGSGKAIIALARRLAVIMHRMWRDGTEFRWTREVQAA

SEQ ID NO: 237918 - protein, 411 aa, unidentified
MFHHVAGLDVHHKTIVACVRSVQPQGGVVEEVRTFGTMTRDLLHLSDWLAVLGVTHVAMEATGVLWKPVWNILEDRFQLLLVNPRDLKQVPGRKSDVRDCQWLAQLLQCGLLRSSFVPPRPQRELRDLTRQRAQVTAEHTRAVNRIHKTLEDANIKLGAVASDIMGKSGRAMLHALLAGERDPHKLADLAEARLRGKIPQLEKALEGRLTDHHAFLLRQLLDHVEYLERQIDAFSARIEVCLRPFVDDALMQRLDAIPGVNRRTVENVIAEIGTDMRPFPDAEHLSSWAGLCPGHEESAGKRIRNRTTKGNRWLRRALCEAAWAASHTKESYLGAQYRRLAARRGKKKAVVAVGHTVLVIFYHLLRTAVAYQDLGADHFDKLKPEQYRRYLVKRLESLGYQVTLTPKQTAA

SEQ ID NO: 237919 - protein, 346 aa, unidentified
MKEIITIGLDLAKHIFQVHAADAEGSPVFSRKLRRAAVLSFFMKTPPCLVGLEACGGAHYWAREIAALGHEVRLIPPAYVKPYVKRGKTDAADAEAICEAVTRKTMRFVPVKSVDQQAAAMVLKTRELLVRQQTQAINALRAHLAELGIIAATGTAKVASLIEIVRDETDKPLPQAARFALSEIADQIEGLTRKIGKLEHAIVKEAKCDDDMRRLCTIPGVGAIIAASIKAMVPDPGGFTSGRHFAAWLGLTPKPHSSGGKERLGGISKMGNPMLRSLLVLGATSVLRHVKGNASAPPWLSALLARRPFKVVAVALANKMARVIWALLTKGGTYRTSGTTSEAAHA

SEQ ID NO: 237920 - protein, 356 aa, unidentified
MSNKILYVGMDVHQATISMAAMNAAGWIVSEAIIETKTEAVRDFIKTLRGEVHITFEEGTQAAWLYDLLSPLVEEVIVCNPRHNKLLHSGNKNDQVDARKLAELLRHGSLRAVYHGEHGTRTLKELVRCYECLVEDITRVKNRLKAIFRARAIASRGRALYQVSQRQAWLQQLEEPGARCRAESLYRQLDELKPLHREARRAMLAESRRHEANTLLQQIPELGPVRVAQIIATLDTPHRFRTKRPLWAYLGLAVVTHSSADYQVRAGRVHQKSRKVVQTRGLNRHYNHRLKAVFKSAAAGACDAGPYKQFYEGLLASGMRAEMARLTVARKLAATVLAVWKSGESFCAEKIMKLAT

SEQ ID NO: 237921 - protein, 320 aa, unidentified
MNCIGIDVSKQTLVTYDGKKERVFPNTTGLAELVSFVRRKGKGVAIVFEPTSTYSRRLETLCRQERIRCCYLNPRVIPHLREVAQERSKTDRSDAELLYQYGQEKAKAEARLLQRDPIAHALSAILSCYKAAQKARVTCQGVLEALRHDPDTPPELLTELKEQIVHLKAWEKKELNRAEGVVRADKEASSALGQLLSICGVGPVTAITLIGLFRRYPNTNRKQVVALVGLDPVERQSGSSVRGKPRISKRGSPEIRKLLYEVTLPAARYNPSIKAVYHRLKAKGKPEKVARIAAARKLLLMAHAIYKSRESYNAIKGETT

SEQ ID NO: 237922 - protein, 360 aa, unidentified
MIVQGTSVGLDVHALSVVAHAVDEETGKVARARLCPDHGEVLGWLHQLRAPVRVTYEAGPTGFGLARAITEAGMECLVAAPSKLQRPAGDRVKTDARDAAHLARLLRLGEITAVRVPEREIEAVRDLMRAREDARADLMRVRHRLSKLLLRQGIVYSGGTPWTCVHEQWLRRHRFDDIHLKAAFDHGFDAVLAATAARDRLDEQIMVVAASPRFADPVNRLGCLRGISALTGLALTVEIGDWSRFSGSSIGAYVGLVPCEYSSGNSRVQGSITKAGNTHVRRLLIESAWHHRKSYSTSGPTLRARWAKVDPALRARGHAGNRRLNKRWRSFTERGKNPLVANVAIARELAGWCWSLATMQ

SEQ ID NO: 237923 - protein, 406 aa, unidentified
MMTDTAGTRTRDRSDDEPWVVAGVDTHKDTHHVAVLNAATGAGLGDMRVPATPAGYDQLHDFVRSHGRIRMIGIEGTGSYGAGLARALRAAGAPIREVIRPKRSQRRRGKSDPIDAYAAAGRALAEADALPVAKTGTGPCEQIRVLLVERRSAMKARVAAHRQITALLTTAPDAVRTRFARLATDTPASATARALRRLARRHRILTDEIADIDTELRALTARAAPTMLATKGYGVITTATLLVTAGDNPGRIRTEASFAALCGAAPIPASSGKTNRHRLNRGGDRQANWALHQIALVRLSSDPRTKAYAARLTATGKNCKEILRCLKRAIAREAWHLLTHPQPAPRTDDLRRLRHERGLTLTQAAHHLNTHPARISELERGTRPDTTLTAAYRQWLNTQQPQTHTA

SEQ ID NO: 237924 - protein, 347 aa, unidentified
MTVYIGVDFHARKQTVSYLTTEDGEIQQMELEHEKDYVRTFYEQFRGQKVIVGFESSGYAAWFEELLEELEYETWIGHAAAIRKFARRRQKNDRRDADLILELMVRGDFPRLHRYSRASRETLQQLRYRQRLVKMRTMVINSLRFMVASRGVTLRGTLQSRPGQARLMQVALPGPLGQQRDELLRLLIDIQQKVETVEEWLKQKAEADPRVQRLRTHPGIGLLTGLGLVATLESIERFGHSRKVTAYVGLDPVEDSSGERRRMGSISKQGSRLLRLLLVEAGQVAARRDPELGNVYRRVTLRRGHATAKVAVARRLLVRAFIMLRDEIDYAEFCRRGVAARSSRGIA

SEQ ID NO: 237925 - protein, 346 aa, unidentified
MKKIFIGIDFSKEKFDATLIQAEGLKECAPSVHEVFYNKTSGYRRLVKWVKAHTEGFAADTWLFCGENTGGYSIGLSNYLYASGYDMWLECAYKIKHSAGIQRVKNDKADSRAIAEYAMRNYDKMILHKPQSASLTCLREIFLYRHSLVRQKVALQVRRDEKRLTQEKSDARAFMSFTSKHLITEVNKAIAKCDQKIKEIIASDDELREIFDIITSMPGIGVQNATCLMVYTDNFQRFDLNSRKIACYYGIAPFGRQSGTSVNSRPQVSPFANRMIKSLLSQAALAAIKFDMNVHIYYQRLIERGKHPLLVHNNIKNKMLHILVAMVRDRVKYNPDYVYRTNKEIV

SEQ ID NO: 237926 - protein, 339 aa, unidentified
MGRFVGVDLHRNSFLVCFFDAEKGEKKFRNYYLRCIRKFLMDLEEDDLVAVEATVNARFFKKEVEKKVGKVIVVDPYKFKVISESVKKTDKRDAELIAFYLSKGMLPEVRMKKEEIAEVESLAHTRDKLVKLRTALKNKVHNILRMYGIETNREFLSSEKGLEQALSYEIGDTAKVELKVCIDQIRSLTKSIEEIEETLVNKGKNMKGFKNITSIKGIGEKSGTILLSVIGDINDFKSRKQLDAYFGIVPRVNNSNETIRHGRITKRGSKLGRTTLVQCTLIAIKYSKYLAKFYNKLKAKKGSGKAIIATARKLLGIIYDTLKYELEFEDFPNFVFKTA

SEQ ID NO: 237927 - protein, 371 aa, unidentified
MKENSTTKFIGLDVHSKTISVAIADEGRKGEVRHYGTIENTFEAIDKVIKKIMVTGTELKFIYEAGPCGFALYRYLTGNGFKCIVTAPGLIPKRSGVRIKNDRRDALTLARLYRAGELTGIYVPEPEDEAVRDLTRARDDARVAERKAKQRLNSFLLRNNLIYPGKTKWNRTYFDWLGLVGMKYPAQKIALQEYIESVHECTGRVKRLSEQIGLAVEEWRMAPMVKALQALRGVSLICATVTIAELGDLSRFNKPKELMAYLGLVPSEHSSGESIRRGHITKTGNSHARRVLVEGAWTYKHHARVTRPLIKRQRDLPKNICQISWKAQLRLCARYRRMMVRKKPMQVVVIAIARELAAFMWAIAQEVKASA

SEQ ID NO: 237928 - protein, 343 aa, unidentified
MELYVGMDVSLEETSICVVDGAGEIVCEGTVLSEPEAIAAFIEAKAPHAKRIGLETGPTSTWLWHELRTLGLPVICIDARHAKAALSMQINKSDRNDAVGLARIMQTGWYKEVQVKRLSCHEVRAVLNARALLVKIKRDLENQIRGLLKNLGLRIGKAGGNVFSRRVEELVADQSLLQEAVRPLLAVRESTRREIADLHRKLLTLARDAEDIRRSMTVPGIGPITALTFHATIDEPARFRRSRSVGAYVGLTPRRYASGEIDWTGRISKCGDRMLRTYLFEAAGVLLTRVPQWCKLKAWGHRLWKRIGFKKAKVAVARKLAVILHRMWRDGTDFIWSTKEAAA

SEQ ID NO: 237929 - protein, 344 aa, unidentified
MSEEKRRELFCGVDLHSNNAVYYIVDKGGECVFHRRLENVLDIVLKMLEPFKDDLVSVAIESTYNWYWLGDGLIEQGYPVVLANPAAMHQFNGLKHTDDDSDAGFIATLDRMDILPTGWICPPGERVLRDMLRRRMLMVDSRTRQVLSLQSMLMRQTGSGLNRLGIETMETEELAALLKYDGLLLVAEAQLKLIAGHDEAIASLEKYVLGQCKPRAEYAILTSAPGIGKILAMVIMMEIGDISRFAGPGHLSSYVRAVKASRISNGKAKGTNNGRNGNKYLSWAFVEAVNHAIRHCAPARKWYQRKVAKTLPVVGRKALASKWSKAVWYMLTEKKPFQVELVFG

SEQ ID NO: 237930 - protein, 348 aa, unidentified
MLADLVEVVIGVDTHKDTHTAAVLDARTGGLLARATVSADPDGYAALAALAEQHSGLRAWAMEGTGGYGAGLARHLEQASELVIELDRPKRPARRAGAKSDPIDAERAARDALARTRLAQPKTGPERAALQMRLTARRAAVEAGGDAQRQLHAMVITAPEVVRARFRGQSTRAMIGTAARLRPAAGSADVAVITALTVLRDLARRVRYLQAEAAEHEAAIRAIVRSWRPDLLTLTGVGPIVAATVLTAWSHPGRCRDDAAFAMLGGAAPIPASSGKTVRHRLNRAGDRQLNRALHTIALSRLKHDQRTREYADRRRTQGMTDREIKRCLKRYIARELYRRLETPLATA

SEQ ID NO: 237931 - protein, 375 aa, unidentified
MSEITRALIARVGVDLAKQVIQVHAVDASGRRVVARAFKRDQFLAWCAQLPAGCLVGMEACSSAHHWARKLRALGLDARLIAANFVTPYRMEGKNGKNDATDAAAICEAASRPSMRFVPIKTCEQQGVMSLHRVREGLKEERTACINQIRGVLTEFGLAFAKSPKALRAVLADVIEDASNELSTMARLVMQRAFEHWRELDEHLRWCDRQVGQHVRASPAAKRAAKITGIGELGASALTAAVGDFKQFKSGHQFGAWLGVVPRQDSSGGKIRLGRITKRGDDYLRTLLIQGAKSAVMTADKRDDPTSRWLVQLTSRVGWQKACVAMANKNARILWAVMTREEGFDPNHLSVKPHAKKSARQPVAAAPSSPAVSMA

SEQ ID NO: 237932 - protein, 371 aa, unidentified
MKSILSVGMDVHKNSFSLCAYDGYTGEIVSESTFASDVKLVIKFIEALKSRYENDVEIKCGYEAGCLGYSLYKLLTARGVDCVILAPTTMQVSAKNKMVKNDRMDALNIAKNLASGSYKTVYIPDEEDVEIKEYIRMIHDFKKELQRVKQEICAFVLRHGYQYDGKSKWTIRYMNWIRELEMSEIQRETLNEYIAEMENLNDKIDRFMNRINEIYQSERYHEKVSKLRCFKGIETFAAMTIQVETADFERFPSAKAYASYTGLTTGEHSSGDKNNRIGITKQGNTVIRKTLVECAQALVKGNVYAKKSQRLKSRQKGMDVNIIVYADKATERLKKKYQKLIERNVPRNKAIVAIARELACFIWGMETGNIH

SEQ ID NO: 237933 - protein, 365 aa, unidentified
MPSVSHLAVTHLGLDVHKDTISVAILAPGCDGPVVDRIPHDEPSVRRLVGRLGNPRLLRACYEAGPTGFELARLLMGMHVRCQVIAPSLIPKAPGDKVKTDRRDCRRLARLHRAGELVAIRIPTVQEEAVRDLCRARADLVEDRTRARHRLSKFLLRHGRPWRGGNAWTLTHERWLLAQRFDQPALAATYVHYRAVLDVRDAQLAAIEADLATWYDAAPFADAVHRLSAYRGVTRLGALTLASEVCDWRRFPRAAAFGGFCGLVPSEYSSGTSTRRGHITKTGNAHLRAQLVESAWAYQHRPAVGLELRERHKGLDPAVLARAWAAQLRLCGRFQRLAARKDSKNVVVTAIARELAGFVWAEMTA

SEQ ID NO: 237934 - protein, 501 aa, unidentified
MKAKRTKAKIRAEQKGIAVPCSEPAQELQILRPDAAGIDCGAQEHYIAVPPERVSAGEATVRRFSAFTEGLDAAVEWLKACRVTTVAMEATGIYWIPLHQKLEAAGIEVYLVNAGHVRHVPGRKSDVQDGQWLRQLHRFGLLNASFRPEDIICRLRSLHRHRDNLVSSSGSEIQHMQKALQQMNLHLHHAVSDITGVTGLRIIDAILAGQRDPEQLVKLRDKRVHKSTPQQMQAALVGDYRAEHLFVLSQSLQAYRFYQARIEECDRQTEPLLEKLAQQVEAASARLKLDAPRAADAQQRVTLPESPNGSKAEAGALKAKRNRKPIANEPKIELAGLLERICGIDLTKVVGLNVLNVLLIVSEIGVDMSKWRSAKAFCSWLGLCPGNKISGGKVLNSRTRQVVNRVADALRLAAQSVGRTETCLGIFYRRKQAHLGAPKATTATARKLACLIYHLLKYNQPYQEPDPAIYQLRLKKSALTKLQRQALALGYTLLPTTPVPA

SEQ ID NO: 237935 - protein, 333 aa, unidentified
MKLKKEIIGIDVSKLTLDVFIHNLKHHFVVSNNPLGFSKLLQVIWKSLPNKKKENLFFCFEDTGKYSLPLCIFLSGEKLTFAMVPALDIKRSMGLVRGKSDKKDARVIALYAWRKRDEIKPTVFPTGSIVRIKQLLSLRNKLVKHKKAYQTGMDDIQDYFKTGDSNFYLDVNKRVIKSLNAEIASIEKEIETIIKSDPQVQKNYKILKTVHGIGKIIALYLIAYTHNFTKFEDARKFCCYCGIAPFENSSGTSLKGRTKVNPLANKMIKALLNMGALSTIRHYPEFKSYYNQRIEKGYNKMSTINIIRNKIVFRAFSVVKRGSPYVDLYKFAA

SEQ ID NO: 237936 - protein, 389 aa, unidentified
MEARTVNNLPPAGIHDDAICCVLAIELSKKSWMVAVNTPLSDKISRHSLKPCDGKELLDLCERIRTRVARETKQRAEIVSCYEAGYDGFWLHRLLEAHGIRNYVIDPASLQVDRRARRAKTDRVDVERLLRSLMAYLRGEPKVWSVVRVPSVAEEDDRRLHRERGRLINERIQHVNRIKGLLAIHGIYDYQPLRRDRAQRLEQLHTANGRTLPPRLKAEILRELQRLELVIGMIKTIEAERDAIALVNTETERRGAKKIQHLAKIKSIGPEFATTLVGEVFYRSFDNRKQLASYVGLTPTHFQSGAMSRDQGISKAGNAKARTVMIELAWLWLRHQPDSPLSVWFRDRVGKLKGRIRRITIVAVARKLLIALWRYLETGLVPKGAALKV

SEQ ID NO: 237937 - protein, 449 aa, unidentified
MNMNNAAIKNTVAKTNSVARPYYAAVIGIDWADRKHDLATLPLSVTQQPARPPELSILEHKTEALIEWISSVQERFSGGRIAIAIEQRKGALIHFLSGFDFIDLYPIEPLSLNSYRKALYPSGAQSDPVDAALLAEFLLKHQDRLRCYRPQSAPVRQCAQYCEHRRRFVDERAQALQCLKASLKLYFPLALELFADLSTDLVRAFLGRWSTLEQLQRANRATLRSFFYRHGSRSKKVITRRLELIAAARPLTSDPGVIEPQRLRVKCLLEQIGTLSRSIAAYEERIEGLIQLLDCDGVFASLPGAGACLVPRLAVLFGQDRSRFESAAEVQMLTGTAPVTRQSGKKKLVSMRWACSTFQRQSLVEYALSSLRFSQWARAFYASHMPEDPNADKPTYTVLRKLAFKWLRIIYRCWQTRTPYDESRYLESLRRSGSPLWRHLQQANAPASS

SEQ ID NO: 237938 - protein, 338 aa, unidentified
MTIVMGLDQHRAQITYDLLDTETGEVRGGRVSPADRVSVRAFLQRFAGREVEAAVEATTGWRFLVEELEAAGAVVHLAEPAETSERRGRKKRAKSDRADARHLRELLLVGRLPESWIPPAHILELRSKVRLRHTLAEQRSEWQQRIQAQLYHHGVPRRRQLLTRENRGWLEAVELPEAARLQITVALRLIDQLQAEMAPIERELRAFARRQAGCQALMRHYGIGELTSVTVLAELGDVRRFGSSRRAVRYGGMDITVFESDQRRSPGHLSRQGPPALRWALYEAAQVARRPGSPDRAYYEQARQRLGGNRACLAIARKLLQRCYHTLNELGEEALQPA

SEQ ID NO: 237939 - protein, 338 aa, unidentified
MAIVGGFDLHRRQITFEYLDTVSGEVSRGRVAPADREHLRAWLRRLDGQDATFAVEACTGWRFVVEELERAGAQAHLAEPADTAALRGPKRRAKTDRADARHLRELLMAARLPESWIPPAHVSDARTEIRLYKALVDERTAWLQRVHAILFQLGAPAMPGLARASGRSRLDLAALPLIARSAVEVGLRSVDRVNEELDTLRPQLARLSRAQRGCRALQAHYGIGPLTSVAIWAELGDCGRFSSSSDAVRHSGLDVTVRSSDSRRARGHLARQGPGVLRWALFEAAVCAARPASPDHAYYLQVKARLGHQRAVLSVARKLTRWCHHTLRALGEQALAPA

SEQ ID NO: 237940 - protein, 382 aa, unidentified
MNRILKIGMDVHSTSYTLCAMEPVLDGEDRIFANIQVTSDYRNVIQFIDKLKEMLGSSDSYSIECGYEAGCLGYSLYHQLTKAGVKCTILAPTTMLTQQGKRVKTDKRDALMIAQCLSYGGYRAVHVPADKDVSVKEYLRMRDDHKVALKKIKQQINAFCLRQGYFYAGNKWTIKHLNWLKKLVLSDLYRETLNEYLTSYEEQTAKIERFDKRIEELAEDSDYQENVKKLGCLLGIKTHTALSLIVETGDFKRFRKGNTYAAFLGLAPGESSSGEKISRTGITKAGNSHLRMLLIEAARGMCRGRIGYKSKVLRSRQAGNPAEVIAYADRGNTRMRSKYYRMIRHGKKNNVAVAAVARELACFIWGLMTNNIAPKEEGTKAA

SEQ ID NO: 237941 - protein, 348 aa, unidentified
MLADELDYVVGVDTHRDEHVLVAVAAPVGAVVARQAVRANARGYRAALRFAERYAPSSRAWAIEGSGSYGAGLARYLAGCGETVLELSRTPRAERRLRGKDDSLDAARTARAALASETLALPRAGERREALRLLLVARRSAVDVRREALGQLRGVIVTAPDQLREQLRSLPVGRLLERCSRLRRSSTASADELATRLVLRSLARRIEAATLEAAELERELLTHVRALAPRLLEEPGVGPIVAAQLIVAWSHRGRVRSEAAFARLAGVAPVPASSGQTQRQRLSRGGDRQLNRALHTVVLHRRQHDPATQAYIERRIAEGKSRRDATRLLKRYLARHLYRLLQQEPLMA

SEQ ID NO: 237942 - protein, 337 aa, unidentified
MRFCGIDLHSNNSVVVVTDETDKVLLSRRCPNELSTILALLAPHRAELAGVVVESTYNWYWLVDGLMAAGYNVRLANTVAMKRYDGLKHSDDETDAAHLAHLLRLGILPTGYIHPPAERALRDLARKRIQLVRSRTQHVLAVENILARQTGACVGAGAIKRWAASDVDMLGLTADVALAMKSNVAVINALNLEIDRLESRLLEGVKLRPEYARLKSIPGIGEVLAIVIMLEAGNIARFAQVGNFASYARCVDSARYSNGKKKGEGNTKNGNAYLVWAFVEAANFARRYSDDAKRFFERKKAKTNTIVATKALAHKLARASYHMLKAGQDFDVKRCFA

SEQ ID NO: 237943 - protein, 340 aa, unidentified
MSEITTIGLDLAKHVFQVHGIDAQGTTVLRKRLRRGQVLAFFSRIPRCVVGLEACATAHYWARELGALGHEVRLMPAQYVKAYIKRNKHDAADAEAICEAVERPTMRFVPVKTAEQQATALLHRGREQLVRQRTMLVNALRAHLAEFGIVAAQGLRNVGELIAIVRDDGDTRLPDMARQVLQVLASQIEQIETAVAALERQLLAWHKTNPVSQRLASIPGIGPIIATAIATTVADPKVFRSGRDFAAWLGLVPRQNSTGGKTRLGGITKRGNRYLRRLLINGASANLLRSKATKADPWVIGLRRRRPPLVVAVALANKTARIAWAVMLREKEYQPRAVAA

SEQ ID NO: 237944 - protein, 304 aa, unidentified
MISTAKTAKIFVGVDVSKATLDVYRPDTKELLKIENSEGAIIQLCAQLEKKTRRVMVVMEGTGGYEHLLLRCLASHKLEAAVINPRRVRDFAKGIGLDAKTDPIDAKVISRYAEVVEPKPMATKSDHELKHSALVARRNQLLELINQENNRLKQSWDDDAKQSIREVLELLKKQLKNVDSLLATMLAKDTANQRTIEILQSVKGVGAVTISTLIAELPELGKLNRGEVAKLVGVAPINRDSGTKSGKRFIGGGRGQVRRVLYMATLVAIRHNAAIKAFYVRLKSKGKESKVVSPQSLGPLHPVH

SEQ ID NO: 237945 - protein, 400 aa, unidentified
MDDIDDVGVFLGLDVGKSAHHGHGLTPAGKKVFDKQLPNSEPKLRAVFDKLATKFGTVLVIVDQPASIGALPLTVARDAGCKVAYLPGLSMRRIADLYPGEAKTDARDAAVIADAARTMPHTLRSLELTDEITAELTVLAGFDQDLAAEATRTSNRIRGLLTQFHPSLERVLGPRLDHPAVTWLLERYGSPAALRKAGRRRLVEVIRPKAPRMAQRLIDEIFDALDEQTVVVPGTGTLDLVIPSLARSLAAVHEQRRALETQIGQLLEAHPLSAVLTSIPGVAVRTAATLLVTVGDGTSFPTAAHLASYAGLAPTTKSSGTSIHGEHAPRGGNRQLKRAMFLSAFAALHDPASRTYYDRCRARGKTHTQALLRLARQRINVLFAMLRDGTFYEPRTPRLA

SEQ ID NO: 237946 - protein, 450 aa, unidentified
MSNGNGVSRGDRNRNARLDRLRALVPVTNAIVGIDLADKKQMVVVCDHDSKVLARRTYRCRAWDLGTALDWAHERAAAKGFAGMTVSCEPTGHRWRVLAQLAADRSMPFVCVQPAVSSWSRRAEDLTHDKTDEKDAVLIARLTAQLRCYEPEPVDETWGRLRHLGARREQLITESSGQVQQMRDLLECVWPAALECAQQPFRSRTWIAALTVIVDRDGGQFDRTRRLGLARFEQAVLREISKRGGQKPCRRIARSVFAALADPAGVIAHRAGALERVQLLLEDWRTAHHRLADTEQRMTGVLDELGLTGLVTSITGISAVGAAAILAQTGDPRRFATARALVKHAGLAPREKLSGTFTGRTKLTGQGRPGLRLAAWRAVWGAQRANPVYGARYRHLTTREHNRLKPTQAQTVIAAAILRHLHAVISTGQAWDPSIATHGTRSAIRTTAAA

SEQ ID NO: 237947 - protein, 355 aa, unidentified
MRWSLPPSQYYAEDRLSFGEPSWKTLRLLVSIWVRTLSIFIVRIIGKAVYRKKFTRPKLIEFLATCPATTIAMEACGGSHFMARKLEELGHFPKLISPQFVRPFVKSNKNDFVDAEAICEAASRPSMRFVQPRTESQQAMRALHRVRESLVQDKVKTTNQMHAFLLEFGISVPRGAAVISRLSTLLEDSSLPLYLSQLLLKLQQHYHYLVEQIKDLESQLKRKLDEDEVGQRLLSIPCVGTLTASTISTEIGDGKQYASSRDFAAATGLVPRQYSTGGRTTLLGISKRGNKKIRTLLVQCARVFIQKLEHQSGKLADWVRELLCRKSNFVVTCALANKLARIAWALTARQQTYEA

SEQ ID NO: 237948 - protein, 351 aa, unidentified
MSHKTAATVAHTIGIDTGKNTLHLIGLDDQGAIVLREKIARGRIAARLANVPRCLIGIEAGMATHYVARELGALGHDVKQVPPAYSKPFRQGHKNDFRDAHAIAEAVQRPSTRCVPVKTDDQLDLQALHRVRSRLVGQRTAVINQIRGFLLEHGIAVRQGLRFLRQQLPDILAKRSDVLSPRMIRIMEDLSGDWRRLDERIEHITKEIEVLAGTDVNCGQLMTVPGIGPIIASATVAAIGNGAAFARGRDFAAWLGLVPKQMSTGDRTILGRITKRGNRYLRMLFVQGARAILLRPKSWVKHSFGPWLTTAARRLHRNILTIALANKLARIALSVLIQGRNYETRIVPAAA

SEQ ID NO: 237949 - protein, 345 aa, unidentified
MFYCGIDVGMKSSYLYITDGEGLVRAKGELPTTAQALRDRLRRFVPGGLKVAVEAGPQTAWIHDLLVEIGAEVNVVNPNKVRLIAESRRKTDKIDAKLLCELLRLDGLPHPVHVPDKETRSLRGLLVARRQLVSARTKVCNVVRGMLRQEGISLPSRFLTSLAAWQRLLEVEFTHSHLRPIVEAYAETFKTLTRSLQALDRELAQREKSDDRAARLQTMPKVGRIASLTFLAAVDDVNRFSSSRKLVGYSGLAPTVRSSGERTEYGSISREGRRELRAVWVQIAQLVAMDTGRDTAPLRKWFAKVAFHRGKKTAIVALARKLLTIAYQLLKQQTVYDAKKLRRAA

SEQ ID NO: 237950 - protein, 402 aa, unidentified
MNCVGIDVSKGKSMIAVMRPFGEVVVSPFEVRHTANELSELAGLLKSLDGETRVVMESTGNYHAPVAWLLHDAGLYVSVVNAMLVHDYGNNSLRRAKTDKKDAVKLANYGLDHWLTLPRYIPEEDTRLMLKICYRQYQQYSKVQTMLKNNLISLLDTTFPDANRLFTSPPRADGSEKWVDFVATFWHCECVCGLSEKAFTAKYQKWCKKHGYNFSEDKALDIYASACRHFGVIPKTDTAKLLVEQAISQLQATSAALAALKQEMQSLAASLPEYPVVMGMFGVGPTLGPQLLAEIGDVRRFHSKKALVAFAGIDAPPYQSGQIDVRSRSISKRGSASLRRTLFLVMSVILQCAPIDEPVYQFMDKKRSEGKPYRVYMMASANKFLRIYYASVKAYLESLEHD

SEQ ID NO: 237951 - protein, 406 aa, unidentified
MAGLPRECLDVGVIVAIDPGKASHRVWVTDRDGLVSDPVSLPSSRVGIDGLERLVGGREAVFAIEATGALHRAWMAELERRRPGALRLFAPSETVAARAQLGTRRFKTDDRDCAALVWLTRQGAGRPAPDSGVDAMRAAVAHRRQLVLALTPLRQRLHDQLNALAPGLSAPPGHGRALGLETPTGRAVLACAAAFAGRPPSLRSLQARAGGRLTTATATFWVERWKPCLAPPPDAELRAARLARDVERFHALRHDIAFVDGQLELLLADSSGHVLASLPGVATVRAAAFAAHTLPIERWPTPAQLYSATGLAPASYESASVRRRGAIARTGLPEHRDALMGIAWGLGQHAAAFQRRRAELNARGKTGIAARVALARHACRLCWRLLDTQQPYDDRRYDRARRDRGR

SEQ ID NO: 237952 - protein, 339 aa, unidentified
MKVSTLGIDLAKNVFQLHGVGCNGQTVLKKKLTRDKFLPFLMQLEPCLIGMEACASSHHFARVLRQYGHEVKLIPPQYVKPYVKTNKTDAADAEAICEAVARPNMRFVQIKTAEQQAILVLHTERNILIRERTACANSMRAILAEFGIIMPRTLSQLYKKIPEILEEYDNELSPFVRCSVARQLEHLQSVEDQITLIEQELSRWAKTQPACQRVMKVPGVGLMTATYLVASVGNGQQFHSAKQFAAWLGLVPREFSSGGKQRLGRISKRGDRYFRYLLVHGARAVAAVIERHKDNMPWLYRLLNKKAYNVAVVAQANKTARILWSMLVQHTEYRTLSVV

SEQ ID NO: 237953 - protein, 362 aa, unidentified
MNATTVAVDLAKNVFQLAVADANWKVIEKHRLTRTQFERFFGNRDVKLVVLEACGSAHYWARQIQAMGIEVRLIPPRYVRAYVKRNKTDAADAAALLEAARCADIVPVKIKSIEQQALQCLHRTREQWMRTRTARINCLRGQCREFGLFVAQGARLGLEQIARLIADPRTQLPQILLVTMRSLLDEIRLLEVRIHELEKQLGELARQSLPCTTLLSIPGVGLLTSTALVAATSGEVLHFKDARHFAAWFGLTPKEHSSGNTRRLGRISKRGDAYVRMLLTHGARSVIAAAATKAQAGAPLDRLRQWALDLEKRSNRNKAVCALANKMARLCYATLRDHEPYAAAKLTRELPRKLAQTSFSCA

SEQ ID NO: 237954 - protein, 356 aa, unidentified
MEYYAGLDVSLRSCAVCIVDGKGTVLFERELPCEVGDIAECLLEFPHPIERVGFEAGSMSQHLFFGLTAEGFDVVCMEARQVSAALSAMRNKTDKTDARGIAQILRTGWFSPVHMKSREAHGLRALLSTRKALLKKTMDLANEVRGLLKIFGIRLPQTVKHGSFDGVVRPMIEIDDVLAHALVPLLDARVVLYQHYLELDRRVKRAASHDDVCMKLMTIPGVGPIAALSFKSAVDDPTRFKSSRTVGAYFGLTPRRYQSGEHDNPGRISKAGDRDVRAVLYAAANALLMRTMASSQIKSCTARQAMPASLRGGMRLMRTKGRRRAVVAVARKLAILMHRMWIDGSEFRQDQVGGMA

SEQ ID NO: 237955 - protein, 408 aa, unidentified
MPVVHPICCDIDVHQAQLTACLRRVDADGQVTPEVRELATTYDALRTLSTWLTEEQCPVVALESTGVSWRPVYHVLVGTVDVLVGNAQEMRRRPGHKTDKADARWIAELLAHGLMRPSFVPPPPIGALRDLTRTRVALIQARTPAKNRVVTVFEDTNITLTSVVSDLFGRRGRRMLAALLAGERDPKTLAALALEVLRRKQSPLELALTGQFTEHHAWLIQGALELVDRLDRQRTELDQRIGELMAPLTPQMEQRTSIPGVEATAARAILAEIGAEMRHFGSAARLASWAGVCPGHADSAGKRRSGRTRQGHRDLRRVLVPCAWAARQTPTFLGHTFQRLEGRLGGKKAAMVVAHKILVIGYHLLLEGTCDEEERYDRLQSRQEERQQKRAVKALERLGYRVTLDRLA

SEQ ID NO: 237956 - protein, 348 aa, unidentified
MNEITMIGVDLAKDVFQVHGVDQDHRPVLRRQLKRAQVLKFFAKLPPCTVVMEACGTAHYWAREIGALGHEARLVPPAYARPFAKRGKSDAIDAEAVCEAGGRPTMRFVPVKNLEAQALATLHRTRALLDKQRTMLVNALRAHLAEFGFVAGKGIHKVPDLAQLVEEASAERLPEIARGVLRGLLHMIAQVNAQLGVLEKGLRTFHRGNAASQRLETAPGIGLITATALTALTPDAATFKNGRHFAAWLGITPRQDSTGGKTRLLGISKAGDGYLRRLLVLGATSLMRSLEGKTTRLALWVQKLLTRRPKKVVIVALANKLARIAWAIMAKGETYLAGMIEAQAEAAA

SEQ ID NO: 237957 - protein, 409 aa, unidentified
MRLFVGLDVSSFDMKVCFLNGDGEKLDSFSVSNDLSGATTLKEKLLQCVAGKEVEILKIGLESTSVYSFHPSMFLHHEIDLQRFGAKVFLLNPKQVANFKKSYSDMNKTDEIDAFVIADYLRFGRNQMSIVKESQYVALQQLTRSRYQLVKMLTKEKQHFLQHLSFKCNTFSQEVDTSVFGSAMTELFLEKFSLEELANMPLEELAEFLQEKSRNRFGDPKCVAASIQKAVKASYRLDKVIEDSIDVILGTSIAVIRTFQQQIKELEKSIKKIMAGLTQTLESIPGVGPVFAAGIIAEIGQIERFDDETKIAKYAGLYWRKHQSGRFTAEDTSLSRTGNHYLRYYLVEAANSVRKHVSDYQEYYVKKYNEVPKHQHKRALVLTARKFVRLVDALLRNHQLFTPERCVKE

SEQ ID NO: 237958 - protein, 368 aa, unidentified
MNKRTYVGLDVHARSVKGCAIDRETGEILRQSLAANDAGVAEWVSGLPGPVLVVYEAGPTGFGLARLLAAAGIECVVAAPSKLQRPSGDRIKTDARDAEHLARLALLGQISPVRVPGRADEAARDLVRAREDVRSDLMRARHRISKLLLRHGLVYSGGQAWTDAHHTWLHRQHFDNPALQAAYEASLEAAELTLDRRNRLDAKITALAATERYAPVVHALMCLRGISVLTALGLAVEIGDWNRFTGNTIGAYLGLVPSEHSSGASRSQGGITKTGNTHARRLLVEAAWHHRRPYNNISRGMRTRWNIADEASRVRGHQGNYRLHRKWEQFETRHKRRVIANVAVARELAGWCWSLAAPVQQEQPWTDE

SEQ ID NO: 237959 - protein, 344 aa, unidentified
MNIQTLGIDVGKNVFHAVGLDTSGKVVLRRQFTRSALMRFMGKLAYCRVGMEACGGSQYLGRRFERFGHTVRLMAAQFVKPYVKSNKSDFNDAEAIAEAMTRPTMRFVTLKTVEQQDLQALHRARSLLMGQRTALINQLRAFLLERGLTVPKGVAALRRRLPEVLEDADNELSDRLRALIDQIWQQVSELEARIATLNAEIEAIAATDMACQRLLSIPGIGVLTATAMVATVGDGKQFRCGREMAAFLGLVPRQYSTGGKPRLLGISKRGNTYLRMLLIHGARAVLRGGDKRSDRLGPWLRELKARRPSNVTAVALANKLARIAWAVLVHGEDYRPSLSVLEAA

SEQ ID NO: 237960 - protein, 422 aa, unidentified
MMNQLAEIPFTLYVGIDWADAKHDICVQAAGSEEREFDRIVHKPEEIEVWAQALFQRFGGPIAVALELTKGPIVSALQKYDFFVIVPIDPIRLASYRKTFTPSGAKDDPTDAEFALDYMMRHPEQLKVLKPQSVPMRKLTYLVEARDRLKGDQSRFVNRLIQALKQYYPQTLDWFSDRNTVLFCDFLVQWPTLEKAKRARKKKLEAFFKNHNVRFAHLIEARIDAIKAATPLTHDEAIITAHRLQVEALVEQLRLTIQAMKRFDKEIVATAEQLSDYKLLFTPLPGAGKVLAPRLLAAFGEDRERYPCAEELQRRTGIAPVTKRSGQSEWVHWRWQCSKFLRQTFIDWSAQTINKSAWAGAYYRQQRAKGSSHQAAVRALAFKWIRILYRCWQDRSPYDESKYLEALRRSGSPLLKQLAQAA

SEQ ID NO: 237961 - protein, 395 aa, unidentified
MQIPQIVVGIDNGGRSHRVTIAGPEGQLLEEFDMEHTAAGFGDFFQRLETHERRLKLPVAIAMEGFNGHARPLDTQILMRGYRLYNVNNLKLARFKEIFPGPAKNDPIDSHKIVELFELRAHLPLAKDVLQEVAAAPAENEKLKRLTRRRRQLVEDKVRVVNRLQADLQSVSPGLLAITGNVDNRWFLRFLTSRDELPQLGRLHHSTLLKIPGVGQHYAETIEQWQRQAYFAPAVEWVGPMIVADGQRILELIEQIEQLEGQIAGLAQQSEIAQALFSMPGFGPICSAELAGEIGTLERFASERSLALYLGMAPLDDSSGTYQGSKPPRQVNRRAKAAMMRAVDQHRKQVLSSQRYYHKKRLEGKRHNQAIRALGRHLVRVIWSLIGQRRAYEIR

SEQ ID NO: 237962 - protein, 359 aa, unidentified
MDVHKNSISVAVADGGLRGESRFVGTIANTPAAFGKLASQLSRPGVRLRFCYEAGPFGYGLWRQLTGLGHDCVVVAPSLIPRKPGARVKTDRRDALALAALDRMGALTAVWMPDADHEAMRDLVRARAAAVRALRRSRQQLSGFLLRHGVVRPGKNWTMAHRRWLSTIRFDHPTSQIVLQDYIHAVEDAGARRDRLTGQIEELLDDWSMAPVVKALQAMRGIALIVAVTLVAELGDLTRFDNPRRLMAYLGLVPSEHSSGESVRRGGITRAGNGEARRVEAAWTYRLPARILAVRLKRLQGLPKAVRDIAWKAEVRLCARHRRLRAAGKPANLVNAAIAREMLGFAWAIAQHVKPRPAG

SEQ ID NO: 237963 - protein, 491 aa, unidentified
MQLRSPLPVPKRNAARLPGCVEAPVQKSKRTLPHRGLVPGRPDTGTWRRTRSKGMEINMANKSHKTNETNETNETPFHKRYKLFVGFDWASDHHDIVAVDEIGKIVMELAIKDTAEGWASLRKKFADKTGQEDLCLVAVAVETCNGPSVERLLEMGCQVYPVNPKAAKEYRGRKSPMGSKCDRLDAWSLGDALRTDGHAWKLLKSDDPLTQELRILCRDEVKLIAQRTALVLQLRAALHEYYPAALDAFDDWTVQGAWSFVENFPTSQDLAKAGKRKWKTFLKDHKLSCREKNKTRLDIFSRAHKFCGPPAVTKAKSRLAVTIVKQLRILHTQLVEYRKAIEALFEDHPDKDIFGSLPMAGDKLAPRLLSELGQNRDRFDDPDVLKCYAGTAPVTKQSGKSRFVIFRRGCNKNLRTAIHQWVDLSRQECAWAQAYYKTKRQQGKSHSCALRCLGQRWLNILWKMWQTKTTYNEALHTRNQVRHGSWIVKPG

SEQ ID NO: 237964 - protein, 358 aa, unidentified
MSKTTKSETAPKAKVIYLGIDAHLDKYVVVRQVDGLSPQPAQTFRSENSLLQWVAKQQKAAHDVVACYEAGPLGFVLYRQLHAMGVTCHVVAAKRWSENEDRVKTDKRDARILCQRVESYHRGNHTVLNVLRVPTEEEERRRALGRQREAFKKELQSNAQRGRGQALLWAVRLKGQWWKGNLWESTQKQEPELLALLIPLREIILTIETQLKTLTRQLEEESIAENLRPKGLGALTWRMVQGEVCDFTRFNNRGQVASYTGLCPSESSSGGSRRLGSVNKHGNRLLRNYLVEATWRLIRWQPDWYAWKKWQAEYQQASGGRRKQIVVALARILAVDLWRIATKQTTLENLGLQPANPA

SEQ ID NO: 237965 - protein, 338 aa, unidentified
MPLYGGIDLHANNSVVVLLNEQDQRIYHKRLPNDLATIVEQLAPYHADIEGLVVESTYNWYWLVDGLMDAGYRLHLANPAAIQQYSGLKYTDDHSDARWLAHLLRLGVLPEGYIYPKAQRPIRDLLRKRAHLVEQQTANVLSVQNIILRNTGARLSANRIKSVSQAEVEALLPDADQALAVSSALAVLHCLAEQIKTVETRVRTRLQSTPLYELLQTVDGIGPILAQTILLETGDIGRFPSVGDYASYCRCVDSTKVSNGKRKGQGNVKNGNPYLAWAYAEAAHFARRFNLKVQRYYQRKQAQTNVPVAHKTVAHKLARACYHMMRHQVPFDAAKAFG

SEQ ID NO: 237966 - protein, 310 aa, unidentified
MDIIAVGIDVSKDRLDVAVHPGGEAFVVERNGAGLEQLTVRLKQLAPTIVALEATGGFETIAAAAVGGAGLPVVVVNPAQVRAFAKALGQRAKTDPIDASVIAHFAAATRPEPRPLPDEATRFLSDLVTRRRQIVDMIGAERQREKRATSQHLRKSITRLIKALEKELVSVDTDIDDAVRSSPAWREAEDLLASVPGVGPIIARTLMAELPELGRLNRKQIEALAGLAPYTRQSGQWRGKSFIGGGRQAVRTVLFMGAMTARRHNPVLKAFFERLVANGKPKLVALIAVARKLLTILNVMIRTKTPWQPA

SEQ ID NO: 237967 - protein, 408 aa, unidentified
MEVVYRCCCGIDVHKKIIVACLDQGGEQSLREFGTTTSEIKSLATWLTESGCEMIAMESTGVFWKPLYNLFELMDLDAMVVNAAHMKALPGRKTDVKDAEWIADLLRHGLLKASYIPSREQRELREITRYRKSLTEERCRETNRLQKILEGANIKLDSVVKDINGKSARKLLEKIIENDVPTSEEEISKMIHGRMRSKLGQLVTAIEGITTPLQRKLLAQVIDHIDDLNRRIADLDKLVQDYMDEYEAAITALCDIPGIARRSAEVILAEIGLDMSRFPSAAHLCSWAGVCPGNCQSAGRRKHGKTTKGNKPLKTILTQCAKSSRSVKGSYFSAQYQRIAARRGKNRATLAVAHSMLIAIYHMLRNNVPFRDLGSDYYDFFNRDRKIHGYLKRLKALGWEPDALPGSA

SEQ ID NO: 237968 - protein, 312 aa, unidentified
MDATAIVGIDVSKDRLDVHVRPGGDAFFVRRDGDGIAALIERLSPLDPAAVAVEATGGFETVVAAGLAGAGLPVVVVNPAQVRAFANALGQRAKSDPIDAAVIAHFAEATRPAIRPLPDEATQLLADLVSRRRQIVAMIGAERQREKRAPARIARSIQRLVKALEKELASLDGDIDDAVRGSPAWRDKEDLLASVPGIGKTIARTLLAELPELGSLDRRQVAALVGLAPWTRQSGQWRGKSFISGGRAGVRAALFMGAMVAARHNPNLKAFRDRLVAAGKPKLVALIATARKLVTILNAVIRDRQPWREQNA

SEQ ID NO: 237969 - protein, 412 aa, unidentified
MEVVYPCCCGLDVHKKSITACVLWAEAKGKSRKEKKRFGTFTHDLLQLGDWLEQCGVTHVAMESTGVYWKPVWNILAEQFEVLLVNAQHIKAVPGRKTDQKDSEWIADLLQHGLLRGSFVPPQPIRELRDLTRYRVSLVQEINRIANRIQKVLEDANIKLASVATDALGASGRAILQAMLAGEQDAARLAEMSKGLLRNKIPELRLALEGRMTEHHRFLLRQLFEHLRFTESKLSEIEQEIDKRMRPFEDKVTRLCTIPGVDRVTAWGMLAEMGMNMNQFPSSGHLASWACLCPGSFESAGKRLRGKMRKGNVSLRRCLAQAAWAISMMKNNYLSALYRRIAARRGAKRAVMAVAHALLEIAYHMLKRKEDYRELGADHFDRIDVNRIRRSLVSRLERLGHKVTLEPLAQTA

SEQ ID NO: 237970 - protein, 476 aa, unidentified
MPPCAKRAPREDPHPGVVVRGEDPVGSSRPDKFLFARSASTGVDIRHGGSRNPTGGITLQNISPNHLHTDFQYFAGIDWGTERHRVCLMNAAGSTLAERWVEHSGSSLAELVDWLRQQASAAPQALAAAIEIPRGAVVETLLDQGFAVFSINPKQLDRFRDRYSPAGAKDDRRDAFVLADALRTDQHCFRAVRLDEPAMIRLRELSRLDDELAQEQTRAINRLREQFHRFFPQLLQLSECADEPWLWALFEAAPAPARAARLTEARITRLLREHRIRRIDAAQVRAILKSKPFTLAPGAAEAAAEHALLLLPRLRLLHQQRADLARRIDGLLQQLAAPLTDGQAQEHRDAAILLSLPGLGRKVAATMLSEASQAIAERDYHALRCYSGAAPITHQSGKKKSVLMRRGCNERLRNALYHWSRTSVVWDAASKNRYAGMCARGHSHGRALRGMADRWLKVLISMLRHGTLYDPQCSAA

SEQ ID NO: 237971 - protein, 339 aa, unidentified
MAYSGIDQHKRDSVITTYGPDGPAVKQARVPNTALQLERYCAHFPGPHRAVVESTGGWYWLADVLTTQGIDLVLAHATRVKAIAAAKVKTDQVDADTLGVLLRADLIPVAHRIRPEQRGARDLMRTRLRLVEKCVSAQNSIDRLLEKFNVSDVGQLDACYQLHAGCHAAQIQLCTQQITTLERALYPHLIPNADVQRLLWIPGLGKVNAFTIYTEIDGITRFPSVGQFFSYSRLVPGAVNSGPRTRHRSGSKAGNRYLKLAFSHAGIRAVQYYPEIRAFFKAKARRKLLRIARTLVALELARIVYHVLTTQEAFDDRFKGRALSHRKHATWPRQASPPA

SEQ ID NO: 237972 - protein, 330 aa, unidentified
MKVAGIDVAHKTLEVVVSEGEKASKAQAYANTASGHLALVKALKAAGVERVCLEATGSYHLDLALALDAGGLALMVANPKASKNFAEALLTRTKTDAVDAAVLAQFALRMPFEPWQRPDDQAVALRACARRLEALNRARTEAKNQLHALSQTLMTPEIVLADVRLSIRQCEDQIQALRTWAEAQIQAQADLKDIFDLLNSVKGIATASAIQLMGELLVLPPDMRAKQWVALAGLDPRQTQSGTSVNKKPRLSKAGNRYLRLALYMPALSASRHDRHVNGYYRHLIADRGLKKIQAVCAVMRKLLHAIHGMLKSRQPFDGGRFYVLTETPA

SEQ ID NO: 237973 - protein, 350 aa, unidentified
MIIIGCDYHPSFQQIAFVDTETGELQERRLQHREEAEKFYRDLAAQGMKVRVGMEASGHARWFERLLAELQCELWIGDAAEISAKRVRKQKTDRQDAQLILRLMMKDDFPQIWVPSWENRDLRQLLWHRHRMVQARTRIMNQLQAVALNEGLRAKKRLWREAGREQLEAIRLAPWASQRRRDLLELLDRLNPTIAKLTQAIEEEVEKCPAARRLQTHPGVGPLTALAFVLIIGKADRFQCGKQIACYLGLVPLEKSSGNQRRLGHITKQGNSLLRFLLVEAAQVTARSLPEWRSKYVHLTMRRGRKIAKVAMARRLAVRLYWMMRKEWNYGQVKKFGSHAGQPGTGDGVW

SEQ ID NO: 237974 - protein, 267 aa, unidentified
MNVNHYIGFDVHKKTASYCVKTADGTIVEEGKLRATHDALRQWAGKRREPWHGAMEATLFSGWIYDTLRPFAAELQMGHPALMKAIAASKKKNDKLDARKIADMVRCNLLPACYVAPPEIRELRRMLRYRNLVVGQATRMKNKMSGMLMEVGAEYNKRQLHGKQYFTNLLDTLEEVPESVKDLLRLSRGAMEMFETTQQQLLARLGKDPLLAQRVMLLKSIRGVGPVTALTWALEVGDPHRFPSVAHAVSYCGLTSALVSSADKRQR

SEQ ID NO: 237975 - protein, 356 aa, unidentified
MGQNGSVNIPFNKSGVGIMKITTIGLDIAKSIFHSYAINHTGRLIRKKQLKRKQLLAYFSKLEPSIVVMEACGGANYWAREFIKQGHQVKLIAPQYVKPFVKGNKNDYNDAQGIAEASQRSSMRFVPIKSLEQQDLQNVHRQRERVKKERTALANQIRGLLAEYGIVIKKGISAIRNELPSIIEDAENDLTVMSRALFNELLEEFHAMGDLLEHCDKKIKIANKNNDICTRLGDVLGIGDITSNALYAAAGDGKNFVNGRHFSAWVGLVPGQHSTGGKPRLLGISKRGNSYLRTLLIHGARAVLRHSEKKNDRFSLWAQALLKRRGQNKACVAVANKLARMAWVIMAKGETYRPAM

SEQ ID NO: 237976 - protein, 338 aa, unidentified
MELYAAIDLHSNNSVLVVTDAEDHVVFSKRLGNNLEAIVTALRGCPGAIRAVAVESTYNWYWLVDGLRAAGFDVRLVNTAAVKQYDGLKHGDDFSDGKHLAQLLRLGILPQGYICPPELRAVRDLMRKRAQLVRQRAAQILSIHNLLARNLARSVKGDDIKKLRDEDIDALALLEDQKSALRANVAVMRCLEQQVRLLERTILAKGRLRQDFHGLKTVSGIGDVLALTIALETGDIGRFASAGKFASYARMVDSRRESNGKNKGVGNRKCGNKHLSWAFIEAAHCAVRYDPQVRRFYQRKRAKGLPVVAIKAVAHKLARACFHIMREGVPYDGTRAFS

SEQ ID NO: 237977 - protein, 422 aa, unidentified
MTPAIQKQIEIHTRSEAEAAAQSLNLSHIFKKMKPFPEKMDRPPLVVGLDLGRGRWHAVFQSARKSGYRDFPGMGKARALVSAIRSEMGLLGLSDTRDVVVCHEIGRDGWWIAEYLEAHGFACVVLSADVLSGNGRAAKTDRLDARRLAVRLGRFFDGELECDHVVLRPQADILEGRAVSRGRAEAVAMRTRLGNQFKSILSLHMEVPPGLDIRKADVDGLRDALGRPLPPAEAEELKRLQRHFKEMDADVAEADRRMKGEVSAARKTREAGGALTRREAMLVELALLKGVGPRIAWVLVHELFHKDFANTRQVGCATGLVAIPRSSGSSDRCAGISRRSNNRLRATLVELAWLWLRYQPGSALSRWFGERTEDGVSSRRMRKVAIVAVARKLAVALWKFLGHGELPEGAAKADEKGAAKAA

SEQ ID NO: 237978 - protein, 284 aa, unidentified
MAMLAEFIDGVIGVDTHRDTLTAAAVTNLGGVLAQTTTSADAAGYQQLLDFACVQVPGRRLWAVEGVGSFGAGLAVVLQQRGEQVVEVGRPKRLAARTGAKSDALDAVRAAREALGQDRLAIPRRRGEREALRVLLTTRRCATLARVAAIGQLKALMVGAPEELRAELRGRSTSSQVASCATLRQRPTRSLEHRATVRALRATAQRIQLLQDEADQLQAELTVLVGAVAPWLLEVPGVGPLSAAQVLVSWSHAGRFRSEAAFAALAGTNPIPASSGQVTRYRLM

SEQ ID NO: 237979 - protein, 529 aa, unidentified
MTGRTGALRGNRSASHSGAKSRHRQTLQKPSGVIGPRVKQVGGEKFAIVCVDPAKHRSEWMMADYFGNLLIQHQTLPHQAAYFKLAVTQIRQAQEQHGIEDLIVVVERTGNYHLAPKRAFASAGFETRVVHPFATKQYRMPADPSNKTDENDLYAQHRAAVAGFGLCEQELESPYRELQLRVRHRRNLVEKATAIACQVRENLHLAMPGFALLFDHLLEHQSAMAIARRCVSPAIVLQLGRVGLSQHLHERKIRHQPRTIDKILAWASQAASEDIHDGALHHAIWTDLDELYQHVQRQILALERQLASDLVQTPYVRLLAIPGINVVSAAELAGEMGPMTRYANANAITGRAGLYPSRHQSDQTDQSGPLIQRANRRLRCVLMRIAETLVCHCAYYRGQADADRAIGVDTRASRVKTAKRFSRLAFACVAGDEPLKHPCMQKPDSILEKLRAFHQEHETPLDRILADLRTTVEQLPYNTRNHEAEVVAEVLRQQTERRRGPTPIGALLPAVLARLEIKTEEHNENRDRS

SEQ ID NO: 237980 - protein, 391 aa, unidentified
MSMYFIGIDISKYKHDCCIISATDQKVISKFSIKNDKVGFEELITTFNSLSSPEDIRIGFESTAHYALNLELFLENAHHSFMEVNPVLIKEYKKSTTLRRTKTDSVDCESIARWLMTVEYKPHSKGFYHAYSLKSLTRLRDRLIRQRSFYLVKITNVLDHTFPEFKPFFNERLSKTALYLLENYGSAEKMARMNSVSYEKLRSISRGKFSPQQFIALKELASNTVGVNNSIFDVELNSLLTLYKTLVTEINTLEKEINLLIEEVHPHYLSVPGIGPISAAIIYSEYGDISNFDNPGQMLAFAGIEPGINESGTESHGGRMVKRGSSQLRYALINCCLPLIRFDMTFATYYAKKRAEGKPHRVAITHVAKKLIRVIYALERQDTDFCVQKLR

SEQ ID NO: 237981 - protein, 458 aa, unidentified
MSQKRSKQIGSGQPKWSLNLEVVHPNAAGIDIGNEFHYVAVVPDRDANPVRQFACFTEDLHRLADWLKSCGIETVAMQSTGVYWLPVYEIQTGEGLEVFLVNERHTKNLPGRKTDVQECQWLLQLHTFGLLNNSFRPPEEICVLRAYWRQRGEHVAAAGACIQRMQKVLTEMNVQLANVISDISGLTGMAIIQAILNGERDRYKLADLADPRIHATREEIARSLEGNWRKELLFILQQERNLYQIYQQQIAECDTALAAHLQTLDDKVEPGSQLPPTKANKRAGSNAPTSFDVRGELYRISGTDLTQIDGINIMTAQTVIAEVGVDMSRFPSEAHFASFLGLCPDNQITGGKVFRRGTRHVQNRAATALRMAASTLWRSKTYLGAKFRRLRTRLGAPKAITAMAHMLARLVYRMLRYGDQYVDKGMNYYEEKYRDHQIRSIQKKAKELGLEVTLCPAA

SEQ ID NO: 237982 - protein, 429 aa, unidentified
MNLIPVAGIDVGKRFSEMAVLSPSNEVFARIRINHDSFKNFEKAFELLKKAEKEFAAKPVVVMESTGHYHKILFHALNNVGYEVSVINPIQSDSIKNIGIRKVKNDKVDARKLALLYRFEQLKGTNIPNEDIDCLRSLCRHYYKLSDQLTAYKNRLLGIVDQLFLSFTDVFKDVTSVTALAILDKYLTPEDILNADRDELITLIKKSSRKNLKWATAKYELLCSKARDFKPLSINSIANTAMLKANLSMIKTLSQLLENALDSIYELLEQDSQKDMPLLSLTIDILCSIPGIGILTAVTIVAEIGDFSAFPKPDKLVAYFGIDPSVKQSGQFEGTKNKMSKRGSRLLRRVLFTTALANIRKKRNGKEHNPVLYEYYRKKCVSKPKKVALGAVMHKLVLIIFAVMRERKPFVLRKPEEHAEMLKAKNSAA

SEQ ID NO: 237983 - protein, 389 aa, unidentified
MNGQTDFTAKVEPEDFKNTLFLAMELSRSTWLVATFAPRLGDKISVHAIPGGDTKRLLELIGRLQAKLRDKDVSRVRTVCCYEAGYDGFWLHRVLVNHGIENHVLDAASLPIDRRAKHIKTDNIDAKRLLRAIVGFVQGDPQSCRVVRAPTPEEEDARRLHRERQRLVRERTGHLNRIKALLITHGIRALRITDAKWCERLDKMRTGDGRPIPARLKIEMEREWKRLKVVAEQVREIEAERDRLVKGSEPSGDACTEKMRRLVKIHGIGAEFATVLTREVFYRPFQNRRQVASYVGLTPAPYDSGDTKHDQGINKAGNTRARVIAVQMAWLWLRYQSKSELSLWYYRRVGDLKGRVRRIMIIALARKLVIALWRYVETGRVPTGAIVTT

SEQ ID NO: 237984 - protein, 435 aa, unidentified
MTGAVARCARPKRKTVKTWTEITHYAGFDWARDHHDIVIVDPQGNITTEFRIAHTLAGWQQFREKIQGYGAVAVAIETSQGAAIDQLLQSNVTVYPVHPLSAKRYRERKAPSGNKTDHLDAWALADALRVDGQGWSMLQPLDPLTQTLRLFCRDEMALIEHRTALVNQLQQALSEYYPAALEAFDDWTRPSCWEFIIHFPTPHQLVKAGKRRREQFLHVHRLWRPETVNKRLEIFARAEQFCGSEPVTAAKSFLALSLAKLLCTLEHQLQEYRKQIQALFEQHPDHDLFGSLPGAADKLAPRLLGEIGGDPDRFESVAVLQMLAGTAPVSFQSGQIHKVRIRYQCQKVLRYVVHLWANSCRKSCSWARVYYRQKRAEGKSHACALRCLGQRLLKILHAMIRTRTRYNAELHARNQQAHGSWVLKLVTKQAPLGSE

SEQ ID NO: 237985 - protein, 435 aa, unidentified
MGRKKKLEMEIINPNAVGIDIGSKSHFVAVGQVLDDVQEFGVYAEDLEAICRHLKEYGITSVAMESTGDYWQNLFTELIKHEFEVILCNGKFTKHAKGKKTDVKDACWIQKLHSLGLLTSSFLPDETTEILRTYCRQRTGLINQASGASRKMQKYLKFLNFRLDVVVKDVCGLTGLKIIEDICNGNLNPVSLAEHRHYNCRKSKEEIAKALVGNNREDFLFGLNQEFEAYRFYQKQIKTCDKKIEKFIKEELKKTPDKLKIKTTDKPYKRANKNAPEIKNFNQVAYQFFNGVDLLAIEGLSHATVLSIISEIGPAGFKKFKSSKEFVSWLRLAPNNKISGGKVLSSKVPKGSNRLKIALRQAANAIGNLKDSTPLSDFFKRIAFRKGRQAAVSATARKLGVIIWTMITKRVPYQPPKEYLFLDQKRKLKLITRIK

SEQ ID NO: 237986 - protein, 394 aa, unidentified
MCQQYKTEASMIKHNILFIGLDTHKTFTEVAYIEDQRGAKSTHLGKILSNKAAFKKLARQLQSKYPDATLHFVYEAGPCGYWIYRLLTSLQHCCYVIAPSLIPKKPGERIKTDKRDALKLAKLLKSEDLTPIYVPEPEDEAVRDLSRARETAMKDLKDAKYQLKALLLRNNINSKVKDNWSLQHLRWLAELILPHPCQQIVLQEAVSTITERLKRLKRLDNELTHQVKSWRYYPVVKAVQAMRGVRLLVATGVMAELGDLTRFDHPRKLMSYLGLVPSEHSSGGKRHLGAITKCGNSRARRLLVEGAHSYKHNANISKEMQLRQEGLSKEVIDMAWQAQLRLCRRYNRLMHKGKHRNVVVTAIAREMIAYIWAISREVVLPVVDVKLRLARMPA

SEQ ID NO: 237987 - protein, 438 aa, unidentified
MAAVMIGVDPHKASHTAVAIGSAEQKLGELRVPASSGQAGRLLAWAVAWPQRTWAIEGAGGLGHLLAQQLVAAGERVLDVHPGLGARVRLLATGDTNKNDPDDARSVAIAALRSPSCQEVTADDHAAVLKVWSKRHLDLGRTRTQVACRLHAVLRELVPGGVARGLTAAHAARILAAITPASAVDQARRDLATGLVEDLQRLDAQQRDTRRKLAAAVRASGTTVTEVYGVGPVVAGIVIGDVRDVNRFPGRDHFAACNGTAPIEVSSGQRKICRLSRRGNRRLNHAIHMAAVTQLRHRHTRGRACYDKKLAEGKTPEEAMRALKRQISDAIFARLRTGARRAAARVEGPGGQPGNGSVTSAAGLHPEDRLFGQATPGPDHQPTTAAGNPAPAPARTKGIAGHFSLAAISPSAAPGTEEQRPARPTRTSHTTKKNARKH

SEQ ID NO: 237988 - protein, 347 aa, unidentified
MAIVGGFDVHRAQITYDYLDTDSGEIATGQIRPATRQVLRSWLERFTGREDVAFAVEGCTGWRFVVEELVRASVQPHLAEPADTATQRGRKKRAKTDRTDARLLRELLTHKRLPESWIPPAHMLEVRTLSRLYVALMDERRAWQQRIHAQLFHQGSPVVSGLLTAIGQSGLEHAKLSPAGRQMVQTALATIASLNHQIEPLRAQLQAIGLHQPAVRALAKQYGIGLLSGTIIWAELGDCRRFKSSDQVVRFAGLDVTVWSSDGKRSAGHLARQGSPELRWALYEAAKCAARSTSPDQAYYVAVRDRLDGKQATLSVARKLARRCYHALRELADEVCIASTYHRQEAA

SEQ ID NO: 237989 - protein, 318 aa, unidentified
MTVSPMVGVDVAKDRLDVAVRPSGEAWSEANDDAGVRALVARLRPLGPALIVCEATGGFERAAIAALAAAGFPVVVANPRQVRDFARATGQLAKTDQLDAAILALFAERVRPTPRPLPDAAAQLLDAVLTRRRQLLEMLVAEKNRLGFAPKPLHRGIQAHIRWLERQVDDVTKELAGLIEASPVWRAKDDMLQSVPGVGPIVSSTLLGELPELGTLSHKQIAALVGVAPLARDSGTLRGKRLVWGGRASVRTALFMAALCGRRWNPALKRFYERLKAAGKPTKVALIACARKLLTILNAMVRDGKRWAVPAPSVQYSC

SEQ ID NO: 237990 - protein, 344 aa, unidentified
MVIFGVDAHKRTHTIVAVDDRGTPVGQTTVGTTSQDHLVLLRWAARFGAERRWAVEDCRHLSRRLERDLLAAGESIMRVPPKLMAHVRDSARTYGKSDPIDALAVARAAQREPNLPLARLDGPDREVRLLVDHRESLISERTRLICRLRWHLHELDPAWEPKARSLDAQRTLDEVRGRLQDHVGVVARLAVELTERCAELTITIKALEKEITELTTQLAPALLELPGCGALTAAKIIGETAGVDRFKSRDAYARFNGTAPLPVWSSNKARHRLSRTGNRQLNAALHRIALTQARWHPPAKGMIERRKSGGNSGREALRVLKRRLSDAVFQALLHDQTAGLTLAA

SEQ ID NO: 237991 - protein, 350 aa, unidentified
MNLHAIGIDLGKTVFHLVGLSQTGEVVVRKKFSRTQLLRFTSNVQVDLIGMEACPGSHFLGKALREQGHEARLMPAQYVKPFVKTNKNDFIDAAAIAEAVCRPTMRFVPVKTDEQLDMQSIHRVRERWIMRRTAVVNQIRGLLLERGITVRMGRCHLDAALPNILEDGSTPLSGTFRFLLVELKQELEQLAGHIEQAEMLIQKAAQQSEACQRLDAIPGIGPLTATALIAAIGNGAAFRKGREFAAWVGLVPREHSTGGKQKLLGISKRGNSYLRKLFVQGARAVLKYRDKQCSGLKHWLAELSSRSHYNVVGVALANKLARMAWAVLASGDAYRPPLLADTTGLQMPAF

SEQ ID NO: 237992 - protein, 370 aa, unidentified
MSNATTFVGLDVHARSVKACAFVPETGETIRKSFGYEPGEIASWASSLPQPARCVYESGVTGFHLCRELNAMGAACVIGAVSKMHKPAADRGRKTDRRDAQFLAVQLALGVVTEVHVPDAECEGARDLARALADARDDAVRAKQRLSKFLLRHGLVYDERNAAGQRRNRWTGDFWAWVGRIDLGDAAAMATLDHYCERVREADAAKAALEAKVKSLAQQPRWKPTCDALKCLKGIDAVTAASIACEADGFARFATASGFAAWVGLVPSEHSSGESRFRGGITKAGNKHLRKLLVEAAWHYKGASRSPKDLAKGQVVDAATRRHANAGVRRLVDRRRSMDDAGKQSSVANVAVARELACWCWAVGRMAEGA

SEQ ID NO: 237993 - protein, 408 aa, unidentified
MVYIGIDIAKRSHVLSAVDDDGKAVIESFKFANTDRGFEKLLERLKKAGVEPGGSLSGMEATGHYWIALFDFMTSHGYDVAVINPIQSDAFRDVWTVRKVKTDAIDAAMIADLVRYKRYEPSALGDEATDELRSLARYRMSLVERSTMLKNRATAILDRVFPELDGLFSGSFGPTQRKLLEHCSTPSQVLSTNVRTLERILKEASGGNCGREKAEELKAAAKASVGVGFGSETLAFELKLLMEELDFVRGQIDEVESELARLLDRTSGKWLVTIPGIGLVLASAIAGEIGDPNRFGDAHQLMAYAGMDPTKSESGETVASDGSMSKRGPAALRWAFMQAADSARKYDPYFGDYYAKKKGEDKKHHYVALSGVARKLMGVSLALMKEQRPYEPTPPKHHLPGHLQEAAK

SEQ ID NO: 237994 - protein, 399 aa, unidentified
MMKLKYSICCGLDVHKNVIVATIVTTNKDGISEYLQKSFSTINSDIQRFHNWLIENNCYHVCMESTGKYWIPIFNYLENDIDVCLTHPKYVKAIKGKKTDKKDSKWIADLYKFDLVRCSFIPPKDFRQLRELSRYRFKLVCMKSSEKNRIQNCMTISNVGIASVLSDPFGKTATEIISYLLEHTADSMDEKAVRKLIKKGAKSKSDEIIEAIKGYTIETDQAKKLELARGHLEYLDDMITQTEVELYVRIKPYYEFVEFVSTMPGMTELSSTIVLAETGVDMDIFDDAKHLCSWCGLSPANNESAGKKKSVRIAKAGDYLKPMMVQCALAAIKSKKQPYFAIKYGRIKKRRGHKKAIIAIARMMMVCIYHMVSEKKPFTPTDYEELMDPQKSCRECRLE

SEQ ID NO: 237995 - protein, 347 aa, unidentified
MRFYTKQHKYYCGIDLHTKKMYVCILDAEGQIRLHQNIKTDPKALLNILAPFREDIVVAVECMFTWYWIADLCTAEGISFVLGHALYMKAIHGGKAKNDKIDSHKIATLLRGGMLPQAYVYPARMRATRDLLRRRNHFMRKRAELYAHIQNTRSQYNLPDPLGCIAKPQNREGIVERFDDPSVQKSIAVNLEMIEAHDRLLTQLEHDIIASAKEHDPLSYALLQTIPGVGRILALVILYEIESIERFPTVQDFVSYGRLIKSIKESNGKKYGSSGKKIGNAHLKWAFSEAAVLFLKGNEQGKRYLERLARKHGKPKALSILAHKLGRAVYFMLKNKKAFNQKKFLGL

SEQ ID NO: 237996 - protein, 325 aa, unidentified
MNIVSYAFSRFVGIDVSKETLDIASADGQSATIGNTRKAINTWINSLLETANTIVVMEATGGYESLLVKLLHETKIALAVVNPRQVRDFAKGIGKNARTDAIEAQVIARFGEVVRPAPHVAQSEDEIKLGALVQRRRQLLDLMNQEPNRIQQTVDRDIRKSIETVVGSLKKQLKVIEGQIETAVQADEPNARKVEILNSVKGVGPVTVSTLVAELPELGQLNRQEIAKLVGVAPMNNDSGKSVGKRKTIGGRSTVPNEARGIRLEAGGKSLQPRASGLVPLRCLLAKGKPKKVALTAAMRKLLTILNALVKSNQLWRVPTLCPVK

SEQ ID NO: 237997 - protein, 377 aa, unidentified
MEVVYRCCCGIDVHKKIIVACLNQGGEQSLREFGTTTSEIKSLATWLTESGCEIIAMESTGVFWKPLYNLFELMDLDAIVVNAAHMKALPGRKTDVKDAEWIADLLRHGLLKASYIPSREQRELREITRYRKSLTEERCRETNRLQKILEGANIKLDSVVKDINGKSARKLLEKIIEDDVPTSEEEISKMIHGRMRSKLGQLVTAIEGITTPLQRKLLAQVIDHIDDLNRRIADLDKLVQDYMDEYEAAITALCDIPGIARRSAEVILAEIGLDMSRFPSAAHLCSWAGVCPGNCQSAGRRKHGKTTKGNKPLKTILTQCAKSARSVKGSYFSAQYQRIAARRGKNRATLAVAHSMLIAIYHMLRNNVPFRDLRSDY

SEQ ID NO: 237998 - protein, 386 aa, unidentified
MNNLSPAAAHDGAVRCLLAIELSKKSWVAAVNTPLSDKISLYKLKPCDWKELLQLIERIRKRVSEELKKPVEVISCYEAGYDGFWLHRLLEAQGVRNHVIDPASLQVDRRARRAKTDGIDVGKLLRSLMAYLRGEPRVWSVVRVPTIIEEDDRRLHRERSRLINERIQHVNRIKGLLAIHGIYDYEPMHPERIQRLERLRTADRHSLPLRLKAEILRELQRLELVLGMIQTIETERDAIVSVKSKSQQTTSTKKIKHLVKLKSIGPEFATVLVGEVFYRTFNNRKQIGSYVGLTPSPFQSGSTSRDQGISKAGNTKARTTMIELAWLWLRNQPDSLLSVSFRERVGSRKGRIKRIAIVAMARQLLIALWRYLETGVVPEGAVLKCK

SEQ ID NO: 237999 - protein, 455 aa, unidentified
MPKPKRIRNARTSPVPRILEPDAAGIDIAATEVYVAVPTDRDPEPIRSFSTFTDDLHRLADWLRACNVQSVAMESTGVFWIPLFQILEDRGFRVCLVNARHVKNVPGRKTDVSDCQWLQYLHSVGLLRASHRPAQTICAVRSIWRHRESLVQMAAAHIQHMQKALDQMNLQLHHVISDISGTTGLSIIDAILDGERNPETLAALRDPRIVASRETIARALVGDYRTEHLFTLQQSLRAYRQHQQWIAACDVEIERQLRVLPNNLADDQKPLSKPKDHHKPRRNEPGFDLRSQLYRIFGVDLTEVPGVSSLTAHALLTEVGPDLRRFPNAAAFASWLGLCPDNRISGGRVLSVVTRKVKNRLTMALRMAAQSLHRSQSYLGQYFRRMRVRLGTPAAITAAAHKLARILYHLITTRQPYQESTFAAMEERSRHRQLLRLKKQAASFGFQLVPGSSVP

SEQ ID NO: 238000 - protein, 336 aa, unidentified
MEDYQWFMGIDVSKSKLDITLLEGSEKRHYSVIENNEKSIKQFIKDLTAIAGFSLKNCLVCMEHTGIYNAHLLTISKAQAWNLCLESAIQIKQSGGLQRGKNDIIDSYRIALYAYKNKSFLKLWEAPREVILKLKKLSGVRERLLQAKVQLERTLKEDKHFQSKHLSTFLGKCCAKSIKAIEGDIKRTEEQIQLVIVSDEELTRLFSIIESVPGVGRISATEIVITTNEFKNIHDARKYACYAGVAPFEHSSGSSIRGKTRISKKANLQVKTRLHMASLVAAVHYEEFRLYYQRKVAEGKNKMCVLNAVRNKLVHRIFACVKENRLYEKNYDPKFG

SEQ ID NO: 238001 - protein, 483 aa, unidentified
MAAKKDGKTGTDPEGAGAAPEHGGDGAEVAEDRVQVVEYAAAIDVAKGSGMVCTRVPGSRPDRRRQKVWRVEATYAQVIALMDHLRCEGIQRLVLESTSDYWRIWYYLAEAAGLEAWLVNARDVKHLPGRGKSDKADCVWHCKLNERGMLRRSFVPPEPVRDLRALTRTRARLAQDQARHQARVEKILEDALLKISVVISDLFGASGRRFLDALVAGERSPKALAALGDPRLKATRRELEDALTGRFRDIHAFEISTHLRIIDAINEEITRLDDKIEEQLALVPRTAPACTACGLAGGGHAPGCADEQVPLLGLAARLDEITGVGECNARAIIAELGTDPSQFPTPGHAAAWARLTPRTRQSGETARPGRTGKGNRYIRGALGQAAMTAAKTDTRLGAMYRRIARKRGKQKAIVAVSRVICEIAWILICDPGARYQELGPDYHTPRSRARQTRDKIREIERLNPGKKVILAPIDPGPEAGAAA

SEQ ID NO: 238002 - protein, 351 aa, unidentified
MQIIGVDLHTRQQTVAMLNVETGEIVEKTLRHEGDSVREFYSTLPRPTRVGIEATGSMQWFLELMEELGIDCQVGHPAKIRAAEPRKQKHDRRDAALVLQLLVENRFPSIWMPSREQRDVRSLILYRHQWVRIRTRVQNALQAIALSQGLRRGSSLWSKMGQHAISSLSLTRYTAERRTALQSLYQQLEQQIADLNQKVEELAWQRPQARRLMTHPGVGPITALATETFLGEPKRFVDGKAVASYVGLIPSEHSSGGRQRLGGLSKQGNPLLRFLWCEAVGHAVRKDAELQRFYQHKLVQKGLGKAKVAAARKLGIRLWILLRDQIDYQEFCRRGQLRQKHGGAHAGMPAR

SEQ ID NO: 238003 - protein, 343 aa, unidentified
MKLHVLGIDLGKTVFHLVGLDSTGKVVIRKRCSRRQLLAFTANLQVQLIGMESCSGSHFLGRALRDQGHEVRLMPAQYVKPYVQTNKSDYIDAEAIAEAVQRPRMRFVPIKSEEQLDLQALHRVRERWVMRRTAVVNQIRSLLLERGSTLPKGRRYVEEALPRILEDAELPLSGSCRLLLAQLKLELEQLSARIDQLDMAILERAKEDEACQRLTTIPGVGPVTATAVIAAVGNGSALGRGRDLAAWIGMVPGEHSSGGKQTLLGISKRGNSYLRRLFVQGARSVLQQRHRQAPGLSSWLAQLLARKHQNVVIVALANKLVRMAWAVLCKGERYRAPVLAVST

SEQ ID NO: 238004 - protein, 468 aa, unidentified
MLLIFFIKEEQVKKIKKRNMHNSEFKQINFNAAGIDIGAETHYVAVPEGRDPEGQDVRHFGTFTSDLYALADWLKQCQIDTIAMESTGVYWIPLFEILESKGFDVKLVNPRFIKNVPGRKTDVVDCQWIQQLHSYGLLTGSFRPEEQMSILRSYLRQRTLLVSYASHHIQHIQKALEQMNVKLKQVIRDITGTTGMRIIRAILAGERKPEKLAQLRDPRCKNDIKTIAKSLHGNWRPEHLFLLQQSIELFDFYQKQIADCDLKIEQHLANFEDRSNGQSLDKTRKLTGRNKLTFDARTHLFQMTGVDLTKVPGLDSLTALKIISEIGLDMNRWPTEKHFASWMGISPGSKISGGKILSSKTKKCANRAAHYLRLAAYSLHSSKTAIGAFFRRKKAHLGPAKAITATAHKLARIIYNMLKTGTEYKDMGQEYYEQRYKKRVITNLKRRAKQFGYELKYVKEQQEVMLDV

SEQ ID NO: 238005 - protein, 339 aa, unidentified
MSVYAGLDISLDAVAICAVNEAGELLWQGKVPGEPEAVRTALLRWKNELVRVGLEAGATSEWIGGSLADEGFPVVCLETRHVKAALSAMTVKTDRNDAQGIAQIVRTGWFKAVHLKSAAGQRLRTLTAARKAAVRAVTGNEQVIRGLLRPLGLKIGTVTRARFEARVRELIGADKMLLVVFEPLLRIHKSLRESLAELHRVVLRAVRIDPICRRLMTMPGIGPVTALTYRATIDDPKRFRRSRSVGAYLGLTPRRHQSGEIDRVGRITKVGDSETRTALFEAANVILRPTTRWSSMKAWAMRIADRQGARRAKVALARRMAVTLHRMWADEQDFRWTAA

SEQ ID NO: 238006 - protein, 392 aa, unidentified
MQISVGIDIAKEIHWVTAIDAGGVVQVDRKLLNTPAGIATLVDELTALRGTVRIGLDVIGGIAGLAEAMLGDAGFALVHVPGIAVNRARQGTVGGENKSDPRDARTIAEQVRTRSDLRPIEPATELDLEIRLLVGRRSDIVQAQTQRLSRMRDLLVGIFPGLEACLDLKTKGPLHLLTKFVTPAELRDAGKKRLVRHLQAAGGVPKVEDLADRVLTVATEQRIAVPGERTTARLIRELAVEALASRTRLTELDRELEALLARHPDAALIRSLPGMGAVLTAELIAEAGNLARFRSADALASAAGMAPVLRQSGRSRFLRRPSGGNKGLKRVFYQSAFCSLAHDDSRAFYERKRREGKRHHQAVIALARRRVNVLWAVVHSRTPFQTAFKIAA

SEQ ID NO: 238007 - protein, 345 aa, unidentified
MPIVGGLDIHRKQLTFDYLDTETGEVKRGQVAPADRAHLRAWLARFAGREDVAFALEGCTGWRYVTEELAAAGVAAHVAEPADTAFARGRKRHAKTDKTDSRHLRQLLAEGRLPECWIPPGHILECRALLELYHDLRAEHTAWVQRIHAVFFHQGAPALGDGALRTGKDLAALRAAAAAHLSPVGQLQVAVSLEVLEALEARMHQVRHQMLAAARHLTGAKVLAARLYGVGPVTALAMTCWLAGKDRFSSSRKAVRFAGLDVTVWSSDRKGPPGRLSRQGPPVLRWAVYEAGKTHARSSAPDHRYYAQVKDRQDGKRAALSEARKILRQACHILAELGDDALTAA

SEQ ID NO: 238008 - protein, 366 aa, unidentified
MDGPPLLAKQLIACFRNSKVKTERTMQLSIIGIDLGKTSCSLVGLDAGGKVVLRRRMRRDTVVSFCSKFSACIVAMEACCGAHHIGRPLAGQGHEIRLMSPEYVRPYVKAQKNDDRDAEAIAEAASRPTMRFVTLKSEEQLDMQTLHRVRDRLVGDRTSLMNQIRSLLLERGHVVAQGRARLAVALTLLLDGEHRVLAPRIHELIVDMRRQWLALDERIKAFDAEFAAAAKAQDGARRLLSIPGIGALNATALVAAVGDAGTFTRGRDLAAWLGLVPRQVTTGGRPKLLGITKRGSKYLRKMLIQGARAALPTLKAGDTRVGAWLRGLLARVHLNTAVVALAAKMARTVWALLRHGSTYEAVAQAA

SEQ ID NO: 238009 - protein, 354 aa, unidentified
MKRTTKYVALDVHQATTVASVRDDSGRVIARSVLETHEPSIFEFLRGMRGAIHVAFEVGTQSQWLYELVAPLADRVVVCDPRQVARQGNKSDQVDADRLSELLRLGGLRLVYHGSAHRVDLKEFTRTYQALVEDGTRVMLRIKALFRARGIPTPGTAVYHPTGRARWLAQLTDRGARFRAEALYAELDVLRALRPKAKAAMIAEVQRDPAWPVLRTIPFFGPVRVALLLATMGTPWRFRTKRNLWAYAGLAVVTRSSADYTWVAGQPVRRRRAPLTRGLNRNHNRVLKDVFKGAATAAASRPGPLQDFYEGMVARGMREELARVTLARKLAAITLRLWKTGECYDPTQLTRQSS

SEQ ID NO: 238010 - protein, 348 aa, unidentified
MNRTANIVGLDIAKNVFAAAGIDAHGNVVFKRIVSRGEVLKFFVNIPPTAVAIEACAGSHYWARELQKQGHEVRLIAAQHTRRYVAGNKNDMNDAVAIAEARSRAKTKYVPVNTTAQQDLQMLHRTRQSLMADRTATINRMRAFAAEYGQVFALGVAKFREQFRDWLADDGNGLSGSAVDTFRELHTQLVDREERIEVYDRRLNLAVKDDARATQLMAIPGVGKITATAILAAVSDPRHYDDGRDFAANLGVVPREHSSGGKQRLYGINKRGDAYLRTLLIHGARSALRCADDKPDKMLRWASKVSERRGYNVASVALANKMARVIWAMLAHGREYVPVWSNSATTPA

SEQ ID NO: 238011 - protein, 338 aa, unidentified
MRAYAGIDLHSSNNYIGIMDQNYKRLFGRRQPNDLNNVLKVLEPFKADLEGVIVESTYNWYWLVDGLQEHGYTVHLANPSAIKQYEGIKHTDDRWDSFWLAHMKHLNILPEGYIYPKEQRAVRDLLRRRLFFVRHRTANILSLQSTITRNLGIKISNNDIKKLKLDDANDLFDSSNLVFMAQNNISAIKHLGKIIKGIEKEVKSQVQLRKEFVMLTTIPGIGLILGLTIMLEVGDIKRFSKVGNYSSYCRCVSSKKLSNGKKKGENNKKNGNKYLAWAYVEAAHFATRYIPRAQKFYQQKMAKANGAVATKALANKLARASYFIMRDQVPFDEDMLFK

SEQ ID NO: 238012 - protein, 344 aa, unidentified
MTSMNFIGLDIHKKTISYCVKDAAGEVLAEGTILSTRQSLDVWMRTLCEPWTVAMEATMFTGWIYDYLLPHAAAVKVAHPLMLRAIAAAKKKNDRIDACKIADCLRCNFLPECYMASTEIRERRRTLRYRKLLVRQNVQLRNKVSQMLMESGVVYNKQKLHKVGYFKELMTTNPDIGEGLRPLLTICRETIVRIGKTEGALVRSLARDPLLSDRVQRLMTIPAVGPITALTWVLEVDDVARFGSVKQAISYCGLCGAERSSADMVKRMPISKQRNKHLQSVLVEAAKLGPRLSPDLALVYETEKQKGHANRATIAVARKLVAYLLAVDRSGREFVVAGERREAA

SEQ ID NO: 238013 - protein, 426 aa, unidentified
MNCTQNYKIDQVTEQTLVVGIDIAKRTHYACFVDDRGRVLRKSFPIFQSKEGFQQLYKAIQEAMQAFGKSEVIVAVEPTGHYWLNLAYFLEEHGIPLVMVNPAHVCRSKELDDNLPTKHDAKDALVIARLAKDGRFLVPRLLHEIEADLRVGSTLKEKLRKEQTAVKNAIVRWTDRYFPEFWTVFRDLGKTALSVLEWTPLPADMAGRAVEELLEVYRQSEGLKCPQKAKIQALIDAAKDSIGVTEGTTMARFEIAALVRRYRQLEAEIAALDAELKALVQTTMEYQWLKTVDGLGDATIIDLLAEIGSFAHYRDPRQLVKLAGLTLKENSSGQRKGQKHISKRGRKRLRSVLFRAMIPLIRHNEAFRELHEYYTTRSVNPLTGKQSIVALCRKLLNVLFAICTKKQAFDAERMKQDVLSQVQRAA

SEQ ID NO: 238014 - protein, 389 aa, unidentified
MILVGVDIAKQTHYAAARRSDGEPVFPVFGFPNNLEGFELLLSKLKPFSKSEILIGLESTAHYAENLVFFLTKKGYTLAVINPLQTASLRNTGIRKAKTDRIDPGLIIKSLIVNSYRVYTTADIDTQTLKRLCRFRQNLKKSKARLKIQLTAYLDVLFPELQYFFKSGIHIKTCYQLIKVHSNPDDIAALHLTYLSNLLRKASHGRFNKEDAVRLKSLAQSSVGIKDANLSIQIAQTLSQIELIEKQICELESTIASIMLKLDSVIMSIPGIGFMNGAMILGEIGNINRFSSSDKLLAFAGLDPGVNQSGKFAAKETRMSKRGSRLLRYALVNAAWNVSLNDITFKSYYDSKRAQGKDHYNALGHTAHKLVRVIFKLLTENVTFNNQPH

SEQ ID NO: 238015 - protein, 420 aa, unidentified
MKAYNVNDFAALIGIDWADTKHDICQHPNHTEKYQYSIIKSKPEALHEWAMSLKQRYPNQQIAVACELKKGPLIYALAKYNHLTLFTINPSSVANYRKAFTPSNAKDDPSDAFIQVEILTLHMHKLVVIEPESAAIRSLTQLVEYRRNVVQDSVDLSNKITAALKNYYPQVLEWFKEKDTFVFCDFILKWPSLDHAKTARKQTLLDFFTTHNSHYAQVNDARITSIKSAMALTEDIGVIEPNKLLVEVLVAQFKVLLKGIVSLDKVIKEAYKTQPDKVIFDSLPGAGQQLAPRLLVAFGSNRDRYNDASELQKYAGIAPVIERSGKKTWTHWRYSCPTFLRQTFVEWAGFSIRYSFWAKAYYEQQKSKGKPHNSIIRSLAFKWIRIVYRCWKTSKPYDESKYLEALKRRGSPLLKFAINS

SEQ ID NO: 238016 - protein, 325 aa, unidentified
MKQVFIGIDVSATTLDICIKVNDSLSCVVIKNQVKEIKKFLQMYQGEQVRIAMENTGRYNWAFYEALAGFEFTTFVISPLHLKKSMGLVRGKNDKIDAERIVHFLIKNYSELRPWICPDASIQKLKVWITERNHRIKSKKQLSVMSKDYSKMKSLDMDKALIRMNKKLIAELDAQIVAIEKEIELLLKADTKLQEQVKLIRSVPGVGKVLSWEMIAKTNGFTSINTAREMACYSGVAPFEFQSGTSIYRRPKVSHLADKTLKSLLHLGAMSAIRLNNDLGEYYRRKVAEGKNKMCVINAVRNKIIHRVYAVIKNQNMYQNNLVLS

SEQ ID NO: 238017 - protein, 346 aa, unidentified
MPIVGGLDIHRKQITFDYLDTETGQVCRGQVSPADRAHLRAWLARFAGRDDVAFAAEGCTGWRYVAEELAAAGITVHLAEPADTAFARGRKRHAKTDKTDCRHLRTLLAEGRLPECWIPPGHILESRALLETYHDLRREHTAWVQRIHAVLFHQGAPALGEGALRGEQGLAALRAAAAAHLSPAGQLQVATALEVLDALEARLHELRHQLLDAARHLAGAKVLAGRLYGVGPVTALAMTCWLGGEGRFSSSRKAVRFAGLDVTVYSSDRKGSPGRLPRQGPPVLRWALYEAGKTHARSSAPDHRYYAQVKERCNGKRAALSEARKILRQACHILTELGDDALVLAA

SEQ ID NO: 238018 - protein, 313 aa, unidentified
MNEKFAGIDVSKFAFDLNVNGNNKVEHFNNDVKGVKKCSKALVKLAPVLVVIEATGGYEMDLAMGLQQAGLAVSVINPARIRNFAKAAGILAKTDNIDAKAISFFASALQPPTSAMITESTRKLKSLVARRGQLIRMRTAELNRQGHTVDKFVGKSLKATIKLLEKQIESIDEEIKGCINNDPQMNSKAKIVESMPGIGEVTSSMLVTELPELGSLTRRQIASLAGLAPIARDSGTFKGKRMTGGGRGVVRAKLYMPTLVAIQHNPAIREFYQRLLKAGKTKMTAVTACMRKMLTILNVMVAKKEYWKSEFNA

SEQ ID NO: 238019 - protein, 329 aa, unidentified
MADYREAFVGIDVAKLRNAIAVAETGRDGEVRYFGEAEAADANMRRIIQRITTKFDRVHFCYEAGPTGYGLHRLIRALGHECMVVAPSLIPRKPGDRVKTNRRDALALARLLRADELTAVWVPDEGHEAMRDLVRARAAAVETLRVHRQQVSAFMLKHSRIYPRKKGWTMRYLRWLQEQHFDHPAHQIALQEMVDAVRVSKERVERLEKVIEEFIPNWSLGPVVRALQTLRGVDLIVAVTFATEVGDVTRFESPRQLMGYLGLVPGERSTGRPSDEAQSRRQATVGFGTCWLRAPGHIDIRRRSARRSYTAWRKRHRKCARSRGRRRTD

SEQ ID NO: 238020 - protein, 312 aa, unidentified
MNDKKTSVYAGLDIAKASLQLHLQGKSYDLANTTEGHAQLIKRLAAVPGSHVICEATGGYERAGVAALHAAAIPVSVLNPARVRQFARAAGKLAKTDPIDAAMLTAFGQAFTPAPTPQRTATELKMAALVTRRAQLLELRVAETQRADTCADLDLRKLFTPWLAQIKKQIAKVEALVEALLQAQAPLASQVQRLDDIMGVGRLTAVMVLATMPELGTLNRQQAAALAGLCPYNRDSGQWAGKRCITGGRAEVRRALYMAALSASRSNHLLKPFYDRLIAAGKPAKVALTAVMRKLIVLMNHLLKNPNFSLAH

SEQ ID NO: 238021 - protein, 425 aa, unidentified
MKNENRMIDKWRTQHRTNALERRNEMDRTQPCIAIDVSKGNSHVCGFVEALKPHKKVINVHHDQLGFQQIEMLYHHLQVITQKNPVVIFESTGIYHRCLRLFLEEKQFDFIEVSPLLSAKHRKNSAIRSAKTDARDTHALARLFYDVEFQLNQPTNEVYYQLKQLHRYYSALIPLFVKCKVHFNEKLDILFPSFRKDVDNNVYHPSYLNLLKQYPHPKVLSSKRVDVIARILRENGIQKSRVRHMAEKIKSFCKNCYPGTMDSSVDTLIFVKFIEQIQMYQSERERVLLQMIEYGKQFSLYYQLQSIPGIGPALSICLICELGDLSRFEHHKQLLAYAGLDPTIYQSGKISGEGLKISKKGNKHLRRLLFQSITISVNSNFDHPIKTFFQKKKQTRSIKSAYTASCDKLLRIIFRINQTGELYKI

SEQ ID NO: 238022 - protein, 331 aa, unidentified
MLDLREGELVEHFRSPCDRDGLYGLSRRVAVYDEPVRGVIESMNGARFVHDELVRYGWEVLVADAQRVKGLAPLACKTDKVDARVLAELSFRDLVPAIWLPTPELRAERERSRWRLHLVKHRAILKNRVHSSLIAFGHQVPIADLFGVAGRKLLSELDFPEPWRGHVQASLELIDDLERRIGEIERWLRRSGADHRYIPLLMSAPGIGWVTGFTIASEIGDISRFSSPVKLTGYTGLCPHVRQSGEMDRRGPLSKHGPKYLRWGLMEAAIAASSHLLYKERYQRTKRCLGRQRGAKVAQIELARKLTEAIWYMLTRNQPFAPAGATFRLAA

SEQ ID NO: 238023 - protein, 395 aa, unidentified
MSAEGEAIRSNDYRKDTTVKAPSTRPATVLGLDVGKSSHWACLIDRDGEVLASAPVRNREAELDALFASAPAGTLVVVDQFRNIGSLAVRRARAAGLGVAYLPGLAASRAAGLFAGEAKTDERDAAVIARTALGVPDSLSGVPGRGEALEAARALSSQRDHVVACATRDKNRLRAVLLESCPALEAAVDLSDRRWLELLAGFGGAWGIARSGAGGPRAEAAGEAAAASTAPPPALVEAENRQVRFLAARISEALDEAGALEAETAALLEGDETYACLLTVPGIGPRTAAQLAVSVDIGRFPDHDHLASYCGIAPRVRSSGTSVRSVRASRRGDARLKSLLIFSCNSLVRSSGRYGEYYRACRARGMGHGRALKAVARKRLRAIYAVMRDRVPYRE

SEQ ID NO: 238024 - protein, 372 aa, unidentified
MTNHEAFVGFDVHKETIAVAIAKGGAGGDVCGFGTIKNSKQAVALLARKLARTHGKLSFCYEAGPCGYAIYRQLADLGHDCQVVAPSLIPTKPGDHIKTDHRDAVTLARLLRAGELTAVWVPDQAHEAMRDLVRGRIAVMQSVRKARQQLQGFLLRQDLRYPGKSPWTKLHRDWLRSLTFAYPAHHVLVHELLHVIEEGQRRQQRIEQQIQALLPTWSMAPIVRAIQAMRGVSVIAALTLAAEIGDFRRFDNPRQLMAYLGLVPSEFSSGKRVTRGSITKAGSAHARRVLIEGAWAYQQRAGISKIHMQRLTNLPTQIREIAWDAQLRLCARYRRLAAKGKCKNVVTTAIAREMAAFVWAIAREVEPVRIAA

SEQ ID NO: 238025 - protein, 345 aa, unidentified
MARKAKKQHLKIIHPRCAGIDIGSREHWVAVDPERCEDSVRCFTTFTDDLHRLADWLKSQEVEVVAMEATGVYWMPLYEVLDARGFNVQLVNSRATRQVSGRKSDVLDCQWIWQLMSHGLLKGAFRPGEAVCALRSFVRQRAGKVQEQSRCIAHMQKALTQMNLQLDNVVSDLMGKTGTAILRAIVAGERDPQKLAQLRDRRLRADEATVARSLHGNWRKEHLFALTQALAHYDFLNEQIEACDQQIIQTLPTLPTLSNKEAPKPLKPLRSAHRTATQQKAFHQALHAVMGVDLCAIPTLGIDTVLVLAGEIGADLSRFPSEGHFCSWLAVAPPTNISGGKTGIM

SEQ ID NO: 238026 - protein, 294 aa, unidentified
MHLRPSGESFAVARNGDALSNLATRLGQLTPTLIVLEATGGFEITVAASLAGADLPLAVVNPRQIRDFARATGRLAKTDALDAEAIALFAERIRPAPRAVPDADARALAELVARRRQVVDMIGAETKRRRQASAKRLQKRLDAHLAWLQKELSQIERDLDDSVRGSPVWRANEDLLTSVPGIGKTTARTLIATLPELGELTRRQIAALAGVAPLNRDSGTLRGRRMIAGGRAAVRRALYMATLSAARWNQTIAAFYQRLIAAGRPAKLALTACMRKLLTILNAILRDQRPWQNA

SEQ ID NO: 238027 - protein, 372 aa, unidentified
MVYIGTDLHKDSVSVVVCTEDGQVLEKERLACKCVGKIREFFSRPEVHPCLVIVEAVGFYHWFFDLLEPVADRLVLCNPVEVKKYSWDEAKTDFRDARKLALLAAGGEFSRNRHLTCFVPDAVLRSFREITRHRQRLVSHHISFVNSARRIFLKCNLAGPAHLSAPALELFLSRFGERFSDQHRRCLYHICDNLLTLERQIRDTEATIREVLSEDRFQKTREILTSIPGVGDLTAATLIAEIGDYRRFAYPEQLSAYAGIVSRVFRSAETTRYGHITKTGSPYIRRALVQAAWVAVRAPGRPRTVFQRIARRAGTKKAIIALARRMLVWSWFLVNRQQLWHDTCDTGSLTNAAGMTLTVVLSRARDRVNSVA

SEQ ID NO: 238028 - protein, 338 aa, unidentified
MYYTGIDLHKKTSYITTVESIGKIVKKANLMNVENVILGYFMELAGETKIVIESMSSWRWLYDLLSANGLDVSISNPVKTRAIASAKIKNDKLDSHMLAQLLRSGLICSVHVSSLHTRKLKELLRHRDRLVRDATRIKNRIHILLTKNNYQVPFSDLFGVQGLKYLQGIALPDYQRAKADTYLALYEYLVQSIEPLTKTIHALAKEDPMARLLMTIPGIGPIVAMFIMAQMEDISRFPSYRNLASYPGLIPCLDSSAGKDRRGRITKQRSRYLRTALIEAAQVIPRMHTCRLNVFFRKRIVRSGYQKAIVATAHKILQYAHYVLKNQTPYQEHYPVCA

SEQ ID NO: 238029 - protein, 317 aa, unidentified
MHSETIFVGIDVSKDQLDIAIRPGEARFRESNNDSGIQALIVRLLSCEPRLILLEATGGYEILAAASLRQAGLPAHVINPRQVRDFARSSGKLAKTDKIDAAILAHFAEALKPDLRPWPDEQQQELAALMSRRRQLVEMLVMEKNRLSMTCSPRVRKSLQTNLQSLKEQLQELEQDLDDFIRHSPVWLEKAQLLQSVPGIGPLTCQSLLAWVPELGTLNRKKIAALVGLAPFNRDSGQMRGKRTIWGGRARVRPPLYMATLTACRVNPVIRAFYLRLVAAGKSKKVALTACMRKLLIILNAILKQQQPWCPHVPVNL

SEQ ID NO: 238030 - protein, 374 aa, unidentified
METIYIGVDFHARQQTICYLKTETGELVICELKHQDKQAVRAFYAEFRGQVIVGLEASGYSPWFERMLEELGCEVWLGHATEIRRRARWRQKNDRRDAELILDLMLHDEFPRLHRPAVQSREVLRMLRYRQKLIKIRTMSKNSLQALALQSGLAKGSRLFTQAGQQELSAAVMSPVMHWQREHWLQLMQPVNQQLLETMAWFKEQSKGDVCIKRLRTHPGIGLLTSLCIVHTLQPVSRFRNPRKVAAYAGFDPVERSSAERKCFLGISKAGSRVLRFLLVEAAHTAIRKDEDLKRFYKRLAERRGRPKAKVAAARKLLIRAYIMLRDEIDYAEFRRRAVAARLARRSQGPNVPEVLIGQPASADHRDELTSENQ

SEQ ID NO: 238031 - protein, 386 aa, unidentified
MPQLNDLSRSLVILEQDATLIAVIEMGQSNWLVAGIVPGVERSPLKKLAVDESALLKLLNRWREEAEKAGHRIERIAIAFEAGRDGFWLARWLRARGIEAHVIHASSVAVSREHRRAKTDRLDTELLKRAFLGWLRGERGHCKMVAIPTLAQEDAKRPNRERESLVGEQSRIVNRMKAALARLGIRGFNPKLKKAVERLDGLRTPEGEPIPPNTLAELKHDMERRRLVRSQIRDIEGTRLERLKQAPGDGPHVMVRLLARVIGVGVETADMLVQEVLSRNLRDRRAVARYGGLTGSPDESGKKRREKGLARSGNARVRRGMIQLAWRFLMFQKGSALAHWFYARTKNAPQTRKTMIVALARKLLIALWRLAREGAIPEGIVLRPAL

SEQ ID NO: 238032 - protein, 361 aa, unidentified
MNATTVAVDLAKSVFQLAVADEHWRIVETQRLTRTQFERWFANRDVRLVIMEACGSAHHWGRWLNGLGVEVRLLPAQYIRAYVKRNKTDAADAAALLEAARASDIRPVRVKSVEQQALQGMHRIRSLWMGTRTSRINALRGFCREFGIAIPVGARNGIEAISRVLADPGTAVPDLIRGTAKLLLEEIRLLEARIAQLERELAALARLSPACTTLLSIPGIGLLTATALVAATSGDVSHFKDARHFSSWFGLTPKEYSSGNSRYLGHISKKGDRYLRMLLTHGARSVLRAAKVAEGAGKQVCGVRRWALDVQGRSNHNKAACALANKLARICYATLRDKEPFGEQTVRLGKKINRESFVMPA

SEQ ID NO: 238033 - protein, 433 aa, unidentified
MGLIVPTTIHPEQEDQPLPYEWFVGIDWGSQQHQVSVLDRDRRRVGERVVDHDGASLARLADWLWTLSAGQPQRVAVAIEVPRGAIVEGLLERGFHLFALHPKQLDRCRDRHSVAGAKDDRRDAFVLADSLRTDQPSFRRLQLEAPQFLLLRELSRAEETLLAEFRRSANRFREQLHRFYPQMLQLCAAADAPWLWDLITLAPTPAHAMLLSEEQVQRVLKAHRIRRLKATEVLACLQAPALPVAPGTADAAQAHCGFLLPCLRVLAEQLLACSQQVSTLLRTLADEPGKGEGPSDVAMVQSLPGVGRKITAWLCAEATQPLAERDYQMLRTHGGVAPVTKQSGKRRQVVMRHGCNPRLRHALYHMARIAMQRDAHFGSVYAALRAKGQRHGQALRNIGDRLLRILMAMLRDRTGYDASRIRCKPVVEMGQKM

SEQ ID NO: 238034 - protein, 408 aa, unidentified
MRIIGLDIHRAFAEAVAWKDGKLSRMGRVIMRRDSLEAFAKQLSEDDVVVIEATGNAASVAAVIGPHLSRVVIANPKQVRLIAHAKIKTDTIDASVLAQLYASGFLPEVWIADEATQALRRQVTRRHQIVRQRSRLKNIIQSILHAHLIPSCPHQDLCGPAGRAWLSEQILPGDERLAVERHLREFDRLGDDLKVIERDLARSALADESVRRLMTIPGIDMVVALALKAAIGDVERFAGPEKLVGYLGLNPSVRQSGPGPAYHGRITKQGRGHARGMLVEAGWAAARSPGPLRSFFLRVQTRRGQHVAAVATARKLAILIWHLLTKGESYLWARPALHARKLRNLELKAGHQGARGQKGTAHAYNIKSQRDQERRWVEQAEAAYARFVAGWNPSGPKARTGAAKEERR

SEQ ID NO: 238035 - protein, 391 aa, unidentified
MIYVGIDVAKDKHDCFITNSDGKALFPVFTIQNNRDGFDDLFFRIQSVSPDMSKIKVGLEATGHYSYNLLGYLIDKGLTTFVINPLHTNLYRKSLSLRKTKTDKVDARTIAIMLMSDVNLKSYSDTSYHNEELKSLTRYRFDKVQERAQLKQSVSRLVTILFPELEKLVPTLHIASVYSLLSELPSAGKIASCHLTHLTKLLENASKGRYSREKAIEIREAARTSIGSNMPAKSLELRHTLKLIGELDSEISEIESEIKRIMDQISSPILTIPGIGYRMGAMILAEIGDFSRFDSPDKILAYAGASPSTYQSGQLESSYSHMEKRGSRYLRFALINAAKYVCHWDETFGTYLQKKISEGKHYNVAITHATKKLVRLIYAMEKSGKPYIKTA

SEQ ID NO: 238036 - protein, 353 aa, unidentified
MNDIPSIAWLGLDAHSKNCVLGHLDDHGTELKSWQFATQPRLLLQHVQNIPAADKRLMLEESNLARWIGQLLKPHVQQLVVCDARRNRLISHDHHKHDRRDAFALARLLRLNEFKPVWQPAEPQRVLFKRIAKSYENAVQRQTRLKLQLKSLFQHWGLFPAGATVFSKSGRAAWLMQLPHDTLRAQARLLYQLLDQALDAQSQFRRLMCQTGRQFPEIQRLRSTPGVGLVGAHLFVAYVQDPKRFGKFSRLSRYCRLGIRDRTSDDKPLGYEQLDRQGIGSLKAISYRAYLQAAKRRTGPVWDFYQLSLRRTGSTTHARLNTQRKILLCLWTLWLTGRVFDPKEFFRSQPIDV

SEQ ID NO: 238037 - protein, 411 aa, unidentified
MLKIVYPICCGMDVHKSFVVACIASTNDHGVTTYKSRRFSTFTGDLRRCAAWLAENNCKDVCMESTGKYWIPIYNVLEHTCNIVLAHPKYVKAIRGKKTDKRDAKWIADIFKHDLVSGSFIPPADIRQLRDLVRYHWKLTNFNVGEKNRAQNCLTVSNIKLDDVFSDVFGKAASAITTRLLESNEPFDVKPYLTKNIKKPIEQIQAAVDGEMCAEQAEKLRIIRSHMDSLELCKLNLESLILSTAEKYIPQLNLVMTAPGIQSFAAIGIISEIGVDMSVFPTSKHLCSWAGLTPQNNESAGKKKTTRISRAGAYIKPLLVQCALCAIRAKRFPEVRNRYLGLKKRRGHKKAIVAIARMLLTAIYNILKKNEPYNAELYRCCNTPPEHRAVSVEEAIFILQRQGYLVTPSAT

SEQ ID NO: 238038 - protein, 349 aa, unidentified
MSEPYAGRQIVGIDLHRRRSVLVRMTEAGERLETVRISNDPEYLREVMTRAGEAPEVVLEACYGWYWAADTLAELGATVHLAHPLGVKMFSYRRLKNDERDAADLADLLRMGRLPEAWIAPPATRELRGWVRHRAKLVGLRSNLKCQVHGILANAGITVPMSDLFGASGQRLLATADLATESRSRIDSLQRMITALDFEVELFAKLVAGRLRTHPGYQAIQLIPGVGPILAAVFVAEIGDITRFRRPEQLASWAGLTPKHHESDTTVHRGRITKQGSRLVRWAAIEAVQRLPGHTRIGQVRDRVAGRRGRNIGVVAAARELIELVFYGLRDHRVHALAVHSPARTPLPA

SEQ ID NO: 238039 - protein, 348 aa, unidentified
MIIIGVDFHPEFQQIASVDTDSGEYQEKRLAHREDAETFYRALAGQKVRVGMEASGHARWFERLVAELQFELRIGDAAEIRTKRVRKQKTDRQDAQLILRLLLEDRFPQIWVPSWENRDLRQLLWHRHRLVQARTRMMNQLQAVALNEGLRCKKRLWRERGRQQLESFLLAPWASRRRRDLLELLDRLNPTIAELSQAVEQEVQKCPEAQRLRTHPGVGALTALAFVLIIGRAERFGSGKQVASYLGLVPVEESSGNRRRLGHITKQGSSMLRFLLVEAAQVTVRSVPEWRSQYFHLAMRRGRKIAKVAMARRLAVRLYWMMRQGRGYEQVKKFGSHAGQPGHRDGVQ

SEQ ID NO: 238040 - protein, 385 aa, unidentified
MGSQAFIARDYDVFGGLDVDKKSISVTFTDHQGLLKSMRMPYSVDHLVNHVRKHYGDKKVAFAYEAGPTGYGLYDGLVAQQYPCLIASPSMIPKAPGQRVKTNRLDSLGLAENLRGGQLKSIHVPTTLYRELRHLTQLRDALVSEVVAMKQRIKSLLLMEGLEFPPAPPGSQWSFLVKAKLRKLPCSSVVRFKLDQLLDNLEFGEKQVLKVTREIRRFCQNDPELSQCIDYLKSLPGIGWIVASQMMARIGDWRQIKNIRELPAFLGLVPTESSTGERTTRGSITHSGDPRLRSKLIQASWSAIRQDGELLKFFRTVAKKHPRHLGPRVAIVAVAHKLCVRAAVVLMQQRPYEIREKVQSAPLTQEETVPQGTTRRRRVPGEKIS

SEQ ID NO: 238041 - protein, 418 aa, unidentified
MRKRWEPATEIQYRRKKMNAVGIDVSKGRSTVAIMRPLGEVVALPFDVNHTDSELSELAKRLKSLSGEVKVVMECTGSYYLPIAYALRNAGLTVCAVNAQLIHSFGNNTIRNIKTDKADAAKIANYALTYWAKLPEYIPEDDVRHMLKAFSRQYNKYTKIKTMLKNNLISLLDQTFPGVNELFKSVPRKSDGHEKWVDFAAHFWHCKCVCDLSQKTFATAYRKWCKQNGYMFNQAKAENIYMEAAGHVNVMPKNDTTKLLINHAVAQIRVISETLAAIAREMKHLAASLPEYSIVTAFSGVGEILGPQLMAEIGDVHRYPKKSSLVRFAGLEPVENRSGKFRRDEKISKQGSPHLRKTLFQVMDCLLKNAPRHDSIFQFLDRKRAEGKHYYCYMNAGAAKFLRVYFARVTQFLDNYFM

SEQ ID NO: 238042 - protein, 372 aa, unidentified
MNYNTVYVGMDVHKESFTLCSCKYEDEKASHYQRTPASYKNVLRYLAFLRTIYGEDTRFVCGYEAGCLGYSLYHQLENFNVECVILAPTTMLEQRSKRRIKTDKRDAEIIAKSLAQHNYSPVHIPTETDNQTKEFIRMHDDHKAELKKIKQQILAFCLRQGYQYDGSGNWTAKHVKWLRSLKTEGLYKEILDEYLLTYTILTDKLNRLDQRIEELASEEEYKEPVSKLTCFLGIKTHTALSVIVEVGDFQRFASARKFAGYLGLVPGQHSSGDDRNGLGITKAGNTHVRRLLVESAQSYTRGKIGYKSRVLRSRQAGNSPQIINYADRANERLRRRYYQMILKDGKKYNIAKIAVARELACFIWGMMTDNIY

SEQ ID NO: 238043 - protein, 314 aa, unidentified
MQTSFIGVDVSKSQLVISVDDQPPLSVANDMAHITHWLAAMPRDCCIAMESTGRYHLLLAQLASQAGLVVYVLNARDVYFYAKALGARAKSDALDCAVIRRYVQEHYQSLYPWQPSTELQQQLHALLRRRAQVSAHQAAIKQTLKDISLPGQQLASLMQSLKDLLEAMDRQVIDLIAKDDVMQQGCTRLQTITGIGPQTGALLTELLSRLHFTNSDALVAYSGLDPRANDSGTKRGRRRLSKRGPALLRRQMYLAAFAASHSKALKPVYAHIRAKGFSTTESLVILARKLLRVAFAIWRGQTAFNPEQLLPKVA

SEQ ID NO: 238044 - protein, 341 aa, unidentified
MQITTIGLDIAKNVFQVHGIDATEKVVVRKQLRRGQLIKFFEALAPCLIGMEACATAHYWARELTKLGHDVRLMPAKDVKAYVKRNKNDAADAEAICEAVRRPTMRFVMVKSAEQQGRLMQHRARDLLMRQRTQLINALRAHLAELGIAAAQGREGVKELLAIVAQNGDSRLPVDAHASLIVLAAQLQAVQTMIGSIEKRVVGQHRSNEESKRLETIPGIGVIGATAIAATVPDPKVFRSGRDFAAWIGIVPREDSTGGKQKLGPISKRGDQYLRRILVVGACSVLRRARQQPAKYPWLTQLLARRPFKVVAVALANKMARVAWALLAKGGTYRAPQLKAA

SEQ ID NO: 238045 - protein, 310 aa, unidentified
MEQIFVGIDVAKDRLDVHVRPTGEAFAVARDGEGLAALVDRLRALSPRLVVSEATGGFEQVVAGALGAAGLPIVVVNPRQIRDFARALGRLAKTDRIDAETIAIFAERVQPELRPLPDAQARLLGELIARRRQVIEMIVAEGNRARLLESRRLKKRIERHRSALQDELSEIDGELDETIRGTPIWCENENLLKSVPGVGNGLARTLLAELPELGSLDRKQIAALVGLAPFNRDSGSLRGKRTIWGGRATIRTSLYMAALVASRCNPVIARFYRRLLAAGKPKKLALTACMRKLLIILNAIIRDQQPWKAA

SEQ ID NO: 238046 - protein, 322 aa, unidentified
MKTTADKITPVTTVSPAYAGIDIGKASLDVSLAGQPPCRYANDPAGRAALLTALKKLPQPLPVICEPTGGYERDLLAALWAANLAVSLVHAARVRAFARAQGRLAKTDPIDAVVLRQFGEVFTPAPLAAPAVERERLAALVQRREQVVDLLAMEDQRLAQSRDKAVLKLGQHLRKTLVKQLEELDRLIAAQIADDATLHRQSERLQEVKGIGPVTAATLLAAMPELGTLSRGEAAALSGLAPYDHDSGAHKGRRTIHGGRKQVRRVLYMAALVAARYNPILKAVYDRLVADGKAKKLALIALMRKLIVLLNHLLKNPNFKLA

SEQ ID NO: 238047 - protein, 427 aa, unidentified
MLGIGIDWAEQFHDIALGTQEKGVIEQFRIPHGPDGVTALVERALRLEPDPAEVRVVIETRHGLLVEALVDAGFTVLPVNPDLVARRRGPARKKDDAEDARICCLIALDRHAVLKTLIPHGEIGGELRAIGRDDERAARDQRRLLNRLRADLQTTYPAALVVAGKDLGAPTVLRLLQRWPTQAELAAASRAELVAFARAGRHGWPDRFADRVADALAAPSLPTRDYLVRAKAAGIRLAAVQLLALHEARHGWEQRMGELLLGGRRTGRAHTGRDHSVEDPDPGKTFPGGDIYLSFPGLGDRLAARVAGEIGEHINAFDSPNGLQCYAGQAPVTRRSGKHDFVVSRRLAHNRYLGDAVHQWAFCSISRSGWAREFYEAKIAAKKSHHNALRALGNRWLEILWHCLTRGVLYDENVHVANRNRALGRAA

SEQ ID NO: 238048 - protein, 343 aa, unidentified
MQAVTTIGLDIAKSVFQVHGVDADGKVTIRRKLKRRYVAAFFQKLPPCLVGIEACASSHHWSRELKALGHTVRLMPPAYVKPYVKRQKNDAADAEAICEAVTRANMRFVETKTPEQQSCLMLHRTRHLFIRQQTAVINAIRAHLAEFGVVAPVGRNGVEALLDVVADSSDKRVPEIARACLVALGAHLRVLKTQILEFDRLIMAWHRSNETSKRLDEIPGVGPALATALVASVGDARAFRSGRDFSAWIGLVPKQNSSGGKEKLGSISKRGDRYLRSLFTAGALAVIRYAKLHGTEHRPWLTALLARRPTKVAAIALANKIARMAWAMMAKGERYKEPVALAR

SEQ ID NO: 238049 - protein, 382 aa, unidentified
MITMTRTSESTAPTGGLLLAFELGQRSWKLGFTVGMGQRPRIRQMPAGAVSALVTEIERAKKRFGLSFDTPVTSCYEAGRDGFWLHRYLVAYGITNYVVDSSSIEVNRRARRAKTDRLDLAGLLSLLARYVLGDRRAWRVVRVPTVAEEDARHLPRTLEALTQDRSRLMSRLKSLLTTQGVSLPIDGQFLKQLKAAHLWDGTPLPPGLHERLTRTWTQLRDVNGQIRDLKALRLTRPENLTPATSRVLAQLLTMRAIGPIGASVLATEIFGWRRIRNRRELGALVGLVPAPYQSGETDYDQGITRAGNAHVRRVIVQLAWGWIRHQPDSALTHWYQQRFGAGGKRLRKIGIVALARKLLIALWRYLETGAVPDGAQLKPMEV

SEQ ID NO: 238050 - protein, 310 aa, unidentified
MDIIAVGIDVSKDRLDVAFRPSGETFAVERNASGLDRLIERLRQLSPSIVALEATGGFETIAAAALAAAGLPVVIVNPAQIRAFAKAVGQHAKTDPIDAGVIAHFAEATRPEPRPLADEATRLLGDLIARRRQIVEMMAAEGQRERRVTNKRLKKSIVRLRKVLEKELAELDGEIDDSVRGSPAWREKEDLLASVPGIGPIIARTLIAELPELGTLSRKQIAALAGLAPFTRQSGQWRGRSFIGGGRSVVRTALFMGALVAMRHNPVLKDFFNRLRAAGKPKMVAIIAVARKLLTILNAILRERRPWQIA

SEQ ID NO: 238051 - protein, 373 aa, unidentified
MANIQDGFAKCKPVYVGIDVHKRDWVVTVLCQGEELYHATVVPDPAGLVRLLKRFEASEVHTVYEAGPTGYWLHEALAEAGFDSIVTPPSLVPHVGGRVKTDRRDSRKLAAMLAGGFLRRVYVLAPEERAHRQLLRTRNQIEQHRRKAQNQIKSLLLFHGKRAPATLKERWSETHVHWMETTEWEYPSLKISLNAMLTMYRNLTEQYKDLTHEIELLALTEKYRERARLLTQIPGIGMFTAMAILIELQDIERFARADQLASFLGLTPSQHSSGERIRMGHITRCGNYHVRTRLVESSWTLIRYDAGAKAMYERIKHQTGSGRKAITAIARRLALRIRRVLLDKAPYRLSDGGRLATGRDKTREAKRFVLRPL

SEQ ID NO: 238052 - protein, 427 aa, unidentified
MRQAFVTWMPAAGAAGAGAVIERESTSVSDLSDIAVYLGLDVGKGEHHAVGLTPAGKKVHDRALPNSEPKLRELLDKLTAKHGQILVVVDQPASIGALPLTVARDAGCLVAYLPGLSMRRVADLYPGQAKTDARDAFIIADAARTMPHLLRDLKTDDETIAAPAMILGFDDDLAAEATRTVNRIRGLLTAIHPSLERAIGPKLAHPAVLDLLTRHGTPGQIQAARIGQITAALRERAPRMATRLATEIFDALAEQTVVVPGTDAAKIIIPGLATSLKTTLDQRKRLEAEIEDLLEAHPLSPVLTSMPGIGVRTAARILAEAGDATAFASAAHLASYAGLAPVTRRSGTSIRGEHPNRSGNKQLKRAFFLAAFAALRDPTSRAYYDRKINEGKRHNQALICLARRRCDVLYAMLKNGTFYEPQPTHTA

SEQ ID NO: 238053 - protein, 309 aa, unidentified
MKEEVVYCGVDVAKAYLDAAIGKQKRRLPNDAMGHRQLITWIKQIEAQVQVICEPSGGYERGLIRALVGAQIKVSLVQANRVRQFARAAGILAKTDSIDAEVLCAFGEAMRPQILTASKVQQGQLRELESQRRHLSRLLVMEQNRGARLSDSSVRRLNRSLSKQIQKQIERIDLLINEHIAGSQELSAKAHKLTAICGVGPRTAALLLAQMPELGQLNRREVAALVGVAPFNRDSGKLRGKRTIFGGRRHVRHGLYMAALVAARHNPILRAFYRRLRATGKPAKLALTATMRKLLIVLNSALKPDPAYA

SEQ ID NO: 238054 - protein, 445 aa, unidentified
MHLNAAGIDGGATEHWVAVPEDRDEEPVRRFGAFTADLYVLAEWLRPCQIETVVMESTGVYGIALFEVLEERGFDVKLVDAHYARQVPGRKTDVKDCQWLQELPTYGLRRGAFRPEDQLCVLRSSLRQRRMLVAMASRAVQPMQQALEQMNLQLPEVVSDINGKTGMEILHAILAGERAPQRLASHRDRRCKHDQATIAKALEGHWRAEHRFALQQALEPYEFLQQQLRACETQIEGCLQTFVTHVEVAPPQPTPARQRRARPRQAPRFDVHGYLDAMTGVALTQIDGMDALTALKVISEIGLDMTRWPTSKHFASWLGLCPGNKLSGGKRYRMRSQPTANRAASALRLGAQGLVNSPSALGASYRRLRARLGAPKAMTATAHKLARLVDSMLRYGTAYVDAGQQAYEQKYRDRVLTNLQRKARVFGYQLVHVADPGSAQAAATL

SEQ ID NO: 238055 - protein, 306 aa, unidentified
MNQTLYIGVDVAKSRLDFDQPGLAQVANTAEAIEQALGVLPERAHLVCESSGGYEAGLVAAALAAGVPVSVVAPQRVRHHARSKGRLAKTDRIDAELLSEYGRIHQLKPHEALEPERRQLRDLLRARAQLIELQKMEASWLEHPSEVEVVRRQAADRQAWLEKQLRELTEQIRTLVKAMPRRAELDRLQQVQGVGEVTAWTAWAEMPELGRLEPGQPAALAGLAPHPHDSGQHRGKRYIQQGRPQIRRVLYMAAISASQHNPVLKRFYQALRARGKPAKLALIAVARRLIELLNLLLKNPNFKLVG

SEQ ID NO: 238056 - protein, 404 aa, unidentified
MSVHVAPVTSSTIVVAVDVGKTSAVLSVTDAARHRLLAPSEFAMTGSGLTAAAARAMAVAPAAVQVKVGVEAAGHYHRPVLDHQWPDGWEVLELNPAQVAEQRRVQGRRRIKTDVIDLEAITELVLAGYGRPVTDRDVVIGEISAWAVHRSRRVATRTATKNQLLGQLDRAFPGLTLALPDVLATKIGRLMAAEFTDPARLAGLGVNRLIRFAATRDLQLRRPVAERLVAAAHDALPTRDAVIARRILAADLVLLGDLDDQIQSAETALGSLLPRSPYATLTSVPGWAVVRASNYAAALGDPKRWPGPQQIYRASGLSPMQYESAHKRRDGGISREGSVALRRALIDLGIGLWLNEPAAKNYAQGLKDRGKPGGIVACALAHRANRIAHALVRDHATYEAARWA

SEQ ID NO: 238057 - protein, 345 aa, unidentified
MKPLTHYYVGIDIGSETFACSILINPDSDVYSQDELLNTPSGFEELEEWLAQHKVSPKNSIICLEATGVYGESLCYWLYSKGYSVALEPPQKVKRAFKIKGHKNDQIDSKQIAQYAYRFFDELNLWKPRKEIIEQIAVLLATREQFVGQRTACTNAAKALKRKVVQTPLANKLYEKNIEHLNQAIENIEKEIDNLIAKEPEYRQMVAWLSSIPSVALLLASNMLVMTDGFTKSENIEYRPLAAHIGICPYQHKSGISIHGKTAASGHGPARARKLLYLAARTLRTHHPQFKEYFLRKRAEGKDSRLVLNNISNKLLKIMCAVIKNRKPYIKNYMSINPQFIQKRA

SEQ ID NO: 238058 - protein, 431 aa, unidentified
METRTNLNEVGKKKLVLGIDVALKNHWAAIGDNKGQEMVKPFQFSNNAEGMSLLEGMIKQTGRAEDKGDVIIGMEPTGIYWKPMGHYLREAGYRVVLINPSHTHKTKELEDNSQTKNDRKDSRVIQTLTREGKYLEPIILRGIYGELRRLGQAYKSALKRGNVISNKVKMIADEYFPEMRGIIKSINGKTAKGLLAEIPFPDDIIRLGKTKFYKKLKKWSNKRFGKKKSLKLWEAAKKSIGVKVGQEAAKIELRQLVEEMELVKRHREELVKEIEEKAKVTEEGKSLIKLPGLGYLSIGKLIGETGSIKSYKGARSLEKLAGLNLIESSSGERHSGKKISKRGRKLMRTTLYQMALASIKNNRAIKYEYQYRIKTKKQKKMKALTAVACKMLRVIYALVSANKEYDERKISRHYYESEIKREENICEWVTP

SEQ ID NO: 238059 - protein, 491 aa, unidentified
MKMLYSRCAGLDVHKKSVCACIRMSQGQQTSQEMRTFGTFTEDLEGLRDWLREHQVRHVAMESTGVFWIPVWNVLEQCETKFALTLINPQHVHALPGHKTDRKDGQRIAELLQYGLLKGSFIPPPPIRELRDLSRRRTHLQGDRNRVINRIRRLLETANIKLGSVVSDITGKTASLILGEICRGNCTPEELVKLAQASLKNKRAELISSLKGFYSEHFRWLLTEAVQDLAHLDRKLQPLDRQLAQRLLAHTDLIHRLCTIPGIDFTTAAVIVAEIGLDMSRFPDAAHLVSWAGVCPGNNESAGKRFSGCMRKGNRYLRRVLTQSAWSITHKKDCFLTSLFWRVAARGGRKKAAMAVANRILTIAWHIINNNGMRYREIGGDHHDRLHPQRSARRLMRRLEQIGFEVSVKPKSAEPTPVPEFVTPSPSTVGRRSHRSRAAIPASSTSHKTPEVTPADPTICRRCARWGIACIHVRNAGRSSPAVMQPTESVT

SEQ ID NO: 238060 - protein, 346 aa, unidentified
MLYTAFDVHKHYTWARVERPDGTVVREKRIAHEPGAFRQFLAGSEPGSPVAVEAIGNWYWVGDEVEAAGCTLQLVHAYKAKLMLGRVNKTDKLDAQGLVRLQRAGTLPVVWIPPRALRDMRELPRARMVLVAQRTRLKNRIHATFSKYGIPLPQVADLFGKRGRQGLQARVGELPSHTGFVVSRLLAQVESLDREIAAFEQRTGALFEVDDTIRLLLTLPGVGFILAVVIGTEIGDVSRFSRAEQLASYAGTTPRVHESGGRRHYGPVRSDVNHYLKWAFVEAANGVCRNRGRHPQRHTSQLYDRVAKRKGYQKAIVAVARHLAEATYWMLTKGEAYRESGSSKGA

SEQ ID NO: 238061 - protein, 320 aa, unidentified
MPASCGVGIDVAKDTLDVAWSTESEARWRTTNDEAGWVALIERLRALQPTVIVLEATGGYETGVASALSVAGLPVAVVNPRHVRDLAKALGRLEKTDALDAGILSEFAVRIAPVPRPLADDALADLQALVTRRRQLVDMLAAERNRVPLERGAVRKNLRAHIAWLENQVRHTDRDLRRRIEASPIWRVRDRLLQSVPGIGPTTAASLLAGLPELGTLSHREISKLVGVAPLPDDSGTRVGYRRIQGGRADVRRALYMATVTATLHNPTIAVAYHRWRAAGKLPKVALIAAMHKLLIHLNAMLKDQTTWQPTPGPPSTTPS

SEQ ID NO: 238062 - protein, 353 aa, unidentified
MIIIGVDFHPEFQQIASVDTETGEFQENRLAHREDAETFYRALAGQKVRVGMEASGHARWFERLLAELQFELWIGDAAEIQSKRVRKQKTDRQDAQLILRLMLKDDFPRIWVPSWENRDLRQLLWHRHRMVQMRTRIMNQLQALALNEGLRCRKRLWREHGRQQLESFRLAPWASRRRRDLLELLDRLNPTIAELSQAIEQEAEKYPEAQRLMTHPGVGPLTALAFVLIIGKAERFQCGKQIASYLGLVPLEKSSGNRRRLGHITKQGSSMVRFLLVEAAQVTVRSLPEWRKKYAHLMMRRGRKIAKVAMARRLAVALYWMWRKGWNYEPSKSSVRTRASSEQAMVCSKTPSN

SEQ ID NO: 238063 - protein, 418 aa, unidentified
MKKDISKTTKTQKQGNGKRKQLRETKRNVAGLEIAKKRMAKRKAKQNEVEQEVKAEAEAAAKFKAGEGEGYTIGIDIGDKRSRYCILDKEGKILRESSVATLPAGLKTVFSKLAGCRMAMEVGTHSPWMSRLLTALGHEVIVANAREVPLIYKSRRKNDKLDAEKLARLARMDPKLLKGIRHRGAEGQGDLLLIRSRAQLVETRTGLMNMVRGLVKSRGERLPGCTSEGFVVELLEGVDEAAVRALKPVMVLIEQMTEAIKGYDQQVEEMGKKHAEIARLAQVKGVGPLIAATYVLTIEDPERFGRSRDVGGYLGLVPGQSDSGESQPQKRITKAGDGYLRYLLVQGAHYILGPNGPDTDLRRWGQKLGSSGGDRGKKRAVVAVARKLAILLLVLWKTGAKYEPLRNSDKQEKQKVAA

SEQ ID NO: 238064 - protein, 354 aa, unidentified
MNAAGIDVSSRKSTVAVLRPFGEVVRLPFDVAHNTEGLASLAEQLKSLDGETRVVLEHTGRYYEPVAKALHEAGLYVSAVNPLLIKEYGANSLRRVKTDKADAVKIARYALDNWTDLRDYTPMDTIRYDLKTLNRQFQLASKQRTACSNNLIALLEQSFPGIRKCFDSPVRSDGTQKWVDFAHTFWHVDCVRKQSFNAFSERYRKWCKRHGYFFKQSNAEEVYALAKNAVVLVPKSEVTKVLVQEAANQLTSISRSVETYRTEMERLASMLPEYPVVMEMYGVGKSFGPQLMAEIGDVRRFERKQALVAFAGIDPMPNQSGDKNVRSNKASKRGSPYLRKTLFNVMGIYLKCAP

SEQ ID NO: 238065 - protein, 347 aa, unidentified
MAMTIVETRAITGGVDTHAGTHVAAALDPIGGLLGVQEFPATAAGYASLLGWLGGFGTVALVGIEGTGSYGAGLARHVTAAGIRVVEVDRSDRQERRRQGKSDPLDAVSAARAAQSGRARGAPKGRDGAVEAIRALMVAKRSARAERVQTINQARALVLTGPDDLRTRFARHAAAGLVSGLASLRPRPGDVVGYATRVALRELGRRAEFLDGQLARLDELIAPLVAARAPALLALHGVGPDTAALLLIAAGDHPERLRSEAAWAHLCAAAPIQASSGKVTRHRLNPGGDRQANHALWRIVLTRMSAHPPTLIYVERRTKEGLSKKEIIRCLKRYVAREVYHHLRAAG

SEQ ID NO: 238066 - protein, 341 aa, unidentified
MEATQIVGIDIGKRAFHVHGIGMHGCKTLQKQLTRSQLRRLLATHPACTVAMEACGSAHHWARLARASGHEVRMISPQYVKPFVKTNQNDRNDAEAICESAVRPSMRFVPPKSVEQQDVFMMHRIRQRRVQRRTALSNQIRGLLLEYGVSIPVGVCRLRRQIPTILEDASNELSDLARELLAELRYELLALEDQIRSIDRRIDIVFRRSERCQRLAQIPGVGPLTATALEAAVGNGSEFGNGRHMAAWLGLVPRQFSTGGRNQLYGISKRGDRYIRTLLIHGARSAMLVMRRNGDPRKPWVDALKARSCHNVASVALANKVARVAWAMLASGESYRPSLVN

SEQ ID NO: 238067 - protein, 411 aa, unidentified
MEVIHARCAGLDISKKDAKVCVRVAGAGRRKTVETVTTWGSMTSQILALREHLIAERITCAVMEATGDYWKPFYYLLEGAGFEVLLVNARHVKNLPGRKTDVADATWLAQLGAHGLVRGSLVPPEPIRQLRDLTRARTAITRERSREVQRLEKLLEDAGIKLSAVASDILGVSGRAMLESLIAGNRDPAALADLAKRRLRLKIPALTEALTGRFTDHHAFLARVHLDLIDQHTAAVADITARIEATIKPFHWFRDLICTIPGISTLTADVIIAETGADMTRFPTAGHLASWAGTTPGNNESAGKVKSSRTRPGNPYLQGALGAAAMACAQNPVTYLGARYRRIAARRGPQKANVAIQHSMLIATWHMATNGCLYHDPGADYFNQLHPERAAKRAISQLEAMGYHVTLTRAS

SEQ ID NO: 238068 - protein, 405 aa, unidentified
MKQSRTNGRDLEGSGALQLNNNEQTNTPMKKELYLGLDVHKDCIITAVAEEGRKGEVRDTGVISNDLHALEKWVGRLRKAHGRDVILRACYEAGPCGFGIARRLKQLGVECEVVAPSMTPKRTGDRVKTDKRDARKLARLLRAGELTPVYIPEATDEAIRDLCRARTDAVDDRRRSRHRLKGFLLRHGYRYQGKSSWSAAHERYLRELVLPHPAMKVILEEYLQGIAAAGERIARCEVGMRALLEQWRLAPAVRALMALKGFQTVAAMIVVSELGEVDRFAHPRQVMAYLGLVPTENTSNDKRRQGRITKCGNAHARWLLVECAQHYATPPKVSQHLSRRQQGQPAQVRAISWRAQNRLHSRYTRLLGRRLQRNKAMVAIARELCGFIWELLHTQSCYHVQATSV

SEQ ID NO: 238069 - protein, 368 aa, unidentified
MNQYTHVGLDVHQDSITAAILEGKSREVEVVRLPGDLMKVRRLFRRLSKKGPVRACYEASGAGFVLQRVLAGDGFHCEVIAPSLIPRKPGDRRKTDRLDAVNLVRLYRSGHLTPVHVPSVEQEALRRLIRLRYEYVCYTTATKHRISGMLRNHGFVYREGKSTWTKTHRRWLARLRDQLDGAMRTALAAELEHLEYLEMQRGVLDDEITRYAQAPPYRSHVEALCCLRGIKMLTAMTLLSEIGDIRRFPSPTALMAYFGLVPSERSSGDYQRRGPITKAGNTHCRRVLVEAAWNNRHRGGADLVLNRRRQGQPPDVVAIALKAQHRLYKKFWRLDHRKHRHVAITAVARELCGFVWAILNAAPRFTTN

SEQ ID NO: 238070 - protein, 355 aa, unidentified
MVQSKQLDFSGQKIFCGIDVHKKSWKVCIRSEHMELKTFSQNPSASELIKHLKKNYPSADYKVVYEAGFCGFNSQREFSEEKVDCIIVHPADVPTNDKERKRKSDTIDCRKLSSTLSDGKLTGIFVPGIEQQDDRSVIRAYQQFVKDQTRCKNRIKGWLNFQGISIPNDDEHKYWSNNFIKWLRELSLTPSARISLDLLIHSYEQTRNMVLAATKQVRALSKQERYKGQIKLIRSIPGIGPIGALLFTTEIGDINRFKTFDQLCDYIGLVPMINGSGQHQTVLGLTHRGHHKLRETLIEASWIAIRLDPAMTMFFNECAKRMVKNKAIIKVARKMLNRIRFVMKNQTEYVMAVVE

SEQ ID NO: 238071 - protein, 457 aa, unidentified
MGPDPVYKTSRQFSDARMRPRTRMGICTLEDFHLPISGRAIVMEFQRNKVCGADIHKKFLVATILSRDSTKITQRFGMTLDGLLKFKSWVIENQCEQVAVESTGVYWIPIHAVLEDAVDLIVANAYKIKHIPGRKSDLIDSEWIAELCLNGMIEPSRIFPKEDRELRRLTRAREGYITDMTREKNKIHHALESCGIKLSSVLADVFGKSGRYLLNCLLDGVELEEMIKGIPVKSIRNKADQIREAVRGSLETTQIILIRGGLELIGSIQRRIDELDREIKNRIASREEDLRIAMSIPGIGFTSAVTILAEIGDFKDFAKAEQIASWAGLVPTIYQSADKLVTGSITKHGSRHIRWILVEVAQAIARTSKSKLKRFFRRIQAKKGYNVAAVALARKVLCILFHLLMNREMYQEDDVIKTKSIDVNPTSLQTKMEFEEMIRILAKAGYEIRKTTSGTGG

SEQ ID NO: 238072 - protein, 314 aa, unidentified
MTGFVGIDVAKAELVVTSRPTLTRWSVANTASGIEALVAQLRELAPALIVLEATGGYEREVTAALVAAGLRAVVVNPRQVRAFAKATGQLAKTDRIDADVLALFAERMQPAWRPLAEEATTDLAAVLLRRRQLSDMLTAERNRLGVARRPVRASLKKHITYLERELRGTESELRTLIEDSPVWRVHDELLQSAPAIGTVTSQTLLAELPELGQLTHKQITALVGVAPMANDSGRLRGPRAICGGRARVRQVLYMAALVATRRNPVIRRFYQRLLAAGKAKKVALVACMRKLLLILNAMMRDQRPWAATIEASPA

SEQ ID NO: 238073 - protein, 391 aa, unidentified
MKKRYASVAYGGMDVHRKFSTVTLRDAAGVVVARERLNHEDRRKMREHLRCWPAGTPLVMEASFGWPWVSDEVEAAGHAPRLSNCYKLEQMRKARGQVKTNAKDADLLSLLPAEPTRWWEVWRAPPAVRDLREWMRHRADLVVLQTEVKNRVHALLARHGVFHPFSDLFGGQGRAFLHRLCQDGRYADGVLPPGTLEAIRSDARVLLALRAELATITWRLRGRLVWDPLVRRLKTIPGIGLILAHVLASEMGDIGRFRSHRHLASYACLAPRSDDTGEANPTQSPLGRHLGDRGNRMLKWAFIQAAHGAVRHGGRWRALYDRHTAGGTKDRGRGYIKVARQLTKVVFVVWSRVVDYTETPPARPGSRLSRRRKDSRPGTGQPLVAMVQAKA

SEQ ID NO: 238074 - protein, 384 aa, unidentified
MRYAPNVRRAQGTKKETGYEKSSTVRVNGNMIFKGHKLTIGLDLGDRWSCYCVLDEAGEIILEQKLPTTPEAMKQTFERIPRSLIALETGTHSPWVSRLLRELGHEALVAHAQKVQLISKSKRKDDRHDARTLARLARIDPELLGPVRHRSAKAQIHLTVIRARAELVSARTALVNAARGLAKSYGQRLPKCGTAQVSRELAAELSVELREALEPLLAEVESLNERIKEYEVRMEKIARESYPQVELLKQVKGVGTQIALTYVLTLEDPYRFPKSREVGCFLGLRPGRRDSGESQPQMHISKEGDPYLRTMLVQGAHYILGPFGEDSDLRRWGLKLAARGGKNAKKRAVVAVARKLAVLLHRLWVSGEVYEPLRNSHEALRAVA

SEQ ID NO: 238075 - protein, 423 aa, unidentified
MKSSGTQTFRAYVGIDWADTKHDFCLQERGSDRREFGCIAHQVECIDEWAKSLQQRFGTPVAIALELAKGPIVYALQKYDFLVLFPINPLTLAKYREAFKPSRAKDDPSDAELALDLLMRHPERFAALRPQSVGMRTLISLTERRRELVNDKIRLTNRLTHTLKEYYPQALDWFDQHDTVLFCDFLTRWPTPLQARRAHQASLKAFFHAHNAHRPQIIAARLKAIKAAVPLTQDPGVIVPCRLHVMVLIEQLRLALQAIEQFDRHIAELAPTLPDYRLFAGLPGAGPHLAPRLLVAFGEDRERFQRAEELQKYAGIAPVTERSGKKTWVHWRWQCPTFLRQTFIEWAGQTINKSFWAGAYYYQQRARGSTYQAAVRALAFKWIRILYSCWKTRTPYDESKYLNALKRRQSPLLNNLVPIPQNA

SEQ ID NO: 238076 - protein, 331 aa, unidentified
MNQIGIDISNNVFDATLQHGDRVVRRQFSNAPAGHHHFITWALGEASLARVCLEATGIYHLQLALALDHHTDIELMVINPCAARRFIQAHMVRAKTDAIDADGLLMYLQRMPFRPWSAPREAVLQLQSLAHRMSQLNKEVTRERSRLHAVHRAGPHTRPVQQDIQAHIKQLQRRLTAMKAQAGEVIGSDQQLADDARLIDSAPGFAELSATKLVAELSALPDDMLPAQWVAHAGLDPRPYESGTSQRPPRRISKQGNVRIRAALFMPALVAAHNNANVSAYYEKLLANGKPKMVALVAVMRRLLHALWGMLHHRQEWDGDKFYRLNQPENT

SEQ ID NO: 238077 - protein, 380 aa, unidentified
MSESTTIVAFDQHAATTVAAVLLPGHQTPALHALTSDSATIVRFLRRLSATGPVQCLYEAGPCGFDLQRALGAEQFPCDVIAPALIPRRPGDRIKTDRRDATHLAVLYRAGALTAIHIPTEQEEAARDLLRCREQIRADLLRARHRLSKFLLRHGRRFTATKNTWSKRHHQWLQTQRWPLAALEHTHRAYVRAVDEAVAQLQAIETELRDVLVLEPLRTRVETLRCFRGIDDLTALTVAAELGDARRFPSAPRVMAFTGLVPAEYSSGTSRARGRITKTGNAHLRRVLVEAAWHYRHPPFVGDPLRRRQRGAPPGAIAHAWAAQCRLHRRYRRLAARGKPKQHIVTAIARELSGFLWAALTQPSDRPTSKGESSGFLCDR

SEQ ID NO: 238078 - protein, 455 aa, unidentified
MEVYDAGVSGATGLLLRARGSVSGQRSLRAGAVRRWSPHRWREGVMEVMFDRVAGLDVGKESITVCVRTPGSRRGRHSETRTFKTMTGSLRVMRDWLVESGVTIAAMESTSAYWKPPFYCLEEVMEVWLLNAAHMKAVPGRKSDVRDAEWIAQLLEHGLLAPSFVPPPEIRRLRMLTRYRVQLMADRAREIVRLELMLEDASIKLSSVASSLKTVSARAMLTAMINGESDPLRLADMAKGRMRRKIPDLAQALTGHFDANHARLARSMLRRLDLVEQAIVELDAVIVDACRPWQHQIELLQTIPGVGPKVAETIVAETGADMSRFPTAAHLAAWAGVAPAMHESAGRQTPARKRHGNKWLTAMLVEAAGSVGRMHGKNYLAVQHARLTKRRGMGRAQVAVAHSILVAAYWMLKRDEPYHDLGADWHSRRNDEAHTRRLIAQLEHLGHTVIIDPAA

SEQ ID NO: 238079 - protein, 424 aa, unidentified
MNLTQNDRLKQVTADTLIVGVDIGSKTHFCRAFDWRGFELSRRVFRFSNTGMGFLTFLRWTEEVMNKTGMKKVIVGCEPTGCYWLTFQKFLQDHGVQLVTVNPFTVNRSKELDDNSPEKSDLKDPKTIALLVKDGRYSTSYLPSGVYAEIREASVCRDQIMKQHIRLSNQIQGWLQKFFPEYLECYADWDSTSGLLLLKEAPLPQDILKIGAGGINQIWRNAKLRAAGIKRAQTLLEAAQNSVGLEAGEAARLEIWVLVNDYMLKAEQLRRLDEYLEEKVKEVPNVEKLLAIKGVGMSTVIGFVAEVGDIGRFTDPKQIQKLAGLEIVKKSSGKKKGQPRISKRGRRKLRRTMYESARALMNWNPAFQDVFLYYRNRKKNPLGGMQAKIAVACKAIRIFYVVLQTGCDFDEEKFRRDIIRPEAA

SEQ ID NO: 238080 - protein, 349 aa, unidentified
MIIIGCDYHPSFQQIAWVDSETGECGERRLAHSDGEAENYYRGLNGHGVRVGIEATGHARWFERLLAELKYELWVGDPAQIWAMRVRKQKTDRQDAQHLLKLLVEDRFPRVWVPSAENRDLRQLLWHRHRLVQMRTRVMNQLQAIAMNEGVRRKKGLWSKQGRRQLESFSLAPWATRRRQDLLELLDRLNPSIQELSTAIEQEAVQRPEVKRLMTHPGVGPLTALAFVLIIGSPERFRCGKQIGSYLGLVPCEDSSADHQRLGHISKQGNALLRFLLVEAAQATVRSDPEWRRQFLHLAMRRERAIAKVAMARKLAVRLYWMWRKGWDHQQMVQFGSHVGQPVVSHGVK

SEQ ID NO: 238081 - protein, 427 aa, unidentified
MKEVPEQDLLIERVAALDLGKAALEACVRVPHESKAGRRMQEVRSYATTTADLLAMADWFRCWGVTRVVMESTSDYWKGVYFLLEAEGFECWLVNARDVKNVPGRPKTDKLDAVWLAKVAERGMCRPSLVHPEPIRQLRDLTRYRRALVQDRAREMQRVEKLLEDAQIKIGTVLSDIHGQSGRAMMEALIAGERDVCVMAQMAKGRARNKIHELEEALRGFFTGHHAMILRMMLDNIDRMAAQLAELNLKIETAVAPFAHQIGQLVEIPGLDQIAARELIGEIGVDMTRFPSPAHLASWAKFCPQVHESAGRKKNKSRGKGNPWLAGALGRIVFGFSRSDSFLGARYRRLAKRRGPQKAIIAAGNSLLTVVYHLLSDPNARFHDLGSDYYSTRIDKDRQARNLARHLQAITGQQITIQDGQVILHSS

SEQ ID NO: 238082 - protein, 259 aa, unidentified
MIYVGIDVSKLTFVVAYSSAKSSKTKTFKNTAKGIREFIKTISVDEHHCVMEATGNYSTLLVYMLSEFGFTVSLENPLKIKNFSKVMLSVIKSDEIDARLIALYGEKMQPSPYRMRSDSILVLKQKRTVLRQLKKQLVATSNLKGSMEVLPIYDSKCKKTIEKTIAFLGKQIKYMEEELASLANDEFKKQMDLLTSIKGIGVTLAAALIVATGGFTYFDNAKQLTRYLGLSPTYQQSGTSVNFKGHININGDPILRRKR

SEQ ID NO: 238083 - protein, 359 aa, unidentified
MAETANGEAPLLWIGVDVSKKTFTASAWLPWEEKAAYPKDSGGFENNRSGARKLCAWLGELEKTHGGPFGLAMEATGAYSLRLYDNLKKCRPGLHVAICNPLSVSYYMLSLGTNKTDKADAAVIARFAAHRRPARYVELSKDQAELRRLARDRAFLVDSRTEYRNRLESERNSSSRSRMNKVIETINEQIGDIDAEIEKYLSEEASSECQDELKLMQTVPGVGRLSAAIIYGELGTLAGYTRKQLSAMSGVCPTTRQSGTSLHKGGLSRRGSKWLRRILYLDSQQTILRSPAMAAFHEKMLKKPDSSKMSARVACMRKLLLILRGIVVSGKEFDKDHVSVKPDFLEKKQNNPEKSGMTA

SEQ ID NO: 238084 - protein, 392 aa, unidentified
MIYVGIDVAKDKHDCFITNSDGEVLFKSFPISNNREGFETLFQRIQSVSDDLSKVKVGLEATGHYSYNLLGFLLEKGLTTFVINPLHTNLYRKSLSLRKTKTDKVDSRTIATMMMSDMNLKSYSDTSYHNEQLKSLTRYRFDKVKERAKLKSSVSRLICILFPELEKLVPTLHMASVYALLSEFPSADAVANAHLTRLSNLLSESSKGRYGKDTAVMFRDAARSSIGSHMPAKSLELKHTIKLIQELTAEIDEIEAVIKQIMDEEIQSPILTIPGISYRMGAMIIAEIGDFCRFDSADKILAYAGMSPSTYQSGQLDNCYSHMEKRGSRYLRYALYNATKYVCHWDESFRVYLKKKRSEGKHYNVALSHATKKLVRLIFAMEKSGRAYLPTA

SEQ ID NO: 238085 - protein, 369 aa, unidentified
MDEGIKFFIGLDAHKDSTSVAACEAGREPARFAGTVGPDVRPLLKVLAKAGDPAQVSVVYEAGPTGYGLYRELRRRGYRCEIVAPSLIPRRPSDRVKNDRRDCTRLAELSRAGELKPIWVPDEAHEAMRNLWRAREDGLGMRLRARQQLKAFLLRHARRYPGKTSWTTRHERWIAEQCFDHEADRIALAEYQLAAQSADQRVQRLTFALTEATRGWRFEGVVAALRALRGIDTVSAIGLVCEIGDIGRFASARHLMGYLGLVPSEHSSGNSIHRGSITKTGNAHARRLLTEAAWNYRFPARLSGQLRERSKALPEPVRNHAWKAQLRLCKRYRVLTARGKRVVATAVAREMAAFLWAIAQVVAPKEAAS

SEQ ID NO: 238086 - protein, 346 aa, unidentified
MTIVETRAVTGGVDTHADVHVAAALDSIGGLLGVQEFPATPGGYAGLLEWLGGFGAVCLVGIEGTGSYGAGLARHIAGAGVRVVEVDRSDRQDRRRRGKSDPLDAISAARAAQSGRARGAPRGRDGTVEAIRVLMVAKRTARSERTQTINQARSLVLTGPDDLRVRFAHHATAFLVAELAGLRPRPGATVGYATRIALRELGRRAEFLDGQLERLDELIFPLVTAHAPGLLALYGVGPDTAALLLIAAGDHPARLRSEAAWAHLCATAPIPASSGKTVRHRLNPGGDRQANHALWRIVITRMSSHPPTRAYVDRRSKEGLSKTEIIRCLKRYVAREVYPHLRPPAS

SEQ ID NO: 238087 - protein, 414 aa, unidentified
MEILYRSVAGIDVHKKMLAVVVRGQRGEQVQYYQRKFGANRADIQHLGAWLQAHGVSEVVMESTAQYWRPVWYGLEPHFRLHLTHPLKTRAPRGRKSDFRDARRLADRWDSGDLEESFVPGCEQRSWRFLTRTRVQLKKKLSVIHSHVEGLLEQGGIKLSAVVSDLFGVSGWAMLERIAQGVTDVEVLAGEARGALRKKDAELKEALAGGLEPVYRLLLKQHMDQVRLLRRQVEEINQALAEAMKEHVGALHRLSKIPGVDLYADQELVSEIGPKAAAFASAEQFASWVGVCPGSQESAGVNYSHRSAKGNRYLRRLLCQIAWAAIHTKGTFFAGLFARLKPKVQGKGAAWAVAHRIAKIVWLVLHQEVEYQEKGSAPPNERTLVRKFKRMLKEFGALGLDVRALLDQQLPATP

SEQ ID NO: 238088 - protein, 418 aa, unidentified
MEIVFSKVAGIDVHKRQVTVAVRVPEGEADSGQKRTQRVRRFATFYGALLEMAQWLRAEQVTHVAMEATGVYWRPVFHALAEFDGFEVLLCNAHHVKNVPGRKTDATDAVWLAQLCEVGLLRGSFIPPAEIAAVRELTRYRRKLTEERTRETQRLHKVLEDGGIKLDSVASDSLGVSGRAMITALIDGVRDPVVLANLARGLMRKKIPDLTLALSGRFAAHHGVLAGLHLDHINHLNEMIARLEARIDEVVDPFDRQRDLLMTIPGIGKRAAETIIAEIGVDMSRFPTADHLASWAGLCPGNNESAGKRKKSATRNGNAHLCSVLVESAWSASRTKTRLGARFRRLHRRFGKAGGKKAAVALAHTILVIAWHILHDEVEYSDLGADFYTQRNSPEVQKARLVRQLKDLGYSVEIGPAA

SEQ ID NO: 238089 - protein, 494 aa, unidentified
MGCVIDFGESSRELAGPRGDIPFERVIKTTYPTSASRCTVRMMEHSMTQRNRSSARPAPLALTHPNAAGIDIGSASHFVAVPPDRDDEPVREFRSFTADLHRLADWLDACGVDTVAMESTGVYWIALYELLDARGFTVLLVNARHVKNVSGRKSDVLDCQWLQQLMSYGLLRGAFRPDDAVCCLRALVRQRATILRTQSRSVQHMQKALVQMNIQLGTVISDVAGASGQAILRAIVAGQRDGRALAALADARIKASAEEIAASLQGHWRAEHLFALKQALAAFDFCGTQLAECDAQIEAQLRVLQFTEAEPAAGKKRSKARNAPKFDLRGRLFRMCGVDLTRIDGIDVTTALVVLSEVGADMSKFPSDKHFASWLGLCPGTKITGGKVMSGKTARVANRASQALKLAAAALRTSQSALGAYYRRLCARMDKPKAVTAAAHKLARLIYAMLTRGEEYTDRGQAYYEERYRQRVVANLARRAQQLGLQVVPIAAPA

SEQ ID NO: 238090 - protein, 413 aa, unidentified
MEILHTRCAGLDVHKKVVVATILVSDEHGQLKKETRSFETMTASLLALSDWLTGFGITHAAMESTGEYWKPIFNILEENFEILLVNAQHIKAVPGRKTDVKDSEWIADLLRYGLLKASFVPPKGQRELRDLTRFRTTFIKERATLINRVQKALEGANIKLASVVTNIEGVSGRAILDAIIEGKATPKAMAELAKGRLRTKRDALEQALAGRVQAHHRFILQELLCQIDSLDETIERFDTEIQDYCRPFDVAIEHLDTIPGVARETAEVIVSEIGVDMSRFPTANHLASWAGVAPGNYESAGKRLSGRTTKGNQALATALTQAAWAASHTKNTYLSAQYHRIASRRGRKKAIVAVAHSILIIAYHLIMDKQTYQDLGGNYFDRRNSEATAKRLVQRLEKLGYKINLDRPIAVAA

SEQ ID NO: 238091 - protein, 346 aa, unidentified
MGVVCRIGLDIAKNYFQAHGVDKHGKEVFNKKLKRTDVLPFFANLPSCLIGLEACGGAHYWARELAKLDAGHSVRLISPRHIKPFVINNKTDAADARAICEVVGRPSTRFVNVKTVEQQDMAGWHRIRGRKVKERTALVNQIRALLHEQGVILPQGITHVRKQLPHITEELNNWLSLSARDYLSELYSELVDCDAMVAKYESRIKKFAVTNENCKRLLKIPGVGPLTATAVVAHVGTAKHFKNGRAFASCMGLTPKEYSSGGKQKLLGITKRGNSHIRCLLVQGARVVTRYWLQKLAEQGEQRIRWVQELVERRGKHIAAVALANKTARIIWALLARGGEYKPSLA

SEQ ID NO: 238092 - protein, 340 aa, unidentified
MRQLYVASDLHGNNNLMGIIDGEGKRIFKKKLPNDPLVIRDVLKPFKEEIVGIVVESTYNWYWLVDGLMEEGYKVHLANPAAIQQYSGLKHADDKHDAFWLAEMLRLGILPEGYIYPKEERPVRDLLRKRGHLVKLRTSLIISLENIISRNFGRKLPVNKVKGLREDHVTPLFEGKEDLGLAGRVSKETIDFLTHQIRQIEGAVEKRITLKEQYRNLLTLHGVGKILGLTIMLETGPIGRFETVGDYTSYCRKVPSQWISNGKRKGSGNRKNGNKYLSWAYAEASDFARRLHPESRAYYNRKMQQSNPAVAHSALSHKLARAAYYIMRDQVAFCPEKLFG

SEQ ID NO: 238093 - protein, 309 aa, unidentified
MKEELVYLGVDIAKSYLDAAIGSEKRRFANERIGHRELIKWVKQFKAPVQVICESSGGYERALVQALAGAEVKVSLVQANRVRQFARAAGILAKTDRIDAKVLCAFGKMMRPETISASRLEQEHLRELESQRRHLTHLLVMEQNRAARVSDSCVRRLNRSLLDQIKKQIQRLDLLIKEHIEASPELSAKAQKLTAINGVGARTAALLLARMPELGQLNRREVAALVGVAPFNRDSGKMRGKRAIYGGRKPVRHGLYMAAVVAARHNPILHAFYLRLRAAGKPAKLALTATLRKLLIALNSALKPDLNYA

SEQ ID NO: 238094 - protein, 403 aa, unidentified
MKHVIALDVSKGKSTMVIYDSYRRCEFEGELNHTRVDFERLHTRMKEITKLDGQVPEIVFEATGIYSKPVESFLKDYGYTYSRMNPLEANLQMAKMRRHKTDRSDAHELAKTHFKMERESTYIQVEYYEQMRALTRYYDEIDEEMILIKSRMHAILHMSFPELETLLTPGSALFLNVVQLYPHPALVLAHSKTVIKNRLKTNTKKNLSLARAEAKAIELLAAAKNSYPAIKCTDVRCDQVRDYAARIADLKDKKEALVKQMIELSKERKEYIVLRSIPGIGNSTACRLIGEMGDIRRFKNAKQLNAYVGIDIMRYQSGNTQYRDRINKRGNKHLRKILYFMVCAMLMAKGKPNHFVDYYYKLKTQPQRKPHKVAIIACINKFLKMTFQLLTHGILYDYKTATN

SEQ ID NO: 238095 - protein, 369 aa, unidentified
MTKRTTTMSATRSRSTSATKAALVWDIGLDVGDHKTHYCMLERTTGEMREGTVSTNAEALEKFFTPLVASRVVLEVGSQSRWIQKFLRGLGMDAIVCEARKSSEVNKNKRKNNRIDARTLAELLRANLPFLSKVEHRSDEEQRVWTQLRCRDTLIGVRTKLINLIRGVSKSSGCVLPWCNADGFGRKNHDKVPADLKEVLNPIFTLLAELHERVRGYDRKIEAEAARRPEAQRLAEIPGVGSLTAVAFLVAIGNIRRFRRSRDVGAYLGLVPKERATGDSNPQLGISKRGNCYVRKLLVNAGHYTIGKLNKTDTDLRRWGLLHAGTSKNQKKRAVVAVARKLAGVMAAMLRSGSPYVPLRQKLAEKISA

SEQ ID NO: 238096 - protein, 332 aa, unidentified
MNMHQQGGVANGSVKLNAGIDVSKLHLDVCVGGTQQRVPNDANGWNELTAMLQAAPVDLVVMEATGGYERGLVCALQSVGVCVARINPRQARDFAKSMGVLAKTDQVDARVLRDFADVLARHTDRSKFITSMPDQARDLLAELMTRRRQLVDMRVAEHNRLEHAGARAAKSIASVLKLLDKQIEAIDAHIDDHMDQHFKAQRQLLDSVKGVGPVTILTLTAALPELGQLGRRQIAKLVGVAPLADDSGGRSGKRRTWGGRSEVRSVVYMAAIVAMRHNPVIREFYERLLMAGKPKKVAIVACMRKLLTILNAMLRDQALWNATRHVKPAELG

SEQ ID NO: 238097 - protein, 407 aa, unidentified
MNAVGIDVSKGKSMVAAIRLLGEVLIEPREYPHTADGLSRMVKDILELGEDTRVVMEATGRYHEVVAFALREDGIFVCVLNPLLVKQSGGGTLRKAKTDKKDALKIAKYCLDNWNELREYMPLDILRQHLKLFSRQYNLYMKTIVSLQNNLISLSDKVFPGVNELFTSPDKEDGHQKWIDFFYTFWHADCIADVSEKSFTDRYQKWCKRKGYHFSQSKAEDLYTESAGLILTLPKNDNTKLLVQTAVQELIAAKTCLAAFKSEMINMAKMLPEYKTVVSMFGVGEVTGAQLMAEIGDVTRFTHRSALVAFAGVDPDVDQSGKHNASSVPTSKRGSPHLRKTLFQIVSTHLKRSPTDEPVYQYLDKKRAEGKPYFVYMTAAANKFLRIYYARVKEVLSTEKESANGPA

SEQ ID NO: 238098 - protein, 389 aa, unidentified
MPTVADRPEAQTAIQTNLAAIFISLELSRSIWLITSLSPGGGEKMSKHSVPAGDIAALLARFSELKQKALARTGKSFPIVTIQEAGLDGFWLHRVLQSEGIESHVVDPASIATSRRRRRAKTDRIDGEALLRALLAFKRGEPRVCAMVRVPTPEEEDRRRLCRERKVLIAERVKHVNRVKGLLFSQGVSGYEPLRRDRRQRLDELTTGDGHPLPTHLKTQISRELDRLELLLDQIKAAEAERDALLAAQQAATPAPAGRMLLDLKGIGPEFAANLWLEGLFRHFDNRRQLASYAGLAPTPWQSGSVDREQGVSKAGNPRLRTTLIQLAWLWLRHQPQSALAQWFKERVSRNGGRLKKTTIVALARKLLVALWKYVTAGVVIEGAVMKAA

SEQ ID NO: 238099 - protein, 436 aa, unidentified
MEEAGDEPLFCERAAGIDIGKAVVSVTIRVPSGTRAGGRQQETREFGTTRRQLLELADWLRCWQVERAGMEATSDYWKPVFFLLEREGFDCLLYQASQVKALPGRPKTDRLDSVWLAKVTERGSLAGSFVPPEEIRRLRTHTRYRRKLVQARTAEKQRCEKLLEDAHLKLSSVISDIHGVSGRAMLAALIAGERNPAVLAEMARGTMRRKIARLAEALDCSFFTGEHAFILQMMLGNIDHYSAQIAVLDEKIAVLCEPYERQIAQLDSIPGFGVTAAQDLIAEIGVDMSVFPTGGHLCSWARVAPRARESGGKRKGKTATGQGNPYIGGTLGETASAVARTQTFLGAKLRRLCKHMPKKKATGAIMRTQLVIAHALLSDPAAEYRDLGPGYYEHKADVRRQARNHVRGLERLGYKVTIEPLSPDPETSGLPVTRAS

SEQ ID NO: 238100 - protein, 370 aa, unidentified
MESIIYVGMDVHKDTYSICCYDPKTDRYLYEHKMKSTTANVLKYLDNVRKQLVDVSFICGYEAGPTGFGLCRDLLKKDIACVVMAPTSLRRSSCHKVKNDKVDARLLAKDLFTHDYSPVHISSQKEESIKEFCRMRRSLMTEVKTAKQILTAFLLRQGKHYEGKTHWTEAHRKWLKELAFDQPYLQEAFEEYIIGLNSLETRLKRVEKRLDEIADDEEVGAKVKKLICFCGIDTLTAVSIVSEVGDFMRFGRAWDFSNFVGLTVGEDSSGQREKKLGITKSGNCYLRRLFIESAKSIKRTNVKFSKSKRLLARQEGNDPKVIAYADKCRYRLKHKMLNLENRGKAANVASTAAARELACFVWGMMTDNIA

SEQ ID NO: 238101 - protein, 502 aa, unidentified
MKGGGRRRRSFFFATFFFLVNSVRWVSSIPPGAGTGPKLLAPEGFSETDRPAPISAATRANRLLPREGFYERIRAVRPGGRIEYTFVMVTEGGAVMLFVGIDWSDLSLEFHARTAEGRVVAEGRVRPNAEGLGELFAKLEAHAPPSEIAVAIETTHGAWVQALLDRGYRVYPINPKCAENFRKSLSAAGDKSDRIDRKALALMLAALHQQLRPMQPDDPEMVALRIACQDRVRLVEERTGKINELLSLVKQYYPAFPGLFGEIDSDIALAFLEDFPTQKAMRALTFKRLQNWVKRHGYTRTSRLPEMEQHLKAAVLPVADHLQNAKAPLIQYLARSLRALQAEIARREQEISDRFNGMPEADWVRSLPGAGDALAPALLACLGRDPARFADVAAARAFLGTAPVTKASGKTQAVVFRRGCWKFGRRTLQLFAEQSRRYCTWAAKFYEKQRASNHGHHAALRALAHKWVKIILAMRRTGTPYDDDKYTHSCSQRLLNPRVAHA

SEQ ID NO: 238102 - protein, 390 aa, unidentified
MQALYPRPDEHAAIRTDLKAIFVSLELSRSTWVITSLSPGGGEKMSKHAVPSGDIPALLARLSQLKEKARARTGQVFPIIVIQEAGLDGFWIHRVLQQEGIESHVVDPASIATSRRRRRAKTDKIDGEALVRALLAYKRGEPRVCAMVKAPTPHEEDRRRISREREVLTAERVQHVNRIKGLLFAQGIGDYEPLHRNRRERLEELITGDGRPLPECLKAQIRRELDRLELLIEQVKAVEAERDAVLAQAQASPGVPAPAAQLLALRGIGPEAAATLWTEGLFRTFSNRKQVAAYAGLAPTPWQSGSVHRDQGVSKAGNPRLRTIMIQIAWLWLRHQPQSALALWYRARIKRRGGRLGKTMIVALARRLLVALWKYATAGVLIEGAVLKPA

SEQ ID NO: 238103 - protein, 404 aa, unidentified
MPTKVIGIDPDSNGFQCILVDTEADKMISRQYFYTETGLIRFLEWTEKNGSPIICIEGKNGQCRPLESFLHENKTPFYSVSPKQTNKFRESVVSENKDNEIDAEAVARLGITLGNQNKLGEHRVIEETSNVFEIRELSRIQQKATENRTVAVNCLWKKVHSGSSDLYLYLKGCSPDAESENNIIQNKGILNLLIAQPDLAKWKNLTYDDLFQAMGGQNYKGRDVIIKSVTAIMEKFKNISVSDRIGMEMYAKQILFHSQEIKMLEKELLKLTEGDPIIEQMMEYKGIGCNTASALRGEILNPARFKTNDNLASYAGFGMKKVATGKTVKMVRNNSYNRRLKNTFITAAKSLIRHHGDKHLTGYYNSLVNRNNLEKTEIYKRVARAWLRMIYKNILAPQGGKTSK

SEQ ID NO: 238104 - protein, 386 aa, unidentified
MPQPKDDLSRSLVALDQHSSLIAVVELSLSTWLVGGMVPGIERDPLKKLVPDEDGLLKLLHRWRDEAVKAGHQINRMVVAFEAGRDGFWLARWLRSRGIEAYVIHPTSVAVSREHRRAKTDRLDIALLKRSLLGWLRGEKKHCSMAAIPTLEEEDAKRPNREREQLVGKRTGIVNRMKAALVRLGIRGFNPKLRKAPQQLATLRTPEGGTIPPNTLAELQREMAHLSFINEHIKQIEDARLIQLKQAPQHGPNAKVVQLGRINGIGIETADMLANEVFSRDLRDQRAVARYAGLTGSPDESGRRRREKGLAKAGNARVRRGMIQLAWRFLFHQRNSALAQWYRQSVAAGKKRTTVIVALARKLLIALWRFVTIGDVPQGVILRTAS

SEQ ID NO: 238105 - protein, 415 aa, unidentified
MDVVYKCCAGMDVHKKTVVVCLLRSADGGATVQKTRTFSTMVTGLEELRAWLRSEGCTQAAMEATGVYWKPVLNILERDPELTVLVVNAEHIKVVPGRKTDVKDAEWIAGLLRHGLLRGSFIPERTQRELRELVRYRTALLRDRSRTVNRLQKTLEGANIKLAAVLTDITGKSGERILAALLRGEQDPEALAELADRRVVKHKRQALEQALVGQLGPRLHFVVQQQLQQMQALDEQIAACDSEVAAQLAPHQELLERLDAIPGVGQRTAEVILAELGTDLSRWPTARHLAAWAGVAPGNKESGGKRRRARTRRGNPWLKAALTEAGWAAGRTKKSYLGQEYRRLAPRLGRKRAVVALAHELIIIVYAMMTRGTVYQDLGLDYWDTRYAARREQRALQFLKGLGYEIKEPEHHHVA

SEQ ID NO: 238106 - protein, 412 aa, unidentified
MQTLIERGCGLDVHQATVVACLLMVRRDGKVQKQMRTFSTTTRELVGLREWLLSEGCTHVAMESTGVYWKPIYAILEGALEIVVANAQHIKKVPGRKTDVKDAEWIADLLCHGLLRSSFVPPKPIRELRDLMRYRRKLVESQAAERNRLLKVLETANIKLANVATDVFGMSGRLMLRALIAGKATPQEMAELAKGLLRKKIPELELALEGKLEQHHRFLLELQLQRLEAAEKDLAVLEQRIRQMLEPYAAQLALLDEIPGVDWTLAAVIIAELGVDMSVFGNVSQLASWAGVCPGNNESAGKRKSSRIPSGNVYLKSGLVEAANAAARAKGTYLRDKFFRLKARRGYKRAAVAIAHKILVAIYHMLSQQVSYNDLGDLYLDKLNKNHLTRNLVHRLERLGYVVTLTLQQKAA

SEQ ID NO: 238107 - protein, 338 aa, unidentified
MTYGAIDLHTRYSQIRIIDDEGQVIGERRITTEATRFVAAFDNHGPMRILLETGTESEWVAQVLEAAGHQVIVADPNYAPMYGEIRRKVKTDRRDVAALAEANRRGWYRATHRVSAAQRAQRQELRSRRLLVQMRSGTIALIRALLRQSGFRLASGSSRCVSRRLTQLTLPPGLVATIAPLQRMVETLTSEIAGVDAHLASRAAADPVVRRLQTVPGVGPVVALTFRAFVDEVSRFTQAGQVSAAIGLVPREDSSAERRHRGHITKAGPRELRSLLVQAAWACWRSTASGTLRAWVERVAARRGKRIAVVALARRLSRILYALWRDETVFAPATVAAA

SEQ ID NO: 238108 - protein, 293 aa, unidentified
MRILDQDYSGKSVFVGIDVHKKSFVISAYCQGKAVKKWTTQSSRVSAAEQLTRFFRGAEIHSAYEAGFSGFKLHRVLNAAGVRSRVIHAAAVEVKSNDRVKTDKRDAKKIAEQLAAKRLRAIYVPTEDEERRRSLSRGREQVIERRKAIGNQLKMKLHYLGMMDSDPQKVGETFLETVEKLVLPKEHRFVVAELIDAWRQETKRIKRFEQELLKQAADDPLEIIYRSAPGIGAISARVLSNELDNMLRFDNERQLFSFSGLTPGEYSSGEYVRRGHITRQGSPRLRGMLTEIT

SEQ ID NO: 238109 - protein, 424 aa, unidentified
MIPVPSYVLLVTILLIWRKISKYINMNRNRTVAGLDVHKDSIYLCIMGHDEAIIFEKTYGVLTPELRQMCNDMVDRGVSEAAMESTAVYWVPVWNELCESMELKLVNPYFIRQLPGRKSDVRDAQWIAECLLKNLIKGSFVPEPIVQDMRKLNRRIFDLQEDLTYYSNKLDAALQRCGFRLSNYVAKITGKSYRKAVESIASGVTDPDELIKCVHGRIINKHGRETMLAAMTGSFSTTDITVIRQYWELLAIYTRQSEECQSKLTALCEAHFPTEYKRLQTIPGVKERAATAIIAETGVDMKTFATAASLVGWCGLKPRNDVSNGRYKSRKITHGNKYLRKILIEISWTASRTRNCFFSNFSYIQVTQKHKSKIKIQVAIARKILVAVWHMLSKQEDFIDLYLKRLEEQRLMEEKIRQLESKMA

SEQ ID NO: 238110 - protein, 355 aa, unidentified
MNAIKYIGMDVHSATISIAVLDVNGKLMMEVTIATQAGALLDFIRGLSGTLNVTFAEGTSAHWLYTLLEPQVAKVVVCDPRQNPRRLGEKKSDRLDARKLAELLRLGSLKPVYHGNTLGPALKELARSYRTLVSDTARVMNRLKALYRARGIRCAGTRVYSPRFRDQWLEQLPEPGGRGRAHLLYKQLDLLLPLRQEARAAMLAESRKHPAHKILCSIPSLGPVRVALLIALLQTPLRFRGKRQLWTYAGMALVTRTSADYQIVDGQVARSRKPALVLGLNANHNHTLKGIFKDAAASALAHPRPFKDFYTMRVAQGMKPELARLTLARKIAAIALTLWKKGECFNAEHVKAQAA

SEQ ID NO: 238111 - protein, 348 aa, unidentified
MHIAVIGIDLGKNSCSVAGFDATRRIVLRRRMSRDGVIKLGARLPACVMAMEACCGAHHLGRALQAHGHEVRLMSPEYVQPYVKAQKNDERDAEAIAEAATRPTMRFVALKSETQLDMQTLHRARSRLVGERTALINQLRAVLLERGITVAQGRRKLEQYLALSLDGEDAPPLALSPRMRLLIDDMRAQWRELDRRIAASDAEFVAAARIDPTARRLVTIPGIGAINATALVAAVGDARSFARARDLAAWLGLVPRQATTGGRPRLLGITKRGNKYLRTLLIHGARAALPSLAATAGSLGNWLRGLSARAHRNTVIVALASKLARIAWAVLRSAATYQTTIGDQPAAA

SEQ ID NO: 238112 - protein, 418 aa, unidentified
MKVVYPICCGVDVHKKFIVATIIKTEGITPKYSKKRFSTFNNDILRFKQWLLDNDCRDICMESTGKYRVPIYNLLEDEINVVVASPKWVRAVKGNKDDTKDSKWIGDLFRLGLVPGSFIPPKPIRILREFTRYRYKLVSCKSSEKNRYQNSFTVCNVALDSVVSDMFGKSATRITNYLIETDNFDPEHCKTLLHGSMHKKFDAIVESIAGYKIAPAQKERMTMVKSHLEYVEKAIEMMDAGIDRLVADYESHIALLTTIPGVDRRSAITIISEIGTDINQFSNSKRLCRWAGLTPGNNESAGKKKSVRITRAGIYLKPALVQVAHAAVKSNVNPYYKNKYERISKRRGKKRAIIAIARMILTAVFHMFSTGEVWNPVDLFKVDMPPLLVEKQKQKAIQNAIKLLRAQGLAVSTTKLAV

SEQ ID NO: 238113 - protein, 390 aa, unidentified
MVIWLTHIQGRQNDRIQRLRIRSGKRLFDKALPNDENKLRSLISDLKQHGQILLVVDQPATIGALPVAVARSEGVLVGYLPGLAMHRIADLHAGEAKTDARDAAIIAEAARTLPHALRTLKLADEQIAELSMLCGFDDDLAAQTTQASNRIRGLLTQIHPALERVLGPRLEHPAVLDLLQRYPSPEKLASLGEKKLAAQLCKLAPRLGKRLAADIAQALAEQTVVVPGTNAAAVVLPRLALQLITLRKQRDEVALEVEQRVLAHPLYPVLTSMPGVGVRTAARLLTEVACRAFASAAHLAAYAGLAPVTRRSGSSIRGEHPSRRGNKALKRALFLSAFAALRDPLSRAYYTRKMSQGKRHNQALIALARRRCDVLFAMMRDGTFYTPQGS

SEQ ID NO: 238114 - protein, 332 aa, unidentified
MKLYAGIDLHSNNSYVVLSYKKRLANDAKVIVGALAPYHERITGIVVESTYNWYWLVDQLQAENYRVHLANTTAIQQYSGLKHTNDKTDAIWLAKLLRLNLLPEGYIYPREERGLRELLRRRLILVRQQTMSVLGIQAMITRYDNLKIGAKSIKNCKNKEEISNLITDADVRIAAQSQLNVLYCIVDQVALLEKNILMKIEDEADFIFLKKIPGFGPILAMTILLETGDISRFSKPGNYSSYCRCVESKCISNAKKKGQNNRKNGNAYLGWAFVEAANAAIRHYEPIKKFYQRKLEKTKRVVAIKTIANKLSKACYFILRDKVEFDMKKLFN

SEQ ID NO: 238115 - protein, 397 aa, unidentified
MSFFVGIDWADTKHDICVLNAQGQIITEFIIPDDPSGYQRFQTYLQTLPSVKLLIERPNGRLVDFLLQNRWSVYVVPPSVSAASRPRRSKTDRADAYLLATLLKNNHPDCRPILRSSDLCDQLKQVVSAHDRLHRELQRLALQLRYQLKQYYPAILKVFRKPQQPLTYAFLKAFPDPQIFNQLPFADFQAFFVTQRYRYSERLESHWNIFQQEATLNRPTKGYQLATTATITLMTLIDQQLRQLKREMGLMLQQHPDAAWWQGFPAVGSLNAARLLAYVGDNRTVFADTDTLRARAGTVPITRRSGKRIAVHFRRDCSHPLRKAFYDLAMNSKKQSAWAKSYFQAQIARGHTRPRANRALANRWVGIVWKLWHTGAMYDETVHQANRQKGCAQQLAS

SEQ ID NO: 238116 - protein, 333 aa, unidentified
MAWCGIDVSAQQLVVALQRGDRAVQHRTFPNGSVGHQALIRWLARSTGTVRVCLEATGLYSLDLALSVHAVPSIELAVLNPKAVCRFAETLRRSKTDPADAVVLLDYARRMPWQSWQPPSATALVLRSITRRFAALTKQHTMEANRLHAAEASKTVPRCVRQDLKQSLRQIECRLKRLQSEARKLVARDAELEQRYTLLRSIPGIGESSALQIMGELEVLAPDLDVRQWVAHSGLDPMQHTSGSSVHRAARISRAGNRHLRRVLYMPAVVGVRFDPYLRTFYERLLARHKTKLQAIIAAARKILHAIYGMFRSRSRYDGSKLFPLFQPVTQAA

SEQ ID NO: 238117 - protein, 415 aa, unidentified
MEIVFPICCGIDVHKNFLVATIITTPKDSLQPNYQKKRFSTFNSDLNRFADWLHTNKCVDVCMESTGKYWVPVFNILEKRSIRVVIANPKWVKAVKGNKDDTKDSKWIGDLFRLGLVKSSFIPDKNIRVLREFTRYRYKLTTMKSSEKNRYQNAFTVCNVALDSVVSDMFGKSASAITDYLTSDESFDAEHCVSLLQRSLKKKAVAVIESIEGYSITDDQKQRISIVRDHLSYIDSLIARTDSCITRMVSEYESAIILLCTIPGIDRRSAITIISEIGTDMKQFGSSKRLCSWAGLTPGNNESAGKKKSVRISRAGVYLKPALVQAAHAAVKDKNSPYYKLKYEHIQKRRGKKRAIIAIARMILTAIYSMFVSGEVWNPIDLYKVDMPESLKEKQLAKAVKQATKFLEKQGLQVS

SEQ ID NO: 238118 - protein, 347 aa, unidentified
MKIVSIDVHSEWSQLTALSEETGEVLLEMKVRTDPAELHRVVGGLPGPKKVLFEEGPMSGLIRDALEGVADEVVSCDPTKNALIARSEHSTDELDARRLGLLCRAGVIHPVYVPAEPYRTLRSLVRYDHHLARSITRVMNTLKAALRRQGIPVRGKGIYRQAGRKSVLANAPNFAVRWQWESLYRHLDWLRRERVGAHRVLVRQCRGMPVTQRLRTIPGVGPIAARTIVAWLVEPGRFKSRKALSSYGGLGLGQGFTNWTATGRARASRRGQRELKRALFLAAHAASRGDSALGRRYQARLHCGWEHRKAIRDIARTILFIAKALWITGKEYDDTKVNVPRSEPVAR

SEQ ID NO: 238119 - protein, 343 aa, unidentified
MEKIGIDVHKVASQVCIQLEDGTVLDRRIATTQPAFAKLLGGRPRARIVLEASTESEWVARSLEALGHEVIVADPNFAPMYATRSRKIKTDRRDARALAEACALGAYRAAHRSSAGARERRAQVAVRDALVTSRTKYISLTRTLVRQEGYRVASGSTATFATRVQAQVLPAPLQARVAPLLTAIAALSAQIAALDQALAQLVRADPVAPRLCTAPGVGPVTSLTYVAVVDQVARFGSAKDVPAYLGLVPREWSSGEQRQRGRITKAGHRRLRALLVEAAWCLLRTERPETAALRAWALRIAARRGKRIAAVALARKLAGILYAMWRDGTDFGHPAPRRTVHAA

SEQ ID NO: 238120 - protein, 284 aa, unidentified
MQTVTTIGLDIAKSVFQVHGIDAGGQVVIRRQLKRRYVLAFFQKLLPILVGIEACASSHHWSRELKELGHTVRLMPPAYVKPYVKRQKNDAADAEAICEAVTRANMRFVETKTPEQQSGLMLHRTRHLFIRQQTSVINAIRAHLAEFGIVAPVGRNGVEQLLEVVADSNDKRLPEVARACVAVLGAQLKMLKEQILEFDRMIRAWHRSSELSMRLDDCPGVGPTLATALVATVADPKTFRSGRNFSAWIGLVPKQHGPAPARRILPSRLPEAASDPAPAAGSTT

SEQ ID NO: 238121 - protein, 365 aa, unidentified
MKKNSTTKMKRQMARQKLTVGIDLGDRSSRYCILDEQGDVLSEGSFATTKAGIAKLFQPMAKCRIAIETGCHSPWVSRQLTQLGHEVIVANARNVQLISQSTRKDDRLDARTLARLVRIDASLLCPVRHRGAEAQAHLAIIRSRDVLVRTRTLLVNAARGLTKSFGERLRKCGTEQVGLNLAVGLDPVIRAVVEPLLAEVETLNERIAQYSRQIEEIAEEHYPEVAGLKKINGVGTLIALTFVLTVDDPHRFRKSRDVGCYLGLRPGRRNSGNSEPQMHISKEGDSHLRRLMVQGAHYILGAFGTDCDLRRWGLKLAERGGKNAKKRAVIAVARKLAILLHKLWVSGEAYDPLRNSNRAGEAVAA

SEQ ID NO: 238122 - protein, 341 aa, unidentified
MNDVTLIGIDLGKHSFHVHGQDRHGKALLRMKFSRKQLIEFFARFQTCTVVMEACAGAHHMARRLAGYGHEVKLISPQFVRPFVKSNKNDFIDAEAICEAACRPSMRFVTPKTESQQCLSALHRVRESLVRQRVMASNQIHGFLLEFGISLPVGHAVIRRLPSVLAKQSLPARLRVLLERLHGHFSYLEEQIADIEKELNRQLQDDDLGQRLMTIPGVGPLTASMLAAEVGDGKQYRCGRDFAASVGLVPRQYSTGGKHNLLGISKRGDKHMRRLLVQCARAYMLRLERQTDRLAQWVRSMLTRRHSNVVACALASKLARTAWAIAAHHTEFKRQEAVRAT

SEQ ID NO: 238123 - protein, 367 aa, unidentified
MMGWMAPLRHLSAKLLSDRISSEWEPSMGEVTTIGLDLAKHVFQVHGVDAEGATVLRKQLRRAQVLAFFSRLPLCLVGLEACATAHYWARELRALGHEVRLMPAQYVKAYVKRNKHDAADAEAICEAVQRPTMRFVPVKTADQQAAVLLHRGRERLVRQRTGLVNALRGHLAEFGVIAPQGLRNVGKLIAIVRDERDARLPDLARQVLQVLAAQIEQLEAAVAAIEKQLMAWHKSNPVSQRLASVPGIGPIIATAIAATVVEPSGFRSGREFAAWLGLVPRQNSTGGKHRLGGISKRGNQYLRRLLINGASANLLRSKATKADPWVIGLRRRRPPLVVAVALANKTARIAWAVMHRHENYQRVAAAA

SEQ ID NO: 238124 - protein, 449 aa, unidentified
MSKSGKVIGLPIVNVRAAGIDIGSRIQVAAVPPELCDNPVRTFQSFTADIEEMANWLVSIGITTVAMESTGVYWIPVYEILEAHGLTVVLANARDCKAVPGRKSDVNDAQWLQRLHACGLLRASFQPAREIAALRAYMRIRDRHLEYASAHMQHMQKALTLMNLQLHHVISDISGVTGLRIIRAIVAGEQDPDVLASMRDVRCHESLQTIRSALVGNYQPEHVFALSQALGLFDAYQARIADCDKQIESSLRVLNADRPQLETPLPAPRTKTKQANAPKFDVRSMLCQLTGTDLTVIHGIGPSIALSLVAECGTDMSKWPTEKHFASWLCLSPGCKISGGKVLSAKTRKSSSRLASQLRLAASNVGRTETALGAFYRRLAGRIGKAKAVTATARKLAILFYRAMRFGMRYEDPGVDQYEQRYRERVVKQLQRRAAHFGFSLQPTEVGVS

SEQ ID NO: 238125 - protein, 349 aa, unidentified
MTEQRRSYAGECVYVGVDVHKETYTVTCVCHKQIVKTATVPAEPASLAASVLQWFPGAMLASAYEAGFAAFVLHRALTQVGITNIVVNPASMAVAANDKVKTDRRDSKRLAIDLADGRVRGIYVPTEGEELARLLPRTRAQIVDHRATIARQIKAKLHQFGLIAPASRRMISNRYLREIAAWSLPPELRVSLTLLAEQWRFGTRQLIEIRRLLRTQAAAQAELAHVYRSVPGIGAVVARTLATERGDMPRLANERALFSYTGLTPSEDSSGPAVRRGHSSRQGSGRVRHLLIETAWRALPRDKVLQEIFDRIAATRGKKRAIVAIARRLTGRMRACFRQGTTYAVGTYA

SEQ ID NO: 238126 - protein, 281 aa, unidentified
MKQEKYIGMDVHQATISVAVMDSSGKLIMECILETRAATILEFLHGLRGSLSVTFEEGTSAAWLHDLLKPHVTHLVVCDPRKNALLKDGSKSDRSDARKLAELLRGNQLHPVYHEEHGLRTLKELGRSYLTLTQDVSRVMTRIKALYRSWAIPCSGTTVYAPRYRAEWLAKIPQPGVRLRAERFYQQLDLLQPVRQEARRDLLSESRKHPAVKLLRQIPSIGPIRAAMLVALLQTPHRFRTKRQLWAYSGFAIETHDSGEYRYVARKGSTQPGAHHGARSE

SEQ ID NO: 238127 - protein, 308 aa, unidentified
MNHDEVILGVDTHLDKHVGAVISVARRLLATLAVETNSAGYLQLLAWARSLGDLRRAGVEGTATYGAGLTKVLRDNHVDVFEVNRPDRATRRSRGKADPTDAESAACAVLSGRATAIPKEQSGAAYAMRAVAVARRSAVKARTQAINQLRGLLVSAPQEIRERLLRTKTEECVGACARIRSLGKTDLLTSLTTTLRILAKRWLALGAEIKLLDCQLEHLTKDHAPRLRNEFGVGAQTAAVLVCVAGDNPERLKSEAALAALCGVSPLQASSGKTTRHRLNRVVIVPPTMPSGPSQWFECAAIRGLRHT

SEQ ID NO: 238128 - protein, 341 aa, unidentified
MNQCFVGIDVSKKQIHVCVLGEKPHPYPNCLTGFRKMMKSLREKKPHGEETLFLIGMEATGVYHLKLATFLKDEPDVAVYVLNPAQVKSFFKASFHRTKTDAIDACGIASCTEFLVNRDKVRAFETPDNEVERLRQLCRRRDEILSMAQMEKNRIEALKEVPSHSGEVESSLLEHLEYLEYLEQRLKDIEEKIKGHIRNSPGLKEQVDLLKSIPGISDTAAAGLISEIRSAERFDNVKELVAFAGLAPAERTSGTSVKGKTSICKTGSSRLRKHLYMPALVGIRYNPLLKEFYERLTNRNKPKKAALIACMRKLLHIIYGVLKNRTAFDPLWAKNRFAMAC

SEQ ID NO: 238129 - protein, 347 aa, unidentified
MDQQCHYVGLDVSLETTSICVIDDAGAIIWRGKCRSDPDTITAIVRQHAPGAVRVGLETGQLSNWLTLSLRRRGVPVVCMDARHAKAALSLQINKTDANDAFGLAQVVRTGWYREVAVKSMDAHTLRMLLVARSRLVSQRQATANTIRGLLKTFGLVVARGSKGLFPVRVREQIAGNPAVIAIIEPLLAVWHAIRDQVGMLDRQMLARARNDQVARRLMTIPGVGVVIALAYTAVIDDPARFRRSVSVGAYLGLTPRRYQSGEVDTTGHISKCGDSLLRGYLYEAAAVLLCRDARASILKSWGLGLAKRIGMRRAKVAVARKLAVIMHRIWSDHSEYRWTAIPPTAA

SEQ ID NO: 238130 - protein, 427 aa, unidentified
MKVIYDKACGVDVHKSFIVAVICDSTSIEPKYLRKRFSTFNNSLIQFRNWLIENDCQNVCMESTGKYYIPVYNALEGFISNVVVANPKWVAVIKGEKDDNKDAKWIADLFKLGIVRSSFIPPKDIRILREFTRYLYKLTCNKTSEKNRFTNALTVGNCKLDMVFTDIFGKSAQSIIDIVLNNDNFSDEDIISCLRKNCKSSHEDILSSVGGLTYTNEQKLRIKIVEDHINYLTNQINSLRDTVDMLVSSFEDYINLLMTIPGIDRNSAISILSEIGTDMSQFSNHYRLSSWAGLAPGCNESAGKKKSVKISRAGVYLKPYLIEVAHCAVKDKTNTYYANKFNKISKRRGKKRSYIAIARKILVAIYHMLSTGEVWNPTDLASNETNDKDRIKYTKNNFKQSLKQLLSLGLTSEELLEMINQNAILDT

SEQ ID NO: 238131 - protein, 314 aa, unidentified
MIHAEVIIGIDISKARLDIHVHPTGQCWSTDNGRAGIAALVTRLARLKPAAVGMEASGGYEQPLARALHTAGFDVHILAPARVRAFARAIGQSAKTDALDAAMIARCLEASRDRLEPYAPDPAREQLSALGAHRRRLIAERNGLTSQLDTIDEPIVRRMIQARLRSIALSLACIDKAAAALLAAEPRLKRRVDRLRQAIGVGPVLASALVADMAELGRVSAKAAAALIGVAPHARQSGASKRPGRCAGGRKALRDILYMATLSAIKARDPVLATFYKRLREKGKPFKLAMVATMRKMITILNAIARDDPAFQTP

SEQ ID NO: 238132 - protein, 412 aa, unidentified
MKDLLEISCGLDIHKEKIVACILTGPLGKPTHSEIREFTTLIPDMLALRDWIISENCHHVAMESTGIYWIPIYEILEDAFSGDITLLVVNARHMKNVPGKKTDMRDSEWISTLLRAGLLNASFIPEKRIREFRDLNRYRKSIIRDITSQKNRVEKFLQSSGFRLSSFISDIFGASGRNIILHLMEHGRIDKISLDSYLKTKTRKRIDEILMSVNGTLSEHQNSFLKILMCHYDSMKEHLIEIETHLQEDMLPFALQIEQLNTIYGISTTASCAIIAEIGTDMKPFKTAEHICSWAGLCPGNNESAGKRKSTSITKGNPYIKSMLCEIAWVIAGKRNTYLSAWYWRIKQKKGARKAIVALARKLLVIIYTMLKQGTNFDENCFEVRRKNCEQKQLSRYIRELEKHGYTVEAQV

SEQ ID NO: 238133 - protein, 322 aa, unidentified
MPVFLGLDVAKNKVDAALLLENDKFKTKVFANTSQGFADLQAWLTLHGAEQASVCMEATGAYHEALATYLFDAGHKVSVSNPLRIKSFGASQGIRTKNDQVDARLIARFCKVIQPQLWQPEPLAIRELRALGRRRDALIEMRIQESNRTGLNIPSVEESIKSMLASIDHEIEEIERKIKDHIDQHPDLKKQCELLKSIPGIGTICAEAILSETGGFTRFERVGEVVAFLDLSPQERSSGASVHGKAHISKKGNRRLRFLMYMPSIIAKRCNPLVRTLALRLEEKGKPAKVIICACMKKLVQIAFGVLKHKRPFNPNYAQNCA

SEQ ID NO: 238134 - protein, 366 aa, unidentified
MRKVMAGMDLHGNNVMVGIVDDQGARLQHRRLACELPEIIEFLAPYKAELESIAVESTFNWYWLVDGLRAAGFTVVLANPAKIDQYSGIKHADDKNDAYFLAELQRLKILPTGYVYDPELRPVRDLFRRRMSLMRQRTTLFLSAKSLHQRTTGRGLELRRLKAMEPEEAAALYTHPANQLIAQIQKEHIDSLDQSIRQIEKAVLKVALQQPYYQRLQTIPGVGIILGLTISMEVGNVDRFAGPGQFASYCRTVDAKRISNGKTKGDNNQKCGNKYLAWAFVEAAHGARRFDATCRRWYDRKAGKKCTTVATKALACKLAKAAWYVMAKGTEYQAGKIFPGLTEPKAEEISGEQASASKGVGPNPED

SEQ ID NO: 238135 - protein, 403 aa, unidentified
MNAVGIDVSKGKSMVTILRPFGEIVSSPFEIKHTSSDILSLIKLIHSIEGESRIVMEHTGHYYEVLAQQFSAAGLFVSAVNPKLVKNFNNDSLRKVKSDKADSIKIARYALDKWQNLKPYSIVDELRTQLKAMNRQFHFYVKQKTAMKNNLINLIDQTCPNANTYFNSPPRSDGSQKWVDFVYTYWHVDCVRKMSLNSFVKHYQNWCKQKKYIFNKSKAEEIYTKATELVPVFPKNEITKRIIRQAIAQLNSTSATVETIRILMNETASKLPEYPIVMQFKGIGPSLGPQLMAEIGDITRFTHKGALTAFAGVDPGVNESGSYAQKSVPTSKRGSSNLRKTLFQVMDVLIKTMPQDDPVYQFMDRKRAQGKPYYVYMTAGANKFLRIYYGRVKEYLCILSESS

SEQ ID NO: 238136 - protein, 332 aa, unidentified
MQMLAIDLGKQSFHIYGITDDGEVVSRKVGRAKLADAVAKLQPHLVAMEACASSHHWGRTFEELGHAVRLIHPRFVKPFVKGSKNDAVDAEAIFEAASRPTMRFVPLKSIEQQDLQALHRTRDRLIVQRTALINHTRGLLAEYGIVMPAGASRFRLQIDKMIETAELSNLAKTLFLQLVKEYRDLDARVSALDDMLVEICRTDERCKRLTALPGVGPIVATSLVAAIDDGRHFKSGRALSAWIGLVPRQYTTGGKPRLGGIGSRANHYLRRQLIHGARSALLRIGKHDDRRSKWAQNLLSRAGHNKTLVAMANKTARMAWAILRSGESYKTA

SEQ ID NO: 238137 - protein, 411 aa, unidentified
MQVIYERCCGLDVHKRTITACRLKWSGREWQREVRQFGTMTKDLLALSDWLVSEGCTHVAMESTGVYWKPVYNILEGQFELLVVNAQHLKAVPGRKTDVRDAEWIAELLAHGLLRGSFVPPPSVRELRELTRYRTSLVRDRARTINRLQKVLEAANIKLGNVVSDIDGVSARLMLEALVAGERDTEQLASLAKGRLKEKHAQLMEALSCRLQPHQSFLIAEHLAQIDYLEGAIERLSHEIEERLRPFEQEIGWLDTIPGVNRRTAEVLWAETGGDMGRFASARHLASWAGMCPGNNESAGKRRSGRTRKGSPWLRHCLVEAAHGAAHTKNKYLSSQYHRLAARRGKKKAQIAVGHSILVIAYHLLTRKQPYSDLGANYFDERDRQAVTKRCVNRLQRLGYNISLEKLQMAA

SEQ ID NO: 238138 - protein, 339 aa, unidentified
MNSTTIGIDLAKTSFHLAGANRHGKIVLRKQLSRSKLLSFMAQHPPCLIGLEACSGAHYWAREFAQLGHEVRIIAVKFIEPYRKGGKNDNNDAEAICEAVRRPNIWHVPVKSADQQAQLCVHRVRQGVVRDRTAWVNRLRGLLAEFGLVLPKGRYAVQSAVPAIISDADNGLPELARQMIHDLWLGIQRANDQVLEYDRALSRLAREDETAKRLLTIPGVGEQIATGVVASVPDPRLFKNSRQFAAWLGLVPRQYTTGGKIRLGRITKRGDKYLRMCLVHGARAVVANLGDKQDQVSCWIRGVIERRGYLRAVVALAARNARLIWTLMMKRENYRVIEA

SEQ ID NO: 238139 - protein, 311 aa, unidentified
MNKDTIGIDISKDTLDTHRLSTGAAARFANSAAGLRALRRWIGAQMPDLVVYEATGAYHAALERGFAGVLPLVKVNPLQARRFAQARGTRAKTDAVDARVLAVLGSALDLAPDVPAGKNQHDLKELQIARMALIKERTRLLNRSKTQSLALLKRQSKARLEQIKRQLTELEAALLDLTRQCPKRARAFDILCSIPGLGPVTAVAILVECPEIGTLTRKQIASLAGLAPMTRQSGQWRGTAFIQGGRKFLRDALYMPALVAARYNPDLRQRYQTMIQAGKPAKVALTALMRKMIELANALVQKNREWAPKTA

SEQ ID NO: 238140 - protein, 355 aa, unidentified
MIYTGIDYHKRYSVACTLDAQGHLLHEARIDGNAAAAFAAYFKHLGTPSEVVIEACWNWGSLYDLLEDTAGVAKVVLSHPAKNRIIADAQIKNDRVDAKALATLLRGDFVAKVHVPSRDVRRRKNVIRQRLWLARLRTMIRNRIHCVIDRHPQLARPAVKDLFSNQGKAWMKRAPLPATDRTLLDDDLALHTLLQAQIDALEKIIVADNAANPLAVRLQTLPGVGKILAPIMALEIDEVERFITADKLCAYAGLVPTTHASGGKIAHGRMLPFCNRWLKWAFIEAAWVAVGCSDYFGAFYGKQRLRGKGANDAITIVARRIAKIAWQMLHDGRDYSPQAPTRSKKPISPAALITD

SEQ ID NO: 238141 - protein, 350 aa, unidentified
MKRTTKYVALDVHQATTVASVREESGRVIARSILPTEEWALVEFFQGIRGAIHVTFEEGTQGQWLHDLLVERVDRVVVCDRRGKARQGHKGDQADADELSELLRQGALRAVYHGSPHRSTLRELTRTYQNVVEDATRVMLRLKARGIRTPGKRVYHPRDREEWLAKLADDGARFRAQALYAQLDVLRELRPKVKAAMVIEARRDPAWTVLRSIPFLGPVRVALLLAIMRTPWRFRTKRNLWAYCGLAVVTHATSEFAWVDGQAVRRRRAPMTRGLNRNHNPELKGVFKGAATAAIGRPGPLKDFYEERIAGGMREELARVTLTRKLVAVTLRLWKKGERYDPEKLTMQAR

SEQ ID NO: 238142 - protein, 385 aa, unidentified
MVKGSIVDTSFGEASAASRAERRRQREIGCSLVNETGIERDPRCRYGTSPNSRRNRRPIRPTSSHLQDWEQTMTEPLFIGIDVAKDTFHVASCPAAVNISLPNNSTGTQQLIKTLKAYTISLIVLEATGGYERPIVADLLEADFKVVVASPRQVRDFARGIGEFAKTDPIDAAVLARFAQVVQPKPKPPSSPETGELADLVRRRKQLIDLRVQETNRSQLALHPKIRKSVRKMIKTLDYQIAELDRIIEEHIKSDDEFRKKDEILRSTPGIGPGTSAILLSQLPELGQLNRQEIAALVGVAPYDFKSGRFAGKSRIWGGRKDIRCALYMAALCATRFNSVIHRFAVRLAEKGKVFKIVITACMRKLLIILNTMIRNQTLWRPENI

SEQ ID NO: 238143 - protein, 389 aa, unidentified
MKTNSSAPSKFYIGLDVHKAETVIAILESDRDAEPRHYGSVTTSQHGIERALRRIVKKQQCRLYDLHVCYEASGCGFWIARRLLQMGCQCEVIAPSLIPTRSGDRVKTDKRDAMKLARSLRANDLVAVHVPDSTDEAIRDLCRARTDAVDDLRRARTRLLALLRRLGYHYDGKTHWTEAHKRYLRHLTLPDAAHNRVLEDNLTTIDFHHERIARLEDAMLQLLEDWQRRALVEALMAFKGFKLVAAMVTVSEIGTFSRFEHPKKLMAFLGLVPTENSSGTSKRQGGISKCGNPHARWILIEQATHYRVPPKVSAQLSKRQENTPRWIKELSWATQTRLSHRFNQLRKGQLHYNKIKVSVARELCGFLWDLGARIEAKQAPGAAAKSSAA

SEQ ID NO: 238144 - protein, 349 aa, unidentified
MGEVSTIGVDIAKSVFQIHGVDAEGTVVIRKRVGRARVLEFFADLPPCRVGMEACATAHQWARELKKLGHDTRLMPPTYVKAYVKRGKNDAADAAAICEAVTRPSMRFVPIKSVEQQSVLMLHRTRDLLIRQRTQLINALRAHLAELGLVAAKGREGVHQLVAVVMECGDERLPSNARFACQAIVTQLHAVQIEISGLDKRITQIHRINVDSRRLDTIPGFGVLLSTAVVATMTDPKAFKTGREFAAWIGLVPRQNSTGGKERLGSITKQGDRYLRRLLVVGATSVINSARARPYKYPWVIELLGRRPTKVVAVALANKMARIAWAVLAKGEPYRAPTRPWNAVVPAAA

SEQ ID NO: 238145 - protein, 464 aa, unidentified
MANQKLWKNRKERKEWARRLQSKDPGLEIVHPHAAGIDVGNGAHYVAVRPDRDPEPVRRFECFTGDLYRLADWLRQCGVKTVAMQSTGVYWIPIYGILEERGFHVYLVNARHTKNLPGRKSDVQESQWLLKLHTYGLLNNSFQPPSEIRILRTYWRQRGEHVQGAATCIQRMQKALTQMNVQIANVISDVSGLTGQTIIRAMVAGERDPQKLAELSDPRIHASREEVAKSLEGNWRPELLFVLQQEVEMYDTYQQRIAECDLRLQEHLASFMGAVLPQPNESEPKRKKAKPAKNAPRFELHSELQRITGVDLTRIDGIDVMVAQTLISEVGLDMGRWKTEAHFSSWLGLCPDNSTSGDKVLARGTRRVVNRAATALRMAAVTLMRSRTYLGAQYRRLRTKLGAPKAITAMAHRLARLVYRMLKYGQQYVDKGSEYYENRYRRQQIEFLKKKACRLGLRITLAPA

SEQ ID NO: 238146 - protein, 391 aa, unidentified
MSLYFVGIDISKYKHDCCIISATDQKVISKFTIKNDKAGFEKLITTFNSLSSPEDIRIGFESTAHYALNLELFLENANHSFMEVNPVLIKEYKKSTTLRRTKTDSVDCESIARWLMTVEYKPHSKGFYHAYSLKSLTRLRDKLIRQRSFYLVKITNVLDHTFPEFKPFFNERLSKTALYLLENYGSAEKMAHMNSVSYEKLRSISRGKFSPQQFIALKELAANTVGVNNSIFDVELNSLLTLYKTLVTEINTLEKEINRLIEEVHPHYLSVPGIGPISAAIIYSEYGDISHFDNPSQMLAFAGIEPGINESGTESHGGRMVKRGSSQLRYALINCCLPLIRFDMTFATYYAKKRAEGKPHRVAITHVAKKLIRVIYALERQDTDFCTQKLR

SEQ ID NO: 238147 - protein, 362 aa, unidentified
MTALSIVSHCHPFVVGVDTHARNHVYAILDATNGALLDTQSFPTTATGINRAIKWVARRTNADADTLWVIEGAASYGAILAGTVATHGFPVTETPRMDAKKNRGVGKTDALDAHRMAMAVLPLPVEKLRRPRLNEGIRQSLRILVTARESMSKDRTRSINALNALVRGNDLGIDARRKLTPVQIEEISRWREREEELALSIARAEAVRLAKHILNLAEQLKSNEQKLDELVKVSEAAPLLEEKGFRAVTAAKCLVAWSHEGRVRSEAAFACLAGVNPIPASSGNTVRHRLNRGGDRRLNSALHMAAITRMTYDSETCDYVEKRRAEGKTDKEIRRCVKRYLARRIFRILTAAAQAKKVQDVA

SEQ ID NO: 238148 - protein, 349 aa, unidentified
MIIIGVDFHPEFQQIALVDTDGGEFQEKRLMHREEAEGFYRALAAAGQKVRVGMEASGFARWFERLLGELQLELWIGDATEIQRKRERKQKTDRQDAQHILKLLLKDDFPRIWVPSWENRDLRQLLWHRHRMVQARTRIMNQLQAVAINEGLRCKKRLWRAGGRQQLESFSLGPWASRRRSELLELLDRLSSTIAELSQAIEHEAEKRPEVQRLRTHPGVGALTALAFVLIIGDVGRFQCGKQIASYIGLVPLEKSSGNRRRLGHITKQGNSMLRFLLVEAAQVTVRSVPEWRSQYFRLTMRRGRKTAKVAMARRLAIRLYWMWRQGLDYEELAKFGSHAGQPGNPDGV

SEQ ID NO: 238149 - protein, 326 aa, unidentified
MMNYLGIDVSKEKIDCCLFINGISGKGKSKIFSNSESGFIKLTDWLSNLNINTNDLLVTLEATGIYHENLCYFLHDLKINIAISNPMRTRRFAQGMSILTKTDKVDSEVLAKYGALAPIKYWKPDSKNFRELRDLMIRRDALSTDLVRESNRLEKSTFTKTSLHVIAMIKESIDSLQTRINHIDVIINELIKNDSELTNEMNLLISIPAIGQRTALQMLTLFHGKDYDNAGAAAAYVGLVPIQKQSGTSVRGATRISKSGSSRIRAALYMAAIVAIRFNPHSKVLYNRLLKNGKSKMSALCAVMRKLVYLCYGVLKNKTPYQPDYA

SEQ ID NO: 238150 - protein, 343 aa, unidentified
MQTITTIGLDIAKSVFQVHGIDAGGNVIFRRQLKRRHVLAFFEKLPPCLVGIEACASSHHWSRELQALGHTVRLMPPAYVKPYVKRHKNDATDAEAICEAVTRPNMRFVATKTPEQQSCLTLHRARHLFIRQQTSVINAIRAHLAEFGIVAPVGRHGVEQLLGIAADVNDKRLPEVARACVTALGAQLQTLKAQILEFDRMIRVWHRSSEASRRLDDIPGVGPALATALVASIADPKVFRSGRDFSAWIGLVPKQNSSGGKDRLGSISKRGDRYLRSLFTTGALAVIRYAKIHGTKHRPWLTALLMRRPTKVVAIALANKIARMAWAMMAKGERYKQPAALAA

SEQ ID NO: 238151 - protein, 424 aa, unidentified
MKSLTDCEFAAFIGIDWADSKHDICLQVANTEKREFAVLPHRPDAIDQWACSLRQRFQSRPVAVCLELRKGPIVYALQKYDFLVLFPVNPAMLAKYREAFTPSHAKDDPTDAEYQLELLVQHRDKLKALRPQSAPMRTLESLVEQRRRLVDDSKRITNRLTSALKQYYPQAVRWFEEKDTALFCDFLSRWPTFKQVKQARRATLEGFFREHRVRSAKLVEERLAAIKSAASLTEDIAVITPHRLLAQVLVDQLRVTLQAIERFDAEISAISQTLPDYPLFRDLPGAGAALAPRLLTAFGEQRERYESAAGVQKYTGIAPVTERSGKQRWVHWRLQCPTFLRQTFVEWAAETITRSFWAGAYYRQQRAKGCSHPAAVRALAFKWIRILYRCWQTRTPYDESKYLNELRRRGSPLFNSIAEAAKTT

SEQ ID NO: 238152 - protein, 359 aa, unidentified
MKQTTKYVGLDVHQATTVAVVGDETGRVIARSVVPTEAPALLEFVRGMRGAVHVALEEGTQAQWLHDLLVGRVARVVVGDRRGEPRRGSKGDWHDAEWLMGRLRTGELRAVYHGSPHLATLKELGRAYRNVIEDATRVMSRLKALFRGRGIRTTGRGVYDPAERAEWLAKLDGAGVRLRAATLYAELEVLHTLRLTAKAALVAEARRDPAWAVLRTIPFLGPVRVALLLATLQTPWHFRTKRQLWTYAGLAVVTHTTAEYALDASGRPVRRRRPPMTRGLNRNHNHVVKEVLKGAATVAAVRAGEFRDCYQTLLARGMREELARVTLTRKLAALTLRLWKTGERYDARKLTTSGVVPAR

SEQ ID NO: 238153 - protein, 417 aa, unidentified
MPYTVAGIDIDKKVLMVVVAIAGDEVADPAGEAIEFECRRFGTGATERKHVVSWLREHGVTEVVMESTAQYWKPVWLDLEPHFAKLHLAQAHSNRAPRGRKNDFRDGKRLTRRLLAGELILSFVPDAAQRSWRTATRGKHQLVRERVRLQNQLEALLEEARIKLSSVISDLLGLSGRRILQAMADGETVPERLAEMGDGRLRCSKEELSDALNGSLQSIHRELLKLYLERLNLLDQQIARLDQLTAAALKQHQDAVTRVAEVPGFGVDSAQQLIAEMGADAEAFASAGQFTSWAGLCPGSEVSAEENHSSRSAKGNRFVRRILTQAAQAAVKKKGSYFQSLFRRFLPRLPYNGAIWAIAHRLGRLVWKILHDGVTYIEQGQEATPAAKKRRARRMVQALRKLGYSVALTPIPEPGRG

SEQ ID NO: 238154 - protein, 414 aa, unidentified
MTETAYAMYVGIDWGTATHQVAVLDAQRGSLGERAVDHDGAALQAFTEWLTLLADGEPARVAVALEVPRGAVVDTLLERGFHVFALNPKQLDRFRDRYTVAGAKDDRRDAFVLATALATDRPAFRRLEPEDPLIVELREWSRAEDELREEWGRLANRLREQLHRFYPQALALCPAADELWFWSLVGLAPTPAAARRLRRAAVVALLREHRIRRLTADQVLAALQTTPLRVAPGTVEAASAHAALLIPRLELVDRQRRDCARRIERLLDALATTGEHQGHRDVTILRSLPGVGRVVAATMLAEASRLLAARDYHGLRTQAGVAPVTRQSGKRLLVGMRYACNPRLRNALYYSGFISVRYDAHSRHHYQRLRGRGHSHGRALRGVVDRLLTVLMAMLAAQTTYDPARRRAALVLAR

SEQ ID NO: 238155 - protein, 338 aa, unidentified
MIVIGVDVHKQSVTAVAVDEAGRMLDEKTVAVGGDELLGWAAALAGERLWAVEDCRRLTVWLERQLLAAGEELVRVPPKLTVPERRAGRERGKSDPIDALAIARAALREPDLPRPREGEQVYVEIKLLVDHRDDLVDERRRVQQRLRWHLYQLDPTFAVPLRLLARPSHLERVSRWLARQEQELQVRLARELTTRIRALTRLIDELDQELERRTAETAPALLDVPGCGAVTAAKLLAEIGPIDRFRSDAQLARHSGVAPLEASSGRIQRHRLDRGGNRQLNAALYRMAITQARYHPQVRAYLERKRAEGKSRREAIRCLKRLLVRVVFNTLKAEPALT

SEQ ID NO: 238156 - protein, 343 aa, unidentified
MWSVGLDVHQAWSCMCILDEHGKVVNRMTVAGRWPKLVAELEKLNHPMAVCFEASCGYGHLYEQLSRLAQRVVVAHPGQLRLIFRSKRKNDRVDAEKLAKLLYLDEVPVVHVPDVNVRDWRSLIQFRNRLIARRTRTKNALRALLRGHGIATPARQGLWTGKGQAWLAGLELPTPQAALQRDLLLDELTEVSARIKRVEQELNKMARQHPGVRLLRTIPGVGPRTAEAVVAWIDDPRRFARNKQIGTYFGLVPCQDQSAQANRLGHITREGPSIVRKLLTEASWQGIRHSPEIRAYFERVQGGDPDRKKIALVATAHHLLRAMLAMLRNNQPWRGSVQNQKVA

SEQ ID NO: 238157 - protein, 428 aa, unidentified
MIPSDQIDHSHEHTDDAIPYQWFVGIDWGSQTHQVCVLDRDRHRVGERSVEHEGGALAECAAWLTHLAGGEVHRVAVAIEVPRGAIVELLVERGFHVFAINPKQLDRFRDRHTVAGAKDDRRDAFVLADSLRTDRPSFRQVHVEEPHLLMVRELSRTEEALLTEFRRATNQLREQLHRFYAPLLQLCPAADEPWLWDLLELAPTPARAACLTEAHVAEVLKTHRIRRVSAVDVLKLVQAPALPVAPGTAEAASAHCALLLPCIRVLAAQLQTCARQVETLLTALGTVEAPTAPTSDVAIIRSLPGVGRKITAWLFAEAAQPLAERDYQMLRTQGGVAPVTKQSGKRRQVVMRRGCNPRLRNALYHMAHCVTQRDAYFASLYAALKTKGQSHGRALRSIGDRLLRTLVAMLRDHTLYDPSCRQAVLMER

SEQ ID NO: 238158 - protein, 335 aa, unidentified
MCQEGESLPLYSWRCFVGAVLGIDVGKANFHCALLIDGHSRSNSFSNSLTGFGKLLGWLRNRDVAHVHACLESTGGWSEELAKFLHEHGHDVSVVNPAAVKAFGQSELSRTKTDKADAALIARYCHAMAPRLWTPPSPSQQRLQRLSRRRVALDDMRVQENNRLQGPGIEDVRSSIEATIAFLSRQIAEIDAEIAALIDGDSSLRGKRELLKSIPGIGERVATTILGELPQITEFRNGKALAAFVGLCPREYRSGTSIGASWLSKIGNGHVRRVLYMPAITAMRCNPVLSAFAGRLRANGKRPKQIIAAVMRRLIVIAYGVLKSAKPFSARGSRC

SEQ ID NO: 238159 - protein, 344 aa, unidentified
MDHFAGLDVSVKETSVCIVDDTGRIVREVKVASEPEDLLRVLANPIYQFKRIGLEAGPLSQWLFSALAEAGLPVICVETRHMRAVLKAQINKTDRNDARGMAQMMRAGLYRPVHVKTLRSQKLRMLLTHRKLLQSKAIAIDNDLRGTLRNFGLKVGVVRTVKFETRIRELVANFPDIAAMVEPLLVVRRTLREQFCVLHRRLLAIVRDDEVCRRLMTTPGVGPVVSLTYRATVDVPARFRKSKSVGAVFGLTCAKYQSGEVEWSGRISRCGDEMMRVMLYEAAQSMFRSNKWSWLKAWAMQIARRCGIKKAIVALARRLAVIMHRIWVDGTEFRWTREQASAAA

SEQ ID NO: 238160 - protein, 367 aa, unidentified
MKKVSTVAAKASRNISQPQLTIGLDLGDRDSWYCVLDEAGQIQREQRVRTTAKALGEVFGAMPRSRIVLETGTHSPWISRLLTELGHEVIVANARKVRLIGESRKKDDRLDAQTLARLARIDPALLSPVKHRSAQAQADLTMIRARAGLVRARTGLVNTARGVAKSYGERLRGCNVRNMNPEKAAGLSPELQRALEPLLSAIEELSERITEYNDRIEVLAQESYPQVALLKQIKGVGTLIALTFLLTLEDPHRFRKSRDVGCYLGLQPGRRNSGQSEPQMHISKEGDPYLRTLLVQGAQHILGPFGIDCDLRRWGLKLAERGGRNAKKRAIIATARKLAVLLHHLWVSAEVYEPLHNSSRTTVAAAA

SEQ ID NO: 238161 - protein, 414 aa, unidentified
MDVLHERCAGIDISKRDAKGCVRTPSPRRKGTFTQQTTTFGATTNAILDLREHLLGAGVTLVVMEATGDYWKPFYYLLAEELNVILVNARQVKNLPGRKTDVSDAAWLAQLGSHGLVRASFVPPQPVRELRDLTRTRTQLTRERAQVAQRLEKLLEDAGIKLSAVVSDLMGVSGRAMLQALIDGQRDPHILADLAKRRMRSKIPELNQALTGRFREHHAFLTRLYLDQYDQLSGAIKQLTVRIEEAMSPFRPALDLLDTIPGVNQAVAEVIVAETGGDMTRFRSAQHLASWSGLCPGHHESAGRVRSTRVRPGNPYLKGALGMAAFGAARTKGSFLQARYKRLTARRGPIKALVAVEHSIIIAVWHMLSDNVPYHELGGDYFTRRDPERAARRAVSRLNDLGYRVTLDPMEAAG

SEQ ID NO: 238162 - protein, 458 aa, unidentified
MYRELQPLRQALSCELKASLPPTGAGIDEEQLLQSYLDRLTLYVGCDVADQTFTLYAQTAGGDEVAHRIDIPNRAQGFQQAWSWMENLREQQHLRILLLAMETTGVYYWAWWDFLAGRPNLARVLYNARTTEHMTEVLSKKVRNDLVDAYALAEQVRLGGTPETLLTEDPDLQTARYCSRFARDLAQQANRKKNQLRSILRAYNPVLEQVFPKHQLHHPAVYALLEKYIFPKEFVQAGVEAITQILEEKCRYAFGEKQAQQLVDLCGRQLVRPIGQEVIHERICQLCEDIQTIQRRQKAFLKKGYALIQDRSETKLLYRSFGAGLSNTLALVSEVGDVSRFPDGEHLASFLGITTSKHISGTTIFHSKHITKQGSPNGRYAIVNLAQHLCRRVPRYKDMYQRIKARKPARIGYLIAVVAVARDFASNILYDMWRNQRPFFLEVADYRKYRQEHPNSPT

SEQ ID NO: 238163 - protein, 345 aa, unidentified
MNSMYYIGLDVHKKTISYCVKDASGQVHREGKIGATRRELDDWIETLPQPWSVAMEATIFTGWIYDHLLPHAAQVKVAHPLMLRAIAAAKKKNDRVDAGKIADCLRCDFLPECHMAPTAIRDRRRTLRYRHLLVRQMVQMKNRISGLLMETGVEYNKRRLHKVGYFGELLSSNEEVNESIRPLLKLSRETIVRLQKTEYALLSSLQRDPLLAERIKRLRTVPGVGPITALTWALEMGDVARFRSIRQAISYCGLCGDEKSSADKVIRTPLSKQRNKHIQRVLVEAAKLAPREDHKLALVYETEKQKGNANRATLAVARKMVAYLLAVDRGERNFVPAEERSRTAA

SEQ ID NO: 238164 - protein, 339 aa, unidentified
MVYVGLDIHKEFCQACVMNESGKVLSNEKFPSTQEALDKFLDRFDKAKFVLESTGIWEFIYEGIEKRGFEAVLAHPLKVRAIAEARVKTDKVDAQTLAHLLRADLIPRSHVPSRDMRNLRQLVRQRTYLVRQATSLKNRIHAELLRNGIRRPEELKTKFSGKSIRWMRSLGLPTVNSNLNCLESINEQIEKLNSLLLDEYGMRRNAQLIATVPGIGFYGALLILSEIDDVRRFPHPSKLCAYAGLVPTVRQSASSVRYGGISKEGSAYLRWILIESVYVHLMNHPDSRLSKFYRRIERRRGKKVAIVATARKLLHIIYWMLLNKEKYHGQGSNPLLKPA

SEQ ID NO: 238165 - protein, 407 aa, unidentified
MGPAARVWHHRCCLNQPMERPVKRNDLSRSLVAFDQNSTLVAVVELGFSSWLVAGLVPNVTRQPLKKLRSDPDALLGLLLRWRDQATKAGGRIKRIVLAFEAGRDGFWLARWLRARGIEAYVIHPASIPVSREHRRAKTDRLDAGLLMRAVLGWLRGEPKHCSMAAIPTVAEEDARRPTRERETLVGEQTRAVNRIKSTLIRFGIRAFKARLRQASKHLGELRSPEGEPLPPNTMAELRRDLVRLQVIREQIRAIERARLERLKRAPRQGTHPMMRMLARILGIGIETADLLVHEVLTRKLRDQRAVARYGGLTGSPDESGTKRRERGLARAGNARVRHGMIQLAWRWLKFQNKSALAQWYGARTTGGKPGLRKTMIVALARKLLIALWRYVTIGEVPAGAVLRPAT

SEQ ID NO: 238166 - protein, 355 aa, unidentified
MSSVKCIGLDVHQATTVAAVVDGSGKLVMQAIIETKASTVVEFIRGIAGEVSVTLEEGTCAAWLHDLLLPHVHRVVVCDPRKNALLKQGNKSDKIDARKLADLLRTNMLSSVYHGQTGTGALREMARSYLALTQDTTRVMNRIKAVYRGRGIACAGQKVYTARHRDAWLEKLSEPSRRRRAARLYEQLDQLERLRKQARHDLLEESRKHPASRWLRQIPSIGAIRAALLIALMQTPHRFRSKRQLWAYSGLGLETRDSAEYRIRDGHLQRARKQVTVRGLNRNRNRHLKELFKSAAIGASTQPGPFADYYAGLLQKGIKPAMARLTLARKIAAIVLAVWKKGERFDKTKLNTQAA

SEQ ID NO: 238167 - protein, 373 aa, unidentified
MSDVIASFDPVGVREWVALDAHKLSIVAATLPPSGGQPQLHRIETTEKAIRRFIDRLGGPEGLAVCYEAGPGGFDLLRLLRRIGVACEVIAPSLVPVRTGDRVKTDRRDAKKLVRLFRAGELTFVAAPTPETEGLRDLLRCRDDLRCARTAARHRVLKQLLRHGRIFRDGKKAWTKLHRGWVAGQRLDDPLAQVALEQMLIHLDGIERQLDALDGRLDVVACSERWAGHVGVLVRFRGIATLTALGLIAEIGDFARFSHPRELASWIGITPSEYSSGDQQHRGHITKAGNRHARRLLIEAAWHYRHAPRRPASGPQPDERAWNAQIRLHHRYRHLTEHGKRPTVVNVAIARELTGFLWAAMTSQPDRKEALAA

SEQ ID NO: 238168 - protein, 379 aa, unidentified
MSNYSKYVGLDVHKETIVAAIAKAGRGDAMQYGEIDSTAEAIQKFAKKMSANGERVLFCYEAGPCGYGIYWQLKEMGQECMVVAPSLIPKKAGDRIKTDSRDAVTLARLSRAGELTAVWVPDKEQEAVRDLTRAREDMKVMEHHARQQLGAFLLRHGKRYFGKSAWTQAHFRWMEDLRFEHPCQQIVFQEYVDMVKHAQGRLEALEQQMLAVLETWSMREVAIALMALRGVKLIAAMTILAELVDLSRFESAPQLMAYLGLVPSEHSTGQKKKRGGITKSGNGHVRRVLVEAGWSYRFPARKTAALQRYAEKTSGEVQEIAWKAQKRLCMRYRHLLLKGKLKVEVCTAVARELTGFIWAIACEVMKKRGIKTITKAKAA

SEQ ID NO: 238169 - protein, 363 aa, unidentified
MFTERTSVGLDVHARSVAAAGIDGVTGELFQTKLTPSIEHIRSWVGDLPGPVAVAYEAGPTGFGLYRSLTAAGIRCEVVAPSKLQKPAGARVKTDAKDAIHLARLLRLDEITSVAIPTVDQEAARDLVRAREDCRSDLMAARHRLSKLLLRHGIVYYGGKAWTGKHDLWLRTEALPKLTTRATRLAFDSGYETVLAVNARRGRLDAVIEAMAADSEFTPVVRRLGCLRGIATLTGFALAVEIGDWHRFTGNTIGSFVGLVPSEHSSGNTKSQGSITKTGNGHARRLLVEAAWHHRSRYTVGATLRARWDLAPAAARVRGDEGNRRLHHRWVKFIDRKKRNTIADVAVARELAGWCWSLAVIDD

SEQ ID NO: 238170 - protein, 352 aa, unidentified
MQHFIGCDVHTRNQVVAWIEEETGEIKKRRLAHEGKEVKEFYAQFPRGTVVGIEATFPAYWFERLMGELGHELWVGDAARIRASEVRYQKTDPRDAEGILDLLRTGRFPRIWVPSLEERDLRQLLVHRMKQVRVRTQVKNQLHALAISQGVCRKGKLWSVKGRKELESLALLPWAARRRKELLESLDRLDEQVRELDRAVEEAGRAREEVALLRTHPGVGTVVALAFVLTVGPVERFSNSRKLVSYLGLNPRENSSGGRQRLGSISKQGNTMMRWLLVEAAQTAARLDPQLRRIYQRLKKQKTSGVAKVAVARRLAVRLFWMLRTRHNYTQLVHMSGSPSSAVVPPTAEPTV

SEQ ID NO: 238171 - protein, 401 aa, unidentified
MSAVWAGIDSGKWTHHCVVIDQSGTVLLSKRVENDETVLLDLIETVVGIADGDNLCWATDLNSGGAALLIALLAAHGQQLLYIPGRVVHHAAATYRGDGKTDAKDARIIADQARMRTDLQSVRGADQISVDLRLLTARRTDLICDRVRAINRLRGTLLEYFPALERAFDYSKSKAALTLLSGYPTPDGLRRIGTSRLTVWLKNRGCRNSAAVAQKAVDAASSQRTRLATQTIGSTLVTKLAAEITVIDHELADLDAQITERFTRHESADVLLSLPGFGVVLAATFLANIGGNLDGFDTVDRLAAVAGLAPVPRDSGRISGNLHRPRRFNRRLLRTCYLAALSSLKNSPASRTFYDRKRREGKSHKQALIALARRRINVIWAMLRDHTTYQEPTPATLPLVA

SEQ ID NO: 238172 - protein, 319 aa, unidentified
MAQNGLVVAGIDIAKDKVDVCIRAVSQRQTFPSTAEGRRQLVSWLRKYKVTKAVMEASGGYEREWAKALRVKDIEVRIVDPKRVRHFAKSAGRLAKNDVIDADTIAWFAETFGEAPGQAHDAARETLQQLVNARLGLMEMRTMVSNKGEHDVPEAVKNGHARLLKTIAVEIAALEEAIAAMVKATPHFAARAEIIESVPGLAGTTSAGLIAMMPELGEASNEAVSALMGVAPYDDDSGKRQGGRQIKGGRRKVRNLFYMSCMGAATRHNPALKTFYQRLLAKGKKKKVALVACMRKLIVILNIMLARGEKWDASRYAVS

SEQ ID NO: 238173 - protein, 375 aa, unidentified
MGKNTGFVGLDVHAETIAVAVAEGRNQVRSLGTIANRPEAIRRLIGKLGKLTEVKVCYEAGPTGYALYWELTRLGVQCEVIAPSLVPMKSGDRIKTDRRDAERLARSYQAGDLTPVWVPDSKHEALRDLVRAREATKEDQLRAKHRLLKYLLRYGQRPADDGRSWTAAWWQWVRALRLPHAEQNATLLELILEVDHQGQRIERFDSAIDQAVAAAPEQLRAIVDALQALRGVAKMTAVTLATEFGCFSRFEKAGQVMSYTGMVPSEHSSGPKTRRGAITKTGNSHLRRVLVESAWHYRHQPKLCKRQKELQTALSPKVAAIAWSAQQRLHRRYWALQNKSKPSAKIVTALARELAGFVWSIGVETERTLKLGKAA

SEQ ID NO: 238174 - protein, 346 aa, unidentified
MKHYLGLDVSLKLTAICAVDQTGSVIREGVVDSDPEMIAEFVRSNAPSVVRIGLESGPTATWLWTELKQLGLPVICIDARHAKAVLKMQINKSDRNDAAGIARIMQTGWFREVRVKDLDSHSVRALLASRALLVKIKRDLENQVRGLLKNLGLVIGRAKLNVFAVRAEELIEGRPELMAAVRPLLAARHAIERQVDDLDHKVMRLARNNAQVRRFMTAPGIGPITALCFLATIDDPTRFKRSRSVGAYVGLTTRRYASGEIDWTGRISKCGDKMLRSYLYEAANVLLTRVAKWSTLKSWGVRLAKRSGLRKAKVAVARKLAVILHRMWIEGTEFKWSSKEVANQPA

SEQ ID NO: 238175 - protein, 404 aa, unidentified
MDRQRTVAGLDVHKDSIYLCVMGHDEAIIFQKTYGTLTPGLRQMCADMVAHGVTEAAMESTATYWVPVWNALCDSMSLKLVNPYFIKQLPGRKSDVKDAQWIAECLLKNLIKGSFVPDGVVQDMRKYNRRIFDLNDDMVYNTNKLDAALQRCGFRLSNYVTKVNGKSYRSCIAAIINGTTDPAELVKLVHGKTVNKHGREVIMAAVTADFHQADIDLIRQYKEMIDIIERQIKDCQSALTALCRKHFPTQYERLQTIPGVKERAATAIIAETGADMRHFPKSTNLVGWCGLRPRNDESNRKIKSNKITHGNKFLRNILIEIAWTASRTRNCFFSNFSYVQCTVRRKTKMKVQVAIARKILVAVWHMLSNDEDFIDVYLRGLAKEAEEHRQKQESIQRIELSMVN

SEQ ID NO: 238176 - protein, 343 aa, unidentified
MDSFAGLDVSVKETSVCIVDETGKIVREVRVASEPESLLAVLKNPAYHFKRIGLEAGPLSQWLFGALAEAELPVICVETRHMRAVLKAQINKTDRNDARGMAQMMRVGLYRPVHVKTLRSQKLRMLLTHRKLLQSKAIAIENDLRATLRNFGLKVGMVGAVKFEARIGELVENQPDLALLVEPLLIVRRTLREQLGILHRRLLAIVRDDEVCRRLMTVPGVGPVVSLTYRATVDVPARFRKSKSVGAVFGLTCAKYQSGEVDWDGRISRCGDEMMRTMLYEAAQSMMRSKKWSWLKAWAMQIARRRGMKKAIVALARRLAVIMHRIWVDGTEFRWTRDQASAA

SEQ ID NO: 238177 - protein, 313 aa, unidentified
MVFVGIDVSKHRLDVHVRPSGEAWSVDNDAKGHARLAERLGALSPSLVVLEATGGYQTAVAAELTAAKLAVAVINPRQVRDFAKATGRLAKTDEIDAAVLAHFAEAVRPEPRPMPDELTLEIHALVVRRRQLIDMRTAEMNRLETCRVVPVRRNIQKMINMLNKQIEKVDDDIDTTIRSSPVWREREDLLSSVKGVGPTTARTMLTQLPELGHLNRRRIAALVGVAPFNHDSGKHRGERTIRGGRSEVRSVLYMATVTAVRHNPQIRTVYERLLAAGKKPKVALIACARKLLTILNAMMRTNQPWRLDAPKVA

SEQ ID NO: 238178 - protein, 393 aa, unidentified
MFTADEQGRRLASARLAEGIEGVTRFHDLAAAHAGDPAEVVIGIETDRGLFAAALLAAGYQVFAVNPLSVSRYRDRHGVSGAKSDPGDAKVLADLVRTDRHNHRRTAPDSDLAQAVKILARAHQSMIWNRRRQANQLRSALREFYPAALAAFDDLTSGDATAVLAAAPEPARGAALSKTQLAAALRHGGRTRNLSERATAIQAALRAPQLQPAPVIAAAMGATVRSHATVIAAMSAQIAALEQQLAADFEQHPDAPVIRSLPGLGITLSARVLGEFGDAPNRYATAKCRKNYAGTPPITRASGTRRAVLARHARNKRLADAIYLWAFSAITASPGARAFYDQRRAAGDTHHQALRALGNRLVGILHGCLAHHAPYDETTAWAHRAPSQLNPAA

SEQ ID NO: 238179 - protein, 359 aa, unidentified
MNRNTGMSAGQIIGTVNGMQVIGLDIAKHVFQLHTPVDMGTGEIVNVQIKRAKVLEHFANKQPCLIAIEACGGAHHWARELSAQGHSVRLLHAKIVRPFVSGNKTDATDARAIWLAVQQPGVKFVGIKTAAQQATLTLHRQRELLMKMRTMQTNALRGLLYEFGVTFVQGQKALFKDIEQTLEELAVQLPQMLRDSLREQVARIKAMSEDMLAIEKRLGLQLKADPQMQRIAQIPGVGLLTATAAIATMGEASAFKSGREFCAWLGLVPKQTGTGGKVRLGGISKRGDTYMRTLLIHGARSVLAHAKERGPWLEQIKARRPASVVIVAQAAKMARTIWAVTAKDQDYQRGFKSVRPLAA

SEQ ID NO: 238180 - protein, 413 aa, unidentified
MSQILVGVDVSLKTHHVHFMNGDGQSLDEFSVPNNREGADTLIQRLLKRAQSGQAADLRIGMEATDQYSWHIAHYLRAQLKGYEPDYQTSVYVLNARKVARFKKGYDTLPKNDHIDAWVIADHLRFDRLPRAMQETVQYEALQRLTRTRFHFMKELARNKTFFLNQLFLKFSGLRQDSPFANTFGATSLAVIEELEPERIAEMSIEDLVDFLQVKGKHHFSEPEEIAQYLKKLARSSYQLTPSMKDPVNLSMSVTLSLIRHIEMQVKRLDKEISRLMQAIPQRLVLTSVKGIGDVFAAGLLAEIGDIKRFKSHHALAKYAGLVWSQYQSGEYESEDTSRIRTGDKYLRYYLIQAADSIRKYDSDYQAFYQKKYREVTRHQHKRALVLTARKLVRLVYSLLSTNQLYTPPEGRT

SEQ ID NO: 238181 - protein, 330 aa, unidentified
MNYCGIDVGSKELIVRLIRNGRLGKDKTFFNTSEGVNSLIKYISGKNMVRVCLEATGIYHQDLTIALNNADNIEVMLVNPNVSRKFSEALSTRNKTDKVDATVLAEYACRMEFVPWEAPSDNALKLRMFSRRIVQLTKMKAQSKNQLHALSATAMTPEELISDCESQIEFYEKNIEKLTKRTVELILSSDELKQKFELMISIKGIAEASAIQILGELVMLPNELTKKQWVAYAGLDPRAYESGTSIKKKTRISKAGNRFLRQALYLPALSAKQHDPHIKAFFEHLVDDLGKKKIQAVCAVMRKLLHAIHGMFKNEKPFNGALFYKMEEVK

SEQ ID NO: 238182 - protein, 450 aa, unidentified
MSNGNGVSRGDRNRNARLDRLRALVPVTNAIVGIDLADKKQMIVVCDHDSKVMARRTYHCRTWDLGTALDWAHERAAAKGFAGMTVSCEPTGHRWRVLAQLAADRSMPFVCVQPAVSSWSRRAEDLTHDKTDEKDAVLIARLTAQLRCYEPEPVDETWGRLRHLGARREQLITEISGQIQQMRDLLECVWPAALECAQQPFRSRTWIAALTVIVDRDGGQFDRTRRLGLARFERAVLREISKRGGQKPCRRIARSVFAALSDLAGVIAHRAGALERVQLLLEDWRTAHHSLADTEQRMTGVLDELGLTGLVTSITGISAVGAAAILAQTGDPRRFTTARALVKHAGLAPREKLSGTFTGRTKLTGQGRPGLRLAAWRAVWGAQRANPVYGARYRHLTTREHNRLKPTQAQTVIAAAILRHLHAVITTGQAWNPSIATHGTRSAIRTTAAA

SEQ ID NO: 238183 - protein, 370 aa, unidentified
MQPTRFIGLDVHKERISVSVADNGRQGAVEYLGEIDNDAISLAKLCRRLARPGTALCFCYEAGPCGYGVYRQLIGLGHRCAVVAPSLIPRKPGERVKTDRRDASMLARLHRAGELTAVWVPDASHEAMRDVVRLRGVVRHIVTRARQHLQGFLLRHGRRHGRGTAWKVAYRRWLSTLAFEHPAQQIAFQDYVDAVTDAELRLRRVEEQINALLLEWSLRPVVEALQAMRGVSIINAVVLVAEIGDFTRFSNPRQLMAFLGLVPGERSSGEKVRRGAITKTGNNYARRALVEGAWAYRLKPRVGRHKVDRIEALPKAVRDIGWKAQVRLCARYRRLSALGKNANLVVVAIAREMVGFIWSIACLIQTPKAA

SEQ ID NO: 238184 - protein, 356 aa, unidentified
MNSTKYIGMDLHSATITVAVVNDAGKLNMEATIATEASAVLDFIGGLQGTLQVAFEEGIHATWLHDLLRSHVAEVVACDPRQLPHRKGENRNDKIDARQLAQWLRLGVLKPVYHSPTGLRTLKELVRSYLTLVSDTTRVMSRLKAIYRGRAIPTKGKRVYAPRFREAWLKQLREPGVHQRAELLYRQLDALLPLRRQARNAMLTESRKHAAHKILLSVPTLGPVRVAVLMAVIQTPHRFRRNRKLWTYAGLGLVSRSTANYRMVEGQLARSPKPALILGLNLNHNHVLKALFKDAAATAASRPGPFQEFYARQIAQGSNPEIARVTVARKLATIVLTLWKKGGRFDAAYLKAQQAA

SEQ ID NO: 238185 - protein, 376 aa, unidentified
MKTVRSFVGMDVHKATISISVAEDGRSGLVRFIGVIPNTPEAVHKVAKQLTRHGELDFCYEASGCGYGIHRQLTALGHKCMVVAPSMIPRKPGERIKTDRRDSEKLAILHRSGDLTPVWVPDTTHEALRDLVRARVDASMHLMRARQQLLAFLLRHGRSYPTGKHWTQRHRSWLAGQVFKEQAHGIVFHDYLETVWTAQQRRDALIEKISAMVASWSLGPLVEALRGLRGIDTISAATFIASAGDLSRFESPRLLMGYLGLVPSEHSSGGTIRRGGITKTGNREARRMLIEAAWSYQYPARIAKEKAEILVKLPKNIRDIAWKAQTRLCTRYRSMVARGKKPTVVVAAIARELAGFIWAIGQEVRCNNRSIAAVLV

SEQ ID NO: 238186 - protein, 425 aa, unidentified
MHSKWNNKINQVTENTLVVGMDIAKRIHYACFVDERGRVIEKAFAVHQSKEGFENLYEKIRQMMKEAKKTEVIIGIEPTGHYWMNLAYFLDQYGIPLVMVNPMHVKRSKELDDNLPTKNDKKDALVIARLLKDGRFSYPRILKEVEAELRIGSTLRLKLTEDLASIKNRIIRWLDRYFPEFTQVFPTFGKMALTALERTPMPQDIQGKTAEELVFFYRQVGGMRAPQLPKAKLLIEKASNSIGLTEGQKMAKHEIATLLRQFRLLETEIEAVNDQLTELAKTTMEYDLLASVPGLGDATIVDLLSEVGSFSLYENPRQLIKLAGLTLRENSSGQHKGQKHISKRGRKRLRHILFKVIVPLIRHNLAFKQLHEYYTTRNQNPLRGKQSMVVLCGKLLKILHGICKKKVYFNEQLMMKDLYSLGEAA

SEQ ID NO: 238187 - protein, 359 aa, unidentified
MRIIGCDLHARQQTLAMLDTTTGEVVKTTLQHEGNNVREFYCKLSRPVRVGIEATGSMQWFVNLMEELRIECLVGHPATIRAAEPRKQKHDRRDADLLLSLLVEERFPAIWLPTKELLDLRALLRHRHQWVGLRVKIQNALQAIALANGLRRGSSLWTQAGQHAIASLPLSAHAAYRRNELQAMYVKFETEIEKLNQRVEQQARERSGARLLMTHPGVGPITALATEVFLGDPARFADSKELASYVGIIPGEHSSGKRQRLGGLTKQGNPLLRFLWSEAAIHAVRRDPQLKQFYRRKLIQKGLGKARAAVARKLGIRMWIMLRDRIEYNEFCRRGQMQRRSGDACAGMPEPRYGAKVTG

SEQ ID NO: 238188 - protein, 353 aa, unidentified
MEHKYVGLDVHQSSTVAVVQDEKGKSVMESILATEAEAIRDFLKGLRGTIHVTFEEGTQAAWLYEIVKPVVAEVIVCNPRRNKLLAVGNKADRVDAQKLAELLRCGQLKPVYHGTPGVRLLKELVHSYDSLVSDTTRVMNRVKAIYRGRAISCAGRDVYYQRNREQWLEKLTEPGVRQRARLLYQQLDTLRGLRREARKAMLKESRRHLAFPILKEIPVLGPIRIAQILAKVASPHRFRTKRQFWAYCGLAVVTRSSADYQFREGKAEKRKRAPMTRGLNPNFNHRLKYVFKSAALDGIHQAPFEGYYARLLVKGIRPELARLTLARKIAAVTLTLWKRGERFDELKVSEQAA

SEQ ID NO: 238189 - protein, 307 aa, unidentified
MNGIGIDVCKAMLDVAVHRGPFERFHNTPAGHRKLLSWLATQQPGQVVLEASGGYEQQILDALFDAGHQVVRADAYRCQAFAAATGLPAKTDRLDATNLACMAATLELRAYQPMEPWRRKLREFVRARQQLVDLATSAQNQLEQGTDTSLRRLLQANITQMKKHCVRLEKHIAEQVRQQPQLEAMRSFKGVGAILQAVIASYLPELGTLDGKAIAKLVGVAPIAHDSGTTRGIRRIGGGRIEVRNVLYMACLSAIQHEPQIREFYRSLRARGKPGKVAVVAAMRKMLVILNARARDALAGQAQAIPT

SEQ ID NO: 238190 - protein, 347 aa, unidentified
MVKNTVIAVDLAKNVFEIAISKSPGKVCARKRLSRNGFTLFLKQHEPAAVLLEACGSSHYWGRMARKAGHQAVLLPPHVVRPYVLRSKTDRTDAKGMLEAYRNEDIHAVPVKSVDQQALCALHRLRSGWQAQHTARVNGVRGLLREFGLTIPCGAHHVVRHVHTFLSEPDSSIPPLLHPALLEACDEIKQLKKRIDGVDRTLMEFVKANEIACRLMKIPGIGYLTATALVALVGNVGRFRSGRSFANFLGLTPRESSTAFRRRLGRISHQGNVYLRTLLIHGARSILAWSRREKNLDGLRVWALKIAAKRGFNKAVVAIANKMARFVWVTWRHDRAFVPFVAVQSVG

SEQ ID NO: 238191 - protein, 425 aa, unidentified
MNPPTTYAAFVGLDWADRSHQICLRAAEGPRDEQSKLAHNPLALHTWAHELRARFPEGKIAVALEQTKGPLVYALSMHAHLELFPINPAMLAKYREAAKAASGTKNDPLDAALLGELMRVHRDWLRPLPAVPAAVRGLQMLLEARRGLVDQRTGLCNQLTAALKGYYPQALVLVGHDVGAPLTCAFLRRWPTLSAVQRARPETLRRFYHAHQVRSEERIAERLALVRAAVALTDDAAVLATLPVQVAVLVAQLEVLAPAIADYDRRIADAFAMQADAALFESLPGAGEQLAPRLLVAFGPDRTRYPSALQLQQYSGIAPVQQQSGNTKITHWRWHCPKFLRQSFHEFAGCSVPQSRWAKAYYDEQIERGKPRHRVLRALAYKWQRILFRCWQNHEPYDEERYLAALRRHHSPLIARIDSTCADAA

SEQ ID NO: 238192 - protein, 382 aa, unidentified
MEQQQQYVGIDLHRRRSVIVRRNEAGQTLDTVRIDNDPVALAAELAKAGEHPEVILEATYGWYWAADVLEECGANVHLAHPLGNNWGNRRVKNDERDATDLVDLLRMGRLAEAWIAPPPLRELRELIRYRAKLVHLRTNLKSQVHAVLAKEGVRVPMSDLFGVGGQVLLDKVHLAEAYRLRVESLRDLIDHINREIAMLEEQTAPYFAGDLGYHAVQAIPGVGPVLAAVFVAEIGDISRFTSARHLCSWAGLTPTHKESDVTVHRGHITKQGSRLVRWPPSRPWSDNAPIRPSDVTTATWANAGAPRSAAWPRPANFSSSSTTACATARSVAWPRRGENRDGRSPVRARLVSWFPHSGETAVLIEPTGLRPNHSMSLFATNR

SEQ ID NO: 238193 - protein, 338 aa, unidentified
MPTDQTGQTYALFVGVDIAAQTAMVATQRPGAKASRSLTIEQTPEGYTSLLRQLQATGFVPCQVLVVMEATGSYWMSLATRLVHEGFAVSVMNPAQAHHFAKALLKRAKTDAIDAQTLAQLAMILQPEPWTPPPQIYYALQQRLAQRDDLLNLRQQVRNQLHALVQHPEVIAEVRARMESLLATFASQLTEVESEITAALSQDSAWAAAATRLQSIKGVGWVTAAWTLVTTLNLTSCDTVDALTAYAGLAPMPRQSGSSVWHRPSIGHTGNGRLRTAFYMATLSAAQHNPVIKAFYTRLREVGKPEKVARCAAARKLLHIAWAVVKKDQPFDPNYALG

SEQ ID NO: 238194 - protein, 342 aa, unidentified
MDHYAGIDVSLEYSSVCIVDANGKIIREGKVASEPDALIGWLRSLGYELSRVGLEAGPLSQWLFAAMRQAGLAAELLETRHVRKAFEAMPVKSDRNDARGIAQLMRLGWFRPVHCKSVSAQEVRAVLTARKLVQTKLLDVENSLRGILRGFGLKVGKTTARSFAGRIQELVKSHPHLEAIGEALLSVRAVLLREFNAFEKRVRAMARTDARTRLLMSTPAVGPIVALTYASAIDDPARFKSSKQAGAHFGLTPKRYQSGETDRSGRISKIGDASVREALYQAAHVMLTKPVKGCSQLKSWAMRIARRAGRSKAKVALARKLAVILHRMLANATSFNAAAAAT

SEQ ID NO: 238195 - protein, 415 aa, unidentified
MSQVIMIGCDLHDGSMLLKIAEGRQTPDTRSFQNTTRGRAEMIAGLKRRAKAAGTERIVLVYEASGQGFGLYDQLVAAGIECHVLAPTRIAHSPQQRKRKTDEQDALALLELLRAHVLAGNALPAVWIPGPQTRDDREVVRQRLDVAEKLTATKTQIQSLLKRSQVARPAGLGKRWTKTYRAWLAHSLAEPLDATRSPLGSGARTALGSLLRQMKMLEEEVERLDKQLPNMAWSPRYEAAMRALTGMPGVGVLTALVFLSELGDLRRFANRRQLAAYLGVVPSSHESGKSGDRKGHITHQGSPRVRKMLCQATWVRLRHDPEEKAAYERIRARNPKHKKIAVVASMRRLAICLWHRGVAAAERTAADSPATVRAAPQVLPARSTTASPSDFRRHDKGVRGKRKVVPGTAAAMPGT

SEQ ID NO: 238196 - protein, 338 aa, unidentified
MYYSGIDQHKQFSYFTTVNDEGIIIKQAELKNNEFDILNYFYTLGKNHIATVETTGGWYWMNDLLSNHGINLKLAHAKYVKAIAYAKVKTDKVDSHILAQLLRLNFIPEAYKISDNLRPLRDTLRARLRLSQKRTSCLNFMNRMLEKFNINSPSQLTEFYKLQYLQFDNQEQLLKQQMLTLEKSLYTSLIPNEDIQRLLWIPGIGKLNAFSILLEVGDINRFQSEKNFFSYCRLVPSARNSAGKSKQRSSKDGNKYLKLVFSDAAVHSLQYYPAIKKYHDSKLRKKKKQVAHAIIAKEIARIVYYVLKNKSAFNNHFKGIELEHKKSVQWPRTSSPDV

SEQ ID NO: 238197 - protein, 356 aa, unidentified
MNYVGIDIHKRYSVLTAMDGRGRKLGQARIEGNSASGFAQNLKGLQGKSKVVIEACWNWGKVYDTLEAIPEVTEEILAHPLKTRLIAEAQIKTDKVDSEALATLLRGNLVARAHVPSKETRHRKDELRQRLYWARMRTRIRNRTHALLDRQHDLALPQCSDLFGVKGMRALKELRLPEPDGRMLREDLELLELVGRQIREQEKRIAAQNEFNAGARRLLSIPGMGPILASVAAAEIDQIERFQSAEKLCAYAGLVPTTSSSGGKTYHGSLLPFCNKWLRWAFIEAAWVAVGCSGYFGRFYRHQRARGKKANTAITIVARRMCRIAWQLLKQNRDFQPEPIATRPVKLYKLSPAAPR

SEQ ID NO: 238198 - protein, 410 aa, unidentified
MLYVGIDWAEKAHRVCIRDDERIHAEIEVPNSAVGAADLLAKIAAIEPDKRNVLFAIEANHGPFIDAILDAGYTIYPLNPKAVERYRDRFRLARAKTDWIDARVLADILRTDRQAHQPLKPDSEETTMLRLLTRDCAELEKTQTMLRNQLRSALLCYFPLATELFSDLASPTALAFLKAYPTHQEARRATPEALEALLRAQRYPRAAKKARELYQALQQAPFAVRPAMSAAKQMLVATLVAQLEVLNAQISSYRKEIDALMQEHPDSAIFTSLPGAGTRLAARMLGELGDDRNRYPGVRVAQARAGTAPVTRQSGKSRVVVFRRACVKPFRETMQLFAFCSTRWCSWARDYYLQKRAAGKKHSEAIRALANVWLKIIFAMWKNRTPYDEARLMAARLTAAQHRTPAQQVA

SEQ ID NO: 238199 - protein, 367 aa, unidentified
MKKISTAAVKQSRNISQQKLTIGLDLGDRNSWYCVLDEAGQIRLEQRVRTNAKALQEVFAAMPRSRIALEIGTHSPWISRLLSELGHEVIVANARKVRLIGESRKKDDRLDAQTLARLARIDPELLYPVTHRSAQAQADLMRIRARAGLVRARTALVNTARGLAKSYGERLRGCNVRNMNPEKAEGLSPELQSALEPLLACIESVSEQIREYNQRIEKLAQDSYPQVALLKQVKGVGTLIALTFLLTLEDPHRFRKSRDVGCYLGLQPGRRNSGQSEPQMHISKEGDPYLRTLLVQGAQHILGPFGVDCDLRRWGLKLAERGGRNGKKRAIVATARKLAVLLHHLWVSGGVYEPLHNSGRTIVAAAA

SEQ ID NO: 238200 - protein, 427 aa, unidentified
MSERKSLELRVSVDVGCRRHSVAIGWPDGQVLEEFDIAHRPEGFEEFFSRIEKHQKANGCGVAVAMEGYNGYARPLDSLVRSRGYRLYNINNLKLARFKEIFPGAAKKDRIDARKGLELFQLRDHLPLAKEVLQEVTGTPQENEILKRLTRRRRRLVNERVRVVNNLQADLQAVCPGLLEITTEASNRWFLNFLLSADTLPQLARLRKSTLLKIPAVGRKYASLIQEWQKRAHFSEEAQWVGEMIHEDAQRCLELEEKIKALETKIKEVAKNSKIAKILLSIPGFGTVCTSELAGEIGTVERFGKEGGLALYLGLSTLDNSSGNYQGTKQPKHVNTRAKAAMMTALDRHRKYVPESQRYYEKKRSQGKKHNQAIRALGRHLCRIIYKMLTEERPYQIRSKKGDTQARVRSRSSHIGQIRKKKISAKS

SEQ ID NO: 238201 - protein, 347 aa, unidentified
MGNRSKVCVGKEVFIGIDVHKRTYALAVKTENGAVEKVSMPASPAGLVQFIKRRFPHQSVQTSYEAGFSGYSLHRRLEAEGIRNLVVNASSIPIASNDRVKTDKRDAKKLCDLMSTRMITGIQIPTESQESSRLLTRTREQLVKERSRIGIQMKSKLAYYGKMSGTDTRAMTLKLLREIEEKWDLHEDLKRIIGVLATVYRCIHKQVRELSKEIEKHFESQHTYRLYRSVPGIGPTSAAVLTAELGDMSQFRNERTVFSFTGLTPAEFSSGDHTRRGHISRQGSSRLRAILVEVAWRAIRKDKFLEEGYQRLKRTRGGKRAIVAIARRLIGRIRACITKNETYKTPQ

SEQ ID NO: 238202 - protein, 310 aa, unidentified
MDVIIDKGCGLDVHKETVVACVMGEGIKKEIRTFSTMTGDLFRLKGWLSEKGITHVAMESTGPYWKPVFNVLEDSFEVILANARHIKNVPGRKTDVKDSEWICKLLRSGLLAASFVPPKAIRELRDLTRYRRKLTQSISAEKNRVQKVLEDANVKISSVVSDTFGVSASRMIEAIMAGTLDTEAISDLAVGKLKGKKEELKKALVGNFKEHHRFMIQASFNHIGSLEKIIAELDQEIARKLKDYHKEYELLQTIPGVKEQGAASILAEIGADMDIFPSEGHLSAWAGMSPGNNESAGKKKAERRPTAIRI

SEQ ID NO: 238203 - protein, 334 aa, unidentified
MQQPITIGIDLAKNVFQLHGVDAGGVAILKRKLRRSQVLDFFARLEPCLIGMEACAGAHFWARELQARGHEVRIMPPSYVKPYVKRGKTDAADAEAICEAVTRPTMRFVPVKSAERQAALVDHKTRDFLVRQRTQLVNTIRAHLSEFGIVVAKGIHNVDRLMEAASELPAAARPAIDLLADQLRETQEKIELVTERIEAAQRSDPLARRLATIPGVGAITASAIAATTPAVDNFRSARDYAAWLGLTPQPHSSGGKERLGRISKAGNRYLRRLLYLGAMAQISARRFGRPGDDWLWRMLERKPVKVVAVALANRMARIVWALIGRGESFRGNPA

SEQ ID NO: 238204 - protein, 343 aa, unidentified
MQDVTLIGIDLGKHSFHVHGQDRQGKALLRKKFSRKQLVEFLATCQACTVVMEACAGAHHMARLLVGYGHHVKLISPQFVRPFVKSNKNDFIDAEAICEAACRPSMRFVTPKTESQQCLSALHRVRETLVRERVKASNQIHGFLLEFGISLPVGHAVIRRLPSVLAEQALPARLVALLERLHSHFKYLDEQIADIEKELGRQLQDDDLGQRLMSIPGVGPITASVLAAEVGDGKQYRCGRDFAASIGLVPRQYSTGGKNNLLGISKRGDKNIRRLLVQCARAYMQRLERQTDRMAQWVRAMLMRRHSNVVACALANKLARTAWAIAAHHTEFKRQEAVMMTAS

SEQ ID NO: 238205 - protein, 334 aa, unidentified
MQITTIGLDLAKHWFQVHGVDAAGKVVVKRRLRRAEVVAFFKTLEPCLVGIEACATAHHWARELIALGHEVKLMPPAYVKAYVKRNKNDAADAEAICEAVTRPSMRFVPVKDIDQQSVLMMHRARNLLVRQRTMLVNALRAHLAEFGVIAPRGLRHVEQLIAAIEAESTALPELARSILRLIVNQLNDTQAKIQQVEAKLAQWHRNSRLSKLLATIPGVGIMGASAIAATVCDPNLFRSGREFAAWLGMTPRQNSSGGKERLGRTSKRGDKYIRCLLVAGAVAILRHARTRDEGRRMGSRDAGAKAGEGSRGGARQPNSPHRLGGDETGRRLQS

SEQ ID NO: 238206 - protein, 323 aa, unidentified
MNISLLGIDIAKNVFQLHGVDSSGKKIIKKRIERNKLSAYIANLSPCTIAMESCGGSNYWARIFQRNGHAVKLISPQYVKPFVKTNKNDANDAEAITEAASRPSMHFVPIKQIAQQDIQSIHRVRSRLMKNKTALTNEIRGLNLEYGITIPQGALKVKSCLCSIIDDEKNELTTSSRELMSELYDELVEIEERIKKLDKKIKLICRDNDQCRRILSVPGVGELTATAIVAAVADANEFKNGRHMSAWLGLVPRQSSSGNKQVLLGISKRGDRYLRMLLIHGARSALSFSKHKDDNYGDWLIKKKASLNLNKAAVALANKNACL

SEQ ID NO: 238207 - protein, 362 aa, unidentified
MAGTMTYVGLDVHARSTYAAAVDVLTGELTRLRFGPGTGAPVQWLTELQGPVYACYEAGPTGFGLYRAVTGAGIRMDVIAPGKTPRGPADRVKSDRKDAELLARCLMAGSLAVVRVPSVRVEGARELTRAHDMCRRDLMNARHRVSKLLLRHGRVYPKPGSTWGTEHRRWLSAQQLSDSVSDFAYADLIAAVDGLTARKAALAERISLLATDPEFWPTVARLRCFRGIDTLTALTLHLELGADWQRFEQPKRLGAWLGLTPSRSQSGESDHNGSITKTGSTLARRLLVESAWHYSREPRIGATLRNRQLGQSDHILQIADRAQQRIYRVHNRMRSRGKPHNVTVVACARELACFLWAAATAP

SEQ ID NO: 238208 - protein, 423 aa, unidentified
MEHPRIYAGVDTHSDTHTLALIDEYGRPLATQTFMADPTGYERLAAMIGDPDACLGIGVEGTNSYGAALTRRLVEAGYNVYEVLRPKRAVRRRDGKSDPVDALAAARSVLAGDGTSVPKSADGWVEALRALNAERAQLVTAMTALSNSATGLPATAPEHIRERYRGLRTPIRMRRLAVCRPSGNMVEQGMLVALKASGKAWKALKEQADLLEKNMRLILEEHARPLLDIYCASTVTAATLAIVAGDNPERIRSEAAFAKLCGACPIPASSGKTNRHRLNKGGNRQGNSALHHIAIVRMRYHQPTRDYVDRKTGEGKGKMEIIRCLKRFIAREAYRALVSIRRGRTPLNKPPAERGRRLRELRVAHGITQQQIGDALGVHSSRISEIERGTRNLPELERRAALWIQTITTPNQPTQHTETLDNV

SEQ ID NO: 238209 - protein, 344 aa, unidentified
MDHFAGLDVSVKETSICIVDDTGRIVREVKIASEPEALLKVLGSQAYRFKRIGLEAGPLSQWLFSALAEAELPVVCVETRHMQAVLKAQINKTDRNDARGIAQMMRVGLYRPVHVKTLRSQKLRMLLTHRKLLQSKAIAIENDLRGTLRNFGLKVGMVGTVNFEARIKELVENFSDLAVLVEPLLIVRRALREQIIILHRRLLAIVRDDEVCRRLMTTPGVGPVVALTYRATVDVPARFRKSKSVGAVFGLTCSKYQSGEIDWSGRISRCGDEMMRVMLYEAAQSMLRSKKWSWLKAWAMQIARRRGMKKAIVALARRLAVIMHRIWVDGTEFRWTREQAVAAT

SEQ ID NO: 238210 - protein, 412 aa, unidentified
MEPIYTSCCGLDVRKKSIQACVRHIGKDGKVQHEVRPFGTMTRDILDLADWLSQEEVTHVAMESTGVYWKPIYNILEGRFNILLVNARHIKNVPGRKTDVKDCQWIAHLLQSGLLKGSFIPDRVQREFRDLTRHRAKLVDQRASVVNRVHKILEDANIKLGAVATDIMGKSGKDMIRALIEAEKDSAEIADLARRQLRGKIPQLRLALDGHVTDHHRFMLGELMDQLDHLDGQIDRFSQRIEEISRPFAKAIEEVMRLPGFEKRGSENVIAEIGSNMDPFPSADHICSWAGVCPGSNESAGKRKSGKTTKGSKWLRSALAQAAWAASRKKNSYFHAQYGRLAGRRGKKRAVIAVAHSLLTVIYHVLRDHIEYKDLGQDYFDKLNSRRLVPYLVKRLKNMGYEVNLVPLESAA

SEQ ID NO: 238211 - protein, 334 aa, unidentified
MEKVTTLGIDLAKSVFSLHGVDGAGHVVLRRTVRRDQLVKVVAGLSPCLIGMEACSGAHQWGRRFQELGHAVRLMAPKFVAPYRKSGKNDGNDAEAICEAVTRPSMRFVPVKSLEQQALLAMHRVRRGFVVERTATINRLRGLLCEFGVVLPLRSVSVRRQAAQAAENLPELARRAIGDLLDELRVLDERIGGYDREIEAQAKLCEPAQRLMQIRGIGPTTALAIVATVGNAREFKNGRQFAAWIGLTPSQYSTGGKARLGHISKRGDAYLRNLLVQGARSVLNSAGMHQDRMSRWILELQPRRGYYRTLVAIANKNARIAWALLAKNESLRSA

SEQ ID NO: 238212 - protein, 346 aa, unidentified
MRFYNGQHRYYCGVDLHTKRMYVCILDQEGNTRLHRNMRAKPHDFLSAIEGFRDDLVVGAECMFTWYWLADLCLEQEIKFILGHALYMKAIHGGKKKDDKLDSEKIARLMRGGTFPLSYVYPREMRATRDLVRRRMFLVRRRSELLAHVQMTNQQYNHDPFEKMLQYASNRDVVDRFEEPSVRLSVEADLKTVNHYDRLLTQLEKELVRQATLHDPRASHLLRTIPGIGKILSLVLLYEIHTIDRFPSVGDFLSYARLVTPKQTSDGKVTGHSGAKIGNVHLKWAFSEAVLWMLRNSEDAKAFLKRKEKKYGKCRAMTMLARKIARAVYQMLKRNESFDAVKFFAC

SEQ ID NO: 238213 - protein, 411 aa, unidentified
MEVIYKRCCGLDVHKETVVACLLIREGGKVLKEIQTFLTMTVDLVVLHDWLKAHQVTHVAMESTGIYWRPVFNLLEEDFTVLLVNAAHIKTVPGRKTDVKDCEWIADLLSHGLLRGSFIPPEPIRDLRDLTRYRKSLSDERVREVNRLQKFLEAANIKLSSVATDVMGASGRAMLEALASGGTDPQALSELAKGRLRKKLPELKKALEGRFRPHHRFMVSEILTHLDFLDESIERVSQEVSIRIVPFSPKVDLLDLIPGIDQRVAEGVLSEIGVDMNCFPTDGHAVSWAGLCPGNNESAGKRKSGKTRKGDRWLRRYLIEAAWAATRKKGSYLSALYHRLVVRRGKKKAIVAVAHRLLVIIYHMLKDQGTYRELGSDHFNKLNVAYVQRHHVKRLESLGFKVILEPISEAA

SEQ ID NO: 238214 - protein, 436 aa, unidentified
MTTRKTIQEYDAVLSFDWADEKHDYCLWDAGSNSIEIDTIANRPEVIHDFICKMRFRFQGKAVAVGLEQSKGSLAYQLMEYGFFTIYFTHPTTVAKVREAWTPSGAKDDPDDAELIMGIVRDSNHKLRAWKPDTPETRRLMLLCSHRRKFVDLRVKLTNMLRSCLKTYYPLACQVAGDKLNEPLALNFLTKWPTFEELKRARPSTIEKFYALGNGRSTKAIQKRLEAIRDARAATTDPVIIGCHSVQMLALVAQIRTLRESIKQYDKQIAETYSTHSDVEIIKSFPATGKVFGPRLIAALGSDRERFESAHEMECYSGIAPVVDRSGKTAKTYRRYKCSTFIRQSFHEWANETTKHCLWARAYYVQCREKGKGHHQAVRSLAYKWIRIIYKCWKEQVPYDDGHYMSMLKKRGSNLIKLIAEHPDVYRLNGPVKVEF

SEQ ID NO: 238215 - protein, 375 aa, unidentified
MKIIGCDYHPSFQQIAMVDTETGEVSERRLYHGNGEAQRFYESLSGAVRVGVESSGNMLWFERLLARLKQELWIGDAAAIHWQNPRKQQLTDKRDAQHLLDLLLENRFPRIWVPSMEERDLRQLLKHRHTLVQMRTRVKNQLQHIALNQGLQKKSQLWSQEGQEWLKKLELDPWTQRRRDDLLQMLEDLDRQVKQMNREAEKAAAARKDAQLLMSHPGVGPILALATVLTLGDVSRFQCGRQVASYIGLVPTEMSSGQHRWLGSITKQGNSFMRFLLVQAGLSAARGDAELGRVYKRLAQKKHHGIAKVAVARKLLVRLYWMLRTQKQYPEVVRMQGSPSHPVAEAKADRLSGRPASRPEPKDQKQKQKNRKKQK

SEQ ID NO: 238216 - protein, 346 aa, unidentified
MMHVGLDLSRRRLEVQLVNEQGEPVERLAAVPTVDGLRDLAARVARHQESVRAVIESMTGARFIHDQLELLGWDVAIADAVKAKGLAPLTCKTDRIDAWVLAQLSRLNLVPEIWLPDPAIRADRERARWRLHLVRHRTALKNRIHQTLISFGHACPVSDLFGARGRELLRGLALPEPWQGAVIASLQLIDHLDRQIDACEAELHSLGEEQPYVSLLRTVPGIGWVLAYTIAGEIGDITRFASPAKLVSYTGLCPSVRQSGDRDYRGPLTKQGPKYLRWALIEAAQHAAMSSRYRDRYQAIKRRLGRQRGTNVATVAVARELAKAIWYMLIRNQPFAPRGANVSVAA

SEQ ID NO: 238217 - protein, 338 aa, unidentified
MNYHNLIAIDLAKNVFQVCTMSTNNHVLMNKSFNRQGLTEFMLNQPTSVVAMEACYSSHYWARLFKSFGHQVKLLPAQHVKPFVRGNKNDHNDALAIAEASQRPGIKAVPIKTVAQQDIQSLHRLRERCVRQRTSLSNQTRGLLSEYGIVFPPGFKSFKQTLAVLIDPSNTQLTEPLKQQLRYVADEFDRMSARLTELNQVLAQIAQTNPHCQRLMSIPGIGYINATALYSAIGNGGQFNNARELSVWLGITPKQYASGNKQVMAGITKRGNRYLRKQLIHGARALMRYCKKRDDQLSQWLQAVEQRRGKNKACVALANKMARLCWTLLQTNQMYRSR

SEQ ID NO: 238218 - protein, 427 aa, unidentified
MNYTQNHKISQITPSTLIVGIDIAKDKHVARAQDERGMEFGKRLIFDNRIHGFETLLDWAERHQKVNNKNHIIFGVEPTGHYWLNLAYYLTAKGYDFVLVNPMHVKKSKELDDNSPTKNDTKDAKVIAQLIKDGRYSVPNLLEGIYAELREGVKLRDQLIKQLMIIEDRIQNNIQRYFPEFFDVFGDWKGKAALCTLRLFPFPAQIKKMTPEDVLLEWKPFVQRGVGIKRATKLVETAKKSIGIQIGVQFAKREMECLLEQYDLYKEQLAELDKELEALVETIPGAKEMMAIPGLGATTVALFFAEVGDISNYTHPQQLVNLAGLSLREHSSGKLKGQTRISKRGRSRLRRALYLAIRPLVAHNSTFKALHQYYTTRPNRPLKKQQSLIALCCKLLRALFAIGTKQCAFDGSKLLRGLPHLNTLQVA

SEQ ID NO: 238219 - protein, 309 aa, unidentified
MNEELVYLGVDIAKAYLDAAIANEKRRFSNDAVGHRRLIQWLKQIKGPVQVICEPSGGYERALVRALVAARIKVSLVPANRVRQFARAGGILAKTDRIDAKLLCAFGEAMKPGIISASELEQEQLRELESQRRHLTHLLVMEQNRAARVSEVCVRKLNRRLITQIKKQVEQLDLLIQQQIAASRELATKAEKLTTISGVGARTAALLLAQMPELGQLNRREVAALVGVAPFNRDSGRMRGKRAIYGGRRSVRHGLYMAALVAARHNPILRGFYLRLRAVGKPAKVALTATMLKLLIVLNSALKPDLNYA

SEQ ID NO: 238220 - protein, 350 aa, unidentified
MGGGSRTRFVGLDVSQKLTAICVVDETGRRLWRGQCAADPGQIERTVRGHAGGDAKIGVETGPMTPWLVHELRGRGLNVVCLDARHASAALKMQMNKTDQNDAEGLAQIMRTGWYRPVHVKSLDAHRARALLGARAQLVGMTTRLSNHIRGVLKTFGMLPGAMRGLPFDRRVEELLVDRDDLASIVRPMRVAWRQLREQIAAFDKAVHALAKASPTCRLLMSVPGIGVLSVLAYVSTVEDPARFAWSRSVGAHMGLTPKQYQSGEVDRSGRISKCGDMLARTLLYEAAVVLLTRVKRASRLKDWAQALAKRSGVGKARVALARELSVILHSIWKTGKPFRWSEQEQAQAA

SEQ ID NO: 238221 - protein, 482 aa, unidentified
MKKRNIYQNQSQELLSLFEQAANNAKVMCVPIDYAKKDHVVMFCNGYGDILRKPFSVKNSPEGVDYLTDQVMRSCRQRAISQQHVFFGGEQVGSFADNFVSTLRSQGWLVAGVNAHEAKTQRENLQASTDCLDLLGIAKSLLNRRANCSPAQSGIYLNMRTVVRHRRKLVVITTEVKNRIHAVVDRLFPGFLNESKSGITPFSNSSLWLMKERFSAPQIRRRRRSTLIESLRRLGTKKSECTADTLQQYAAQVLKPPQDYVHMLQLSLAQHVKHFCCLQESIDQLEKEIALNLAQTQGAFLTSVRGVGIVLAAGVSAEIGNPFEQKAINNLVSYCGIIPRVKQTGGPQGETRTGKVAKRCNRILKDYAVQSASHLGLHGPADLMSDYKRRDAAGQHADFGMARRYLRMAMCLMRTSQIYLPSRLRKAQAQIQERADYYLMTWPYLRDKWQKLGTLETAFKADHPLGQWRTIVQQFYGIKLSL

SEQ ID NO: 238222 - protein, 359 aa, unidentified
MTAKVKTNKMNFKGKMVSIGIDMHKCSWRITALVEGEIVLAVTLARPSYDSFKAILTRFKGNHVRIAYEAGPGGFHLYDELTAEGIECIVTPPSLIPTESGNKVKTDKKDSYKLAKLLESNMLKKVWVLTAEQRAHRQLVRTRRQLVNHRSDVMRQIKSLLLFHGVAVPFPSHQQWTRRFTQWLHELDLEDGYLNNSLEALVKLFDYLSDEKKRLTHEVIQLAREDHYASRVQLLKSIPGVGALSAIEILVELQDMSRFEIADELAAYLGLTPSQYSSGEHIRMGHMTHMGNSRVRTTLIESSWILINKDSQMREKYEHIKHRRDGKRAIVAVARTLSACIRRMLLDQVPYEIGFTKAT

SEQ ID NO: 238223 - protein, 369 aa, unidentified
MTDVTLFVGLDVHKKTISVALVDAAASATVRFYGTIVNTPDALLGLSKKLSKDGQALHFCYEAGPCGYGVQRQLTRLGHRCDVVAPALIPRKVGDKVKTDRRDAMMLAQTLRAGQLTAVWVPDEAHEAMRDLVRLRAQAMRDLRKTRQQLLSFLLRHGLVSPYGHWTKMHRRWLGELVFAHPAQHLAHEEMLQRIERAEALCDRLKGAILDLVPQWSLAPVVQAIQALRGVSLIVASVIVAEVGCFTRLDNPRQLMAYLGLNPSEHSSGSTIRRGAITKTGNALARTCLVEAAWTYRFPARVTQIIRDRLAGLPEPIRNVAWKAQVRLSARYRKLVAAGKPTPKVVVAIARELVGFIWAIARMVEPKFA

SEQ ID NO: 238224 - protein, 404 aa, unidentified
MEATPAYAGIDWSWQHHALCVVDRDGQRIEEATVAHSRPGLAKITTMLARHGVSQVGIERGDGPVVEHLLRDGFEVVVISSRQVKSLRARYGSAGNKDDRFDAFVLADALRTDAARWAIVQPDSQATIALRMLVRARQDLITHRLAVANQLLAVLQHNFPGAVGLFSQLDIGISLAFLRRFPTEAKAGWLSDLRMAHWLKANGYCGRQTPTELVEHLRDAATGRVLGPAAEASEVIVVTLVDLLTTLREDQARLEARIKEALLAHPDGAIFQSLPRAGTVRAATLLAEIGDCRARYPDAQSLAAAAGVAPSTRQSGKYLNVGFRRGCNKQLRAALVDWAQDTPRANAWARDTYDRARARGCRHPHAARILAQGWTRILWRCWHDHVPYNPDLHGRLNLIVQEAA

SEQ ID NO: 238225 - protein, 310 aa, unidentified
MRLTSVWTPASFSSIFYIRPLGIAFAVANDDQGIQEAIGTLKKYQPTRIIIEATGRLEHAFVCACAKAELPFVIANPVHIKKFGGAIGRIAKTDPLDAKLIAHYGEAIKPRLSQLRPGLLQQMSDLLARRRQLLNMQTMEKNRQQIMPKSMASTIKPILTALSNQIDKVDQKLQKLIESCDDYKAKNDIIQSMPGIGNVVALSLISNMPELGYISNKEAAALIGVAPMNRESGRYQGERKIRGGRAQIRTVMYMAMMSAIQCNPVFKATYNKLLAKGKTKKSALIACVRKMIVILNSMVRDGAFWDPKMG

SEQ ID NO: 238226 - protein, 351 aa, unidentified
MTVYVAVDFHAREQTISWCDTADGEVHRTKLRHQHDDVRKFYKQFSGEVIVAFEASGYSAWFEQMLAELGHTVWLGNAAAIRRKAPRKQKNDRRDADLMLDLMLKRDFPRVHTFSAESRTVLRQLRYRHKLVKVRTIAKNSVHAIGINAGLPWRGRLLTQTGLEQLQGLPLSPVLSQQRDEWLALIRLMNKQIGAVEESLEQRAKDDEAVALLRTHPGIGLLTALALRYTLDPIARFTSTRCVVGYAGLDCVEDQSSERRRMGSISKQGSRLLRFLLNEAGQTAARKDPQLKQFYRRLLRRRDKPKAKVAVARKLLVRSFIMLRDQIDYAEFVRRGVAARVARETHSPKSD

SEQ ID NO: 238227 - protein, 350 aa, unidentified
MLYIGLDVHSKWMTIKGFDPETGDLVEIKKQSNDEDSLRERFGSFAGPLHGVMESGTNSWAVYRILEPYFERLIVVDPATVWCKDVRRGAKTDGRDASGLALKMQRGELVPLYVPDVQTQDMRALGRAKINASRHVTKIVNEIGSQMRSWGIIVECSLLSVKGQTLIEESKGKLPEFSLKVLEMWLEMLKKAQETEAELEKMVAAQAAKDEDCRLLMTIPGVGPLTALVVRAEIGDILRFGSAEQLVNYCGLCPSVKQSADKIYYGKLNRFCNRFLKYVLVLRAQGMARSKVDNPMRQTYWRVVIKGKNCAKIAVARQLVRVIYSMLSNKTAWNASRITARRSAPTSAAA

SEQ ID NO: 238228 - protein, 343 aa, unidentified
MDHFAGMDVSVKETSLCILDDAGKILKEVKVASEPQALLKVLGNPAYRFKRIGLEAGPLSQWLFSALAEAGLPVICVETRHMRAVLQAQINKTDRNDARGMAQMMRAGLYRPVHVKTLRSQKLRMLLTHRKLLQSKAIAIDNDLRGTLRNFGLKVGVVGTVKFEARIKELVENLPDLAVLVEPLLMVRRVLREQFSILHRRLLAIVRDDEVCRRLMTTPGVGPVVALTYRATVDVPARFRNSKAVGAVFGLTPSKYQSGEINRTGAISKCGDEMMRVMLYEAAQIMLVRTAKWSWLKAWAMKIARHRGMKKAIVALARRLAVIMHRIWVDGTEFRWTREAAVA

SEQ ID NO: 238229 - protein, 311 aa, unidentified
MTDHTIGVDISKSHLDVFRLEDGAAQRFDNSAAGFRALTKWLGKAPVARIVFEPTGPYHKAFEAALGEKFPLVKVNPLQARRFAEAHGTRAKTDAVDARMLARMGMAFDLAPQVPCSKEILVLRDLHVARAGLIKDRTRLRNRGQTQDIAVLKRQTKARLAQVERQIVELDTEIAALIAAGQTTARNCDILCSMPGIGAVTAAAMLTLMPEIGTLERKQVASLAGLAPITRQSGQWQGKAFIGGGRKPLRDALYMPALVAMRHNPDIKAKYEHLRSAGKPAKVAIVAIMRKLIETANALVKADRLWAKKPA

SEQ ID NO: 238230 - protein, 394 aa, unidentified
MEDVFRSCCAGLDIHQKVIVACIIRSAEGNKCPEKFFGSFDTTTRGLFDLSDWLASYEVTHISMESTGVYWKCVWRILQNHFELQLANPRHIKNIPGKKTDMKDAEWIARLTRLGVVPTSFVPPEPIQELRDLTRYRKHLVEDLNREKNRGHMVLQNAGIKLTSVIKDIYGKSGRALLYVLIENKPMTETLILECVYTTLRRKVPQLLESLEGFMTPHYRKMLSLHLTQIECLEKQLVEVEETINDYLVPYEEYVERLEEIPGINRRTAAVVLAEVGIDMSVFPSAGHLASWAGASPGNNQSAGKTRSKRVRKGNSYLKKVLAQGALAVSQGKPNRIQAFFFRIRRNASHKKSVVATVHLLLRIIYRMFSDQSRYNELGGSYLQNRKNTLTRSC

SEQ ID NO: 238231 - protein, 345 aa, unidentified
MQESIYVGLDLGSSRCYQSVIAADGTLCGSRPIPTSEQHLRSAFAKLNGAVQVHLEAGELSSWVASIIEPLVQSVIISHPRSLAWIGKDSQKDDKVDARKLAELLRLGRVHQVFRQTDDSRRTFKYLVVHYEQLSREQARFKSKIKARLRTLGIIRQDARLFSMTGQTALLDAIKSVSIKQMLTQSFTVLNQMLASFDEAKRAMIEFSKQFREVQLLQTAPGVGIITACRFVAYLQTPHRFSNKRKLWRYCRLGVSRRESNGKRLAHPRLDSAGVGSLKDVSRKVFEAARRTKTDNCFKRFYEQSLANTKNAVHARLSTQRKILATLRAMWISNQPFRNDLTEIG

SEQ ID NO: 238232 - protein, 452 aa, unidentified
MELSKRRQYFEQIKKTVKESQDYLLIGVDVAKAKHDACFMLSSGKVLNKHFKFNNTQEGFESFFEKIKRYQVAALPKVTIVGIETTGNYMVPLCHYLEENNVSVVQVSSFVTKRNRDTLTLSWNKNDVKDAWNITDCMRQGKIMFYAYPNDCYGDMKRMMNIFSRLSTERGKYKVRLQNNVLCLTFPEFGQVFTEVSELVPMTILERYPLPQDINQLSEQEFVDDIVKNTDPTVKKIKIARVYKLAQQSIGSSHDSESLRWETRFIIQRIQEICKTQKEMLLKVQSLAEKFPEYDLLQTIPGVGPILSAIIMTTIGDIDNYRSSKQILKLAGLDLAQIQSGQFRGDVRISRRGKPALRCAAYQAALVASRYDNNLRLKYLNLIQRKDIQKGQKRKIIIAIACKILRIAYSVMKYKKPYEDEYHVIKSDKDELLMFSDTMQTVVDETSRVLMH

SEQ ID NO: 238233 - protein, 370 aa, unidentified
MGNASTLHVGLDVHKESIAVAYAPEDGATAPVPLGAIGTRQCDIDALVRKLQSKSARLVFVYEAGPCGYWLYRYLTRKGLTCFVVAPSLIPRKPGDRVKTDTRDAVTLARLARSGDLTPVYVPAVPDEALRDLARAREDALHDLNAARFRLKALLLRNDVRYAGRANWGAEHLRWLARFVFPTPAQQIVFQEYVRTVTERTELLQRLEAELLEQAKTWRLSPVVEALQALRGVQFTVAITTIAELGDLTRFDTPRQLMSYLGLTPSEYSSGERRRLGGITKAGNRHARRVLIEAAKAYRHRAKVSEQIHARQEHLPTVIRDIAWRAQVRLCGRYRKLLARGKHPNTVAAAIARELAAFMWAIAKARPVPA

SEQ ID NO: 238234 - protein, 340 aa, unidentified
MNIKRIGLDLAKNIFQIHAVDHHEHVVLRKTLRRDRMTAFFSQLSPCLIGIEACGAAHYWARELTRMGHTVHIIPPQRVKPYLKGQKNDANDAEAICEAISRPGMRFVAMKTERQQTLQAEHRVRARLVRARTALSNEMRGLLGEFGLVLPVGIRQLRKALPEILSQQELWDDRFIRLLSELAEELQMLDERVARHDRRLEQSARDDVRIKRLLAIEGMGPVVASALVAAVGDGRQFKSGREMAAYLGLGPRQHSSGGKARLGSVSKRGDSYLRTLIIHGARAVLNACPNKTDRRSQWLQALSERRNRNIATVALANKNARIAWALLSREEDYHGLQAVG

SEQ ID NO: 238235 - protein, 391 aa, unidentified
MTILVGIDVPKDKHDCFFMNSEGEVLAKPFTIFNNKEGFDFLYEKIQSVSSSDNIKVGLEATGHYSYNIIGFLLNKGLATFILNPLHTNLYRKSLSLRKTKTDKIDSKTIAMMLLSDVSLKSYSDISYHNEDLKSLTRYRFSKVEERAKLKTSLSRLAQILFPELEKLVPTLHMTSIYQLLEEFPSASAIASVHLTRLTNLLSKASKGHYDRETAIKIRDAAKNSIGSNMPAKSLELKHTIKLIHALTIDIGEIEAEISKMMDKIASPITTIPGIGRNMGAMIISEIGDFSRFSSPDKILAYAGFSPSIYQSGKLDNCYAHMEKRGSRYLRYALFHATKLVCHWDKTFADYLAKKRAEGKHYYVAISHAVKKLVRVIFHIEKTKQAFLKAS

SEQ ID NO: 238236 - protein, 391 aa, unidentified
MICVGIDVAKDKHDCFILNSEGVVLADAFTIPNNLEGFQTLLDKLRDCSTPQDSIKVGLEATGHYSYNILGFLLDNGLATYVLNPLRTNLYRKSLSLRKTKTDRVDARTIAAMLLSDAGLKPYTDTAYHNEELKSLTRYRFDKVNERAQLKQSVSRLVCILFPELEKLVSSLHTASVYALLEEFSDAKQIAAAHLTRLKTLLAEASRGRCGRDMAVEIRNAARCSVGSRMPAKSLELQHTIRLIRELDAEIEEIETEIQAIMEELHSPITTIPGIGYRMGAMILAEVGDFSRFDSPDKLLAYAGMSPSTYQSGQLKNCYPHMEKRGSRYLRYALYNAAKYVCHWDSVFAAYLAKKRAEGKHYNVALSHAAKKLVRLIFALEKSRQPYCPAI

SEQ ID NO: 238237 - protein, 361 aa, unidentified
MFTERTSVGLDVHATSVVAAAIDGVTGELCQERLTPSYDHITSWLRQRPGPVAVTYEAGPTGFGLYRHLTAAGIRCEVAAPSKLQKPSGDRVKTDARDALHLARLLRLDEITSVVVVPTPEQEAARDLVRAREDCRGDLMRARHRLSKLLLRHGIVYYDGDTWTGKHDQWLRQQRFPGALTQATFESYYDTVLTTTARRDRLDAQIAAVAADSEFTPVVRRLGCLRGVATLTGFALAVEIGDWRRFTGNSIGSFVGLVPSEHSSGESKNRGSITKTGNGHVRRLLIEAAWQHRSRYRPGKTMRDRWDLASPAARARGDLGNRRLHSRWVTFIDRKKENSVANTAIARELAGWCWSLAVLEE

SEQ ID NO: 238238 - protein, 311 aa, unidentified
MTDHTIGVDISKSHLDVFHLDEQRAQRFGNTQAGLRAFQKWLGARPLARVVYEPTGPYHRLFEETLAGKLPLVKVNPLRARRFAEACGTRAKTDALDACGLARMGVALTLQPDVPISQNTRVLRDLQVARAALIKEQTRLRNCAHVHTNAVLKRQTKTRLTLVEKQIAELDTEIAKLIDADERSARQRDILRSIPGLGQVATAAILTFLPEIGTLDRRQVSSLAGLVPHSRESGQWKGRSFISGGRKPLRDALYMPALVAMRFNPDLKAKYSALREAGKPAKVAIVAIMRKLIETANALVKADRIWVKKTA

SEQ ID NO: 238239 - protein, 323 aa, unidentified
MLNATPARLAAGIDVSKRKLDVAITGSLERFTVANDAAGHAIIAERLHSLGIQRVGLEASGHYEAAVAQHLRQCDFVVLVLDPGQVHGWRRFQKRRAKTDPIDATLIAEVTAAVDLPRQPPDPRLAPLAEHLTLIEQLAEDIARLKTRLERYSDAAPLRFLKAEIQRLTKCRAKQLARLISLLRAAPDLARRFDILISIPGVGEITAVTFVIRMPELGRLSRAEAAALVGVAPFNADSGEQAGQRHIAGGRSRLRRAVFLAAFAAAQHWNPLLQATYRRLRDAGKHHTVATVACARKLVAIANALIARDTPWQPEPPVRQGAA

SEQ ID NO: 238240 - protein, 348 aa, unidentified
MDHIGIDVHKRESQIYLLAEDGEIIERRIRTEGERFAAVLGDRPRARILIEASTDSEWVARCLEALGHEVIVADPNFAPMYATRTRRVKTDRRDARALAEACLLGAYRPAHRLSDPQRHMRGRLGVRDALVHTRTRYISLIRALLRQHGYRVPSGSAGSFIDRVRRLPLPGRLRSVVAPLLAVMGHLNQQLAYSDATIEHLAVQDPRVPRLRSVPSVGPVTAAAFLAAIDDVGRFHHAHQLEAYLGLVPRESSSGETQRRGPITKAGHSRVRWLLVQAALSILRRRPPVAEVLWTWALRIAARRGKHVAVVALARRLAGILYALLRDGTVYAPRGPAALPDSVAALHA

SEQ ID NO: 238241 - protein, 466 aa, unidentified
MENNYILYVGMDSSKGKADAAILKVSDRRSVKPKFLRKKLSFKFVKSEVTSFLETVRSYSDDNCTSICFALEVTGIYSTNVYNFIKDNLNDNESIKFLNTDFVNQWRNAHNIAKSDPLDAQTISTIIGTDSDVQYVNDNVFKNKNGYQDLKALVHRHYQIKKIYSQEINRLIAQCDCLFPELQYVFEPKSAAFIAVLSSYPTTHDIINASRVEVFDVVYEATKHRCSMDKVDKLFELCQDTLVPDDISSYGKSIILDLVENIKNIKGQLKSIERYIKDIASLNPAYKLLLTITGCGPITAATVIAETGNIRRFKNADCFVSYSGTSPRNKRSGTSVETMGKISKKGSRYLRHAIYMIAEFARRHNPVLKHQFERIKNGNKKRHKLANIAIANKIARYIYSIMKNKSSFVILHDHIMRLPEETRDTFFNSISLDFPKNTRKQIYQYSDINGELHRFVYIKTDEMIPA

SEQ ID NO: 238242 - protein, 450 aa, unidentified
MSKGHKTSLSLPVVHQKAAGIDIGSRFHVITVPPDMCPEPVQTFQAFTTDLQKMANWLVSLGIETVAMESTGIYWVPVFEMLESAGIEVILANAREAHAVPGCKSDVNDAQWIQRLHACGLLRASFRPEQNITALRTYLRLRDRFLEYAAAHIQHMQKALNYMNIQLHHVVSDLTGVTGMQMIRAIVQGERDPAYLARFRDVRCRASTEVVIKSLTDNYQPEHVFALEQALMLYDAYQERILACDAQIERILADLNQSKPLPKQPLTQTRKRSKQGNAINFDVRTALYQLTGVDLTQIHGIGPYLALRFIAEWGTDFSKWRTAKHFTSWLTLSPGCKISGGKVLSAHTRKSANRLTAHFRLAAVTVGRTSTALGAFYRWLAARIGKAKAVTATARKIAILFYNMMRYRIAYEDLGADRYELEYRERIIKNLHRRAKEFGYTLQAASECVS

SEQ ID NO: 238243 - protein, 365 aa, unidentified
MGMLAEHADHVIGVDTHRDAHSAAAIATRTGTIAAQTTVAADAFGYKRLLRFARRHARGRRVWAIESSGSFAGLTMFLLAHGEWVVEVDRPKRAARRNGAKSDELDAIRAAREALEREHLAQPRARGDREAIRVLLITRRGAIRARTKAINHLKALIVTAREELRHQLRNTPTDELVYRCSRLRTLPAHSAEHRATVIALRHTARRILALEAEANDLESELEDLVKQTVPQLLDEIGVGPITAAQLYCSWSHRGRLRNDGAFAMLGGAAPIPASSGQTIRYRLNRAGDRDLNCALHTIVLTRLQHDPATRAYAARRMADGKTPREIKRCLKRYVARNLFRLLEATGPHPVATERPPRSRLIGTCS

SEQ ID NO: 238244 - protein, 391 aa, unidentified
MFAGIDIASERHMLARLDDTGAPIGKPMPVTEDRAGYDALLKALGDPPVLVVMEATGHYWKNLFAVLAAAGHEVALLNPFVARRFQDSSLERTKTDAIDAQGLARLGFEKRPTPTHLHDDVAEALRELVRHRDRLRQDFDDRVRQLHRLVDLGFPEFTRYVRRLDSMLATCLLAAYPTAQAFAGASTRRLAKLRYDSRHFVGPELAEQLVEAAKRSVGQHHGPAYKLQAEHICQDLDLWRRRLASIERDIEALLDTHQVGKLLTTIDGIGPQSAARIIAAVGDPAHFKSASALAAYLGVVPGLKQSGKRTGPRSPLAPLGNARLRMALWMPVLVAVRRNPWLRAFYERLRAAGKPPKLALVAALRKLMHAVYSVAKHRKPFKITAEQARAA

SEQ ID NO: 238245 - protein, 421 aa, unidentified
MKSIKFDDYAAFVGIDWADCKHDICLQCADSDQREFGQIQHTPQAIAAWVKTLQQRFGQRPIAVCCELRKGPLIYALTKYSQLVLFPLNPITVARYREAFAPSHAKDDPSDAELQCDLLQRHFNRFRPLMPDSPKMQALQQLVEYRRTCVGERVRISNRLSSALKNYYPQVLDWFQDRGTVVFCDFVSKWPTLKQVKRARKPTLENFFSSHNVRHSNVIAQRIKAIRAAIPLTKNTGVIHANQLIAQAQVQQLRLMLDIIKHLDTEIATLCKNHADHAIFASFPGAGPVFAARLLAAFGDNRERYRHASEMQTYAAVAPVLERSGKKSWVHWRYAAPTFLRQTFVEWAGESVRYSFWANAYYQQQKQKGKPHQTIIRSLAFKWIRIMFRCWQQKCCYDETRYLNALKAKRSPLLQFAVSQN

SEQ ID NO: 238246 - protein, 405 aa, unidentified
MNAVGIDASKGKSMVTILRPFGEIVSSPHEVRHTSDQIDDLIREIRSLEGESRIVMEYTGRYHEPMARWLSDAGLFVSLVNPKLIKDFDNDSLRKVKTDKADSVKIARYTLDKWHKLKQYGAMDELRNQLKTMNRQFGYYTKLKTAMKNNLISLLDQTFPGANTFFDSSARSDGSQKWVDFVDTYWHVDRIRSMSLSTFTDHYQKWCSRKGYNFQPNKPAEIYEAIRNIIPVLPKDTMTKFIIRQAVNQVNTASSAVEELRTRMNDIASQLPEYPVVLAMKGVGTSLGPQLIAEIGDVTRFTSKGALTAFAGVDPGKNESGSYAQKSVRTSKRGSAPLRKTLFQVMDCLIKTMPHGDPVYEFMNKKRSQGKPYYVYMTAGANKFLRIYYGRVKEYLSEHPETAEN

SEQ ID NO: 238247 - protein, 404 aa, unidentified
MKHVIGLDVSKGKSTVTIYDSYRQCKYEGEINHTRRDFEQLHKRIVDITSLDDQAPDIVFEATGVYSKPIEAFLKDYGYAYCRMNPLEANLQMAKMRRHKTDISDAHELAKTHFKMEREPTYIQDDYYEQMRALTRYYDEIDEEMILLKNRMHSILQLSFPELEKILTPNSALFLNIVQLYPHPTLVLAHSKTVIKNRLKANTRKNLSLERAEKKAIALLEAAQNSYPAIKSTDVRCEQVRDYANRIAELKDKKEALVQQMITLSKDRKEYIVLRSIPGIGDSTACRLIGEMGDIRRFQNAKQLNAYAGIDIMRYQSGNTQYHDRINKRGNKHLRKLLYFMVCAMIMKKKDKPNHFVDYYYKLKTQPQRKPHKVAIIACINKFLKVTFQLLTHGILYDYETALS

SEQ ID NO: 238248 - protein, 318 aa, unidentified
MLIHYIDIAKRNFVIAVSSLSKTKTETNNPKGIAHTIEYLKKHKVALVVTESTGGLEIPAAKAIRRAGIAVIIANPRQTHQFAQSQPLTKTDAKDAKMPAFFAQMTAQKEDSQTMPYQPPTEAEEVLEALVNRRNQLVDMRTAEKNRLHQVHETQVESVKQLIAHFDRLIDELDKQIDDHTHTHFDGKAQVAEQIKGIGSITTATLMAMLPELGRLSHKRIASLAGIAPHPRESEETKFKSRCFGGRSTVRKALYMATVAATRFEPLIRDFHQRPLSEGKPYKVAVTACMRKLLTISNARMRDYFAENDTAENGIRTA

SEQ ID NO: 238249 - protein, 452 aa, unidentified
MRTIGLDLAVQAAHKAVVLDDAGHFCTPLLTIHTRPSELDYLLARAREGAPSTDVQIVMEPTGMAWFPVAVYYARQALPVFLVNSQEVADLRRYYQRHAKSDRIDARVLARLPLVNPDKLHRLVLPSATALACQRACKQLDHFATQITAVKNRLQAIDRFAWPGLEEQVFADPFAPAARFFREHCYDPRQVVLLGATAIRQQCEASALSADDGDAWVESLLTLAQQVLTLYGTDGQFLDFAQLQAEVQRDQAWLTWLEQQHHTLRLRTVRPLYRAVHPSRNLETLKGVGQDSAAVYASFIGDPRRFSSTRLFRGWTGMVPSSEQSADTEAKGLHITQAGPDLIKKYAYLDAEIARRYDPQIAAIYYDQMMHKGKHHKQAVCACATHLLDRVLAVLRADKPYEMRDSDGTAISNQQARELIEERYTVPPEVRRRTNKRNRRQQADQRAERRAT

SEQ ID NO: 238250 - protein, 410 aa, unidentified
MRKENIIYVGIDLHKETHTAVMLDCWNHKLGEITIENKPAQFHKLTRKVSRFVTKEKTAVYGLENAYGYGRALAVWLLEKGFVVKDVNTALSYAQRKSVPMYQKSDSYDAEAVALVLINLLDKLPDAVPDDKYWTLSQLVNRRDNINIHQQRLKNQLHEQLCMAYPSYKKFFQDIGRPTALYFFHEYPSPVHLRGKTAEKLAGELRPVSHNNCSVKRAEKILELVKSDGGTCRDCQESRDIITRSLANDLEHYRKQMEEVEAAIEAMLPEFGCTLMTMPGIDTITAANILAEIGNIDRFPNAKKLAKFAGIAPINFSSAGKGKDMCPKQGNRRLQAIFYFLAIQMVQVAPSGTPRNALFREYFLKRLEEGKNKPQALICIARRLVNIVYGMLKNHTEYREPERKTGEETV

SEQ ID NO: 238251 - protein, 339 aa, unidentified
MLIIGCDFHPGFQQAAIFDNQTGEILERRLQHREEAEQFYGSLRGQQVRVGMEACGHYPWFERLLEDLGIELWIGDAARIRATEVRRQKTDRRDAEQLLRLLREGRFPRIWVPSLEERDVRQLLVHRHKQVQARTRTKNQLQALMLSQGLQKKRQLWTQSGRAELEKLELLPYAALRRQRLLTALGQQAAEIAALNRQVDEEVKRRPAAVRLMTHPGVGPVTALAMVLTLGPAERFENARQVGSYFGLIPSEHSSGGRQQLGRISKQGSSFLRFLLVEAGQTAARYDAELGRFYRRLAVRKHRALAKVAVARKLAMRLYLMLREDWDYAQLCKAMCRQA

SEQ ID NO: 238252 - protein, 411 aa, unidentified
MNPVIGLDVSKGESQVQAFLDKGKPYRKSFKVSHTIEGLDLLVEYLEVVKRETGKKPTIVLEATGHYHSSVVQYLEDRGYLLIIINPLISYKAKSSSLRKVKTDAIDAYHLCELFYKEDLEPYKKRGVQLLNLRNLTRQHENITGVLIQTKLQFQAILEQVFPEYRGVFGDLYSVVSLLTLSEFPSSEDILEASEETIANKIAELCKSRSYRWAKEKATKLKAAANRNPFEKTVYQSHILSLGMYINIILQYKEHLSKLESEIDALAKEVEEYNIIKSIPGIGEKIAATIISEIGEIDRFTDPKKLVAFAGVDPSVFESGKFTATKNRITKRGSSRLRHALYMAVRCAIRDCRKSKTSDEIIPRNKKLREFYDKKREEGKPFKVAVIACVNKLLHWIFALLKNKTTFQDIA

SEQ ID NO: 238253 - protein, 413 aa, unidentified
MQVMIERAAGLDVHQETVVACVLIGKPGWRPTKEVRTFRTMTRELEGLRDWLLSLGVTHVGMESTGVYWKPVYSVLEGSFELIVGNARHIRNVPGRKTDVKDAEWIADLVRHGLIAKSFVPPPPLRELRELLRYRGKLVESQAAERNRLLKLLETANIKLASVATDVFGVSGRAMLKALIEGTASAETMADLAKGQLRRKRVDLVLALEGRVEDHHRFLLAIQLRRLEAAEADIAGLDQRIDEKLEPYRVAHALLMQIPGVDWVVAAVLIAEIGIDMSVFLSVYHLASWAGVCPGNHQSAGRQKSGRARKGNVHLRTMLVGAAISASRTKGSYLKDKFYRLKARRGGLRAALAIAHKILVAAYHMLATGADYKDLGEAYLDQLGRTHTVSNLKRRLERLGYRVTLEQKAQPAA

SEQ ID NO: 238254 - protein, 342 aa, unidentified
MKDTMIGVDLAKRVFQIHGTTMAGEVKFRKKLSREQFRVFMAAQPACLVVFEACGSASYWAREMAALGHEARLIAPQYVRPFVKRQKNDAADAEAIVIAARQPEMRFVAPKTVEQQARATLFRGRERLVQQRTEDVNALRAVLYEHGHVFPIGMGHLRRMEALLEAETCDLPAMIRMECQDLLEQITEKTSRIAARDKKLKELAAQSDKARRLQTMPGVGPLTSLAIEAFGPEMAQFKTGRDFAAWLGLIPRQHSSGGKERLGRISKAGQADIRRLLIIGAMSRLNWMGQRTIFEGSWLAKMLARKPKLLVAIALANKMARQIWAMMNKNEDYRDPALTTTA

SEQ ID NO: 238255 - protein, 354 aa, unidentified
MIIIGADYHPGFQQIALVDTDTGEFEERRLEHREEAEKFYRDLATRLLCVRVGMEASGQARWFERLLGELQFELWIGDAAEIRTKRVRKQKTDRQDAQLILRLLLEDRFPRIWVPSWENRDLRQLLWHRHRMVQARTRIMNQLQAVALNEGLRCKKRLWRDKGREQLESFQLARWASRRRRDLLELLDRLSPTIAELTQAVEQEAEKCPEAQRLRTHPGVGALTALAFVLIIGRADRFQCGKQIASYLGLVPLEESSGQRRRLGHITKQGNSLRRFLLVEAAQVTVRSDQEWRNRYFHLALRRGRKIAKVALARRLAVRLYWMWRKGWDYEQLKKFGSHAGQPGNRDGVQLNTE

SEQ ID NO: 238256 - protein, 355 aa, unidentified
MTKVKTNFSGQTVFVGMDIHKNSWNLGIHLNEYFIRNVHQKPNPHMLAVYLRQQYPGASYKAAYEAGKFGFWIQRQLTALGIECIVVNPADIPRSQKDTLQKTDPRDARNLGLRLQSGVLRGIHIPDEQQEADRVLFRHRKRIWKDLTRCKNRIKGLLAFSGIDIPEAYDNASWSHNFINWLKLLDCMQCSRRQALDYMIKQMEFLRRELLDISNAIRKMMREQRYKTNYYLLRSIPGIGPLTAASLLVEIGDINRFESFYHLNSFVGLLPMEHSSGETESKGILTVRKHRQLRSDLVESAWTAKRTDPAMALYFQEQIKKKDSKVVIIKIARKLLNRIRHVLLRQEPYEYGVVK

SEQ ID NO: 238257 - protein, 310 aa, unidentified
MEQVFVGIDVAKDRLDVHVRPSGDAFAVARDSEGVAALVGRLAGLRPGLIVLEATGGFETVVAGAVAAAGLPLAVVNPRQIREFARATGRLAKTDKLDAEINALFAERIQPEPRPVPDDQARALAELIARRRQVVDMMTMERNRRHMLTGKRLIKSVDRLLAVLQKELSSLEMELDDTIRGTPAWREKEELLTSVPGVGDTLARTLLADLPELGQLGRRQIASLVGVSPFNRDSGRFRGKRTTWGGRAKVRSVLYMGALVASRHNPILSAFYQRLLTEGKEKKVALTAVMRKLLVILNAIVRDGTPWQNA

SEQ ID NO: 238258 - protein, 350 aa, unidentified
MTITYYIGFDVHKKWIFYCVKTQDGTVVSEGKISAERSALEDWAKQRSQAWIGGLEATLFSGWIYDALKPYAVELKVAHPAMLKAIAASKKKNDRLDARVITDLLRCNLFPECYMAPGWIRELRRMLRYRNLVVSQAVRLKNRIAGLLMEEGVRYDSRRLHGKRYFAQLLDSLETPASVMQLLRLSRSSLEMLQAVERRLLHELERNRQLRARVELLRTIPGVGLILALTWALEIAEVKRFGSIGRAISYCGLTSAQRESACKPYRTPISKQRNAHLQTVLIEAAKLAPRWNPPLGALHERELARGNRNRATLAVARKLVAYLIAVDRSGQPFQERAAGAESAAVALAGV

SEQ ID NO: 238259 - protein, 405 aa, unidentified
MLRRTFGVDVHRDLIVVTKLGEEGKETRNFGVDFEALGRCINWLRLDECLDGAMESTGVYWAPIYTTFKEAGFNVCVANAYQVKAIPGRKSDVKDSDWLAYLLRAELIKPSYIPDRNHQDLRTLTRLRIRLAETETDFKNRAHKVLQLCNIRVASKLSDLFGESGLRILEALLNNGDIDEAINASDRRIQAKAEEIKASIMGTLNETDIFELKIILENIKLLQTQIQQVDERISTLADRNLVDKLSKIPGVAPTSAYTFIAEIADPNRFMNQKKVGGWSGLAPSQYQTARTDRHGHITRHGSSWLRRIATQSAKAASKSKSKLAQSYNRIAGRRGKAIATVALARQIVTIAWDTIKTGQEYSEEHYAKQTKYRIKHGKAEKYNLTQTSSILSQATRITNLNTSCW

SEQ ID NO: 238260 - protein, 352 aa, unidentified
MESTTVGIDLAKLVFSVCVMDERGRITARRELKREALPEWLMQLPAGTVVAMEACSSAHYWGRLCSSHGLVPKLMAAQFVKPFRKSGTIKNDRNDAEAVATAARQGNMRFVGVKTGDQQARLSWHRVREGYKKDVLAVMNRIRGLLAEFGVVINKSAVALRRMLARLDEHHLPAEFVELVRLQQRHWEAIEAGMAACDARIKAHAGQDERCQRIGAITGVGWLTTDAMVATIGNARDFKNGRQCAAWIGLTPSQYGTGGKVLLGSISCRGDAYLRTLLIQGARSSLQRAKVTPVDKMTPEQQWIVQLAARLPFGKVLVAIANKHARQIWAMLARGEAYDPEAWLKHPMVQRG

SEQ ID NO: 238261 - protein, 326 aa, unidentified
MSIVCGFDVHRDQITFDLVDRLSGEARTGRVIPATRAGLRSWLGSIDASRLSVALEATTGWRFVVEELERAGAGAVLAEPADTRALRGPKRRAKTDRADARHLRELLERDAVPESWIPPVHLQELRTLIRLRQSLADERHVWLQRVHAQLFHQGAPAPRGAVLGAHGAASRATLSAAGRELVETAERMCEAIDREIDGLDQQLAVWARRHPACRALQRLFGVGPITAVALYAEIGDARLLSSSRKLVRLVGLDVTVSESADKRSPGRLSRQGAPILRWAAYEAALSACRRRCRANPHHWPASLAPARARSRLGAARAITQSTSRAR

SEQ ID NO: 238262 - protein, 365 aa, unidentified
MASISRVAPIHLGLDVHKDTISVGILPADQQIPEVERITHDEASIRRLVGRLGDPHLLRACYEAGPTGFELARLLHSMGISCQVIAPSLIPKAPGDRVKTDRRDCRRLARLHRAGELVGVRIPTIQEEAVRDLCRTRSDMVQDLTRARNRLGKFLLRHGRVWRGGATWTLKHQAWLGSQRFDQPAMAQTFGHYLAVVEIRNAQLDAVEADLAGWCDRPPSDWQVARLAAYRGITRLGALTLAAEVADWRRFATASQFMGFCGLVPSEYSSGTTVHRGRLTKAGNGHLRAQLVESAWAYQHRPAVGVQIARRQQGLPPEVAARAWAAQQRLCARFRVLAARKNVKSIVAAAIARELAGFLWAEMTA

SEQ ID NO: 238263 - protein, 360 aa, unidentified
MTSTAPASIPQVTIGVDTHKDTHVAHAVDDLGRPLGNYTMPTTSIGYGKFLVWAQGLGELEVVGIEGVGHYGAGLGRALRAAGVRVTELGRPNRQRRARHGKTDSVDAAGAAAIVLAGEDLGDPKTADGITEMLRVLRVARVSAVRARAKAFNALKDLIVTAPAEVREQLAGRHKLHLIGACAGLATSEIPSIPAEAVSIAVKSLAERCLQLDAETKTLDTQIDALTAHACPALREVYGVGPDTAATLLVALGDNPERIGSDAAFAKLCGVSPIEASSGKTVRHRLNRGGNRDANRALHVICVVRLRRHQPTRDYLARRIGEGRTKAEIMCCIKRYIAREIYHAVLPTRQEVPTQTQGDR

SEQ ID NO: 238264 - protein, 355 aa, unidentified
MNSVKDIGLDVHLTTISVAVLDAEGKLVMHSVVATQAAAILDFIHGLRGTLHVTFEEGTHSAWLYDLLVRQVARVVVSNPRKNALLKAGNKSDPIDARKLAELLRAGLLAPVYHGETGTVTAKQLGQSYAALTEDTTRVMSRLKALYRGQAIPSTGKRPYGRRHREAWLAQLRGEGLHRRAERLYQELDALQALRREARRELILECRKHGAAKLLRTIPFLGPIRAALLIGRVQTPHRFRTKRQFWAYCGLALETRSSADYRFVNGQLERAKKPVWIRGLNRNHNHDLKNLFKSAATTASARAGPFRTFYLGLLAKGMLPAMARLTLARKIAAITLSVWKKGEAFDAEQLKPQAA

SEQ ID NO: 238265 - protein, 411 aa, unidentified
MVKENFIYVGIDLHKETHTAVMIDCYNQKLGEITFPNRPADFPKLVTKVKKCNTDAKEVVYGLENAYGYGRALAVWLIDKGYFVKDVNTAISHRQAKHRGAMYRKSDSDDAEAIALATLNMLDKLPDACPNDAYWSLGQLVHRRDNIMKQRTRLVNQLHEQLCIAYPSYKSFFNDISRPTALYFWEHYPSRKYLRGKSVEDLRKELVPVSHNKCSTKTCEKILDAVASDKVKNNAYQDARDMVTLSIVSDLQHYDKQLAEVDKMLEQMYKMLGCTLTTIPGVNVITAVKILAEIGDIKRFSNANKLAQFAGIAPLHLSSSGKGKDVATKQGNRRLQATIYFLAIQMVQVSSKGTPRNSVVRAYYEKRKAEGKTSQQALICISRRLISVIYGMLKNGTEYRMPVVENAGEKL

SEQ ID NO: 238266 - protein, 422 aa, unidentified
MANSTLCVGGDIHQDELHLRATDKTDGHEVGQPLTVKNNRPGADQAIAHLVQRLTQHGYTRLEFGLEATGLFWLPFYVYLQQSAALTPFQPTWVCFNPKLVAKFKEGVTLSEIKDDDHDALAVAERLRFGHLPVSYLPSSEWLALRMLTRYRYRLSRQITQEKLRALTRVFLKASEWHRGQPFSDVWGATSAALLTGFTVAEIAAMSLSQLTDLIQEYGRKQFDDPQATARQVQRTLQNSFPVTPDLDAALTVVLQVAWTHLRDLEKLMRRLDREIAQRMERIANPLLSIQGLGPVITAGILAEIAEIKRFPDQPQLAKFVGLVWRKHASGQFVAEETRLAKTGNVYLRYYLIEGANLMRQHNLEYQAYYRRKFAEVPKHQHKRALVLTARKLVRLVFALLTKNQTYVRPQAVQSQEAAPVH

SEQ ID NO: 238267 - protein, 391 aa, unidentified
MPTTLTHCTTPTATLYMALELAAHEWLLTFAAGPGSARRHVTIPARAGARLLAGVQRAKVKLGLPADAPVLSCYEAGRDGFWVHHWLTRQGITNAVVDPASIEVNRRLRRAKTDRLDGAGLVRLLARWHGGERDAWKVCTVPPTLAEDLRQPIRERLELVEERTRLVNRIRGLLAGVGAVVDGPLTAATDLDALRQWDGQALPPLLRARLARDRQRLALLERQVTDLENAERRAVRDDATPQVEQARRLLGVKGVGPTSTWLLVRELFGWREHLTPKQTGALAGLCPTPYTSGDSAREQGISKAGSKRVRWALVELAWGWLHHQPHSALSRWYQRKYGAGGARHRTVGIVALARKLLVALLRLALTGAVPEGADVRDWYTKVTGRPRATAT

SEQ ID NO: 238268 - protein, 363 aa, unidentified
MNYVGVDIHKKYSVLCALDERGNKLREGRVEGNAPSGFAQFFAGLEGPSKAVVEACWNWGLIHDELEELEQVEEVVLAHPYKTRLIADAQIKTDRLDAHALGTLLRGNLVARAHVPGRETRARKNLLRQRLYWARLRTMLRNRIHALLDRQRELELPQCSDIFGVRGLGFLRRLELPEPDATLLREQLALHDLIAQQMKAQEKRIAAEFKTEAMHQHLLSVPGIGITLAAVIGCEIDQIERFNAAEKLCAYAGVVPTTHASGGKTSHGRLLPFCNKWLRWALVEASWVAIGCSPYFGSLYKQHRARGKKANTAVLIVARRMCRIIWQLLHEKRDFEKRTLSPKVYSFPGCSALALTVNSASAP

SEQ ID NO: 238269 - protein, 364 aa, unidentified
MKRVQYVGLDVHKKSIEVSVLNGGNADPEIEKALPNEGAKIKSFFDRLKMKGSVIACYEAGCIGFELQRILESIEVPCIVAAPGLLPRRPGERVKTDRRDARKLARNLRNGEVTPIHIPTKEDEAVRDYLRMQEDFKVERKKTKQRLLHFLLRHNLIYTDGNHWTGKHEQWLRALEFDNPVLKETFDEYFFHLKELEEKIGRMKEKIEEIALRDSYQEPVSKLKCLKGIETLTALSMVVEVGDFRRFMKAEEFMSFLGLVPSENSSGDRRRQGGITKAGNSHLRRLLVEASWHYRFDRGVSKRLVARRKGQPVSVVSYANKAGKRLSRKFNRLIFRNKKSQVAVTAVTRELAGFVWGLMVGQTA

SEQ ID NO: 238270 - protein, 341 aa, unidentified
MNQCFVGIDVSKKQIHVCVLGEKPHPYPNCLTGFRKMMKSLREKKPHGEETLFLIGMEATGVYHLKLATFLKDEPDVAVYVLNPAQVKSFFKASFHRTKTDAIDACGIASCTEFLVNRDKVRAFETPDNEVERLRQLCRRRDEILSMAQMEKNRIEALKEVPSHSGEVESSLLEHLEYLEYLEQRLKDIEEKIKGHIRNSPGLKEQVDLLKSIPGISDTAAAGLISEIRSAERFDNVKELVAFAGLAPAERTSGTSVKGKTSICKTGSSRLRKHLYMPALVGIRYNPLLKEFYERLTNRNKPKKAALIACMRKLLHIIYGILKNRTAFDPLWAKNRFAMAC

SEQ ID NO: 238271 - protein, 344 aa, unidentified
MLIIGCDFHPSFQQLALFDNQTGEVTEKKLSHPAQASEFYRGLSEPVRVGMESGAPCQWFRRLLAECGHELWVGDAAKIRAAETRKQKTDRRDAELIMRLMVEERFPRIWVPSEEERDVRQLLLDRHHRMRARTAAKNQLQFLALNQGVQRGRKLWSEAGQEQLRGLPMMEHAARRRDQLLRTVAALDGQIAELNGLVRSQAEGRADARRLMTHPGVGPQTALGMVLTLGEVGRFAGAKQVASYLGLTPREHSSGGKQRLGHISKQGSSLLRFLLVEAGQSAVKGDARLRRAYARLAAKKSRAVAKVMVARRLAVRLYWMLRRNWTYAELARHAGEPGSFCGEQ

SEQ ID NO: 238272 - protein, 340 aa, unidentified
MHATTYGLDVAKRVFQMHWVDNESGEIVNRRFGRDDLIQYLSRQSPARVALEACGSAHWWARKIKTLGHDVVLLHAKFIRPFVQTNKTDASDARAIWTAVQQPGMRTVAAKSEEQQTMLSLHRIRSLLVKFRTMQVNQLRGLLYEFGASFRTGRVAGLAEIRARMTELEEALPGAMMSCLQDQLRRIDGLQAEIHQLEQRLGAWQKQDAACRAIAEVPGIGKLTATALVATMGDARTFKSGREFAAFLGLVPRQSGTGGKVRLGAMSKRGDPYLRTLLIHGARSVLCHIKVPTPWQKAIQARRPTNVAAVAVASKMARTAWAILAHGQAYRRDHVSVRPA

SEQ ID NO: 238273 - protein, 336 aa, unidentified
MSLYCGIDLHSNNNYACVIDNKDKRIFEKKLGNSAELVIQALQPYKRRLKAVAIESTFNWYWLVDSLMAAGFEVMLVNTAKVVQYEGLKRTDDRYDAFHLAHLMRLGILPTGYIYPLAERGLRDLMRKRMGLVQDRTRYILSLKTQHQRQTGRNLASNDIKTRKFQLPVLGDANVQLAMSSNLSMIRVLTGEVKALEKVIMTQVESSPSFELLKTTDGIGDILAETILLETGDIDRFKSPGNFASYCRCVDSRKESNGKKKGVGNKKNGNKYLAWAFMEAANFAIMHSVKASQYYSRKKAKTNRVVALKALSHKLARACYYIMKRGVAFDEDKLFS

SEQ ID NO: 238274 - protein, 340 aa, unidentified
MVHVGVDLDKRSSQIAVLTEDGEVAQQRLPNDGARLEKFFAELPPHTPVAIEASGTWWWLVDLLEHLGHDPILSHPKQTKAIASARLKNDRVDAERLARLLRGDLLPTVWIPPATLREARELVRHRVQLVWLRGIVRNRLHAMLARRNLQPVSTKSWLTQRGQRELQRLPLADTPNRIREDCSALLPLLDAQIRRLDGELSARWGGDPRVQRLTTIPGIGPFIAIVLVLELGDIARFPSAKQVASYVGLTPRIRASAGRIRAGHISKEGNRLLRWVLVLAATQAVRRPGPLRTWFHAVKKRRGKKVARVALARRLAEIVFHVWRQECDYFTVVRHGVVRG

SEQ ID NO: 238275 - protein, 411 aa, unidentified
MNPVVGLDVAKGESQVQAFLDKKQPYKKGFKVAHTLEGLASLLDFIREVENVSGGRPPIVLESTGHYHTPVVQYFEDRGYLLIIVNPLISYRAKSSSLRKVKTDVIDARHLCELYYKEDLEPYKQRGIQLLNLRNLTRQHENITGLFVQTKLQFQAILDQVFPEYRGVLGDLHSYVSLLTLQTFPTSQKILDTGEEKVAKKIKELCKSRSQKWADSQAEKLMAAAVQNPFQKNLYHSLTLSLDMYINMLLEYKKHLSKLEDEIDALAKGIEECKVIQSIPGIGEKIAATIISEIGEIDRFNHPKKLVAFAGIDPSVFESGTFKGTLNRITKRGSSRLRHALYMAVKCAIRDSRKKKTTDEIIPRNKRLREFYDKKREEGKPFKVAVIACANKFLHWIYALLKSKSTFQDLA

SEQ ID NO: 238276 - protein, 410 aa, unidentified
MIEAIVERCAGIDVGKKFVLVCVMTGAAKDEPHTKIKKFGTIVSELERLAAWLVDEGCTHAVMESTGSYWKPVFNLLEAHVRVILANAADVQNRRGHKTDPNDSRWLAHLLRHGMIRPSFIPPLPIRELRDLTRRRRQLIGENSRERNRIQKVLEDANVKLGDVLSDVFCVSGRLMLQALLDGDLSPAQIAELAKKKARVKIPQIAASVTGHRLTDHQRFLIRHALRHLQFLDEEVEALNQEIRRRMEDPALGEAFLLLQSIPGIKEESAASILAEVGADMQQFPTAAQLSSWAGLCPANHESAGVKKSVRTNRGNVWLKTTLTQSAWAATNRKGSRLQSRYHALRARCGNKRAIVALGHTLLKTIYTVLSSGTPYREAPIGEETERQEQRARYHLRCLRKLGYPTLAAE

SEQ ID NO: 238277 - protein, 369 aa, unidentified
MHGLTHCNNVTRILTLDLGKFNSVLCVYDPATHAHQFFSVQTTPQTIHDLLVKHQTPDPSHTLLVIETCDVAGWVHDLATTLGIRVAVANPAHEAWRWTRVKRKTDKDDALKLAKLTVLGQLPTAHMPSPQQRQRRRLVHHRRVLVDRRTAIKNQIRSIFSQQGLQLPARGRAWTKIGLQQIAAESRPLDQCESIDDLWRGRLHVELHLLEQLSKQIEQVDAKLDAIGAQDPRVQLLQSVPGVGPRLAETVVAHLDDAKRFKSAGHVASYAGLVPKQIESGTMKRSGRITRRGPALLRSMLVEVAWMVYMRNDWARAFVQRISRGMKGRKNIAIVALARKLLVTLWAMLRDNAPWREPGFLQPNSAAAA

SEQ ID NO: 238278 - protein, 403 aa, unidentified
MSPEHSIDIFLGLDVGKSEHHACALDRDGNKVFDKPLPQLESELAGVFHQLQKLGTVLVIVDQPNTIGALPITVARDCGCEVGYLPGLAMRKAADLYPGRAKTDKRDAFIIADTARTMPHTLRAVDRNDEVLSALKMLSGFDDDIARDCTRTVNRLRSVLTQIYPSLERVFAGSTLTRTPILELLIHYKGPQGLKRAGYQRVLNWMIKRTRKDPTPLVDDIFTALKAQTVTVPGSDAAELVIPQLAANIQALKEQRNTIAEQVEEMLADFPLCEVLMSMPGVGIKTAAQILLAIGDGSDFASAGHLAAYAGIAPVTRRSGSSIRGEFPARSGNKRLKNALFYSAFAVIRSHEPSRRYYERKRAEGKRHNAAVICLARRRCNVIYAMLKNKEFFREIPPRPVAA

SEQ ID NO: 238279 - protein, 395 aa, unidentified
MKEVASGENGSLRMIEGQSHFRPFGLSCWGFADLNKGVGSMTASYDYHIGVDYHKSYSHLVVQDSGGKTLRSGRVKNDRQSLGGFLERYRQNSHAVVEATRNWMVIYDWLDDICDDVVLAHPLKVKAIADAKIKTDKIDATVLAHLLRADLVPEAWAPGERARELRVALRERMFYVRLRTMTKNRIVTVFDRYPEQTAQLKKLGDLFGKAGRVQLAQVNVSEIDRIQIDRGLAFIGDIDGRIKQSEATIRTMTKANANVRLLKTIPGIGEFFARLIDAEIDDIGRFRNPKKLAAYAGLVPSTYSSGGKTFHGKIIKQGNKWLRWAFVEAVTPAIVTDPQLRAQYEHLKIRGVNKARVAIARKLLTIAFQILRDQRAYEPRGASPTEGASTISRLS

SEQ ID NO: 238280 - protein, 429 aa, unidentified
MSEEKSLELRVSVDVGYRRHSVAMGLSSGEVLEEFEIDHRIEGFEEFFSRIEKQRKKENCAVAVAMEGYNGYARPLDSMVRQRGYRLYNLNNLKFARFKEIFPGSAKSDRIDARKGLELFQLSDHLPLAKEVLQEVSGTPPENEVLKRLTRRRRRLVNERVRVVNSLQADLQAVCPGLLEITAEASNQWFLNFLLSAQTLPQLARLRRNTLLKIPSVGVKCASIIEGWQKRAHFSQEVEWVGEMIQEDATRCLELDGKVKRLEAQIAEVAKGSKITKILRSIPGFGAVCTSELAGEIGTIERFASEASLSLYLGMSTLDNSSGKYQGTKTPKHVNTRAKAAMMIALDRHRKYVPESQRYYEKKRSEGKKHNQAIRSLGRHLSRIIYKMLKEERDYEIRPEKSNTKTKVSSRSSIKTQIRRPKISSKKNK

SEQ ID NO: 238281 - protein, 369 aa, unidentified
MTKVRTWVGLDVHAAKVVACVVDAESGEMTVCRLPGGTSEVVALCAGLPGPTRVGYEAGPTGFGLARALQAAGVVCVIAAPGKIERPAQDRVKTDRRDAERLVRLLMINGLHPVRVPSGEEEALRDLVRAREDLRGDLMRARHRMGKLLLRHDVRYDGVGDNWAHRHRQWLSMVRLPERGAQATLLDYLGAIDALVIRRDQVEATISELVPGSPWAQDIARLRCLRGIDTLTAVGLCAEISDFERFEHPKQLMSYVGLVPSEKSSGQTRRQGAITKSGSQHARRLLVEAAWHYRRPPRLGTRLKARQVDQPAVVIAIAWKTQQRLHQLWRRLDTQRRKRKTIVAAAVARHLVGFCWAIVTADTDQHTTT

SEQ ID NO: 238282 - protein, 427 aa, unidentified
MKYKQNLKIMQITNKTLVIGVDIAKKVHFARAFDWRGIEVAKTFSFRANSTGFFRFKEWAGEIEEKNGKNKIVVGFEPTGHYWLTFAQSVLAEGMMVVQVNPYHVKKSKELDDNSPSKNDHKDPKTIAMLVKDGRYQIPYMPKGVYAELRKANNLREEWLKKIWSIKNKVQRWLDTYFPEFTEVFAKWEGKAAVMTLEKIGLPDRIACMTADEIVAVWREEVKKAVGVKRAQKLIEVAASSVGMREGMEMAGLEIRLLLREYREVRAVMDGLEEKLEEIVLTIPGADKMLGIKGIGIKTVAGFLAEVGDIRRFDHPDQIIKLAGLNLRENSSGEHKGQTTITKRGRSRLRALLFRAILPMVAKNEEFNALHKNYTTRAENPLKKKQSLIVLCTKLIKIAYKLITEDVSYDPVKMMSDIHRGFEPKAA

SEQ ID NO: 238283 - protein, 334 aa, unidentified
MENIALIGIDLGKNSFHIHCQDHHGKAVYRKKFTRPKLIEFLATCPATTIAMEACGGSHFMARKLAELGHFPKLISPQFVRPFVKSNKNDFVDAEAICEAASRPSMRFMQPRTESQQAMRALHRVRESLVQDKVKTTNQMHAFLLEFGISVPRGAAVISRLSTLLEDSSLPLYLSQLLLKLQQHYHYLVEQIKDLESQLKRKLDEDEVGQRLLSIPCVGTLTASTISTEIGDGKQYASSRDFAAATGLVPRQYSTGGRTTLLGISKRGNKKIRTLLVQCARVFIQKLEHQSGKLADWVRELLCRKSNFVVTCALANKLARIAWALTARQQTYEA

SEQ ID NO: 238284 - protein, 382 aa, unidentified
MNKIIRIGIDTSKSVFVLHGVDAAEQPVLRRKLRRSQVLEFFGKLEPTKIGMEACGGAHYWARELQALGHEVVLLPPQYVKPYVKRNKNDAADAEAICEAMSRPTMRFVPVKTTEQQAALMLAGTRDGLIGRRTQLSNTIRGYAAEFGLTTAKGLDKIELLLAGIAASAELPTLAKELFAAYGREYAQLQRQIIKIEARLMAWHKDNELSRRLVEVPSIGPIGATLLVMKVTNPHAFRCGRDFSAWIGLTPKDHSTAGKTRLGVITRAGDEALRSVLVAGATAVIQQAQKGRGYAPPWLVELLKRKPRKLAAVALANKMARVAWKLMVSGERYNPARTAAQSAAREGRGAALRGGSAPRPSLASRITPLGGGCHDRGVTSSA

SEQ ID NO: 238285 - protein, 334 aa, unidentified
MKQGIIKQNVGIDVSKDDFKVSFSNLTVDYRVIVRSTRTFANTVHGFKQLHEWVNLKKDPELTVHVTMEATGVYYEGLAFYLYEQSYTLHVVLPNYAKKYAESLGVKSKTDKLDAKCLAQMGLERDLRQWQPISLALLGLKQLTREREALVCTRTGVANQLHAYRHQGKPNKASIKRSQRHIAFIDKQVKQIEQEITNFVNQDEKLRTKIGYLETIPGVGLITAAVIVAETNGFAAFESIKQLTAYAGLDVRIQESGKWKGKSRISKRGNSHIRKALYMPSISKKTYDTATKQFFERIKEKKGVGMIAIVAVERKLLGLMFSLWKKEEIYNAAI

SEQ ID NO: 238286 - protein, 419 aa, unidentified
MDVLIECCAGIDIGKDEVVACVRTPGPGRRNRRKQTRTFRSFTGALEAMADWFAAEGVTDIAMEATGSYWKPVWYVLEERAFELKLVNAQHVKILPGRKSDVLDAEWLAELLEHGLLRGSFVPPPLIRELRDLTRYRKRLIQASTAETQRIQKTLEDAGIKLGSVASEVLGVSGRAMLAALVAGERDPEVLAQLAKGLLRKKLPELRQALRGRFGDHHALLIRLCLDHLTHLEGAIAQLDEHIDNLFAEHTSEAGVPFAQARDRLDTITGVGKRAAECILAEIGTDMTRFPTAAHLASWAGVCPGNNITGGKRGSGQTTHGDVWLLDILTQCAWAAARTRDTYLAAQFWRLARRIGKKKAAVAVGHSILVICWHLLTNDCDYDDLGGDYFTRRNPDRQRDRLIQQLNSLGYRVTLEAVA

SEQ ID NO: 238287 - protein, 355 aa, unidentified
MKNQAIQYLALDVHQATTVATVREENGSIRMRATVRTEAGAILGLVRALGPRVHVAFEEGTQAQWLHDLLQPHAERVVVCNVRGRSETTNKSDRLDADWLSEMLRVGSIKSVHHASTSTLTLKELVRCYMNLVEDSTRVMQRLKAIFRARAIATPGKSVYRASQRKGWLSKLESRGACMRAAALYEQLDVLMKLRPGAKTAMIAEARQSGGWKILRSIPFIGPVRAALLLAIIGTPFRFRTKRQLWPYVGLAVITRSTSDREIMEGKVRRRKRAPLTRGLNRNHNPVLKSVFKGAATAASTTDGPPKDVYDRCVAGGVREEMAKLTLARKLASIVLCLWKKGELWDPAKLTMATT

SEQ ID NO: 238288 - protein, 406 aa, unidentified
MNLKGTKKKNQVSNVNIFEQQELLKKIEVVRENLTASTWRELETKGKFDKNAKLSFICDDMLILGCDVGSETHYLRAIDTRGRELSKSAFSFSNNADGFSKAKEWAVKIAAEYDKKQIVLGLEPTGHYWFCLATWMISNGLSVVQVNPYAVKQTKELEDNSQLKDDTKDPKLIANLVKDGNFGMPYLPEQLYADLRRLSMFRDQLNEDRIRSINRLHRELKIYFPEYKEALGKTEGTFSLELLKQAPFPDDLAALKEDGIRQIWHNAKLRGRGYSRAGEILEYAKASVGLREGKETGKLVVQWFVQKILELDAELALIETQINQKCLEIPHTDKVLEICGIGENTLSGMMAEMGDISRFDDVKEIQKLSGLGLVASSSGKHKGETKISHRGVSASDIGCFRRQNQL

SEQ ID NO: 238289 - protein, 337 aa, unidentified
MKRYLGVDLHRTQFTVCTRLENGRTYLRQWPMRELKLFAAQLRKEDEVAVESTGNTRLFHDAVVEHVARVAVVNPGQFKVISQSVKKTDKNDAELLALYLAKGLLPEVRMKERNQRNVSHLAQTRDLLVKQRSALKAKINNLLSSEGINLKREALSSNKALERVLALPLSPLMLAETRVLVGQIRSLSQSIAELEELIETEAPKLAGHENLRSIKGIGPVSAAVLLSVIGDIRDFPDPGKLAAYLGLVPRVQNSNEMEHSGRITKQGNKLARTALVQCALVAKRYSAFLQNFYQRIQRRRGGGKANIALARKFLGVIYHTLKNDWVFEDFPNFVLAS

SEQ ID NO: 238290 - protein, 373 aa, unidentified
MNAVGIDVSKGKSMVTILRPFGEIVSSPFEIKHTSSDIHSLIKLIHSIEGESRVVMEHTGRYYEALAHQLSAADLFVSAVNPKLVKDFNNDSLRKIKSDKADSVKIARYALDKWQSLEPYSITDELRAQLKVMNRQFHFYVKQKTAMKNNLIGLIDQTYPNANTYFNSPTRSDGSQKWVDFVSTYWHVDCIRKMSLNAFVEHYQNWCKRKKYAFNKSKAEEIYTKTKELVPVFPKNEITKHIIRQAIDQLNSTSVTVETIRTLMNETASKLPEYSIVMQFKGIGPSLGPQLMAEIGDVTRFTHKGALTAFAGVDPGVNESGSYAQKSVPTSKRGSSNLRKTLFQVMDVLIKTMPQDDPVYQFMDRKRTQGKPY

SEQ ID NO: 238291 - protein, 342 aa, unidentified
MEIAVLGIDLGKTTCSVAGLDEGGTVVLRKRIQRHRLLAFLSGLSPCIVAMEACGGAHYVGHFCVEQGHEPRLMSPLYVRPYVKVHKTDDRDAEAIAEAATRPTMSFVTLKAPEQLDLQAIHRARERLVQNRTRLVNQARGFLMERGIRIGAGRHVFQRELTRLLEEDDVSLMPGMVRILSDMAAELAEINDRVAGLDAEIRAHARHDADMQRLMEIPGVGPTIATALVAAIGDGSSFNRARDLSAWLGLVPRQITTGGKARLIGISKHGNSYLRKLFIHGARTVLHLVRDRSTPLARWVDALKDRAHANVAGVAMANKLARIAWAVLTKGERYRPSALETA

SEQ ID NO: 238292 - protein, 295 aa, unidentified
MKKNSTMATSRKQIFKGQKLTIGMDLGDRFTYYCILDEAGEVMVEQKLPTTKPAIQQAFGRMPRSRVAMETGAHSPWVSRQLTQLGHEVIVAHARNVRLIGESSRKDDRLDARMLARLARLDPRLLSPVQHRSAEAQAHLTVIRARAALVGARTMLVNAARGLAKSYGERLRKCGTQQVSKDLAAGFSVELRAALQPLLMEVASLNERIAEYDRRIEQIATQVHPEVALLKQVKGVGTLIALTYVLTVADPRRFRRSRDVGCYLGLRPGRRNSGSSQPQMHISRVENHCACAWLG

SEQ ID NO: 238293 - protein, 412 aa, unidentified
MTATNQFAAHVGLDWADKKHDVCVQFKNGERTFHVIEHTPEALDVWLTELHQKVKGRIAIAVELKKGPVVYALQKYPFITVFPVHALSLARYRQAFSPSGAKDDPQDAELALELMLRYPQKIKAIEPDNADIRLLQQLVEQRRQLVEDKRRFVNRIINTLKQYYPQPLEWFSHRGSLLLCELIIRWPSLQQLKRARRDTIRNFLNAKGGRAMALTEQRVASIDNAIPLTTDPSVIEANALMATALATQIKVVSEIIKTYDERIETLFDTLPDAGLFKSLPGMGPCLGPRMLAALGDNRDRFNSAEEIQNYAGIAPVTERSGQKSWVHWRWQCAKFVRQTFVEWAAKTVNSSYWAKLYYQGLREKGKSHQSAIRALAFKWIRIIYRCWKARTCYDEAKYLLALEARHSPLLKP

SEQ ID NO: 238294 - protein, 392 aa, unidentified
MVVSVGIDVAKDKHDCFIQSSEGEVLADVFSISNNMDGFHTLLEKIQACTAPQDKIKVGLEATGHYSYNLLGFLLDNGLATYVLNPLRTNLYRKSLSLRKTKTDRVDARTIAAMLLSDAGLKPYTDTAYHNEELKSLTRYRFDKVKERAKLKSSVSRLVCILFPELEKLVPSLHMASVYALLEEFPGAKQVAGAHLTRLKSLLENASKGRYKRDMAVSIRDAAQNSIGSKMPAKSLELQHTIRLIRELDAEIHEIEAEIETMMDEIRSPITTIPGIGCRMGAMILTEAGDLSRFDSPDKLLAYAGMSPSTYQSGQLKNCYPHMEKRGSRYLRYALFNATKYVCLWDPTFSAYLAKKRAEGKHYNVAISHAAKKLVRLIFAMEKSRQPYCSAA

SEQ ID NO: 238295 - protein, 424 aa, unidentified
MQNTAARKRRQVPEEYLVIGIDPHKKRHAAVAITQDFTTRVKFKFDNTREGLEMMLDRARVEMVESGCRGVMFAIETGGHYWRNIAYYLEERGIPFRFINQYTLKRRREGKDLNHRKNDYRDSEVAAQLLCTGEFVESAIPQGVYAELRTTHNAYQRLVKERTRIINLLKGLLDALFPEFTQVFKDPCALTALSVLSTCPIPRVIAGMIEDAFVATIEARHKGRRLMRKKLRTLHYLAKTSIGIDAGAQSVSSEIAFLVDKLELIRQHIRIMEGTLVRLVDETEEGKYLLSIKGLNYIAVAGLLAELGCFKLYRSAKQMIKMAGSNPTESESAGKKKSKTPMSKQGRPLLRYCAWTSVIPMLRFNPDFRAWAKQRRERPAHANPLNGREIVGAALNRLLRLSFALVRNQTYYHDVKPALIPVAV

SEQ ID NO: 238296 - protein, 342 aa, unidentified
MKQYVGLDVSQRETAVCVVNETGQVIFEGKAKSNPGVLTDLLSKHAPHAERIGFETGAMASWLWHELRRVELPVVCIDARHAHAALSVRMNKSDQNDARGLAELVRVGWYREVKVKSEESQKIRAILVARSRLVSMRRDIENQVRSLIKECGLLFPRAIGQQFRNQVSELLGVDHLLLSVISPLLSIHENVCQQQGKFDNEVRRLAKLDETTRRLMTVPGVGVVTALTFRHTIDDPSRFRSASTVGAYLGLTPRRSQSGETDTNGKISRWGDRLLRTYLFEAATVLLYRTKKWSSLKAWGMKLAKRIGMKKAKVAIARKIAVILHCIWVDGTSFDWGQRKPI

SEQ ID NO: 238297 - protein, 433 aa, unidentified
MQDVEDEPLFAERVAGLDIGKAAVEVTIRVPGGTAPGRRQQEARTFGTTRRELESLGDWLACWGVTKVGMEATGDYWKPAFFLLEARGFGCELYNAAQVKALPGRPKTDRADSIWLAKITERGMICSSFVPPEPIRRLRTHTRYRRHLTQARTAEKQRVEKLLEDGHLKLSAVICDIHGVSGRDMLNALAAGQRDPKALAQLARGSMRGKIRRLEEALDCSFFTSEHAAVLAMMLAVIDHYTAQIEALNARIEALIAPYLHQVAQLDAVHGIGIICAQDIIAETGTDMTAFPTAAHLVSWAKWSPQVSQSAGKRKGSNATGRGNPYLSAALGEAAIGASRTQSFLGARYRRMVRRMPKKKALVATGNSMLTIVHALLADPEASYTDLGADYYEQRMHARRQARSHVKSLERLGYQVTIQALNPDTGELQAPAG

SEQ ID NO: 238298 - protein, 410 aa, unidentified
MLFLGNDWAEAHHDIELVDDSGRRLARRRLPEGVDGLAALHALIADHLAEDAEADQVVVGIETDRGPWVQALIAAGYTVYAINPRQVARYRERHGTAGAKSDPGDAHVLAELVRLDRAHHRPVAGDSALAEHVKVLTRTHQSLIWSRQRQTNALRSMLREFYPAALAAFGEDLAGREALAILAIASSPEAGRRLSLSKIAAALRRAGRQRGIDASAERIQTALRTPQLQTHPGVVSAYAAAVHSLIAVIDALVTQVEVLRGEVEAGFGRHPDAEIYLSQPGLGPILGARVLAEFGDDPTRYTDAKGRKNYSGMAPITRASGLKRMVLARPARNRRLANALYFQAFAALSSSPGARAYDDAQRARGAAHHQALRALSNRLVGILHGCLRHHTGYDEAIAWHTDASSQEAAA

SEQ ID NO: 238299 - protein, 351 aa, unidentified
MLHAATVHTVTAIGIDMGKNTLHMIGLDPRGAIVLREKVSRGRITSRLANLPPCLIGIEAGMATHYVARELAVLGHDVKQVPPAYAKPFRQGHKNDYRDAHAVAEAVQRPTTRFVPAKTDEQLDLQALHRVRSRLVSERTAVINQIRGFLLERGIIVRQGLRFLRQALPDILAKRTDVLSPRMVRIVADLASDWRQLDERIEVVTDEIETLAKSDSSCRRVMTVPGIGPIISSAMIAAIGSGAAFARGRDFSAWIGLVPKQMSTGDRTILGRISKRGNGYLRMLFMQAARVILLRPASWPKHGFGVWLARAAQRLHPNVLAAALANKLARIAWTVLAQERSYETRLTKAAA

SEQ ID NO: 238300 - protein, 328 aa, unidentified
MKFREVLGIDVSKKTLDIYLHCSSKHKVFANDCQGYLLLIEWLGKQGIPREALLVCFENTGIYSRSLADFLWHNGFNYVMENALQIKRSMGIVRGKTDKVDARLIAKYAYLRKEELELSQPKGQLIKAVSDLLTLRDRMVKQRAGYKAFLKELLLGQDHSDLLVGIHQRLIETLSEEIQSIHTQILALIKSDAMIENQYQLISSIKGVGFVAACYFIVSTDAFKRFKNHRRFASYCGVAPFKHQSGSSIKGKTRISHLANKKMKNILNMTAMAAINHNKELKRYYQNRVEQGKNKMSTINIIRNKIIARVFAVINRNSPYVEINKFAA

SEQ ID NO: 238301 - protein, 576 aa, unidentified
MTPNSAPIVIAIGVGFDTSRYGHHVTFLLPDLQPACPAFEVLESRLGYQRVHQQLQTLQQRHGAVHFHIRLDAAGQYAANLEAFLRALPFPKTVTIGDPARNNNYRKAIFPKRKADPAESYCAARFALVEQPAPTATTPPVLQTLREIVHCLASQTRHSTRLTNQLHNLLARVFPELATLIADLQAAWVLQLLDKYPTPAQLARCRLASLTAIPHLTADKARPIHQAAAVSVASLTGDSAAALVRQLVAQLRQSAATCAQLKDLMTATYQQLPTNHLDSIPGIGAGTAAVLTATIADIERFATPEHLVGYFGIFPEEFSSGIDKYGRSKTGRQSHMSRKGNDLARQYLWNAASVAIIHNPAVKALYARLRARGTRGDVAIGHGMRKLVHLAFAVWKTRRPFDPNHYPWQTLTDSSATENEKAAGHKPDASQAGKVVTAATPSVTPDAAAVKNTSAHPDDPPDGATTGGIDFAALRVQISMEQVLAHLGCFNKLKGSGPQRRGPCPLHAASDSRQRSFSVHLGKKVFQCFHAPCSAHGNILDLWAAVHRLPLYEAAKHLAQTFGLSLSPPGTEKRNT

SEQ ID NO: 238302 - protein, 335 aa, unidentified
MNKVTLIGIDTAKNVFHLVGIDKRGHYVYRKQLSRKRLLPALAQLEPCEVALEACAVSHHWARCITGSGHRARLIAAQHVKPYRRGQKNDYRDAEAIISAALSPGIHFVGVKSVEQQAEQALHRVRSRILSHRNAAANGLRGLLAEYGHAFGRGIKSLRAGAVGFIDSGQAQSLGLTELVRDVLEELDQLQRRLDAYSQQIERRVGNDAISRRLREELSGVGPLSASALRVKVADVRDFANGRNFAAYLGMPPAHRGTGGKVKIGKMRRGHDPYLRQLLIHGARSVIRHLGDKQDEQSRWLRALLERRGFNITAVALAHRNARQAWAILARELAA

SEQ ID NO: 238303 - protein, 487 aa, unidentified
MHPRTTNKFLETFDVYRFSFESAGALALDNEYSGFAVLPAHYIAFAERKRARPWTSIYHCGRYDVKPLATQQFTAYVGIDWADTKHDVCLQVPGNELREFDCIRHQLADIDQWAQSLHQRFGGPIAVALELAKGPIVYALQKYDFFVLFPINPLTLAKYREAFMPSRAKDDPTDAELALDLLMRHPERFTPLRPQSVQMRTLLSLTEHRRELVGDKTRFTNRLTNTLKQYYPHALDWFEQHDTLLFCDFLTRWPTFPQVKRARRASLEAFFYAHNGRRPNVISARLGAIKAAIPLTEDMGVIAPCRLQVLVLIEQLRTTLQAIDRFDREIAQLAPRLPDYCLFQDLPGAGPHLAPRLLAAFGEDRQRYQHADELQKYAGIAPVTERSGKKSWVHWRLRCPTFLRQTFVEWAGQTINKSFWAGAYYRQQRAKGSSYQATVRSLAFKWIRILYRCWQTRTPYDESRYLNALRKRGSPLLKHLESNAQNA

SEQ ID NO: 238304 - protein, 430 aa, unidentified
MKSNTQNAKIEAITEKTLVLGIDVGSEMHYARAFDYRGIEYSKKPFKFSNTEAGFVTFKEWILDLKERHEKDKVVPGMEPTGHYWFNLGKFLQDNEMKPVLVNPHHVKKSKELDDNNPTKNDRKDPKVIAGLVREGRYMIPYLPDGVYADLRTASNIRFQLQAELTRIQNRISRWFNIYFPEYKTVYGKPDAKSGMLILKAAPLPEDILTLGIDGVNQIWRDAKLRAVGKARAKTLIEAAEHSVGSKEGAVSARMEIRMLLEDYESRNTRLQEVMVLIEELVRKIPMAEKLLEIKGVGIRTVSGFLAEVGDISRFNNPKELQKLAGLALVENSLGKHKGETTISRRGRKRLIYLLFEVAMSLVSKNQEFRELHNYYTTRRLNPLKKMQSLMAIAAKLIRVFYAMLTKGVDYDPKKMVSDIKRPAVYLQAA

SEQ ID NO: 238305 - protein, 347 aa, unidentified
MSVSTIGIDLAKNVFQVHGADERGNVVMRKQLKRSQVLEFFVNLPKCLIGMEACTGSHFWARKLMELGHTVKLMAPQFVKPYVKTNKNDAADAEAICEAVGRPTMRFVPVKNPEQQALLGLHRARQGFVAARTAQANQIRGLLAEFGIAIPKGIHCIPQRVPDILENAENELPGTSRELFARLLDHYRELDRQVDELQSQIKAWHQENPLSLRLEAIPGIGPLTASALVATVGDAKQFKNARQLSAWIGLVPRQNSSGGKERLLGISKRGDTYLRTLLIHGARAVLQRYRRQGDQSTGWLGRLVERRNCNVAAVALANKNARVIWALLAHGREYQANYCRPAAVAAA

SEQ ID NO: 238306 - protein, 397 aa, unidentified
MYIVGIDIAKRKHEAAVIDGEGTVIIKPFSFTNNCSGYNRLLAMLAKAKLPLDEVSFAMEATGHYWLALFTRLQKEGFRVQVINPVQTNSIRSFYIRQAKTDPRDALLIAEVIRFGHFSESTLHPENIYELRELCRGRHAIVSMQADVKRKVVALLDQVFPEYETAFTNMFSDTSMAILQTCPTPKELSEMPLEELCHLIEVSSHKRFRMAKAQELQALARNSFGFAMAGDVFSTMIRLYAKHLVFLKQQVQEMDRKIAEIMDTLDTPITTITGIGPTLGAYILSEIGDISRFSSAAKLAAYAGIDPTMRQSGEYNGVRNRMSKRGSPYLRHAIWLAASSAVLHDPALKLYFQKKRDEGKPYMASVGHACRKMVSIIYAVMRDNKAYTPYIPNEISA

SEQ ID NO: 238307 - protein, 430 aa, unidentified
MKSNTQNAKIEAITEKTLVLGIDVGSEMHYARAFDYRGIEYSKKPFKFSNTEAGFATFKEWILDLKERHEKDKVVPGMEPTGHYWFNLGKFLQDNEMKPVLVNPHHVKKSKELDDNNPTKNDRKDPKVIAGLIREGRYMIPYLPDGVYADLRTASNIRFQLQAELTRIQNRISRWFNIYFPEYKTVYGKPDAKSGMLILKAAPLPEDILTLGIDGVNQIWRDAKLRAVGKARAKTLIKAAEHSIGSKEGTMSARMEIRMLLEDYESQNMRLQEVMVLIEELVKEIPMAEKLLEIKGVGIRTVSGFLAEVGDISRFNNPKELQKLAGLALVENSSGKHKGKTTISRRGRKRLRYLLFEVAMSLVAKNPEFRELHNYYTTRRLNPLKKMQSLMAIAAKLIRVFYAMLTKGVDYDPKKMISDIKRPTVYLQAA

SEQ ID NO: 238308 - protein, 443 aa, unidentified
MSKLKNNLTVIKQNTAGIDIGSKEIFIGIDGMPVQSFDTFTTAYQSAIKYLKENNIKYVAMESTGVYWTVLYDMLEDAGFDVCLIKSNAAKNVPGRKTNVLDCQWIQQLHSYGLLKNSFIPPAVIRTLRSYVTLRRKNIQLASDHIRRAQKALDLMNIKLHFVISEIHGVSGMKILKAILKGQHDPQRLVLLCDKQILKNKKQSVIESLNGNYRDEHIFALKQAVEGYEYYQKKIIECDKEIEKLLKTMTKNLPVPDPARLHKPKAIRRNKPHIENLHTMLMQLTGGVDPSRITGFTDSVLLELISRVGLDMSKWFTEKHFSAWAGLAPNQNDTGDKKKNKKLKNKSAAGQIFRVAAQSLTNSKYSAFGFFYRRLRAKKGKTFAMKATARKLAVTYYNIMTKGTDFVEEGIISYQKKLKEQKIKSIYKQAQYLGLSVSPIGAS

SEQ ID NO: 238309 - protein, 356 aa, unidentified
MARTRTIIAGIDTHADTHHAAVLDQRGRLLDTAQFPATATGYRQLLTWIRGLGQPSRVGIEGTSSYGTGLTHYLNAEGITVLEVNRTSPGTRRQRGKSDPVDAEAAARAVLSGEATATPKDHTGVVEAIRVIRVARAGAVKARTAALNQLKDLITTAPEELRAQLRGHRLAQAAKTCTRLRPDTTRPHDPVQATKTALQAIGARVGALTDEITTADKRLKALLIQAAPRTMDMLGVSTEHAGQLLVTAGQNPARLHSEASFAALCGASPIPASSGKTNRHRLNHGGDRAANRTLHMIAVVRMRWCPTTRTYVQRRTAQGMSKKDIIRCLKRYIARAAYTAIQHDLANLANQTPTRA

SEQ ID NO: 238310 - protein, 326 aa, unidentified
MQSYLGVDVSKAKLDVCLLLPTQKLRSKVFANDPQGFELLVQWLQTHAPGGPASVHVCMEATGSYHEALAIFLDERGVLLSVVNPLLVKRFAELSRQRNKTDRADARGLAEFCRNQRPERWEAPSPGLRALQALVARLETLQAMRQAECNRLEVAHDSVADSIRSVLADLDAAIDQIKTQIARTVDDDPDLRRRAQLLQTIPGLGDRTIAQLLAYIGRPERFSSVKALAAYASLTPFIRQSGTSLQQRRGTHPSGHRQLKRSLYFPAMVAGRYNPLVAALWQRLKAQNKPGKVIVVACMHKLLAIAFGVLRSGKPFDANHLRPHQA

SEQ ID NO: 238311 - protein, 418 aa, unidentified
MDVHRDFCGVAIAEAGAVRSGGRIETSPEALELFAASLARTDVVALEVTGNAGEIARILRPHVGAVVVVSPHDTGISRARAKTDRLDARVLAKLLAAGELDAVWMPDEWTRAMRRRLARRDRLVRARTRAKNEIHAVLIRRLAGRPPVSDVFGVRGRRWLSELALPEDERETVAGCLRHVDFLDGEVAALDGAIASEALRRPEVLRLMTVPGVSVVTASTFVAAIGDIRRFSSARKLVGYLGLDPRVRQSGPGPARHGRITKQGSASVRHVLVEAVWTAVRSPGPMRAFYERVRARRGAQVAAVATARKLASLSWCLLTREQDYSFAQPSMTRRKIRKLELVAGAPSRKGQVPSGQGVRNKQIRAAERALAQQAEDAYRRTIADWKAVGPAKAGASVTPGRASQRPSKGKAARQTTSP

SEQ ID NO: 238312 - protein, 455 aa, unidentified
MYFEKRDLPQYNSIVLVRARKAQIPIGECLYMKRTQNEKILQIKNETLIVGVDIAQKIHHARAFDNRGVELGKLLKFENSAQGFAAFDAWLAKIQQKHGMTEAVVGFEPTGHYWFNLGDHLAECGHKLAILNPYHVKCARELDDNSPSKSDQKDPKTIAMLVKDGRYRDVYIPDGDYQELREMVRERERLQERLGSLSSQIIRWLDIYFPEFVTVFKDWRGKAAWIALRRFSTPKRMAEVGAQEILLAWREEMKRPSLKKAEALCSTAEQSIGRTQGSGAAVRSLQNIMTEYELLTMQMEQLEEEMQECLFRIPHAAELLAIKGVGMVAVAVFVSEIGDIRTFKDPRQLIKYAGLNLRTNSSGEFKGKTKISKRGRRRLRHALYKAMIPILATNEEFRSLHQRNLTRTQNPLTKMQSIIALCGKLLRVIFALLTKGVEYEPSKIKVVTTDVAQAA

SEQ ID NO: 238313 - protein, 408 aa, unidentified
MEVLYARCAGLDVHAASLTACVRVATGAAVTYQHRTVSTTTRGLLDLGEWLAACGCTHVAMEATGVYWKPVWHLLEGRFTLILANAMHIRNIPGRKSDMNDATWIADLLAHGLIRSSFVPPTPIADLRDLTRTRKQLVREITRHTQRIQKTLEHANVKLTEIISDILGTSGRAVLRGLIAGETDPHRLADLTSGRLKASRTQLVDALEGRVTGHHRFMLQLHLTQIEALETAVHDLEMRISDALAPFRAAVSLVTTMPAVKATTAAVILAEIGTDMAQFPSAGHLLSWAGLCPRLDESAGKRRSTRTREGARWLKTTLVQAAWAAVRKHDSYFHAQFVRLKRRRGPKKAILAVAASMLTAVYYMLRDGVEFHDLGSQYFAHHDKEQLTQQLLRRLRDLGVEVEVKKAA

SEQ ID NO: 238314 - protein, 375 aa, unidentified
MQEKLRFLGLDVHAETIAAAIAEPDGEVRSLGTIPNRVESIRKLIKKLGPAEKVRACYEAGPTGYVVYWQLAELGVQCEVVAPTLVPIKAGDRVKTDRRDAEKLARCYRSGDLTAVWVPDDGSEALRDLVRAREAAKQDQMRARHRLSKFLLRSGQRPPSGVRPWTRPYLIWVAQLRFPQIAQDATRQDYLHEVEHMRERVARLEQAITEAVKLASPALQQVINDLQALRGIADISAVTIAAELGQVSRFESARQLMGYCGAVPSEDSSGKRIRRGGITKTGNAHLRRIVVEAAWSYRRPPGIWYGLRRRQESISEEVKEIAWKAQHRLHKRYMKLGAAGKDQRKIVTAVARELLGFIWAIGTRAETVASQQLAA

SEQ ID NO: 238315 - protein, 342 aa, unidentified
MSEIITVGLDLAKNVFQVHGADAAGRAALRKKLRRDQALAFFGQLPACVVGMEACGGAHFRGREIGKLGHGVRLIPPAYVKPFVKRKKNDAADAEAICEAATRPTMRFVPVKSEETQGAAMVFRIRELLIRQRTQAINALRGHLGEFGKIVPQGAANVSKLIAIVEGPESGLPADAIPTLKVLVASLAHLEAEIGKLDAEIARCAKENEVARRLMTVPGIGPLIASAIAVLAPPLETFRKARDFAAWLGLTPRQHSTGGKQRLGATTRMGERSLRRLLIIGANSVIIKRHVHAAARPGAWLGGMLTRKPPMLVRVALANKMARIVWALMARGGVYKAPATAA

SEQ ID NO: 238316 - protein, 413 aa, unidentified
MDVLHPRCCGLDVHKSSISACILVQEAGRVQKHQCRFGAMTQDLQELANWLRQFEVTQVAMESSGVYWKPVWNILEGEFTVVLANAQHIKNVPGRKTDQKDAEWIAQLLQHGLLRPSYVPCEVIRDLRDLTRMRASLSQEASRISSRVQKVLEDANVKLASVATNTLGKSGRAMLEEIIAGQNDPEYLASLALGHLRAKTAQLKLALEGKIRPHHRFLLQRLLDQLRFVEHEIELLDERLEDIGREQPELSQAVTRWDTIPGIDRVAGWTLLAEVGHNMAQFPTAEQLASWTSLCPGNHESAGKRLGGKTRKGSPWLRRMACQCAWAAARTKNTYLSAQFRRLAARRGIKRAIIGVAHSLVIIGYYLQKSQRNYEDLGGDYFDRIDSDGLKRYFIRRLEKLGHKVTLVPLNAA

SEQ ID NO: 238317 - protein, 356 aa, unidentified
MSYDVKYIGMDVHKEAIVIAVLNESGKLVMESVIETRASSILQFLHGLRGELHVTWEEGTWAAWLYDLLQPHVQHIVVCNPRRNALLKEGSKSDKLDARILADLLRTGMLRPVYHGENGLRTLRELGRSYQNISKDLTRVMNRLKALYRGWGIPCAGTQVYAARAREEWLNKLPQAGVRRRAELLYQQLDGLQDLRREVRPEFLAESRKHKAAKLLRQIPCIGPIRAARLIGLMQTPHRFRSKRQLWNYSGLGIETHDSAQYRFVSGQVQRSKKPQQVRGLNRNHNHEMKEIFKSAATRASCGRGPFHDFYTGLLAKGMKPEMARLTLARKIAAITLTLWKKEERFDVEQLKTQAA

SEQ ID NO: 238318 - protein, 405 aa, unidentified
MGDIVEVAWVGIDAGKVSHHATLVDADGTIVWSRQVRNDQAAVEQLIAKAAATATTVRWAVDLTSAGAALLLALLIAAGQRVVYVPGTVVNRMSDTFAGEAKTDARDSYVIAETARLRRDLTELITPNELVAELALLAAHRADLMADWVRGVNRLRELLTRVFPALERSFDYTTRSALILVSRYSTPDAIRDADADQLAAYLRSKEAHRPSIPGMVAKAHAAAAAQTVRLPGEAATAALITRQARKLLDLDREIKDFDKQITERFRAHPQARIIESMPGMGPILGAEFIAITAGDLAAFGTAARLATYAGLAPVPDDSGKRKGVRHRPRRYHRRLRHVFYMAAFSSLKTDGPSREFYARKRSERQRHTRAMIALARRLVDVLWALLRDNRTWQPQPPTPLPATAA

SEQ ID NO: 238319 - protein, 375 aa, unidentified
MKNKVRFLGLDVHAETISVAVAEPDGSVRSLGTIANRADSIRKLVKNLGPVEQLKACYEAGPTGYVLYWQLAELGVQCAVIAPTLMPVKAGDRVKTDRRDAERLARSFRSADLTAVWVPDAASEALRDLVRARESAKQDQLRARHRLSKFLLRSGQRPAAGLKAWTQLYMAWVRQLRFEQVAQESTRLDYLHEVEHMAERIVRLEKVIAEAVKLASPAIQEVVKDLQALRGIAQISAVTIAAGLGNITRFESARQLMGYSGAVPREDFSGKRTQRGSITKTGNAHLRRIVVESAWSYRLRPGVGPALRKRQEGVPEELKEIAWKAQHRLHKRYSRLAAAGKDQRKIITAVGRELLGFIWAIGVKAEATAKQPMAA

SEQ ID NO: 238320 - protein, 450 aa, unidentified
MKVVYPRCAGLDVHKKGVHVCVRIRPTGSNKIRTEFAQFATFYEDVERLHEFLRKHKVRRVVIESTGVYWMPIWNVLERMTWKYDLVLVNPQHVRALPGRKTDQQDCERLAELGQYDMLRGSFIPPVEIRALRDLTRRRAALQQDWNRLVNRVGRLLETANIKLGSVMSSLTSKTGMAMLEAIARGVWDRERLADLAQGSLKDKKLELIRALPERCNDHFRWLLRELLDELDTLENRRLKVEARIRHDMEPYAVQIRNLCTIPSVSEITAWTLIAELGVNMSQFPDPAHCASWAGLCPGNSESAGKRQSGRTRKGNRYLRRALVQNAWAVAHIKDENPLTDLFYRIAGRHGMKKAAVAVAHRVLVIAYCVLRDGSCWKGPAVGRRKHVQKARRLMRRLARMGFPVQPARRADAASPDECKKCAAWGIPCMHAWNPIFQRRKVRKVENQTT

SEQ ID NO: 238321 - protein, 346 aa, unidentified
MYDRKDIILAVDYHAENTEVCWLNCHTGEERCLNIPTTRGGILRLVEKAVAEAGSAGGKVIWIMESTTGWARVKELIGSRAHFVMANVVQMPLPPKAYRRKTDKIDTGRMLREFLNGSLPQSYQPTARWREVRRLVDSRQNLVKRQTAVKNWITHFLHHETWADRSGLWTQKGLARLRGLRLSISDRMVLDLKLQELEQLEGLREKVEVAMQNVYDQWPEAQWVDEVRGIGMVTAVSILARIGPIERFATAEDLISYAGLAPGHRRSDQTAHNGRIGGGGTDSHLRYLVIESMQWVCQIHRYRDAFDRAAAKHGKNIARIIVARMLLRSLFKMLKDQVRFNQVRAA

SEQ ID NO: 238322 - protein, 355 aa, unidentified
MLETVGQRDRKMFISNPNRRRSCARASSNLLGWDFMNFNVKYTKIFVGVDVSKATLDIYRPDTNEAWQIENSEEAIAGFCTQLEKKKRQIMVVMEGTGGYEYPLVKHLASHKLDVAVINPRRVRDFAKGIGMDAKTDPIDAKVISKYAEVVVPKPMATKSDHELKHGALVARRKQLLELVNQENNRLQQSWDDDAKQSILEVLEVLNKQLKSIDSQLAKMLKSDVANQRVIEILESVKGVGPVMVSTLLAELPELGKLNRGEIAKLVGVAPINRDSGKRSGKRFIGGGRGQVRRVLYMSTVVAIRHNPAIKAFYAHLRSQGKESKVAIVACMRKFVTIINLLIKTDQLWQNKASV

SEQ ID NO: 238323 - protein, 359 aa, unidentified
MHERTSVGLDVHARSVVACAIDGDTGELHRARLSPDHGEIHRWLAGLEGPVAVTYEAGPTGFGLARYLAGVGIGCVVAAPSKLTRPAGDRVKTDARDALHLARLLRLGEISAVTVPSVDQEAARDLVRAREDARGDLMRDRHRVSKLLLRRGIVYSGGTPWTRVHEQWLRAQRFDSPAVQLAFDSSLEAMLLTTGRRDRLDVMIETMAADSEFTDVVNRLCCLRGVSTLTGFGLAVEIGDWSRFTGSTIGSYLGLVPTEHSSGMSRSQGSITKTGNTHARRLLVEAAWHHQRDYRTPGRTIRARWDRAPAAARVRGHEGNRRLHDRWQLFTARKKRPVIANVAIARELAGWCWSLALLE

SEQ ID NO: 238324 - protein, 422 aa, unidentified
MLEQTQDDHEVIARVAGLDIGKAELVCCVRVPGPGGSRRRAQEVTTYSTMTRSLQVMADRLRELGVTRVVMEATSDYWKPPFYLLEAAGFEVWLVNAKDVKHLPGRPKTDRLDAVWLCKVAERQMIRPSFVPPEPIRGLRDLTRYRSALVSDATGEKNRAEKLLEDAQIKLSVVASDIFGVSGRDMMNALIRGERDPDVLAQMARARMRAKIPQLREAFVGRFNDRHAFLLRKMLARIDTLTTDINDLDARIEAEIAPFADAAARLDAIPGVGPVAARVIIAEIGVDMTRFPTASHLAAWARFAPSVKESAGRKKGTGATGHGDRYLAAVLGEAAVSASKTNTFLGERYRRIARRRGKKKAIVAVGRSILIIVWHLLNDPDAQFHDLGPTFYDTRLGTQRAIRNHVQHLQALGYQVDLRPVA

SEQ ID NO: 238325 - protein, 408 aa, unidentified
MKLYVGLDISSFDIKVCILDGEGNQVRSFTVTNDLPGATKLRDQIVDCAENQAIQVIKIGLESTSVYSFHPSMFLNADESLRKLGAKVFVMNPKQIVNFKKSYSDMDKTDEIDAFVIADYLRFGRNSVSVVKEKQYIALQQLTRSRFHLIQQITKEKQRFLQHLSYKCNTFTEEVESSVFGHAMMELFSEKYSLDELAQMPLEDLAAFLQEKGKNRFNDAECVAKSIQKAVRSSYRLDKVVEDSIDLLLGTSIEVIRTLQKQVKEIEKGIERIMVGLEESKTLQSIPGIGPVFTAGIIAEIGQIERFKDETKIAKYAGLYWRKHQSGRFTADDTSLSRNGNQYLRYYLVEAANSVRRHIPEYQEYYAKKYKEVPKHQHKRALVLTARKFVRLVDALLRNHQIYTSKGA

SEQ ID NO: 238326 - protein, 428 aa, unidentified
MTPESVPSSTWTFVAIDVAKQKNDVLMEYPDGTRQRWRMTNTHHHYRLLRDRLQALVAPPLIGFEATGNYHRPLAYFLGQAGFELRLISSLAMARTRDALYNSWDKNDPKDAQVLLHLLKGGVTQHYHDPLRHAVNDLRELAQTHFQVSLRKTRVQHSILTHYLPLYFPEAERYYTQSRSQWFSRLLHRFPCPAAITRYSKAAFAQEAWTIVGRKVNKRGFLDDLYTTAQDSIGLPVAEDSEAIQTFRLTLQHHQELCAARAALEERADQKLTGDPDYHRLRTLPGVGPILALTILAEAGNLRRFPHHRQFLKFCGLDLSTQQSGQFRGHSQLSKHGHARLRCALWLAAQGAIRMRENTFRQKYDRYMKGDPLNADRKRKAISAVAAKMARVAHGLMKTGTDYRPYFEAAVPSGALRSPLPSRHVVTS

SEQ ID NO: 238327 - protein, 509 aa, unidentified
MNLGEWRWFASRRSVTAQHYDAPARAARWEDWFRLATCALIGELYASRWKDLFVSDPNRAPGADPKPGQPMTTASLPVLDPTAAAIDVGSEQLHVSIAGGPPKVFGTTTGQLYEMRDWLQSQGVSSVAMEATGVYWLCPYAVLEQAGLEVVVVNGKYVKNLPGRKTDMKDCQWQATLHAHGLLKPGFVPPAHIRRLQDYLRVRTDHITMAGSHEQHMQKALDRMNLKIHEVISDLTGMSGLKMVEAILAGERNPVALLVLCDPQVQRNKAGRLRAALEGDWKEEHLFALRQAYELWQFYQQKIAECDQAIGKVLQEIAGPDDPAHPAPPATKRGGVNTPQIAGLHGLLWRLCGRKDLTALPGVADHVLLQLLAEVGTDLEKHWKSEKHFTAYLGLAPGSRQSGKRKGSQRRSRNRAGRLFCVIARSVGRSVDKGLGGFYRRLKGRRGGLVANLALARKLAELFWRLMVHGIAYVEQGLKKYEEKVARTEQLLLEKLARKYNLTLHPKAA

SEQ ID NO: 238328 - protein, 326 aa, unidentified
MRQPVSHTLKIKTQVALDISSKALDVHIKSDGKAFSVPNTEEGLNRILKSFTAYDVSLVLMESTGGYEDLAACFFQAQGFDVAVVNARHARNFARAMGKLAKTDRIDAAVLAEMAFMIDSSHERDRYIKPLTDEQRKRLSVMTVRRRQVVGLITTEKQRLTHADDWVRASIKKTVKSLTTELRHIEQQISDHVKKNFVDLSKMLLSIPGIGEQAMSVLIGEVPELGKADRRTISALLGIAPFNRDSGNFRGCRRIWGGRQSVRNVLYMGIISATRFNPVIRAFYTRLVSAGKPKKVALIACMRKLLTIINAMMRTGKPFDVALHGV

SEQ ID NO: 238329 - protein, 424 aa, unidentified
MKVTFQTCCGVDVHKSFLVATIIKTSSGIEPSYQKRRFSTFNNSILEFKKWLLENECLYVCMESTGKYWIPVFNLLEDEINVTIANPKWVKSVKGNKDDTKDSKWIGDLFRLGLVRGSYIPCKKIRILREFTRYRYKLVSCRSSEKNRYQNALTVCNVALDSVVSDIFWKSSTSIIDYLLEQSGTSIDHEVIASKLLKHLKAKEDAVIESIEGYQMTDSQKYRMHLVRAHMDYITAATNDVDSEIESLIAFDPDYENAVELLCTIPGVKYDSAITIISEIGIDMSQFCSSKRLCCWAGLTPGSNESAGKKKSVRITRAGVYLKPALVQCAHAAVKSDKSPYYKKKYESLVKRRGKKRAIIAIARMILTAIFQMLTTGETWNPCDLYKIDMPEALLEKQKQKAIKQAQKLLIREGLLPPTEPIAS

SEQ ID NO: 238330 - protein, 387 aa, unidentified
MTKIYLNVACAGMDVHYKFSNVTFRDRSGKVVRRQRLVHRHRQELQERLNRWPKGIPVVMEASFGWGWLSDLLEEAGQEVQLSNCYKVEQMRKARGWVKTNKKDADLISLLPFEQSDWWKVWRAPPEVRNRREQMRFRGDLVGLQTMVKNRIHAIFHRHGIFHEFSDLFGGEGRKFLAELCLHNPTDLSYQALLALRGQVKLLDHLRRQLADVARILHKQLVKTPLIMRLKTIDGIGMILAHVMAAEIGRIERFRNQKALASYSLLAPRSNDTGQDDPRHSPLGRHLGVRGNRTLKWAFIEAAHGAVRSGGKWRAIFDRVTNGGKKDRNRGYIKVARELVKVVYVVWAKGVDYQTVPPARPGSNKNKKKSCSETGQLCHPMVHASMA

SEQ ID NO: 238331 - protein, 361 aa, unidentified
MRSVQSNKLDFKGQNIYIGIDVHLASWSVAVLSENAVLKKFSQNPEPEALHTFLVANYPGASYRSVYEAGFCGFWIHQRLIKLGIANIVVNPADVPTMSKEKLRKTDAVDCSKLARGLRSGDLRGIHIPSVATLEIRSLIRLRNSIVKDSTREKNRIKSLLRFHGIDIPEQFTNRSSGYWSKEFLQWLCKVELSTEYGRKALDLHIEQFVRLREMLLQETRAIRELSRSEAFKESIRLITSVPGIGITTGISFLTEIDDINRFKNAYQLASYVGLIPMCHSSGEKEGIGDITIRKHAILRCNIVEAAWIAIKKDPAMTMSYEEYRKRMPANKAIVKIARKLVNRIFFVLKRRQEYVPCVVK

SEQ ID NO: 238332 - protein, 339 aa, unidentified
MNPVPVGVDIGKNVFQIHYIAPGSGEIINKPLKRANFLEYFANLQPCLIGMEACGGSQHWARALAKLGHQVRLMAPRFAKAFNIGNKNDAADARAIWLAVQQPGNKVAVKTEAQQAVLALHRLRQQLVKFRTAQINCIRGLLGEYGEVMPASRRAFDANIATVLDRVGDHIAAPLIDTLREQWAALAPLDEQIARIEQRLKQWMSADSSAQAISSIPGVGLLTATAAVATIGDARAFKSGREFAAAIGLVPRQVGSGGRTTLLGISKRGDAYLRTLLVQCARVVCFQLRSKNPWIEQLLKRRPYNVAVVAMANKLARVIWAVLAHGKPYEQGFVSAKPA

SEQ ID NO: 238333 - protein, 447 aa, unidentified
MDTESATQYAAYIGIDWADKDHAYALRATEGKKVEQGKVEAKPEAIEEFVAQLRQRFGGKAIAVALEQSRGSLLFTLSKYDHLVLYPVHSSTLDSYRKACHPSGAKSDPDDAALILDLLQKHPEWLQPFAPDTVPTRTLQFLTEERRDAVNDKTRYLNQLTAALKTYFPQMLEWLDVDSKLMCEMLQRWPTLEQLQQQKPSVVEEFLREHRYPVVRVKPLQEAMEKAIPATTDQAVIEAKKFTVQRTIAQLEALRENIAELDRRIEQITRLHEDYRVFASLPCAGKVMVPRLIAAMGTQRDRFQTASELQCQTGIAPVKEASGQREWIHWRWACPKFLRQTFVEWAWLSTRKSQWAREFYDRQRAKDKSHHAAVRALAFKWQRIIFRCWKDRCPYDEARYLATREQRARTAKASTDGSPQLKSSQAGGVEITWKNVSGFSRPDSISC

SEQ ID NO: 238334 - protein, 415 aa, unidentified
MTDQKQWYVGVDWASEKHLVFLANAEGHKIAEREFKHSGEGLAEMAAWLMAASGADEASQIQVAIEVPHGPVVEALMERGFKLHAINPKQMDRFRDRFSMAGAKDDSRDAAVMASALRTDAHCFRQLTPIDPVVIELREWSRIAEELTEERTRLANRLRDQLWRYFPALLELESELWAEWLLDLLQIAPTPDRAARLRESAIAKLLKRYRIRRFDAAQVLKVLRQTPLRLAPGTAAAASAHVATLIALIRPVNQQLKQAQRQIDVLIVRLTLAEETEPGQIKQRDVEILASSPGAGRVVLATLLAEGSDPLQRRDYPALRCLTGVAPVTRRSGKSHVVLRRYACNQRLANAMYHWARAAVQHDPTSRAKYAALRSRGHNHARALRSVADRLLNVACAMLKAGTTFNSSLGTQKTA

SEQ ID NO: 238335 - protein, 341 aa, unidentified
MGEVSTIGLDLAKNVFQAHGADASGAVLFRKKLRRHQVLTFFAAQPPCTVAMEACGSSHHWAREIGRLGHQVRLIPPAYVKPFVKRQKNDAADAEAICEAAQRPTMRFVAPKSEQAQAAALVFRARDLLVRQRTQIINALRGHLAEFGLIVAKGPAHVPHLVQAVEDEAEPIPELARPILRMLVATLHRLDEQIAGLDREVARRAKEDETARRLTTIPGVGPVTAVALAALAPPAETFKRGRDFAAWIGLTPLQHSTGGKQKLGATSKMGERTLRRLLIIGASAVVRWAARNGAPAGSWMARMVARKPPMLVRVALANKMARIIWALMARGGVYQAPVAVV

SEQ ID NO: 238336 - protein, 426 aa, unidentified
MNTPDSATPDRFAAILGLDWSDGKHDICLQVAGSTQREALVLEHRPEAIDEWARDLRKRFGGQPIAIALELAKGPIVYALRKYEFIVLFPVNPATLAKYREVFTHSGAKDDPTDAELALELLLKYPEKLKPLNPQSPQMRTLQQLVEMRRRLVDDQTRITNRITSALKNYFPQPLQWFPDKDSALFCDFLQRWPTAKAAHQARRATLRRFFHEHNVRQAKLLDQRINAIKSALPLTEDEGVVEPGSLLVQCLVEQLRATLQAIERFDQKIAACAPAHPDFPIFDSFPAAGPVFAPRLLAAFGEDRDRLLSPDDLQRYAGVAPVTERSGHSTWVHWRWQCPTFLRQTFVEWTALTIPRSFWAAAYYQQQRSKGKTHQAALRALAYKWIRILHHCWTTRQLYDEAVYLNALKRRGSPLLQEIAATTSP

SEQ ID NO: 238337 - protein, 367 aa, unidentified
MWEAPVRGQRTSVGLDVHARSVVACGLDGETGELFERRLTPEHGGVLSWVRSLPGPVSVTYEAGPTGFGLARFLVVAGVDCQVAAPSKLQRPSGDRVKTDARDARHLARLLHLGEIVAVAVPDAETEAARDLVRAREDVRGDLMSARHRVSKLLLRQGIVYSGGVAWTGVHDVWLRKQKFESAALQLTYDTAYDTMIAAVDRRDRLDKVIAAMAADSPFTPVVTRLGCLRGVSTLTAFGLAVEIGDWRRLTGRSIGAYLGLVPTEYSSGGSRSQGGITKTGNGHARRLLIESAWHHRQPYHRPSVDLRRRWDLADAASRARGQQANRRLHARWAGFDARKKRPVVANTAVARELAGWCWSLAVGENS

SEQ ID NO: 238338 - protein, 398 aa, unidentified
MESLIVGVDVSKESFSAAGLDGKGTGCFSDGFAMDLEGCEKLLKTMLDQQPDKSAIVVGMESTGCYHINLFSYLVSQGIQAVVINPLLIANFAKLALRKTKTDKKDALTIARFVLAHKDKISQMSISQDMQDMRDLARERESLSKLISKTKTEIKGVLQATFPELERICSVYTGTMLAFLQEYPSARLIRLATPQAITKALEPRGKGNRISSFTADDIIKQAKTSIGIVSPAKEAILQGKISTLLHLDGRRDQLTAILTDYCSSMMVEDLEIVTSVEGIGNGTGTMFLAEVGKIENFATHRHLIAYAGIDPTVYQSGKYEGASRISKRGNKHLRRALWLMTVSVIMHNETFKEYYQKKKLAGMPYKKAVMATMHKLIRMLFAMLSHRERYVSSTVNCA

SEQ ID NO: 238339 - protein, 349 aa, unidentified
MDRTTYGLDIAKNVMQLHWVEAESGEIGRKKLARAKLAAYFAQLQPVRIVMEACGSAHHWARVLGGLGHEVELLPAAQVRPFVRSNKDDAADARAIWVAAQQSDIRRVPRKSVEQQAVLALHRTRSHWVSVRTATVNSLRGLLYEFGVVLRGGRHAGLKALAEQRAVIDSQLPATMRMLVDGQLQALVQIGQRIDELEREIAALQKQLKGARELDQVPGIGVLGSTALAATLGDAKAWRSGREFSASIGLVPAHAGTGGKVRVGQLSKRGDPYLRTLLIHGARSVIEHAKDKPKWLEQLLARRPLNVAVVALANKMARTAWAIVAHGRTYQRDWKTTRPGSGAAQAAAA

SEQ ID NO: 238340 - protein, 412 aa, unidentified
MKDLLEISCGLDVHKEKIVACILTGPLGKPTRSEIREFSTLIPDMIALRNWIVSKNCHHVAMESTGIYWMPIYEILEDAFSGDITLLVVNARHMKNVPGKKTDMRDSEWISTLLRAGLLNGSFIPEKRIREFRDLNRYRKSVIRDITSQKNRIEKFLQSSGFRLSSFISDIFGASGRNIILHLVEHGQIDKTALDSCLKTKTRNRIDEILMSVNGTLSEHQKAFLRILMTHYDSLKKHLAEIETSLEEDMAPFTLQVEQLNSIYGISTTASCAIIAEIGIDMKPFKTAEHICSWAGLCPGNNESAGKRKSTSVTKGNPYIKSMLCEIAWVIAGKRNTYLSAWYWRIKQKKGAKKAIVALARKLLVIIYTMLKQGTLFDESCFETRRKHCEQKQLSRYIRELEKHGYHVEAQN

SEQ ID NO: 238341 - protein, 361 aa, unidentified
MENSSSDYCPKTSVIVSVELSKRNWLVASLSPGAAKPSLRTIPAGNSAALISHLRNLECKAADRIGEPAAIRLCFEIGYDGFWLARLLRSNDIDTYVLDPASFLVSRRGRRAKTDRIDAEAMIGILKAYLAGDKSVCRVVDVPSPEEEDARRVMRERGDLVHERTRIISRIRGLLALQGIRSVKAIKGGDWSKQLDDMRTGDGRPLPPNLRRQIERCFERLALLNDQIKDIERDRAEVVLHEESTFPCREKAVRLEQLKGIGPNSAAMLVAEVFCRKFESRRHVAAFLGLAPAPFASGDVSRDQGISKAGNRSTRVQMVELAWCWLKYQPSSELTVWYRNRFKGNGARAAKVGIVALARKL

SEQ ID NO: 238342 - protein, 313 aa, unidentified
MSYTSRFVGIDISKSSLDVCVLPDGQMAAYQNTPAGIADFLTFVVSLEGIERLVLEPTGGYERHVVAALQAARLPVAKVNAKQVRQFARAGGQLSKTDRIDAFILADYARRMETRILLQRSSRERVLADFVSRYRQLSHMIVQEKNRREKASGQTKDWVEESLNFLLDQRQTVVDAMTACLKADADLGRKAEVLMSLKGIGLRTACFILADLPELGHMDKGKIAKLVGVAPLNRDSGLMRGKRMIAGGRRQLRDALYVAALPAIRFDPDMKAFFQRLKQKGKPSKVALVAVMRKMIIILNARIRDANATVLDT

SEQ ID NO: 238343 - protein, 377 aa, unidentified
MNYNTSYSTVYIGIDAHKESFSLCCYTNEKEQPEYPQRVDAHYSKVINYIEAMRFHYGKDALFVCGYEAGCLGYTLYHELEAHNVKCIILAPSTMPVPKGKKRIKTDKRDAALIARCLAHNDYSAVHVPTEKDEQTKEYIRMRDDHKLELKKVKQQILAFCLRHGCIYDGTKSHWTQTHINWLRNLNLDSMLQEIMDEYLLTYDYLTGRLGLIEKRIEELANDKDYAENVHKAECFIGVKSQTALAVIAETGDFNRFPDAQHYASFLGLVPGEDSSGDDKNRLGITKAGNRHIRTLLIEAAQSYGRGKVGYKSAALKARQAGNSSAVIAYADKANERMRRKYYHMVLKQGKKTNVAKTAIARELACFLWGMMTGHIV

SEQ ID NO: 238344 - protein, 417 aa, unidentified
MINAVLERCAGIDIGKKFLTACVMVGPADGEPRAEIRAFGTTVSELERLRVWLQSEGCTHAAMESTGAYWKPVFNVLEETVIVILANAQQVKARKGHKTDFKDCAWLAHLLRHAMIRPSFIPPRQIRELRELTRRRKQLLSAGTAERNRLQKILEEANVKIGSVLSDVFGVTGQAILEALLEGNASAEEMANLARGLAKRKIPQLVEALKGHRLSDAHRFLIEHCLQHMAFLEQAIEQLESRILQQINRANLTGPFELLQSVPAIKQAAAAAILAELGSSIEPFPTPGQLASWAGLCPGNNKSANKRLGTNCTKGNKWLRTALAECAWAASMQNGSSFQARFQRLAPRIGRRAAIVAVAHAMLLAIYHVLETGLPYSKDTARAHPNQKHRLVRHHFRCLHRLGVKVTIESTISGGPA

SEQ ID NO: 238345 - protein, 416 aa, unidentified
MYYVGIDWADENHQVFITDDSAQRLDAFSIKNSRSGVEELFERIRYFVKDQKQVLFALETSKGLLIDSILDAGYTVYPINPKSVDRYRDRYKVSGHKTDDFDAMVLANILRTDRHNYRPILPDSPITRELKILTRECCSLIRLKTLLSNQLTSCLKDYYPVALELFCKLDQQITLVFLKNFPTYQQAKQVSLPQWGKFLSKHHYRVGVKKKAHEIYLKLQEPQFNVEPFLANAKARYTLVLVEQLQLLLAQIKSFEDKIEQLLKQHTDGEIFLSLPGAGIRLAARMVSEFGDNRERYKKVSSVQAEAGTTPITESSGKWKFVHFRSACRKSFRNTMHQFAFCSIKESSWAKQRYQQYVASGKKHTQSIRCLANAWLEIIFPMWKNYMPYSEQRHLLKYVKEQKPVNYSRNLNYLSV

SEQ ID NO: 238346 - protein, 387 aa, unidentified
MFFCGIDVAKHRHAVLVLDDRGQVVQPAFVIENSCTGFEELAKALGALAGEVSIGLEATGHYWLALYDALTRQQYPVTVINPLQVAAYRRSGVRKVKSDRTDAFWVADFLRIAHLPPTRRDLPIILQLRELTRFRFWLIDQIGDCKRKVLSILDRVFPEYETLFSSVFLASSRALLKEASSAQDIADFDMTELTELLRTASRGQFGQGKAEALQNAARQSIGVSFLVDAVHVQMGCLLQQMDLLREQVRQIDELLAEMMRQIPQHITSIPGVGLATGAAILAEIGDVRRFDHLEKLVAYAGIDPSVYQTGQFQASQAHMSKRGSPHLRHALWQAASMAVRYDPDLQAYYQARRKEGKHHGTVIGAVCRKLLARIYVILKEQRPYVVP

SEQ ID NO: 238347 - protein, 347 aa, unidentified
MRFFTDRHQNYCGIDLHARSMYLCIQNLEGKVVLHRNMQAGPEPFLKAIEPFREDVVVGVECIFTWYWLADLCAEHNIPFILGHALYMKAIHGGKAKNDRIDSRKIAALMRGGTFPMAYVYPARMRATRDLLRRRNHLTRKRADLLSHIQNTNSQYNMEPFEANISYKRNRVGVAEQFVDPDVRMSMQADLELIALLDDLKNRLELHILHNAKDHDPQALYRLRTVPGIGPIISLVILYEIGDISRFPRVQDFASYARLVKCAKESAGKRNGTGGSKIGNVHLKWAFSEAAVLFLRGNSEGMKFRKKLEKKHGKAKSLSILAHKLGRAVYYVLKRDQAFDMAKFVRT

SEQ ID NO: 238348 - protein, 415 aa, unidentified
MRVHHNICCGIDVHKKSVTVCLMWGPADREPEHEIRRFGTMTSDLKKLSEWLKQAHCEVAAMESTGSYWKPVWNILEDDVKLILANANHVRALPGEKTDQKDGKRLAGLLPHGLIRPSFVPPREIRQLRDLTRYRSKLLGNGASERNRIQKVLEDANIKLGSVLTDVFGASGHKMLKALVASDVVEIDQITKLAHWKLEPKIEQIKKALEGKLTDHHRFLIDLSLNHMEIIEKQLIKLDQEIDRRLAKHQQSLELLDSIPGLGPASSKSILSEFGTDMSAYPDGEHLASWSAICPGNNESAGKKFSGKTRKGNPHLRAALVDCAWGATRKKGSRFRAQYYSIKSRRGSKRAIVAVAHSLLLTIYAVLHTGRPYSEAEPPPLSETKRLKKASDLCRKLRHLGFDIALKEKIQIQNA

SEQ ID NO: 238349 - protein, 319 aa, unidentified
MSNIILGIDISKLTFDVALLIDNKAKTKKFSNPSKGFSELKQWLKNKGIDNAHVCMEATGGYEAKMAEYLYDNNFKVSVINPARIKGFSMSKLSRVKTDKADSELIARFCQVMQPDLWQPIPKHIQELQQWVRRLDTLIANKNQENNRLDEASDVVAVNISAHIEFLDKQIKEVEELISNHIKGHRDLNDKSKLLDSIPGIGEKTIGVILAFLSIKNFDSAKQVAAFVGLNPRPRQSGSSVLGVGRISKTGDADLRKAFYMPAVVSIRFNPIIKDFAKRLSNAGKAKMVVVIAAMRKLLHIIYGVLKNKMPFNENIKTI

SEQ ID NO: 238350 - protein, 355 aa, unidentified
MIIIGCDYHPGFQQIAYVDTETGELQERALQHREDAEKFYRELAAQGMKVRVGMEASGHARWFERLLAELNFELWIGDAAEIRTKRVRKQKTDRQDAQLILKLMLKDDFPRIWVPSWENRDLRQLLWHRHRMVQARTRIMNQLQAVALNEGLRYKKRLWREAGRKQLEAFRLAPWASRRRQDLLELLDHRLNPTIAELTQAIEREVEKCPQARRLQTHPGVGSLTALAFVLIIGQADRFRCGKQIASYLGLVPLEDSSGSRRRLGHITKQGNSLLRFLLVEAAQVTVRSDPEWRSKYHHLMMRRGRKIAKIAMARRLAVRMYWMMRKGWNYEQLKKFGSHAGRPGTGDGVKENIE

SEQ ID NO: 238351 - protein, 393 aa, unidentified
MICVGIDVAKDKHDCFILSSEGKVLADVFTTPNNAEGFGTLLQTILRCTRPTDKIKVGLEATGHYSYNILGFLLDKGLPTYVINPLHTNLYRKSLSLRKTKTDRVDARTIAAMLMSDVDLKSYTDTAYHNEELKSLTRYRFDKVRERAKLKQSVSRLVTILFPELEKLVSSLHMASVYAVLGEFPGAKQIAGAHLTHLKTLLNDASKGHYGRDMATEFRNAARCSVGSVMPAKSLELQHTIRLIRELDTEINDIETAIQAIMEEMQSPITTIPGIGIRMGAMILAEIGDFSRFDSPDKILAYAGMSPSTYQSGQLSLSGAYSHMEKRGSRYLRYALYNATKYVCLWDPTFEAYLAKKRAEGKHYNVALSHAAKKLVRLIYAMEKSRRPYNRAA

SEQ ID NO: 238352 - protein, 422 aa, unidentified
MQNTAARKLKQVPEGYLIIGVDPHKKKHAAVAITQDFAVHCKFKFDNTREGLRVMLDRAREEMVRSGCRGVMFAIETGGHYWRNIAYFLDERGLPLRFINQYTLKRRRDGKDLNHRKNDYRDSEVAAQLLCTGEFTESKIPQGVYAELRAAHNAYRRLVRESTRITNLIQGLLDGLFPEFTTVFKDPCGVTALSVLSNCVIPSVIATMTEDEFIVIIESKHEGRRLMRRKLRALHQTSKTSIGIGAGANSVASEIAFLAEKLKLIRGHIRIIENTLIRLVDETEEGKYLLSIRGLNYIAAAGLLAELGCFKSYRSAKQMIKMAGSNPTESESAGKRSIHTPMSKKGRPVLRYCGWTAVIPMLRFNPDFRAWAKQRRERPVHANPLGGRETVGAALNRLLRLAFALVKNQTLYQSPQLIAVTG

SEQ ID NO: 238353 - protein, 371 aa, unidentified
MDERIKFFVGLDVHKDSTSVAACDASREPARFVGTVGSDVRQLLKVLAKAGEPGQISVVYEAGPTGYGLYRELRRRGYHCEIAAPSLIPRRAGDRIKNDRRDCARLAELWRAGELKPIWVPDEAHEGVRDLCRAREDAVQMRLKARQQLKAFLLRHDRRYSGKTSWTKTHERWIAEQQFEHAGETIALVEYQLAVQAAEQRVQRLTTALLEVVKGWRFEPVVAALRSLRGIDSVSAIGLIAEIGDFNRFKSARDLMTYLGLVPSEHSSGNSIRRGSITKTGNGHARRLLTEAAWNYRFPARMSSALRERSVDLPESVRSHAWKAQLRLSSRFAKLVARGVHVNKVCVAVARELAGFVWAIARQAQPTSASS

SEQ ID NO: 238354 - protein, 321 aa, unidentified
MATYIGIDVGKKSMQVYLPWIDKSLDITNNEAGFTKLVNKLTKHYEQLADLIIVFEPTGGYEKPLREFLKSNQINFTTVHPNKVRNYARAKGWLAKTDKIDSKLLFDYATVFSLPIKQDYNTESQQKLHSLIKRREQLILIKNQEIARLDKAANDTFIKKSLEEVLSCLEKQLTAIENVIKELCENDVEIKSKFDRLTAIPGVGIVLATTVVCEVPEIGNIDFRKLTSLVGLAPFARDSGQYRGKRSIFAGRSNLRKVLYMAAVASLRCNHKLKSYYDRLIANHKLPKVALVAVMRKLLAFMHALFKNNTVWLQHKENISS

SEQ ID NO: 238355 - protein, 349 aa, unidentified
MTEQRRSYAGECVYVGVDVHKETYTVTCVCHKQIVKTATVQAEPASLAASLPRWFPGATLYSAYEAGFSAFVLHRALTTAGITNIVVNPASIAVAANDKVKTDRRDAKKLAIDLADGRLRGIYIPTEAEELARLLPRTRAQIVEHRATIARQIKAKLHQFGLITPSSRRMISNRYLREIAAWSLAPELRVSLTLLAEQWRFATRQLIEIRRLLQEQAAAQAELEKVYRSVPGIGAVVARTLATELGDMTRFANERALFSYTGLTPSEYSSGSSVRRGHRSRQGSGRVRHLLIETAWRALPRDTVLQEIFDRIAATRGKKRAIVAIARRLTGRIRACFRQGTTYAVGTYA

SEQ ID NO: 238356 - protein, 319 aa, unidentified
MSYVGMDLHSKESHLCLLADNGEVVERAIIKSTRTAIRAWFSGRDDLVVAVEVSGSSPWVYRLLVELGHLVYVVNPRRVKLIAAAKLKTDKVDAETLARLVRLDPDFLAPVQHRSEETQKVRTLLGARRALVEVRTKLINLVRGQLRAYGHKLPGCRSKVFHDAWLAAMPTLPEDLVAILMAVVDQIECATWQIDEYDKRVLELTKGDEVMERLMEVPGVGQTIVLAYVSCIEDPRRFAKSRDVGPYLGFTPVLRQSADVSRSGGITKNGDTYLRQLLVQGAHCIFNSKKDSELKRTAERLEARIGKKCERGLRPAPIR

SEQ ID NO: 238357 - protein, 408 aa, unidentified
MDENTGFDIWCGLDVGKQSHHACALDTAGRRVLDKPLPQDQTKLEELFTRLEGHGRVLVIVDQPNTIGALPIAVAGSMGIQVAYLPGLAMCRAADLYPGSAKTDARDAFIIADTARTIPHTLRRIDADEETLAELKVLVGFDEDLAAEATRLSNRIRGLLTQIHPALERVVGPRLTTKQGLAVIEQLGGPQGMAAASKSRLLKVITKAYPHRAQDFADAITAALAEQTVTVAGTAAAEQVLPQLAASLRQTLDQRHALAAQIEQVVDAHPLAEVLTSMPGVGVRTAARILLDVGDASQFPTAGHLAAYAGLAPVTRRSGTSIRGEFPARSGNKHLKRALFLSAFAALRADPTSKAYYDRKRAQGKKHNAALICLSRRRCDVLFAMLRNREPYRTPAPNPEPSPTPLAA

SEQ ID NO: 238358 - protein, 338 aa, unidentified
MRLYCGIDLHSNVSWVVVLDEEGKVVFQRKLLNELWRFLNELEPYKDNLEIIAVESTYNWYWLVDGLQEAGYSVRLVNPAGAEQYSGLKYTDDRHDARWLAELSRLGILPTGYIYPREQRSVRDLLRRRTRLVRQRTSNLVSLQSAVERQSGERVTTNNLKRWGEAYVDAQSYDSHVKLNLKSTVKVTEALDEQIRCIEKVILRQAKEHPRFNVLKTVPGVGKVLAWTILYETGPIERFAKAGQYASYCRCVGSKRLSNGKKKGEGNRKNGNAYLAWAFMEATNYAIRYEPLAKKYYQRKVRRSHRVVALKALAHKLARASYYVMRDGVAFDPSKAFA

SEQ ID NO: 238359 - protein, 401 aa, unidentified
MGGCFEEGAPAFAGVDTHKGSHTLALLDALGRRLGAREFPADAAGVAALVAAAGAAGVPAGVEGARSYGAGVADALEAAGHEVYEVVRPGRARPRGGKSDAVDAYLAAEAVAAGRGLARKRLDGAAGELRLLSGLRDLLVRRCADQANWARSALVLAPERLRRRWEGEPTGALMEGLRSLPGRGALERTLRECARSWHETRRRADALEAEIAAAVREGWPSLLAAPGVGPVTAAWIICAAGSNPGRCGSEAAFSMLCGTSPVPASSGMTERHRLNRGGDRRANRAIHEIARCRMARDARTRAYVDRRVSEGKTRREAVRCLCRYIAREVYRLLTGPQEPLPAPGAARAAREAAGLSRAAAERGSGVPARRVALLESGELVDRRALEAPGALYAETIAGLIE

SEQ ID NO: 238360 - protein, 402 aa, unidentified
MYNAVGIDVSKGKSTVAVLQPAGVIIRKPFNVNHTSSELDELAKYIGSLEGETRVVLECTGRYHEPVVKALSEAGLFVSAVNPHLIKNFGNNSIRKVKSDPADAKKIARYNHNNLIELRQYSSMDNTRTQLKTLNSQFSFFMKQKVAAKANLIALLDNTYPGVNKLFDSPVRDDGSEKWVDYAYSFWHVDCVRKIGLKTFTERYQAFCKKHHYNFQPAKPAELFLASKDLIAVFPKEASYKLLIQQSIQQLNLASSHVEELRSKMNELASTLPEYATVMGMYGVGKTFGPQLIAEIGDISNFSHREALTAFAGVDPGVDQSGTHNSKSNKASKCGSNRLRKTLFQIMSTLLQTAPENDKVYQFLAKKRAEGKPYYVYMTAGANKFLRIYYGKVKECIRNLEQ

SEQ ID NO: 238361 - protein, 344 aa, unidentified
MPIVETRAITGGVDTHADTHVAAALDPIGGLLGVQEFPVTAAGYSGLLGWLAGFGTVCLVGIEGTGSYGAGLARHMSAAGVRVVEVDRPDRADRRRQGKSDSLDAVSAARAAQSGRASGASRGRDGEVEAIRALVVAKRTARAQRTQTISQARALIITGPDDIRARFTGHTPAGLVAGLAALRPRPGDTVRYHTLLSLRELGRRAQFPGAQLGRLQDLITPLVTARAPGLLRLHGVGPDTAAALLIAAGDQPGRLRSEAAWAHLCAAAPIPASSGKTTRHRLNRGGDRQANHALWRIAVTRMASHPPTRAYVTRRTTEGLTKPEIIRCLKRYIARETYPHLKPS

SEQ ID NO: 238362 - protein, 384 aa, unidentified
MSTIIGIDISQESSSFHLLGEGGIQEISGSFDMNRNGFESLLQRVAHVRSPRFFMESTGRYHMTLAHFLLQEGHRTAIVNPVLVKQFSKANTLRKTKTDKIDALTIARYAKQAPKEIGAIGRAMDDQRLSTARRREQTAEQVATTKTQLKADLTVAWPEILVLNVFTKGILRLFTHFPCARSIEEATDEQLSLALKAPRGRGLALTAADLRHLANGSIGIPSYGPLVADSARSLLFLEEKLEKLTKDLVSLVRETQDLEMEIITSIPGIGEITAAHFLAEIVSIDRFERYQNLIAFCGTDPGIYESGTILRRGKITKRGSASLRKYLYLMASGVNRCNPYFKAYYDKKRKQGFTHRKAMVAQMNKIIKTLFAMLKKEEMFRVPI

SEQ ID NO: 238363 - protein, 305 aa, unidentified
MKRLSKNIVPVEIQGKRCYVGVDVHKASYYVSVLAEDGARREFSAKADPDALLRGLLGNMGIEIIALAHESGPTGYALAWACQDAGIPVVVAASSRIPRPITVAGKTDRLDCIKLADYLAKGMLQSIAIPDRDDFAFRELNRRKIRLTRSRSKLRQEIKSFLLKNAIPDLPELKRWSNEGLKILREMQLNKALRATLDLLLDELESLSLHISKANMLLKSIACEHQKCQIISNLQTVPGVGEVISYTFATEIFQAQRFETKEQVSSYAGLAPQVKQSGESKARSRLRSVGQKHLRCALTEGPGYG

SEQ ID NO: 238364 - protein, 343 aa, unidentified
MDHIAIDLGGLESQICVRGPDGQILEEVRHRTARLGSYLKKRPPARVILETCSEAFCVADAALELGHEVRVVPATLVGSLGVGSRGVKTDRRDAQILSEVSTRIDLPSVHIPSEISRSWKSTCTAREALVSSRTMLINSVRGWTRQQLVKVQTGGVSTFIERVRKACLAVPNGLPEAIEHLLASIQLLNERIAKADAELAKLAEEHPTCKLLMTIPGIGPVTSLRFVAALDRVDRFPNAHAVQAFLGLVPGENSSSTRKQRTGITKAGPPRVRWALVQATWSFRRTSKNDPLVEWAFEVEKRRGKKVAIIALARRLAGVMYAMWRDGARYEPKRPRSRVEHQA

SEQ ID NO: 238365 - protein, 358 aa, unidentified
MQERTFIGLDVHARSVKAGLLDGLTGEVKSLAVPATTAALVAWVCAQPGPQAVAYEAGPTGYGLARALAAAGVPCLVAAPSRIPHAPGDRVKTDRRDAVRLAKLLRLEELTAVRVPDLAEEAARDLVRAREDARGDLMRARHRLSKLLLRRGLLWEERTWTEAHELWLARQRFPERPLQIAYEEALAAMLSVRARREALDAAIAAEAREEPWAAVVARLTCLRGVSTLTAFALTVEIGDWRRFSGRSLGAFLGLVPSESSSGTSRRQGAITRAGNGHARRLLIEAAWQQRRVPGKNVRVRLAREQAAPAVRERARLAERRLQRRWVRFDERGKRSTVAAVAVARELAGWCWSLAVMDA

SEQ ID NO: 238366 - protein, 369 aa, unidentified
MPHVTSIGLDVHARSVAAAAFNPFTGEVVHRDFGTDAAEIAEWALGFEEPRACYESGPTGFHMARELRALGLDCAVAAVSKMQRPAADARRKNDRRDAEFIARMLATHNIVEVPLPDAAVEAARDLDRALDDATVEYRRARQRLNMFLIRLGHVWDERNADGTRRGSWTRAHWRWISGIGLEGPQRDVLEYYVTAARCAESDRRQLEKKVLALARTDRWRPAVEALSCIKGIDTLTAFRLAAEAGSFTRFRTAPAFASWCGLVPSERSSGETERRGGITKTGNRLARTALVESAWHYLTCTPRPKAPAPGADVPAAIRARADDCTARLCRRREALAAAGKSSCKANAAVARELACWVWEIGRRAEGTLG

SEQ ID NO: 238367 - protein, 360 aa, unidentified
MKKDTKVESGLTVGVDLGDRWSRYCVLDAKGQILEEDTIASTGRAFRSLFGERPAARVVIEVGTHSPWVQRLLQELGHETITANPRYVRLIYSSRNKNDRLDAERLARLARVDTKLLHPIQHRGGTTQADRALLRSRNELVECRTKLVNHARGIVKSIGGRLPSCSTTCFHKRVRQDLPDELKPALTPVLDTIAVLTKKIQCLESRIERLASKRYPETGLLRQVSGVGPLTSLSFVLTLEDPARFKSSRAVGPYLGLRPRQSQSGDKDPELRITKAGDTDLRRLLVGSAHYILGPFGPDTDLRRWGLALAARGKKSAKKRAVVAVARKLAVLLHRLWVTAEVYEPLRNDRSAIVPQAVSA

SEQ ID NO: 238368 - protein, 357 aa, unidentified
MPIIEAKTVVGMDIGKKYSWCEAVNAETGEVIKEEKLHNTKDEFACFVEGLPRPIRLVMEATGNWQHLYECWDELAEEVQMAHPLKTKAIASARIKTDRIDKSTLAHLGMANLVPQAYIPPRPVRDLREILRHRAFMVSMQGRIKNRIHAYLSKLGMEEQVTDLFGKAGLAWLKEVELREPFRELVNQDLKILGVVQEEIKKATRSIEELARDDPRVELILPIRGIGKYSAMLILAEIGEISRFPDAKKLVSFAGLCPSTYQSGNVLRYGRITKQGSKWLRWILVEAAQRYAKVPGRLGDFYRRIERRKGSKTARTALARELLTAIYHCLKKEVAFQENPRRVIKDLSRYAPDYTGR

SEQ ID NO: 238369 - protein, 362 aa, unidentified
MEYFTGLDVSVDETAICVVGDDGKVAFETAVETDPAAIAEALRPYADRMRRVGHEAGSLSPWLHTELLAEGVPAVCLETRHVRAALSAQRNKTDANDALGIAHIMRTGWFRQAHVKTDACYRIRLLLVQRRNLKRKFLDLENAIRHSLKVFGIRLGKVGRGAMEKAVRESVAGDAMTAGLMDCMLRARAALWAEYLTLHKLVVQLAMRDELCRRFMAIPGVGPVTALSFSSAIDDPQRFRRSRNVAAYFGLTSKRWQSGTSIDVHGRISKAGDPDVRRALYEAASAMLTRFKGRDMIKTWGLKLAKTKCHAKARVAVARKLAIVMHAMWRDGTFYVGDPDAPAQEVDASNAAKLQRLSLANS

SEQ ID NO: 238370 - protein, 349 aa, unidentified
MKNFSIGIDVSKEKFDLTVKKVHFGAEQSEFLHYDVYENNLSGFRKMLKAVDKATGRADKSEWLFCLETTGAYELHLCNYLYAKGYDVWRESALQIKMSNGVTRSKNDRVDSDRIADYAIRHMDKMVIYVPVEEKLSTLKSLFLYRDRLVKEKQSKHTSSQEIKCTHLMNDEMRWMHTRSQQDIARLNKEIKECEDHIQELIASSAEIEKNYKHIMSIKGMGIITTTALIICTHNFATITSARKASSYCGVAPFFAQSGSSISHKKNVSHYSNAQLKAILTQAAFIATRYNEDIAIYYNRLKEKGKPLGVCVNNVRNKLLRIAFSLVQNDCDYEENHEWRRSQLYKDAA

SEQ ID NO: 238371 - protein, 404 aa, unidentified
MKGPIVSIDVSKGKSDYQAFKNLNVKYTGSRSIKHTKEGFDEIVNLVREMEKKLETEVCVVYEATGVYHRVLKKVLEDNNIKQFIINPLLSAKTRKNDSLRSPKTDKLDPKSIAKTYYSHSLHNSHKPETIYHELRELSRYYEDILVHIRKDKVAFRAQLDVVFPGYDTLYDDLYGPVALAVIEKYPHPEMLQKKKINTVSKVIQSKTCHRQAASDTMADKAIEYSKTIYSGCDKDDIEVLILQRLIKKLKEDMAEAERTIGEMIKLAQELPDFSIIKSIPGIGDNLAARIIAELGDMTRFKKKNELVAFAGLDPRISESGKNDGDHMHITKKGNKRLRCLLYLAVTCSIRLKRDDNSIKDFYIKKKQQSNPMCSKAAKTACASKLVRIIYSMCKTGELYQYNK

SEQ ID NO: 238372 - protein, 347 aa, unidentified
MRFYTKQHKHHCGIDLHARSMYLCIMDQSGEILLHRNMRANPEAFLKAVAPYREDLVVSVECMFTWYWLADLCRSEQITFVLGHALYMKAIHGGKAKNDRIDALKIATLLRGGMIPQAYVYPPEMRATRDLLRRRLHFRRKRSELLAHIQNTNSQYNLPEFEKQLTYASNRSGVVERFADPSVQKTIEVDLGLLAYYDQMLRELEYFILRTAKDHDHNTLYRLRTVPGIGKILSLVMLYEIHDINRFERPQELASYARLVKCARESAGKIRGTGGRKIGNVHLKWAFSEAAVGFLRKNPDGKKYYARLERKHGKGKALTVLAHKLARAVYYIWRKDTVFDQEKFLAT

SEQ ID NO: 238373 - protein, 369 aa, unidentified
MVEYSEAFIGIDAAKSRNAIAIAEAGREGEIRYLGEVEATPQSMRKVVARLAAKYQRLHFCYEAGPTGYGLYRQLTALGHDCIVVAPSLIPRKPGVRVKTNRRDAISLARLLRAGELTQVWVPDEPHEALRDLVRARDAAVEDLRRKRQSVTSLMLRHGRIFPGKTTWGARHARWLQEQHFEHPAHQIVLQELVLAIQHAQERLERIEAAIAEFVPGWSLAPAVEALQALRGVNLISAVTFLVEVGDLRRFETPRQLMGYLGLVPGERSTGDTVRKEGITKAGNSRTRRTLVESAWTYRYPARIGKVKLYHLQRVTPAIRDIAWKAQSRLCARFRALAARGKKSTVAVTAVARELAAFMWAIVRAVPAT

SEQ ID NO: 238374 - protein, 365 aa, unidentified
MIVIGADTHKTSHTVGAVNEATGRVVADRTVKAKRRSFEDMLRWGRGQGEERVWAIEDCRHVSGALERFLLVRGERVVRVPPKLMAGARKSARERGKSDVIDAVAIARAAIREGLDTLPVAQLAGPELDVRLLVDHRERLVAQRTALINDLRWGLHDLWPELEIPSRALTGGRWQDRVAGRLARNEQTARVRIARDELRRIRELTRSIDALERELAALVAALAPRLLAERGCGALTAAKLIGEIAGIGRFASDAKLARIAGSAPIPASSGRTDRHRLDRGGNRQLNCALHRLAVCKGRLDPDTAAYLARKQAEGKSRREALRCLKRHLARRVWRLLQTPADPVAASPTTPVTIYCNTPHGSFALT

SEQ ID NO: 238375 - protein, 376 aa, unidentified
MKLHGEAFVGIDAAKARNAVAIAEGGRDGEVRYLGEFDATPEAMARLVRKLGDRYEALHFCYEAGPTGYGLYRQILSLGHKCTVVAPSLTPRRPGDRVKTNRRDAQSLARLLRAGEPTEVWVPDETHEAVRDLVRTRAMAVADYRRKRQHVTSFLLRYGRFYEGKPSWKGRHLRWLDGQNFAHPAQRLAFQEMLNAVRAAAERIDRLDAALEEVVPSWTMAPVVAAFQAMRGVQFVTATTMVAEAGDLRRFDHPRQLMAFLGLVPSERSTGDTRRRGGITKAGNSSARKALIEAAWTYRHAAGLGRHHQDRQQGLPQQVRDIAWKAQTRLCARYRRLMAKGKRNTVVVAAIAREIAAFLWAIARHVEPTPLSRAAG

SEQ ID NO: 238376 - protein, 377 aa, unidentified
MRNVRFVGLDVHAETIAVAVAEPKGEVRSLGVIPNRPEAVGRLIGKLGKPEQLRVCYEAGPTGYVLYWQLSELGVRCEVVAPTLVPVKAGDRVKTDRRDAEKLARCYRAGDLTPVWVPDAAHEALRDLVRARLAAKRDQLRARHRLSKFLLRHGRRAPEGTGAWTEKYLQWVRTKVQFEHRAQQITLGDYLHEVEHAAERIRRLERSIDAAIETLPVKMRAVIEALQSLRGIAQISAVSIMAKVGELSRFEHPRQLMGYSGAVSREHSSGERIRRGAISKAGNAHLRRIVVEAAWAYRHRPSVGKGLTARQRRCSASVTALAWKAQQRLHQRYVRLMARGKCKQQTVTAVGREFLGFIWAIGVHVERKENLPPRQAA

SEQ ID NO: 238377 - protein, 445 aa, unidentified
MHPQAPASPRLVNMNCSPSSAIRTKMKTNDYAAYLALDWGDSQHAFALQMADTQKTEKGQFAARPEAIHDWLKELGSRCSHGRVACAIEAGGDALVSALLEHKWIEIYPVNAAMSARFRKALVPSGAKDDVPDANVLLTLLLRHGDQLKPLQLDSAKTRELAALVLARRGAVDRRSQLGNQLRAVLKGYFPQALALVGDDIHGVMALDFLERWPDLATLQKARAATVQSFYVLHRVRRPELIKSRLELVAQAQPLTQDSAVIGPAVLQVQMLTAMIKTLQRHIARFDESIQERFAAHAESALFRQLPGAGPQLAPRLLVAFGDNRQRYPDATSLQKYAGLAPVKEKSGRQLWVHWRWNAPIFVRQTFVEWAGQTVVYCDWAGVYYARQKRAGKGHHAIIRALAFKWIRVLWRCWHRQEAYDEARYLTALRQRRSPLIQDLDLALS

SEQ ID NO: 238378 - protein, 336 aa, unidentified
MSSTLLPPLGLDMAKLTFEARLKLEHQQPTRSFANTAHGFEQLATWLRSCGVERVHACLEATGTYGDGLALFLYEQGHQVSIVNPARVVAFRKSEGIHTKTDKQDAKVLLRYCEQKRPRAWSPTPAEVQLLENLVLRRADLQGMRQQEVNRLENSRWDSESRQSILSHIQSLETQIKALTKRLSAHIAAHTSLQEQRTYLVSLPGIADVTAACVLAEGVSATAFSTASQLVGYSGLAIKEEISGTSVRGKASIDRLGNAQLRKCLYMPALVAMRRDPDFALWMAQMRARGKPSKVIIVAVMRKLLRLIYGVLKSKQPYDPRKAFPTHYAQQEKPAA

SEQ ID NO: 238379 - protein, 402 aa, unidentified
MNCVGIDVSKGKSMIAVMRPFGEVVVSPFEVRHTASELSELARLLKSLDGETRVVMESTGNYHAPVAWLLHGAGLYVSVVNAMLVHDYGNNSLRRGKTDKKDAVKLANYGLDHWLTLPRYVPEEDARLMLKTCYRQYQQYSKVQTMLKNNLISLLDTTFPDANRLFTSPPRADGSEKWVDFVATFWHCECVCGRSEKAFTTQYQKWCRKHGYNFSEDKALDIYASACRHFGVIPKTDTAKLLVEQAISQLQATSAALAALKQEMQSLAASLPEYPVVMGMFGVGPTLGPQLIAEIGDVRRFHSKKALVAFAGIDAPPYQSGQMDVRSRSISKRGSASLRRTLFLVMGVLLQCAPMDEPVYQFMNKKRSEGKPYRVYMMASANKFLRIYYASVKAYLDSLEHD

SEQ ID NO: 238380 - protein, 401 aa, unidentified
MHYVIGIDVSKATSQVAVAVDGKVTQHFKITHDVLGFNQLNTIIMQFNEFPDIVFEATGIYSRRLKSFLDWHNYPYTYLNPLAAKKQLDQLRPNKNDLNDAKNLAETQFILARAKSYVQNPIYIELQDMSRFYQQINHDIVSTKNRLHRILQLTFPEIEGLFSATDSPHYWELLTIVPHAIITRRSRQALMDTIQGGISWHIGHERLRKLVDQLMSMGQISAPAVAANSYNVAQVIYYAKRLIELHGTKGDILTAMVDKAKDLPEYSIYQSIPGFSDKTVVSLIAELGDLHRFRTANKLNAFVGIDLRFNDSGDYKSKGFITKRGNSTARKVLFRAISNIASTASYGHPSHINDWYQKKKHSSLSKRTKKIAIGAMSRLLRTMHYLVINHQLYDYKAASKH

SEQ ID NO: 238381 - protein, 340 aa, unidentified
MNATTYGLDVAKRVFQLYWVDAQTGEIVNRRFARDELIKFLSCRLPGRVALEACGSGHWWARKIRTMGHEVVLLHAKFIRPFVQTNKTDAADARAIWTAVHQPGMRTVAVKSEEQQAMLSLHRMRTLLLKFRTMQVNQLRGLLYEFGATFRAGRVAGLAEIRTRMAELESELPSTMMSCLQEQIGRIDGLQQDIDRLEARMATWQKKDQACCAIAEVPGIGRLTATALVATMGDATMFRSGREFAAFLGLVPRQSGTGGKVRLGSISKRGDPYLRTLLIHGARSIMYHTKVPTPWQKEIQARRPANVVAVALASKMARTAWAILARGQAYQRNFVSVKPT

SEQ ID NO: 238382 - protein, 371 aa, unidentified
MRDADGVAGIDAHKQVFSVAVLDGRGGRCAVASFATSPEGLAEALALLDSFAFAVGRVGVEGSAGLGRHVTQALVAAGYDVREVQANRTAERRRRRRRHKSDREDAEAIARETLAHPDLPPAGKQRRPDPAWEELVAVRNRRKSLIGQRVRLLNEAEAVLTGLPLRVRAALPQTSRVRPRLRALHQGAASSVQLGAADQVNLAWLIETASDIARLDARVAELDKKIPPLLGRLGSTLTHEHGIAEVGAMELLVEVGDPTRFATEAQFARWCGAAPVAVSSGEGDQAPTHHRLDLAGNRQVNSVLHLMHVTQVRGYPPARDYLDRKRAEHKTKREARRAHKRHLANVVIRRMWADHARRHTTNAQSPTAAAA

SEQ ID NO: 238383 - protein, 454 aa, unidentified
MAKRSKKSNFKVQSLPEYLRHINLNAAGIDIGSERHMVAVPEGRDEVSVREFGAFTADLQALANWLEQCGVTTVAMESTGVYWIPLFELLDSRGFEVKLVDARHVKNVSGRKSDVLDCQWIQQLHTYGLLAGAFRPTDELCVLRSYLRQREMLSQSSSMHIQHMQKALQQMNLLLHNVVSDITGVTGMKIIKAILAGERDPRRLARNRHKRCHNTSATIAKSLVGNYRAEHLFALQQAVDLYETYQAKIADCEEAIVKQVDKQPDLTADSLPPSEKPIQARERIRSGVDVRELLFKKSGVDLFATPGLAADTLLTLSSEVGFDMSPWKTIKHFTSWLGVCPGTKISGGRVLDKKTKRRPNRAAQAFRMAAATQARSKTALGAFYRRIKSRAGGKQAITATAHKIARIYYTLLTKGTSYVELGQEAYEQKYKERRLHHLMTQAKSFGFQLVPCAT

SEQ ID NO: 238384 - protein, 395 aa, unidentified
MFIVGIDVAKRSHEVCMITSDGQTVQRPFSIRNNCTGYNLMLEKIRKHTNIKSQIVFAMESTAHYWLALFTRLRKDGYHVILLNPIQTSAMRDMFIRKIKTDAKDSFIIAELIRFGRYAESNVAQDRLLALKELCRNRFYLVDMTGDLKRKLIALIDRVFPEYEAQFDTIFCKSSVAVLKKYPTPQKLSNAHLDKLTELLWNSSNGHFGEWKARELKELARNSFGVEDCDGAYSTLILLMLDQIQSLSGKADALEKEISRLFQSFDTTVTTIPGVGPIIGAVILSEVGDISRFSSADKLAAYIGVDPSVNQSGEFQAAHAHMSKRGSPYLRRCIWMASQVAVQRDPMFRAYYEKKAAEGLKYMTIIGHVTRKMTTVVFAILRDHKVYEPILPTAA

SEQ ID NO: 238385 - protein, 411 aa, unidentified
MQVVYPRCAALDLGKDVLVAAVRLQDAGGVSCECRTYGTTANQLSTLRGWLISHGVTHVVMEATGSYWKCVWRALEGHFELTLANPRQIRSLPGRKSDVKDARRIVDFHAHGLIQGSFVPPAEIDAVRELTRTRKQFVREINRHIQRIQKILDVANVKITGLITDTLGVSGRAILKALIAGQTDPERLAALAHPRLRASRVQLVEALQGQPTEQQRSLLGMHLQLIETLETSIAQLDDRIAQAVEPFRELVARLGLVPGLSDEVSIPALLGEIGVDMTKFPTPGNLISWACLCSRNDESAGKVRSRRTLKGAVWIKTLMIQVAWTAVRTKNSYFRAQFYRLCRTTGDRRKAIVAVAASILTVVYHMIREGTPYTDLGVNYFDERNRAGAARRLVARLQTLGYNVQVTEAVA

SEQ ID NO: 238386 - protein, 348 aa, unidentified
MNATPKTVVGVDTAKSVFQLYTIDMETGEVTCKQLKRVQFLQWFSNRAPCVVGMEACGGSQHWARQLQAQGHEVRLMGGKMVKAFVCGNKNDAADARAIWLAAQQPGVKAVAVKSEAQQAVLAMHRIRQQLVKSRTAQRNELRGLLAEYGEVFGLGKAAFNAGMKGALARLAERLPAVLIDTLREQWHELVRLDERITAIEARLLAWFRQDRATQAIAAIPGVGLLTATAAVATMGQANAFRSGREFAAWIGLVPAQSGTGGKVRLLGISKRGDTYLRTLLIHGARAVQAHARTPGKWLQEIGQRRPPNVVTVALANKIARTIWAVLAHDRAYDKGYVSVRPQTTMPT

SEQ ID NO: 238387 - protein, 346 aa, unidentified
MAHSTAQLVIGVDTHADRHVAVALDTLGRHLATASFAASDTGNARLLAWACQHGQPVAAGVEGTGSFGYRLARYLLAHGVAVREVNRPDRARRRRVGKNDPLDAEHAARAVLAGDASAIPKNRDGVVGELRCLVVARRSAVKARTQATNQLRALLVGCDDTIRTRLRPLRKQHLARGCIRLRAAGPAQLALRSLGRRWLALDAEIRELDREITGLVTRVAPRLLDRHSVGVHTAAQLLITAGDNPDRLASEAAFAALCGTSPVEASSGKTTRLRLNRGGDRQANTALWTIANTRLIHEPRTRAYGAKRTAQGKTRKEILRCLKRYIARELYPLVLDALTASPTPAA

SEQ ID NO: 238388 - protein, 338 aa, unidentified
MEQQPQYVGIDLHRRRSVIVRRSAEGETLDTVRIDNDATALAAELAKAGEHPEVILEATYGWYWAADVLAECGANVHLAHPLGNNWGHRRVKNDERDATDLVDLLRMGRLAEAWIAPPQLRELRELIRYRAKLVHLRTNCKAQVHAVLAKEGVRVSMTDLFGVAGQVLLDTCPLADAYAVRVESLRDLIEVLEREIAMLQSRIDMWLGDDIGFHAIQAIPGVGPILAAVFVAEIGDVTRFATARQLASWAGLTPSHHESDTTVRRGHITKQGSRLVRWAAVEAVGRQRGDTPIRSHHRRVGERRGKNVGRVAAARKLVTLVFYGLRDGDIRCLAAGEG

SEQ ID NO: 238389 - protein, 419 aa, unidentified
MSFKILKNNCCGLDVHKTWIYACIGITDSNNRTEYKQARFSSFTKGLNELCDWLAKYNCKDVCMESTGKYWIPVFNILEQHSFWVTLSHPKYTKPMKGNKTDRKDAKWICDLYMCGMVKPSFIPPADIRELRDLVRYRFKLTCMITGEKNRAQNCLTVSNLKLDDVFSDVFGKSSRSITEHILQHPGEKFDIAPFVDSRCKTPITEIQAAVDGAISHEQAVKLRQCLKHIDELEMHKAEIEREIFRLSQKYESVLDLIRTIPGFDKNPLTAIQVLSEIGADMSVFPTAKNLVSWAGCCPRNDQSSRKIKSTRISRAGSYFKPVLVQIANALIKSKKHPEFTTRYRRIKARRGHKKAIIAICRMILTAIWHILTDLKPYTPEGFLESRPVNKEKVLTISQALNLIKQRGYIIKDDVGPVT

SEQ ID NO: 238390 - protein, 334 aa, unidentified
MDTMYERCCGLDIHKKTIEACFRSGKKKTHMSFGTTSVELRKLTMWLVENDCQSVAMESTGSYWKPIFNILELSGTDMKIIVVNARHMKNVPGRKTDVNDAEWIAELLQYGLLRPSFIPDREQRELRELSRYRKSLVGERAREINRLQKMLEGGNIKLTSVVSEVTGYSSKRLLDRLLRNDEPMTEDVISGLVHTSLAGKSKELETALDGLLSELQKELLIKVLDHIDDMSRRIADLDDFCRKQMKKYEDALDKLDEIPGIARRTAETILIETGLDMSRFPTAKHFARWAGLAPGNNESAGKRSSGRTTKGNPTLKSTLIQSAKVAARKKKLIF

SEQ ID NO: 238391 - protein, 372 aa, unidentified
MGRTSHQLSIGVDLHKTQFTVCGLKADGEILHEGIYPCTHEGYDAFASWIHEAQEKHGLSAVLVVEATGNARYFKNFMENEGFRVKIINTLKFKVVVESVNKTDKRDARVIAAFLAKDFIPESHLCSQYEEDLRRLLKTRSQLVKTIVGLKNNIHGMMLSYGIVTKPSQFQSKKDRQQLRNELEAHTEFNVAAAGVLDCILKVLEDTSASLKEVEQELERYVEKDEAVAILRTIPGVGLVTSSTIRAWTADIDRFNSYKEYASYCGLVPYLKESNDVTYLGHITKRGPKELRTAMVQVVMGMLRVREKNPDWIFYQRYGYWKSKKSSGKAIIACARKMSRVIYCMLKNKEGFNPEKMKPERNYSRERLSKAS

SEQ ID NO: 238392 - protein, 411 aa, unidentified
MDVVNARCAGLDVHKATVVAGVRVPGPQPGARRGETKTFATTTRGLRDLTNWLLTHGVTVVTMESTGVYWRPVYEALEGLVQLVVVNARHVKMVPGRKTDVKDCEWLAQLLECGLLRGSFVPPRAVRDLRDLTRLRKALIRERGHHVNRIAKTLELAHLKLSCVVTDLMGKTGRASLQALSAGIDDPERLAACAQGLLRKKQAALREALGGRLTPHYAFLLQQHLSLIDGLDAHIATLDTRIEAAMAPFAEAAALVQTMPGVAARAAQAILAETGVDLDLFPTPAHCASWARLCPGNHESAGKRQNTTTGKGAPWLRATLQETAWAAVRSKKSYYRALYHRLKGRRGAKRAIVAVQHAMIVALWHMLKHRVAHQDLGADYFERRNIARIRRHHVRRLEQLGYDVTLRGKAA

SEQ ID NO: 238393 - protein, 384 aa, unidentified
MFAGIDIASERHVLARLDDAGAAIGKPITISEDREGYDALLAALGPPPVLIVMEATGHYWKNLFVVLTTAGHDVALLNPLIARRFQETNLARTKTDALDATGLARLAFEKRPAPTHLHDEIAETLRELVRHRDRLRQDFDDRVRQLHRLVDLGFPEFTRYVRSLDSMLATCLLAEYPTAHAFARATPRRLARLRYDGRHFVGPELAHSLVEAAKHSVGQHHGPAYKLQARHICQDLDTWRKRLAEIEHDIENLLNTHVTGKLITSIDGIGPQTAARIIAATGDPAHFKSAGAFAAFVGVVPALRQSGKQKGARAGIGNLGHARLRRALWMPVLSAVRLNPWLRAFYLRLRAAGKPPKLALIAAMRKLLHAVYSVAKNRRPFVTT

SEQ ID NO: 238394 - protein, 366 aa, unidentified
MDTIYIGVDFHARQQTICYLKTETGELVTCELKHQHKQALRAFYAQFSGQVIVGLEASGYSPWFERMLEELGCEVWLGHATEIRRRARWRQKNDRRDAELILDLMLHNEFPRLHRPAVQSREVLRMLRYRQKLIKMRTMSKNSLQAIALQAGLAKGSRLFTKAGQQELGTAEMTPVLHWQREHWLQLMEPLNQQLLETMGWFKAQSKGDVSITRLRTHPGIGLLTSLCLVHTLQPVSRFRNTRKVAAYAGFDPIERSSGERKCFLGISKAGSRLLRYLLVEAAQTAVRKDEDLKRFYQRLAERRGRPKAKVAAARKLLIRAYIMLRDEIDYAEFRHRAVAARLARRGQGPSNVPEVLIGQPASPEQ

SEQ ID NO: 238395 - protein, 343 aa, unidentified
MKIHALGIDLGKTVFHLVGLDASGQVVIRKRCSRTQLLAFTANLQVGLIGMEACSGAHFLGRALRAQGHEVRLMPAQYVKPYVKTNKSDYIDAEAIAEAVQRPRMRFVPIKTEEQLDLQALHRVRERWVMRRTAVVNQIRSLLLERGLTLPKGRSHLDEQLPRILEDAELHLSDSFRVLLAQLKLELEQLAARIEPMDRVIQKMAKENEACQRLTEIPGIGPVTATALIAAVGNGSTFKKGRNLSAWMGIVPGEYSTGGKQKLLGISKRGNKYLRRLFIQGARSVLQQRHKQAPGLSEWLAQLLARTHQNVVVVALANKLVRMAWAVLCKNERYRAPVFAVTT

SEQ ID NO: 238396 - protein, 425 aa, unidentified
MNYKQNEKINQVKESTLVVGIDIGSTKQYARAFDWRGIELGKIFTFSNSREGFEAFKAWMRHLQDKYRKSDVIAGIEPTGHYWFDLGAYLEDEGILLVMVNPYAVKQTKELDDNSQSKNDRKDPKVIAKLVTEGRYSAPYTPDGVYADLRIMVTNRKRLIREMTQIKNRFARWFAIYFPEYTDVFGDYEAQSSMLLLKKVCTPEAIVELGAEKINKIWRDAKLRAVGMKRATTLCETAKRSIGLKKGSSAARYEMKLLLEDYEYKKAQLDAVMEEIEKLCRKIPESEQMLAIKGIGVITVAGFLAEVGDVRRFESPRQIQKLAGLSLRENSSGKHKGQTTISKRGRSNLRAVLFNAAIPLIATNPEFKSLHEYYTTRANNPLKKKQSVIAISCKLIRVFYAILANGVTYDAQKMLSDIHRQPQAA

SEQ ID NO: 238397 - protein, 340 aa, unidentified
MKNTKHSAITPDLFLGIDVGKTELFCHIITGHDASSSRFNNSEKGIASLLTWLQKFATPSVISACLEQTGHYGIDIAKALHKLRIHSLFLVNPRQIKAFGQQKLRRNKSDTADAKLIARFLQSEHSELRPWQPKPIENERITELSRYSESIVQEVAKLKTKCEAAREPAVLRSLKRRIKVGEKEIADLRKLITKIIDSKTALQIDHALLGSIPGLGEISCQIMLAELPDIGHFKSARELAAWAGVTPCHYASGTSGRSTTPITKVGSVNLRRALFMPAMNARVFNPLLKTFGDRLKENGKKPKQIIVAIMRKLLHQIYGILKSREPYNPEKRGFQNPAKA

SEQ ID NO: 238398 - protein, 359 aa, unidentified
MREQRNKISFRGQKIYVGIDVHLKSWSVTVLSETSVLKKFSQHPSPEALYGFLTRSYPGAEYHSVYEAGFCGFWIHERLTALGIDNIVVNPADVPTKSSEKLRKTDTVDSGKLARSLRANELKGIYTPDSVSLEMRSLIRLKNSITKDTTRQKNRLKSQLRYLGIEIPQEFLTPFSNWSKRFFAWLKEIETLTPSGRQALDIHIRHLEELRRQKLEMTRALRTLAKTDRFREPLRLIMSVPGVGQATGMAFLSEICDITRFRNAEQLAAYIGMIPMCHSSGEKDGTGDITIRKHAVMRCNLIEAAWVAVRQDPAMNLFYTEQCKRMPKSKAIVKVARKLVNRLFFVLKHQTEYVNSIVS

SEQ ID NO: 238399 - protein, 319 aa, unidentified
MEKDSIGIDVSKDTLDVASYNSNKKWQFPNNGEGIIRLVETLKEQSPALVVMEATGGYETPAAFTISKAGIPCAVVNPREIRDFAKATKKLAKTDTIDARVMAQFAALIKPEPRLMSDEQAQELEAILARRRQVIEMLIAEKNRLHTAQKPVKDEIKAHVEYLEKRLDQIDSNLQGRIEESPVQRERYDILRSVPGVGPNLSTTLIIDLPELGTLNRRQIAALVGVAPLNHDSGTKRGKRSPWGGRPQVRATLYMATLAATRCNPVISNHYARLCTIVKAKKVALVACMRKLLIILNTMVKEHTAWHPTQHILVAITSS

SEQ ID NO: 238400 - protein, 413 aa, unidentified
MDLLYASCAGLDVHKDTVVVCVRQRDAAGKVRQQTRTFGTMTSQLLELGDWLRALGVTHLAMESTGVYWKPIWNLLEDQFEILLVNAHHIKRVPGRKTDAKDAEWIAELLQHGLLRGSFVPARPQRELRDLTRQRRQLIMAKASVANRIQKTLEDANIKLASVATDVLGVSGRDMLRSIIAGQDDPEELAELARRRLRSKIPQLRLALRGRVSAHHRFLLKLLLEEVEQHEAWIARITERITEVMSAPFTEAVRCLASIPGIDERAAENILAEIGTDMKPFASDGKLSSWAGVCSGNHESAGKRQSGRTTKGNRWLRATLVQVAWAASRTKKTYLSAYYRRLASRRGKKRALVALAHTILVIVYHVLREGTTYRELGSQYFDHLESERLTRSLVRRLERLGHKVTLQTQETAA

SEQ ID NO: 238401 - protein, 354 aa, unidentified
MKYFAGLDVSLEETAICVVDETGQIMKEARAASEPEALDALLSKLGLPLEGLGLEACSLTAWLHGELKAAGWPAICIESRHAKAAMGAMPNKTDRNDARAIAQIMRTGWFRAVHVKTSTCRSWRSLLVARRTVLNEMRSIENVVRAILRETGLKLGTPARKDFVVRVRELIGGTDGLALMVEPLLEILGVMLREFARLTKQVLDIVRDEPIRRRLMSTPGVGPLTALAFRATIDQPERFRKSRDVGAHLGLTPRRYQSGETDIQGRVSRCGDELARTALYEAAHSLLVCSKKWSALRAWGMKIAKRRGMARARVAVARKLATILHRMWIDDSAFRFGSEKAAPAGVPKLIAATA

SEQ ID NO: 238402 - protein, 423 aa, unidentified
MHQPPIVLRAVERMFSMEVVIERACGMDVHKDNITACIMTPEGKEIQTFSTKTVFLIQLVDWIKQNNCTHVAMESTSVYWKPIVNLLEAEEIEFLVVNAQHMKAVPGRKTDVKDAEWIAKLLRHGLLKASYIPDRNQRELRELVRYRRSIIEERARQHNRIQKVLEGANIKLGSVVSDVMGVSARDMLNAIAEGEEDPEKLANFARRTMKKKKDELELALKGYINSHQRLMLKTILKHIDFLTEQIEMLDQEVEERVSSYQEDVERLDSIPGIATRMAEQILSEIGTDIKKQFPSAAHMCSWAGLVPGHNESAGKRKSAKTKKGNKYLRSALTEAAHSVRGSKNYLGALYRRTASRKGKKRAGIVVAHAMLRISYYLLTRKEMYVDLGEDYFDKQRQQSIFRHSLRRLESLGYTVTLQEPEAS

SEQ ID NO: 238403 - protein, 343 aa, unidentified
MGVFAALDVSQEETAICVVGQDGVLVAETKVPTCPDAITGWLAERASGLERVGMETGPLAVWLWNALTERQVPIICIDARHANGVLKMMPNKTDRHDARGLAQIVRTGWFKAAQIKSHDAYVNRAMLTAREALVGMRVRLENEIRGLLKTFGIMFGKRVGGFKRRAEEIIRDELTVVPDLVPIFEALMQARRDILARIAALDSRIRAVARRHATVRLLMTAPGVGPITAMAVVAAFDDASRFRRSSSAGAYLGLTPRRYESGEISRNGRVSKRGDAFTRKCLFEAANAIFCRNLGGPRLRDWAKAIAERTGPRKAKVALARKLAVTLHAMWRTNTPFREAAVA

SEQ ID NO: 238404 - protein, 421 aa, unidentified
MAVYCGIDWAEGHHDIALVDSDGTLVAKRRISESADGFAELTAMLAAAGDSAADPVPVAIETPRGLLVAVLRATGRPVYPVNPLAVARYRGRTCVSGKKSDRADAMALANILRTDAHLHRTLPADSGLARSITVLARGYQDAVWRRTKLVQELRARLREYYPGFLAAFASPGAGRRLSTTQLASADARAVLAIAPSPAEGLKVSRARVEAALRSGGRQRRVSTLAASIVAALRMPQLRQEPVVEQAMRTEILALLGVFNAVCESAGLLAAALAEAFRRHPDYQVITSFPGLADVSGAIVLAEIGDDRDRFSDDRALQAFAGSAPVTRASGKSHTVTRRRTKNNRLAAAGYSWAFTAASRPSPAREHYLRRRASGDGHPAALRHLFNRMLGQLHHCLRTGQVYDPVKAYPNATAAHPQQAAA

SEQ ID NO: 238405 - protein, 343 aa, unidentified
MTNDAECTSGVVDMSVNVGIDVGKDYLDICLLHDQTKSGRKHRKFKNTKGAHSEISRWLIKVSKCKPEDTLITMESTGVYHESIALYLHAVGFRIFISNPGKAHKFSQSLGLVHKTDKSDSYMLALYGDAQRERAQVWTPDNINTRNIRSLVRRLSALEKDRLRESNRLEASEISDANERVKSSIMRIVSVIDEEIALIEQEIELAINSDADMERNHKLLQSVVGIGKVMSRELVYLFSSKKFSTAKQAAAFIGLIPQLNESGKLKGRTTMSKNGPSRVRAKLFLAAISASTHNPDIREQKRRLLAAGKTKMQALGAAMRKLIQICFGVLKTQTKYQPQVTLN

SEQ ID NO: 238406 - protein, 380 aa, unidentified
MKNATRFVGLDVHADTIAVAVAEAGRDGEVRNLGIIRNEAGAVRKLVEKLGKKGLRACYEAGPTGYALYWQLSELGVTCEVIAPTLVPRKAGERIKTDRRDAIKLARCYRAGDLTPIWVPDKAHEALRDLVRARESAKQDQHRARQRLSKFLLRSGQKPPQQKSTWTQKYLEWIRGLRFEHGAQQATLVDYLSEVDHLSQRIERLERSIDEAIAQAPDGLRAVVEGLQALRGVARLTATTIAIEIGSFSRFQTAKQLMAYCGVVPSEHSSGSSRRQGAITKTGNAHVRRVLFESAWSYRHRPNLGAALKKRQQQSTPSTIEIALKAQHRLHRRYIALAARGKPRTKIIGAIGRELLGFIWAVAVNIEAQQQKTTQQKNAA

SEQ ID NO: 238407 - protein, 330 aa, unidentified
MTHAVLGIDIAKLTFDACLIRPDGSLRHRTRFANSPAGFTELAAWLKKHHVTTTHACLEATSTYADALARDLLERAHRVSVVNPARIHDFGKSRLTRTKTDKADAELIARFCLTQTPPAWTPPLPEITELQGLIRHLETLEAARQQHANQLATATTQIVRDSLTALIRHLEGQVVEVEAAITEHSARHPDLRADVALLVSIPGIGERTAARLLAEIIHLKSYASARQVAAYAGVSPQQRESGTSVRGKTQLSKTGNARVRRAVYLPAVVAKRYNPLIKALCERLAERGKPPMVQIGAAMRKLLHLAYGVLKSRKPFDPNYGRPQQQPHAA

SEQ ID NO: 238408 - protein, 360 aa, unidentified
MKKDIKAESGLTVGVDLGDRWSKYCVLDEQGQVLEEDTVATTGRAFRKLFSDRVAARVVIEVGTHSPWVQRLLQELGHETITANPRYVRLIYSSRDKNDQLDAERLARLARVDTKLLHPIQHRGGTAQADRALLRSRNALVECRTKLVNHARGIVKSIGGRLPSCSTTCFHKRVRQDLPDELKPALTPVLDTLASLTKKIQCLEARIERLANKRYPETGLLRQVSGVGPLTSFSFVLTLEDPERFKHSRAVGPYLGLRPRQSQSGEQDPELRITKAGDTDLRRLLVGSAHYILGPFGPDTDLRRWGLALAARGRKNAKKRAVVAVARKLAVLLHRLWVTAEVYEPLRNNESAIVPEAVSA

SEQ ID NO: 238409 - protein, 410 aa, unidentified
MAERFVGIDVALREHRVAVLDRDGEAAGPSFTIAASKDGMATLLRTLAARDATAAQTLIGLEASGHLWENLEAALVGAGYRVLVLNPLQTRRYRDVLRRKAKTDDIDAHVIAGLIRSGAAQASYVPDEHIQSLRELARLRARLMDDWQDYLRQLIAQLDVVLPEHRTALGDLRSARARGILAQFPTAQHLAQASPRAIRRAAEDAGTRGFTLDDAIAVRAAARQSLYSGKAAAARAQVVRTLVNQLDRLSTAIDEVDRAATVLLPPSEPGTGPSDADLLQTIPGIGPHTAATLLGELGAPMRFTDAPALVAYVGFYPVITESGQRVGTPRLSAVGSRIARRALYLAAVNAVRRSAEWRTIYLRKRAQGKSAKQALIVVAVKLLHTLYAMLKHRRPYNPSRLLVATATIGT

SEQ ID NO: 238410 - protein, 373 aa, unidentified
MSNVRFIGLDVHAETIAVAVAEPDGDVRPLGVIPNRPESIQKLVKKLGPPEQLRVCYEAGPTGYVVYWQLTALHVACEVVAPTLVPVKSGDRVKTDRRDALKLARSYLAGDLTPVWVPDAAHEALRDLVRAREAAKTDQLRARHRLGKFLLRHGRRPPTGTRAWTQAHLTWVRSAVHFAHGAQEVTLLDYIHEVDHVAGRIERLERAIDEAVTTAPGQMRTVIAALQALRGIAQVSAVTIVAEVGELSRFAKPRQLMGYSGAVASEDSSGPRIRRGAITKTGNAHLRRIIIEAAWTYRHRPSVGPTLRKRHTAINPEVIAIAWKAQHRLHARYRSLTARGKSKQSAVTAVGRELLGFIWAIGMAVERPRPVAA

SEQ ID NO: 238411 - protein, 349 aa, unidentified
MVNAHRTLSPRRRTRTGAFVMSEHSQGRESVMVRRPNAGVDVSKETLDVAVGSRSERFGNDAQGMESLAALLREQDADVVVLEATGGYEAAAAAALQAAGLTVAVVNPRQARDFAKAMGVLAKTDKVDAKVLAAFADVIAQHEKRGSFLRAVPDEQRLHLAALVARRRQLLEMRVAEGNRLALSHKVTRKSMAAVIKILDKQISELDRDIDNHIREHFRDLTRVLSSVKGVGAVTAATLAAQLPELGQLDRRAICALVGVAPLACDSGKKAGRRHVWAGRAPVRAALYMATLTASRYNPAIRTFYQRLLAAGKTKKVALVACMRKLLTILNAMARDGTQWNDAFHAITP

SEQ ID NO: 238412 - protein, 402 aa, unidentified
MQEPSADRGYAVFLGLDVGKGEHHATALGPDGRRAYDKPLPQDEHALRALFEQLSGHGRVLVVVDQPASIGALPVAVARDVGVDVAYLPGLAMRRIADLHPGNAKTDARDAYVIAEAARTLPHALRRVDTGDEALADLDVIVGFDDDLAAEVTRVTNRIHGLLTQIHPALERAIGGKLHHKAILELLHRYGGPTGLRTAGKKRIANVVRPRAPRSHHAIVEAVMAALDEQSVTVPGTRAAELVLPQLADQLTSLLAQREQAATQVEEMLDAHPLAAVLTSMPGIGVRTGARILLEVGDGTTFPTPGHLAAYAGLAPVTRRSGSSIRGEHPSRGGNKNLKRAMFLSAFAALSDPTSRAYYDRKRAQGKKHNAALICLARRRCDVIYAMLRDGTPYQPRPASAA

SEQ ID NO: 238413 - protein, 316 aa, unidentified
MSASRDEVFAGIDVAKETLDLHLEPGGEEVHARNDEAGIGELCTLLGERRPCLIVLEATGGLETRLACELAAQGLPVAVINPRQARDFAKATGQLAKTDRVDAAVLCAFAQAIRPAVRPLKDTTTRELDGLVTRRRQLVAMRTQELNRLPAATSTVMRKSIERHIGWLEKRIREVEDETKRRLRGSEVWKTKDDLLRTVPGIGPANSSAMLAKCPELGRLDRREIAKLVGIAPLANDSGKHRGRRHIWGGRAELRALLYMATLSAMRFNPLIKAFAERLKAKGKHGKVVIVACMRKLLTILNAMIRTGTPWTPNLA

SEQ ID NO: 238414 - protein, 355 aa, unidentified
MKKRDKYMGMDVHQATTVTCVMDAEGKTVLETTVATEAGTLLRLMEGINGPLHVTFEEGTQAAWLYEVVRGYAKEVIVCDPRRNRLLEEGSKGDKPDARKLAQLLRAGLLRSVYHGHEEATRKLKQLVRAYENLSDDTQRTMVRIKAVYRSRGIACRGQEAYQPTQRKQWLEKLSEPGARQRMEWLYEELDQLAPLRRRAKQAVIREGGKHRAVALLRTIPQVGPLRSALIVATVDTPHRFRTKRQLWSYSGLAVVTHMSSEYQIQEDRVIGSRKPIATRGLNRNCNHRMKDVFIGAATGGAQIEPYRTYLERLEQTGMRAEMARLTLARQIAAVALSIWKKGEVFDPKKLNWTT

SEQ ID NO: 238415 - protein, 465 aa, unidentified
MTPHKDFFLDPRPPAPTLPQSPALSEALQVCNPHAAGIDIGEAEHWVAVPPGCDPQPVRRFGTFTVDLDALADWLIDCGVTTVAMESTGVYWIPLFELLEARGVQVLLIDPRQAKRAPGRPKTDRLDCKWLQRLHTYGLLAGAFRPEDQVCVLRSYLRHRQMLLTSAAHHIQHMHKALQQMNLKLTQVVSDLTGVTGMAIIKAIIAGERDPVTLAKLRNPHCHHDADDIAKALQGTWRAEHLFALRQAVELYEVYHQQMAQCDQQIKRHLETFADKSAGQPLPPKARRHKKTNEPRFDARTPLYRMAGVDLTTIEGIEENTALILLSEIGTDMHRWPSVKHFCSWLGLCPQHQISGGKVLSRRVRPGAHRVTVALRLAARSLHHSQSALGAFFRRMKARLGTPKAITATAHKLARLVYSLLQHGSAYVQQGLEAYEAQYRERKVTTMAKQAKALGYTLVPLAAQG

SEQ ID NO: 238416 - protein, 249 aa, unidentified
MFFVGIDVAKDKHDCFVFNSDGEVVKDVFTFSNDLEGFNLLKSSIPNPSDNLIVGFEATGHYSFNLNNFLVNCGYDPVTFNPLQVNLFRKAHTLRKTNTDKADAKLIGSMLSSSDATSFELVQTIDMINFYSSKINELEDKIKEIVIDMDFVLLSIPGISFTLTSIIMAEIGDINRFDTPSQLQAFTGLDPATHQSGKFVAKDVSMVKRGSPYLRWALLTAARTVAMRDPCFKNYYQKKRDEGKHQMLP

SEQ ID NO: 238417 - protein, 369 aa, unidentified
MGEYSEAFVAFDVAKTKHAVAIADGGRGSEVRFLGEVANTPVAVERLIRKLAGRYGKLHICYEAGPTGYGLHRQVQALGHACLVVAPALIPKRPGERVKTNRRDAVTLARLHRAGELTGVWVPDATHEAVRDLVRAREAAADDLRRKRQQLLSFLLRHGRIYSGGGHWTLAHRRWLARQNFEHAAQQIVFQEAIDAIEDAVQRRRRLEQQLAQIVPSWSMAPLVEAYQAMRGASFIVAVTFAAEIGDVRRFDNPRQLMSFLGLVPAESSTGATVRRKGLTLAGNRRARRVLIEAAWTYRYPARVSETLRARLEGLPKTVRDIAWKAQLRLCARYRRLSGAGKKLPVVVAAIAREMAAFFWAIGREMAPA

SEQ ID NO: 238418 - protein, 378 aa, unidentified
MPSENTVHIAIELSFSSWLVAARLTGAKKSRLHRIEGGDTGALLALIAELRSRALTQLGGAAEMACCFEAGRDGFWLHRLLTAHGILVYVLEPTSILVNRRSRRAKTDRLDAEGMLRVLAAWLGGDRQVCSMVRVPTPEEEDGKRPHRERERLVQEKLRIENRIEALLFTQGIRARPSLRSWERELTELRTGDGRTLPPLLRAELDRLRRRLVLILEMIRELEAERAAALAAAPDEAMAQKITSLQRVRGIGANFSAVLVREVLYRSFANRRQLASYVGVAPMPYQSGGMDRDRSISRAGNPRARTTLIQLAWLWLRYQPGSALATWFRERVGTLQGRTRRIAIVALARKLLIALWRYVEAGVLPAGVEIRTGTVPAA

SEQ ID NO: 238419 - protein, 410 aa, unidentified
MEVLVERVAGLDIGKKIVVVCVRMPGPGGRRVSETRTFRTMTRSLGLMADWLVECGVELAAMESTSTYWKPVLYCLEERMTTWLLNAAHIKAVPGRKSDVRDAEWIAQLLEHGLVAPSFVPEAPVRRLRNLTRYRLQLQSDRTRDAGRLEKLLEDASIKISAVASNITGTSSRAMLSALVDGQRDPVVMADLARTKLRRKIPDLVEALTGHFDDHHALIVGQLLARIAATEQALADLDLHLEVAMAPWAHEIDLLTTIPGVGRLVAWTVIAETGGDMSRFPSPGHLASWAGVAPAMHESAGRRQPVGTRHGNRFLTSMLVEAAQSASHTKDTYLASQFAHLTSRRGHNRAAVAVAHSILVSAYWMLVRDQTYVDLGPGWLTDHAAEQARTRRLVNQLEALGHTVVLDPVA

SEQ ID NO: 238420 - protein, 379 aa, unidentified
MKKYSKFVGLDVHKADIVVGTANADRGEAGYYGTIEHTPHAYLKLAKRLNKGGEEVLFCYEAGPCGYEVYRQLTKAGYDCIVIAPSLIPKKSGDRIKTDRRDAVSLARLLRAGELTPIWVPDKEQEAMRDLTRAREDMKTMERQIRQRLGGFLLRHGRVYPGRSKWTKAYFRWLESLRFETAVQQIVFQEYIDMVKDIQQRVAAMEEEMRKALTGWTLKPVVDGLMALRGVDLIASMTIIAELGDITRFESPRQLMAHLGLVPSEHSSGERQKRGGITKTGNGHARRILVEASWSYRLPARKTAHLRKKAEKASKAVQEIAWKAQKRLCSRYWHLVHKGKLHVESCTAVARELAGFIWAIACEVMGKGTVRFNELIIRD

SEQ ID NO: 238421 - protein, 314 aa, unidentified
MTQYVGIDVSKAVLDVYLLPEETARQFPRDEAGLIALSAWLGSLELGTVVMEASGGYEQSVVAALAAAGLPVVVVNARQVRDFARALGILAKTDRIDARVIAQFAQVVKPEVRVLKSADLQELEALVARRRQLLEMLTAERNRLALARHTRVKRDLKTTVEWLERRLAGIDRELGQRIRESAVWREKEDLLKSVPGIGPVNTRTLMASLPELGTLNRHGISALVGVCPFNCDSGTLRGKRRIWGGRATVRSALYMATVTATRCNAAIRAFYQRLVHAGKPKKVALVACMRKLLTILNAMLRDHKPWNESLIKTA

SEQ ID NO: 238422 - protein, 454 aa, unidentified
MSKSTKKTKTGVKKITQFEIIRPNAAGIDVSDNDAMVVAYPVNADEIAVEAFECYTRDLRRISSTLKLHNIESVAMESTGVYWIPLFLLLQEDGFEVYLVNSKHVKNVTGRKDDEGDAEWIQKLHRCGLLSASFQPDNPTRSIRSVVRHRSTLVQTRSTYLNRMQKALEQMNLKIHTVISDIDGKTGLAIINAILSGERDPGKLADLRDYRIKASREEIIKSLEGFWSDEHLFELSQCYKAYLFHNEMIRECDKKIETLLRDVIKSKNNGVMIENGKLKRKHNYKNDITIDVTNYLYTLNGVDIAGLDGITGISEITALTIYSEAGADMSRFKNEKHFTSWLGLAPNTKISGGKIISSRVPKKKHYAGQALRMAAMSLRSNKGPLGDYYRRIRTMAGAPKAIVALARKLAVIYYQMMTSKESYNPQALIEYQEKYRLQKIRNLEKYLNRLKAAV

SEQ ID NO: 238423 - protein, 364 aa, unidentified
MNAMIAGNTANQEAYWVGADVAKQTFDAALVSPGQHYPSTPLRDVPVATFARSAEGVNEFLSWLAAQLRGVSSPVSVRMVMEATGSYSVELAGWLNEKYPALAPAIANPRQTSAYLDSMQLRNKTDRVEARALAFYGAERRPAPYETLSPERLELRALSRHRDALVGEKVREQNRGEEPFASKLLASLHKRRLAQLERDIAKIEARSKDLIEMTPELRRDEKLLRSIPGVAFVTSMVVLAELGDLRRFSRARQVTAFAGLTPRRKQSGSSVNAPAVLCKRGNPRIRQALYMAAMVAVRLRGPLKDFYDRLVAKGMNGKAALCAVMRKMLTIMRAILIHETPYNPLWKKQGTKPSRPVDNAAQNA

SEQ ID NO: 238424 - protein, 384 aa, unidentified
MCVVDDKGAVVLSRKFVNDEQQIRGLVSEVDRLGGPVSWAVDLTTVYATLLLTTLADAGKSVRYLAGRQVWQASVTYRGGEAKTDAKDARVIADQSRMRGADLPVLHPGDDLITELRMLSAHRADLVADRTRTINRLRQQLVAVCPALERAAQITQDRGWVVLFSRYQRPKVIRQKGLSRLTRILADAGIRNAASIAAAAVAAAKTQTVRLPGEEVAAALVAELAQGVITLDDRIKTTDAEIEGRFRRHPLAEVITSLPGMGFRLGAEFLAAVGDPALIESADQLAAWAGLAPVSKDSGKRTGRLHTPKRYSRRLRRVMYMSALTAIRCDPHSKAYYRRKRDEGKRAIPATICLARRRTNVLYALIRDKRTWQPDSPPITESAA

SEQ ID NO: 238425 - protein, 412 aa, unidentified
MRRVIGMDIHRTFAEVVIWEQGQLRRAGRVDMTRTALEGFGKSLQASDEVVVEATGNTMSVVRVLSPFVARVVIANPLQVRAIAHAHVKTDKIDAGVLASLHAAGFLPEVWTPPAETERLRRLVARRNQVVRHRTRIKNEVHSILHAHLVPRCPHADLFGRLGRAWLKRQILPADEIAAIDRHFRELDRLAEDLELLDREIAQSGLEDPSIKRLLTIAGVNVTVAAGLVAAIGDIKRFSSPQKLVSYIGLNPRVRQSGLGFAQHGRISKSGRSHARSMLVEAAWAAAKAPGPLHAFFVRIRAKRGHQIAAVAVARKLAVLCWHLLTKEADYLWARPALVAKKIRDMELASGQPMKKGGKPGSAYAYNVKTLRNQEKTIAENAEHAYEHLVGAWQTRRPKNAVRGRLKTTRHE

SEQ ID NO: 238426 - protein, 338 aa, unidentified
MAIVFVGIDLAKNVFAVHGVNEAGKAELVRPNVARGKLEELIATLPPCTIGMEACSGAHHWARQFQAHGHTVKLMAPKFVVPYRLSGKRGKNDAADAQAICEAVQRPNMRFVPVKSTEQQGRLMVHRARQGFVEQRTATFNRIRGLLSEVGIVLPLKAATVRTHAAALLEDLPGWVNTVIGDLLSEIHRLDERIKAYDRHIAEMARQDHRAQQLMRLRGIGETTATALVAMIGNGRDFRNGRQLSAWIGLVPGQYSSGGKTRLGRITKSGDAYLRSLLIMGARALLNAAKDKTDSVSRWAVALAERAGYWKAVVAIAAKNARMAWAMLRQGEQFVMPA

SEQ ID NO: 238427 - protein, 344 aa, unidentified
MNIASIGIDLGKTTFHLVALGERNKVLVRKKFSRATLLTYTANLPAALIGLEACAGAHFLGSALRAQGHQVRLIPAQFVKPYRKSNKNDFIDAEAIAEAVTKQNMRFVQIKTQEQLDWQAMHRVRDRLMQRRTALINEIRGFLLERGLTFAARPIYLRKNLPTVIEDAEQNLSPLLRWLLDRLWQEWKQTEIDIKAITDEIERISNHDARCRRLRQIPGFGPLVSTATVAAIGNGAAFRRGRDFAAWVGVVPRQYSTGGKQKLFGISKRGNVYLRRMLIHGARAVLLRVKYDTEGFGQWVHRLAQRAPRNKVVVAIANKLARIAWAVLSSGKDYQHQPLQITAA

SEQ ID NO: 238428 - protein, 366 aa, unidentified
MQKISTMRATGRGIFKGCQLTIGLDLGDRWSLYCVLDEAGQVILEQKLPTTPEAMRQAFEKMPRSRIALETGTHSPWVSRQLAQLGHEVIVAHARNVRLIGESRRKDDRIDARTLARLARIDPQLLSPVQHRSAKAQVHLTVIRARAGLVSARTALVNAARGLVKSYGERLRKCGTQQVSREMAAGLSAELREALEPLLREVESLNERIKEYDRRIEQIAKKDYPEVELLQQVKGVGELIALTYVLTLEDPHRFRKSRDVGCFLGLRPGRRNSGQSEPQMHISKEGDRYLRTLLVQGAHYVLGPFGEDSDLRRWGQKLAERGGKNAKKRAVVAVARKLAVLLHRLWVSGEVYEPLRNSQRVVQAVA

SEQ ID NO: 238429 - protein, 427 aa, unidentified
MKYSQNEKILQITAETLIVGVDVASLTHYARAFDYRGIELGKMIRISNDAEGFLKFKSWIDDLKQKHSKDAVMIGMEPTGHYWFNLAQYLKDCGMRIVLVNPFHVKRSKELDDNNPTKHDRKDPKTIAMLVKDGRYLIPYIPEGIYSELRTAMETRCYIVKQLNGIRNRVKRWISIHFPEYSSVFKDWEGQGALIALKEFPTPKRVLEEGPQAIAAHWKKAGLRPLGKKRAAKLTAAAKASVGVREGLMAAEQSLMILLEDYEVKMRQQMQVMVLVEQLVCQIPGVEGVLKIKGIGIVTLAGFLAETGALGRFDHPKQIQKLAGLNIKENSSGKHKGKTGITKRGRKRLRAVLYRVMLPMVAKNPEFRELHRYYTTRAQNPLKKKQSLILLCCKLIRVIFALMQKQAAYDPQKMMSDIRRPDLPVAA

SEQ ID NO: 238430 - protein, 356 aa, unidentified
MSHEVKYIGMDVHKEAIVIAVLNGSGKLVMETIVETKASSILQFLHGLRGELHVTWEEGTWAAWLYDLLQPQVQEVVVCNPRRNALLKEGSKSDKVDARKLADLLRTGMLRPVYHGENGLRTLRELGRSYQTISKDLTRVMNRLKALYRGWGIPCAGTQVYAPRYREEWLSKIVQAGVRRRAELLYQQLDGLQGLRRNLRPEFLAESRKHKAAKLLRQIPCIGPIRAARLIALMQTPHRFRSKRQLWTYSGLGIETHDSAQFRFVRGQLQRSQKPQQLRGLNRNHNHEMKEIFKSTATRASCGTGPFHEFYAALLATGMKPEMARLTLARKIAAIILTLWKRGERFDAEQLKTQAA

SEQ ID NO: 238431 - protein, 337 aa, unidentified
MNYCGIDLHSNNCVVIVSDEGDRLLYQKRLPNDLAQILAALDPFCGELAGVVVESTYNWYWMVDGLMDAGYRVHLAHPAAIKKYDGLKHSGDFADAAYLAQLLRLELLPEGYVCPREERGARDLARKRMQLVRYRTAQILSIEGIMVRQTGSRMKSQAVKQLTAEQVNELAFAPDVALAMEANRAVSETLARQIESLEKRLHERVSLRPEYYLLKTVPGIGETLATTIMLETGSISRFAQVGNFSSYCRCVDSRRESNGKKKGEGNTRNGNKYLAWAFVEAANFAIRYSPQARSFYDRKKSRTNRALATKALAHKLARACYYMLRDQKPFDAHLCFG

SEQ ID NO: 238432 - protein, 389 aa, unidentified
MGEAIRATVAYLGIDVGKRSHSACGLDKDGEVVFRSDLENRPADIDRLLERAGAGALVVVDQKRNIGALVLARAFAHGNPCAYLPGYAERQARGMFPGVAKTDAIDAEVIARTARGMPGALRPLAEEPEAAASLRILSSQREFAASARTRAKNRLRAALLEADPALGRAVDPARGWQGALLAEFGSAAGCSAAGWRRFSAAARRAGAPAAGARALWEAMLASSGSGRALPAGEDVAVRMLAREIAALDADVAELEGLVADSLAGDEVYECLLTVPGIGPKTAAALVTSVDISMFRGHGELASYCGVAPADSRSGTSVRSTSPQRGGNKQLKNLLIFSCNSLIGTDNRFGRYYDECRARGMRHNKALKAVARKRLKVVYAVMRDAVPYAA

SEQ ID NO: 238433 - protein, 332 aa, unidentified
MSYRIAGIDVHKKMLAVAVADVEVDGDFQFERQKVGTTPIDLRRLANWLVEHEVDEVVMESTAQYWRPVCEALEQHWRPQRRARNSAPRLAGTLHLAQAQSNRGAGGRKRDFPDAERLVKRLVAQELTLSFVPDAEQRLWRTVMRRKYQVTRNRVQLQNRLEALLEEAHIKVSSLVSDLLGISARRMLQALADGETDPAALATLATARLRATPEQLCDAFQACPTLHPVYRRLLKLTLEELRLLEDHLRQLDQQMADLLTAHHDAVQRLAEVPGLGVDSAQQIIAEVGATAATFPSPKHLASWMGACPGNGESAGVNYSHRCPKGNRQMRRS

SEQ ID NO: 238434 - protein, 406 aa, unidentified
MMWYAGIDWADQHHDAVVIDEEGRRVATLRVAHTAEGLAKLTTFLKGIGDVAVQPDHLACLVETSHGLLISTLLEAGLPVYPVNPKTVDRHRKPAGAKTDALDAYLLARTGRSDLADLRRLTPDSPLITELKVLTRDQDTLIQSQTRLVNQLTACLKAYYPVALDLFGKLHQPTTLAFLQAFPAPAQARAASVEQIAAVLKAAGHPQAPAKAVRIAHNLRQPHLEADPVLTRAKARLMLTLVAQLQVLVPQIAAYDDEITRLFLTHSDSRAFARLPRAATRLAPRLLAEWGDDRGRYTDAASVQALAGTAPVAFQSGKFAAVHRRYACCKPLRNALHQFAWQSTQKEPWALASYQRKRREGKSHSMAVRALANQWVRIIYALWVKHEAYDAAVFLAAQQTHTPRAA

SEQ ID NO: 238435 - protein, 392 aa, unidentified
MRINVGIDIAKDVHWICAIDADGTVRIDRKLENSPAAIDTLVADLRALGGSVRIGLDVIGGIAGLAEAMLADAGFELVHVSGLAVNRARQGTAGGEHKSDPRDARVIAEQVRMRQDLRPIETATELDIEIRLLVSRRRDLVAAQTQRISRLRDLLVGIFPDLERSLDLTTKGPLHLLTKFVTPAEIREAGRKRLLRHLQGAKGVPNLDALADKALAAAARQAISVPGERMTARLVRELAAEAQAARARLVELDRELQGMLDRHPDAALIRSLPGMGVVLTAELIAEAGSLSRFRSADALAAAAGVAPVLRQSGKMRFLRRPAGGNRGLKRVFYQSAFCSLEHPDSKAFYDRKRREGKHHHQAVIALARRRVDVLWAVLRTRTPFQTAFKTAA

SEQ ID NO: 238436 - protein, 423 aa, unidentified
MCYRIAGIDVHKRMLAVVVADVATEGDYVFERRQFGANPDELRKLADWLIAQNVQEVVMESTAQYWRPVWSTLERYWSAQCRGAEGAGPMSGSLLLALAQSNRGPRGRKRDFVDAERLLKRLVAQELVLSFVPDAEQRVWRTVVRRKYQLTRDRVRLQNQLESLLEEAQIKLSSLVSDLFGLSARRMLRALADGQTDPAALAALGDRRLHASREQLCDALGAATDLKSTYRRLVGMALDELQLLERHMSQLDQEMADLLSSHQDTVRRLAEVPGLGVESAHQIIAEVGVAARTFPSEKHLASWIGVCPGEQESAGVSASNRSPKGNRLMRRLLNQCANAAVKVKGSIFEIVFRRLLPRLGFKQAIWAIAHRLSRLIWKILHQGVRYEERGPAVNQKSRSARTAKMIKELKNLGYRVELTQDPA

SEQ ID NO: 238437 - protein, 452 aa, unidentified
MARVAKRKQTSKGLRLEVVNPNAAGIDISPKEMQVCVPSDRDGECNRTFGVYTEDLHYIAEWLKACCIDTVAMESTGIYWLPVFRILKESGFEVILVNASDVKNFSGRKTDASDAEWLMMLHSYGLLKPCFQPENIARTMRNLVRHRDNLIRSASREVLHLQKAMEQMNLKLDNVFSDILGKSGQSVIKAILNGERDPKVLADLADPRCRTSKEEIEKSLQATWDEEHLFEMRQSDSLYQFYQQLIAECDAKINGIAMQYSATVDAPKTELLRSEKYNAKKNRIGFDVEKVAFELWGVNVMRIPGMSRGSLLRLVGELGADFTTKFVDVNHFVSWANLVPNNKISGGALLSSKVPKKKNPVGMIFRQAANTLKAAKNPLGDYFRHMRAKGGHLQAMVATGKKLASIFYCMVQRKLEYNEKVYCNHRKQELQNKVAYLHKRLQRMESELANCG

SEQ ID NO: 238438 - protein, 343 aa, unidentified
MKLTRVGVDLAKQVFQVHGVDRAERPAWCQRLKRGRWITELERNVEPGCEIGMEACGGAHHWARLLQSKGYLVKLIAPQFVKPYVKSNKTDATDAQAICEAMSRPSMRYVAVKTVEQQDIQAVHRVRASLIGERTAKANQLRGLVYEYGLVAPRELSSLRRAVPAWLEDATNGLSARFRALLAALYRDLQWLDERVGELDREIAALARENEAVRRIEQLRGIGPLSASALVAMVGDGRQFKNGRQLAVALGLTPRQHSSGGKEKLLGISKRGDKYIRTLLIHGARSALRTAPGKTDRLSRWALALAERSHPNVAATALANKMARVAWAMLRHGTNYEPERMAA

SEQ ID NO: 238439 - protein, 416 aa, unidentified
MSLALPEALFFTGIDWAAETHAVCVMDAGGKIAAEFTIEHSADGIALLIGRLTRYGTPGDMPVAIERPNGRLVDLLLEAGHPVVPVSPNAIKTWREGEVLSGAKSDAGDAAVIAEYLRLRQHRLKTAAPYCDETLALRTVVRSRGDLVEMRVAATNQLSALLEAHWPGAKAVFADVESPISLEFLTRYPTPAAAAHLGEKRMAAFLVKHGYSGRRPAAELLARLRAAPAGTSREALSEALRDVVLAAVGVLAALNAAVKNLDRSVAAHLGEHPDGEIFTSLPRSGQVNAAQVLAEWGDCRQAYDGPDSVAALAGVTPVTSQSGKHRDVHFRWACNKRFRAAVTTFADNSRHASPWAAKVYADARASGKDHPHAVRILARAWIRVIWPCWLNGVPYDPAQHGAAAALAEQPGKQIAA

SEQ ID NO: 238440 - protein, 316 aa, unidentified
MNTNLKKIIGIDVSKLTIDVFDGEKYYCFANNNKGFKHLLEKTEGHYVMEATGSYYMHLAYYLHSRSRVVSVANPLSVKRFSQMRFIRAKTDKQDAAMIFDYAQINNLKKWKPSQDYSVKIKAIYTAIDLMMKHKTGYTNQLEAFNHMSVIEKDVIKEIKKQISSIKKSILILEKKAEELVKSNANKTYQKLLTIPSIGKKTATMLIALTNEFLNFNNSKQLSSYIGICPRVFQSGTSVRGKGRICKMGMKQMRSTLFMCSLTAISCNKACKEMFERLTGNGKPKKVALVAVMNKLLKQAFAIANSHENYKEISLN

SEQ ID NO: 238441 - protein, 335 aa, unidentified
MTIVAHSHPFVIGVDTHARTHTYTVVVAATGQRLRTQTFPNTPAGRSRATAWAGRCSGGDTSTLWVIECIGTYGARLAHEVAETGYQVVEAPKMSAKDRRGAGKSDSIDSAAIAAAVLPLEESALRLPRQDDGSRAALRVLITARDQMTEEHTANVNALTALLRAHDLGFDARKPLTAPKIREISRWRHRAEPIAAATARTEAVRLASRVTELGAAIKANHARMTEIIQASPAAPLLDITGVGAVTAAIVIAAWSHPGRLRNEAAFASLAGVNPIPASSGNTTRRRLNRGGDRRLNQALHTATITRMTHDPETRSYVARRITEGRTKSEIRRCLA

SEQ ID NO: 238442 - protein, 314 aa, unidentified
MTKKSAAVYVGLDIAKATLQLHLQGRQHALPNSATGHRKLVTLLRSVSGAHVVCEATGGYERAVVAALQAADLAVSVLNPAQVRHFALAQGRRAKNDPLDAAVLTACGEALRPKPTPAPQAVLAELRALVQWRNYLKDQLCAARNQGEHATLRYVQKQQAKLAKHLARQMEKVEAELASALNRAPETQKQVQRLTELDGVRTLTAVSVLSQMPELGQLNRGEAAALAGLAPWTRQSGPWEGQRHIGGGRAEVRRSLYLSAVVLARQTETLLGKFYQRLRAGGKPAKVALTAVMRKLLLQMNQALKPTRDEPQAA

SEQ ID NO: 238443 - protein, 356 aa, unidentified
MVIVAIESHQGALHMQISTIGLDIAKNVFQVHGIDAAEKVVVRKRLRRRQVLEFFKALPPCLIGMEACATAHYWARELTKLGHEVRLMPAKDVKAYVKRNKNDAADAEAICEAVRRPTMRFVRIKSAEQQGQLMQHRTRDVLIRQRTQIINALRAHLAELGLVAAQGNAGVNELRAIVTDEQDTRLPIDARASAIVLAAQLEALESVIGAIEKRIKMQHRSSEASQRVEAIPGIGVIGATAIVATVADPTIFRSGRDFAAWIGLVPRQDSTGGKQKLGPISKQGDRYLRRILVVGAIAVLRRAQENPGKYPWLTQLLARRPFKVVAVARANKMARMAWALLAHGGTYRAPELAETA

SEQ ID NO: 238444 - protein, 429 aa, unidentified
MSKKAYRATYVNDVNWDQLARGREGMGISLGVDVGKFSLWPVCRWADGRFERPWRVKNPQEIPALISLVKQVSVGRKLVVAMESSGTYGDALRQALADNKIEVQRVSGKAAHDYAEVFDGVPSQHDGKDAAVVAELAALGKARPWAYQASDAWEQELAYWVEWMVAHRQMLTIWQGRLEALLARHWPEATEVLKLTSVTLLQVLKRFGNPKALVAEPEAAKLLARWGRSFLGPEKIERLLAAAGSSVGVRVEKWQQRQIQDYAELALSARREANRAQRQLCRLAEGHPVLQAQGKVVGVPTACVLWTSTGDPRKYDSAAAYRKAMGLNLVERSSGEYQGRLRISKRGSARTRQWLYFAVLRLVQTCGVRPWYEAKKARDEDDARRVVVAVMSKLAMALYYVGVHNEEFKPRRLFGRVRKRRGNPALKEV

SEQ ID NO: 238445 - protein, 340 aa, unidentified
MQIAVLGIDLGKNSCSIVGFDDGGAVVLRRRMHREGVIKLAGKLRPCVVAMEACCGAHHLGRVLRAQGHEVRLMSPEYVRPYVKSQKNDDRDAEAIAEAATRPTMRFVELKSEEQLDMQTLHRARDRLVGERTALINQLRAVLLERGITVAQGRRKLERHLAGLDAQGGLSQRMRVLIEDMRLQWCELDRRIAELDKELTEWVRNEEAARRLMTIPGIGVLNATALIAAIGQGESFARGRDLAAWLGLVPRQLTTGGRPRLVGISKRGNKYLRKLLIHGARAALPTLLESPTSLGAWLRGLMTRMHKNAVVVALANKLARMAWAVLRHGEMFRFAVSAAA

SEQ ID NO: 238446 - protein, 315 aa, unidentified
MSTISTMSFYVGIDISKTRLDVHVRPTGTAFSVSRDPDGLADLVKRLLFLMPTLIVLEATGGFEITVSAALAGAGLPLAVVNPRQMRDFARACGQLAKTDALDAKAIALFAERIQPEAQLVPDEQARALADLVARRRQVVDMITAEGHRKREAREPKLARRIGTHLTWLRQELTDIERELDGAVKASPAWRADEKLLISVPGVGNTTARTLLAGLPELGTLDRRKIAALVGVAPLNRDSGTMRGKRMVQGGRGSVRAALYMAALVAARRNAAVRALYERLRAAGRPAKVALTACMRKLLTILNAILRSRQPWKTA

SEQ ID NO: 238447 - protein, 378 aa, unidentified
MHNNNNYFNGSSQDFFVGLDVHKKNWTVCIRNSGLFLRKFSMNPSPEQLYNYLKRNYPDGTYYSVYEAGYCGYWIDRELKKFGINNIIVSPSDIPTSSRDKYEKTDPRDARNLAMHLQNRIIKGIFIPNDFHLHLRSLSRLRCQLIKQQTRLKNQIKAYLYFYGINLPENSVMLHWTGKFIEHLRRFEFSHPSGKEQLEIYITSLLEVRKQILNTVRLLRRILKENHLNEIILKLCKIPGIGFTTAATLYTELMDIKRFSSFDKLVSFVGLSPSKRSSAETEKILGISFHYNKYLRSLLVESSWIAVRKDPSLTDLYGQYIRRMSKQEAIIRIAKKLLSRIRYVWINNKEYQNYCDRLEIVNKEQKKILSKRIKLKIK

SEQ ID NO: 238448 - protein, 341 aa, unidentified
MAAIGIDTHKATLAACCVDELGTAVSERTFDNDPAGHRAVLDWAAQVGHDTVIGIEGSASFGAPLARFLMASGLTVREVPPQLSRRERIRTRRAGKSDPGDALAIARVAARESDLPPVRSADASLEVRLLVEAREDVVAEMTRVRNRLHADLRTLLPGYGVAATNLTATRHQRTVGRLLRPLAGVQADLARGRLAHLRRLGIEERALHARIGTRVAGHPLLELPGAGLLVTAKLVGEIGDIGRFRSSDAFAALAGVAPIPASSGQTQRMRLNRGGNRQLNRALHTIALAQAIHHPPARAYIDRKRAEGKTWREALRALKRQLVRAVFRLLELGACSMPVAA

SEQ ID NO: 238449 - protein, 353 aa, unidentified
MKCDKYMGMDVHQAMTVVTVLDADGKVILETMVATEAAPIIRLVQSLSGPLHVTLEETTQAAWLHDVIRHFVTEVVVCDPRRNKLLAEGSKTDKVDARKLADLLRTGMLRSVYHGHEVTRKLKELVRAYETLSGDSRRTMTRIKAIFRGRGIRTAGRGVYQPKQREQWLEMLTEPGIQQRAAWLYEQLDQLRVLRRKAKQVMLEESRKHRAVGLLKTIPELGCIRAAFIVATVDTPHRFRTKRQFWSYVGLAVVTHMSSEYEMKAGQVVRRRKPLATRGLNHNCNHRLKEVFIGAATSASQHKSYESVRERLNHNGMRAEMARLTLARKIAAIALMVWKKGVEFDPKKLNATT

SEQ ID NO: 238450 - protein, 443 aa, unidentified
MPHVRALTRGDRRRNERLTRLRSIVRREFAVVAVDLASAKQAAVVADHDSRVLGRRMFSGDAWVIDDILDWAGPVAAKAGFAGVVLGCEPTGHRWKPLLDRARARGVELVCVNPMLVHRGREEEDFTRDRSDFKDATIIAKRVTELRCYVPYVLEGHWCRLRHLGARRADQLVAAGSARQRLRDLLECAWPAVLSTASKPLDTLTWRVAMAVSTDPARIMAMGFDAFAAAVRDELPRWGGSRRNLRILRAIFDAARTPGGVATEQAAACERAAYALDDWHHALGQLADVEARMIEVLDTLELSTLVTTITGLSVVGAAAILAETGDPARFDCARTWVKHAGLCPRANESGNFHGITTVSRRGRPGLRTAAWRAIWGALTHNPVYTARYTHLTTRETNPLRPGQARTALAAALLRQLFVVVTRRVAWDPAVAAGTTKEVAPQAA

SEQ ID NO: 238451 - protein, 401 aa, unidentified
MKTVLSVDVAKNKSMIMLMNSDGEIFIDTKEINHNLEDFEKVKEEIKEINPQNLTVFMESTGTYHLPVERYFKENGFNTLVINSLTTKNNYDTIRKTKTDKKDCYRLAKLFFVNEVEYHDLSKKDLYANLKAMTRQYFYLLQNNVSCKNRYKRLINICFPELEKIFKSTRIYDDTALNFIKEFPHAEIVKEKRIDAMYNNLYKTNGRNLNFYKKLATTIKTASINSYPGVDKEHEDVKNLSYMAKIVQNNNNIINELREKMIETAKQSPYYKIINSFYGIGDTLTAEILGELGDITRFDSPKEIIAFCGLDPTIKQSGKSINVKGAISKRGNKYARYILFNCSQMVVKLGASNYPEHPVYIYYQNKKAEGKHYYESLTACSTKILRMLYSMCKNNKQFLEN

SEQ ID NO: 238452 - protein, 349 aa, unidentified
MDFYAGLDVSLEATNICVVDGDGNVVREAKLETDPDAIELFLAEWGIHLKRVGLEAFSYSAWLYTALAEKGLPVICIETRHAKAALNAMLNKTDRNDAKGIAQMMRTGWFRAVHVESEGAQTLRALLVGRKALLGKVLDMENMIRGVLRPFGLKVGEISVGRFDARVREIMAGKRDLEVIVAPLLDARSAMRLQLAKLQRLALAAARSDNAVRRMMTVPGVGALVALTFRATVDDPARFRKSTNVGAHFGLTPRRYQSGQTDRIGGISKCGDELTRAMLYEAAVAILTRIPKTFKLRLRGLRLARKKGLKRAATAVARALAVLLHKIWIDGTTFRFGAGGKRGRVAAAA

SEQ ID NO: 238453 - protein, 438 aa, unidentified
MSNKIIFNLDELFISVGIDVGADFSWMSIVLPNQQIVGKPYKILHSSMDSLTTAVSKIKEAEELYSLESRIFLESTGIYHYPLFCYLRDKGFNCSVINPIITKNSTNINIRKVHNDRFDSKKASLVGLKPDLKVSLMPSDLALNCRNLCREYYDLMDNRSAYVNKLQGELRMAFPQYLGIFSKITINTSLSLLETYTSPNAFIEADKQEIIDVIKSTARFGLTYAEKKYNAIIQAAHDANEFGYIIDSNIKRIRLCISFIRKYDEEIASIMDALHELVDSNEDTDFVKQIHLIETFKGAGFLSAISLMGEIGDFSAFSKPKQLFAYFGLDPAVKQSGKFEGTKVQMSKRGSAIARRVIHILTLQSISTSRNGEAKNPVLRDYYLKKCEAKPKLVAMGAVSHKVCNMLFAILRDNKPFEIITPQEHIKQYNAAKCDVAA

SEQ ID NO: 238454 - protein, 406 aa, unidentified
MAKNRQEVLIERPEGGRRRRMTVLATKADYDGLAEQLAAIGRPIVVGFEATGNYHRTLAHRLLTAGFEMRLISSVALARTREALHNGWDKNDPKDAQVILHMLRIGATQRYVDPLVAGINDLQELSKTHEAISRMKTQTWHRILTHYLPLYFPEIARFAGNSRSDWFLALIERFPTPASITALDREAFSAAAWPLIGRKVSKARLINDVYETACASTALPVTEDSAAVTMFRMVIAQGRSLIQQRDEIERLAHARLAEHVDYQLLRKIPGIGPINALTILAEAGDLRRFGHHRQFLKFCGLDLATCQSGTFRGRTKLSKYGNARLRRTFWMAAQVAARQRDNSFRDKLGRYTAGHADDADRRRKAMTALTAKMARVAHAVVKTGTEYRPFLERPDTRWKDPSLLVP

SEQ ID NO: 238455 - protein, 338 aa, unidentified
MKLYAGIDLHSNNSMVVIIDEQDRVMFEKRLPNELEHILRALASFKQWLVGVVVESTYNWYWLVDGLMQSGYSVHLAHPAALVQYQGLKYSADEHDARWLAHLLRLGILHEGYIYPRQARAVRDLMRRRMQLVQTRSAQVICMQTQFTRSTAKSPSGNALKRMLPDEIETLLEERNVASGVRANLEVVRTLNREIARLEREVSEQVKLAAQYEPLLSIAGIGRILALAIMLETGAIERFAGVGNFSSYARCVASKRLSNDKKKGEGNSKCGNKYLAWAFVEAAHFAVRYNPRIKRFYERKAAKTNKVVATKAVAHKLARAAYHVMRERVPFDEARAFA

SEQ ID NO: 238456 - protein, 354 aa, unidentified
MPPTTLHNRVLSINAAIDVSLELSSICIVDAAGKVVKESKVETHPDALVKFFKDLRLPLALIGLEAGPLSQWLHAGLVKAGFETVLLETRHVKKALSASTVKTDRRHARGMAQLLRMGWFRPVHAKTVGSQEVRSLLVARKQLQHKLIDIQMSIRGILRGFGLKVRKVTDKTFEGRIRDLVTGHKTLEEIAAAMLSTRATLLTEFTKLHKAVLRIVRQDEVCRRFMTTPSIGAIVAITYKSGLDDPHRLTKSKNAGPLFGLTPSRYKSGETDISGSITRVGDEMVRTALYEAANVLLLPQTRFSQLKRWGLEVAKRRGNKRARVAVARKLAVILHRMWIDGTTFRWSKTEATQA

SEQ ID NO: 238457 - protein, 337 aa, unidentified
MNKTDLSFTPCGIEVSFQTLLVDRAGKAPREFPNTPAGHRALLAWLRRSPLPLRVCMEATGLYGLDLALQLAAAGIPLLVANPRAVRHFARAMMQRSKTDLLDAAVLREFAARMPFEPWQPPSPSALNLMALAHRLQALTRMLAAEKNRLHAASLSRALPDLVRRDVVRSMQGLERAIRRLTQEALLFIADDPQLARRTELLLSIPGIATTSALHLLAELLRFGPDSHVRQWVASAGLDPRAHVSGTSVAKKPAISKAGNAHLRRALYMPALGASQHEPYLRAFYQHLQQRGKTKLQALVAVMRKLLHAIFGMFKHNAAYDGSKVYVLKPKAELLCA

SEQ ID NO: 238458 - protein, 365 aa, unidentified
MVKSISNLSSVAVVGLDTAKNVFHVHCVDEGGFVVLAKALRRAQVLTFFASLPSCLVGLEACSSAFHWARGLIELGHRVKLIPPSYVKPYVRRGKNDAVDAAAICEAVGRPSMRFVPVRSIDNQAQLMRHRARELLAGNRTRMLNALRGHLAEIGVVAAQGAQHAYELKRLLVDGADENGEVVVPDCVRQALAPLVRQIDAIDGELATIDDEIKALVKADDTARRLMTIPGIGPITASAIVATVQDMGAFASGREFAAFLGLTPRQNASGGKERLGRITPAKPSVLLGMGDRYLRKLLVVGACATLSHRKGHRDALRVWADQLLARKEVRYKFKLAAVALANKVARIVFVLMTRGGEYNEMPVAA

SEQ ID NO: 238459 - protein, 354 aa, unidentified
MQQFVGIDWATRRARWCAVTSAGVVIDEGWAPADEDGLAGLVMRLGPEASACMEMMSGAAWVRERLQAAGWTVQIADARKAKAVGSLAAKTDKLDARVLAELARRDLVPQVHVPTFADRELKERLGRRMHMVRLRTAAINRAHGVLSQFGVRLAFDRLRAPDAQELLVERGVPEVWRRSIAEAVAIARVLDERLIPIEQELRPLARADERVRLLVTIPGVGDLLGLTIAAEIGDISRFASARKLVGYSGLTPRVYQSGQKSRTGKLSRTGSTMLRWAAIEAAQQAWRPTNPWHQLYLDVKQRCGGKGNPAKAAVARKILIASWHVLARQQPFTPSRPRGATAPAPANSSCVLAD

SEQ ID NO: 238460 - protein, 348 aa, unidentified
MGSSEQSHGPLPPLPAVKPASARLDIAMLDLSSVVGIDVSKASLDVAFGLGEPVQTFPNEPKGHRALSRVLAKQPPSRIVLEATGGYEKKILLHLNDRQLPAIRVNPRQVRDFARATGVLAKTDAIDARVLVRFGAAIEPQHRPLPSKAQEKMGLLQTRRSQLIEFRTAENNRLKQADDAWLKRMIMHMIKVFDKQIEELDAESRKVIEQHRELERTYEIITSVPGVGPVTAAILIGHMPELGQLSRQAVASLAGLAPFNQDSGASRGQRHIRGGRIEVRNVLYMAALSAIYHNPVIAEDFQRLTAAGKPAKVAITACMRKLLTIINALVRDDLLWGEKKKPNQPQNH

SEQ ID NO: 238461 - protein, 340 aa, unidentified
MSNLAVIGLDIAKNVFQVHGADAEGRCVLRRRLRRAEVITFFARLPKALVGIEACPSGHHWARELRSLGHDVRLIPPQYVRPFVKTNKNDAADAEGICEAVVRPNMRFVPIKSVAQQAAMMLHRTRALLLRQRTQLINAVRGHLAEFGLVARRGARNIRELAELVRDTGSDKLPDAARAMLVLLLEQIREVQLRVQKTEHALEAWAKQSDACRRLMTIPGVGIMSATAIVLAMDDPKRFRSGRHFAAWLGLVPRQSSSGERQVLGGISKRGDGYVRTLLIHGARSLTRWRRESWRWLAGLLMRRPTNIAAVAIANKTARTAWAILAYGHQFQPTRRAEAA

SEQ ID NO: 238462 - protein, 342 aa, unidentified
MQQSIFVGLNLSLSNCHRTAINADGALVRSRSVPTSEYHLRSAFADLQGDVHVHAEASELSNWVRSIINPMVSRFVISHPRSLAWIAKDAVKDDAVDARKLAELLRLNRVHEVYYEECASRRSFKLLVVHHEQLSREQARLKSKIKARLRTLGIIRKDPRLFSEAGQIELFASIDEPLIEQMFRQSFAVLNQMLVSLAEAKTALLEFSRRLPEVRLLQTAPGVGLITACRFIAYVQIPQRFSNKRKLWRYARLGITRRESNGKPLAHPHLDAAGVGSLKDVSRKIFEAARRTKTDNSFKRFYEQSLDNTKNAVHARLSAQRKILATLRAMWLAMQPYRDDGG

SEQ ID NO: 238463 - protein, 426 aa, unidentified
MQPHYNCVCGVDVHKEFLQVCILKRDESPEILRVFNNFSGIQELKQRVEEECCECIACESTGVYWYRLYLAFEGQTRVIVGNAYQIKSIPGRKTDVRDAQWIAELAMNGLINPSRIFPKNNRELRELTRSRESTVKSRTQIKNRIHRILDSAGIALGKGVRDIFGKSGIHLIWGLLNRANADDIIATLPSARVKKKADILREILSGSLSDLQIILIKKNLEMMAHINEHIHALDEQIIARMMEQDSIRNVEIACSIPGVNVTTAVTVLAEIGNYRDFENAERLASWAGLVPSVYQSAGKNCSGKITKHGSEHLRWILVQAAKAAGRMVNTTFRKFFNRIAYRKGANTATVALARKILCILWHLLMNKELYVDPLKSAKSTKPPVVQKFSKNSSTDVQQAIDFIIECGFKVIHPGSILDQKFQGVSR

SEQ ID NO: 238464 - protein, 469 aa, unidentified
MVKAYYKEVSPERIQQVMIMKRIEHGNYNLLRLVSVGNKNTLTGGVTAMRSKNDNRQVKKRQRITDATLVIGMDIGCECNAMCLMSKEGTILGRYPKIYNSRKGFDYFHGIVESMKEKYGFTDVLIGMEPTGHYWRKIAYFAMDKQYEVRFIRTTALKHQRELDESSSAKNDIRDAYTIANIAREGKYIDTVIEDNIFRQLRTLAHTREKIQRISTGAKHALKGMLEDYFPELKHIFWSMKAKGLWALLEHYPFPEDVLKTDIDTVTELIAQSTRRKIQAHEKALQIYKAAQHSIGLQRVGDADRFRVAAYLSEIRHSETQLKEIEAQIEALLKKIPLAEYILSMPGIGTLTCGVFLGELGNPCNFTNPKQIVKYAGCDPKEHDSGQRTGRRIISKKGRWLLRKYLYFMAMRVVHRSPFLKDYYENKQKTMTKKEALCAVVIKLIKVIFALLRDKRTFTEKQSCLKQAA

SEQ ID NO: 238465 - protein, 387 aa, unidentified
MTKNKGRVVGLDVHPDSFAGAVVEGSDPAQARVLSTSTRVQLEQLERWALRHTRTEDRLVLEASGNAFAVAERLRMIGRKVDILDSHRAGKVGKVYCANDRVDAVKIARIYLSALSPIVWQPDEKTLERREIFSAYQGVVKESTRAKQQLRSMLNEHCVRLEKGFRLCHPKAITCLLKLREWTPARRMLLQQLHATLLAARARRTLLRRHMAQEIVAEETLMRLTRLCGINLITLYGVVAAVGDVRRFPHSKKLVAYLGLNPSVSQSGNFEGSGALKRHGRGALRALLIQSGKKLLEVNNPLQKWGLAVASRRGRNKAAVAVARKLCVALWHVLMGHVIGALERLDTLETKLSKFATEIGPAALRAFGYNNKADFVEKKLYVLRSYP

SEQ ID NO: 238466 - protein, 374 aa, unidentified
MDKYSVYVGMDVHARSITAQALNKDTGEIAKKRFGADHAPSDIADWALSLGDKVLIAYESGCTGVWLARELRALGVDCDVIAISTMARSTKDKQGKCDKLDARAILREMVNPLSSYSCVYIPTEAEEGLRDLCRAYASIRDDAKRKKQELSGFLMRHGHVWNERTKTGRAKRPRGRDYEKWLNSISFNDADTQSAFCIYRRRKDVAEKELADVKRELKKRSEKPDVAPYVEALTQVKGLDTLSALIVKAEFCDFKRFSSGRKVSSWLGTVPLNSSSGEKVIHGGITKAGDRYLRRTLIEAVCSIGSWGTSASKGNEGEDPVISSMARTANRRLKERYAHLTHDLGKHANKAKVAVVNELVRWCWAIGLEVQRGI

SEQ ID NO: 238467 - protein, 343 aa, unidentified
MYYIGLDVHKRTISYCVKDAAGHVHQEGKIGSTRRELDAWIKTLPQPRTIAMEATIFTGWIYDHLLPHAEKVRVAHPLMLRAIAAAKKKNDRIDAGKIADCLRCDFLPECYMTSTAIRDRRRTLRYRNLVLKQMVQMKNRISGLLMETGVSYNKQRLHKLGYFTELMSGNEEVDESIRPLLKLSRETIVRSQRLDYALVSSLERDPLLAERLKRLRTIPGVGPITALTWALEIGDVSRFQSVKQAISYCGLCSAERSSADKLVRMPISKQRNKHIQQTLVEAAKLAPRYSHELALVYERERQRGNRNRATLAVARKMVAYMLAVERRKQDFVLTGKFSGTAAA

SEQ ID NO: 238468 - protein, 346 aa, unidentified
MERYAGLDVSLKLTSICIVDRTGKVEREGVVASDPEAIATFIKLHAPHVVRIGLETGATSTWLWTELNKMGLPVICIDARHAKAALKMQINKNDRNDAVGIARIMQCGWYKEVRVKDLDSHATKALLVSRALLVKIKRDIENQIRGLLKNLGLVIGRAKMNMFAVRAAQLAEDRSELFVAVEPLLKAREAIEQQILDLDRKVLRLARNNAQVRRFMTTPGIGPVTALCFLATIDDPARFKRSRSVGAYAGLTTRRYASGEIDWTGRISKCGDKMLRSYLYEAANVLLTRVAKWSALKAWGVRLAKRSGLRKAKVAVARKLAVILHRMWIEGTEFKWSSNEAADQPA

SEQ ID NO: 238469 - protein, 407 aa, unidentified
MNTGFAVVIGLDVGKTAHHACALDPEGNKLFDKPLPQDETKLRELFTQLQNHGEVLLVVDQPNTIGALPIAVARDTGCTVAYLPGLAMRKAADLYPGRSKTDARDAFIIADTARTMPHTLRQVDRDSEVLSALKVLAGFDEDLAHETTRALNRIRSLLTQIHPALERVFAGGTLSTGLVLDLLEKFGGPTGLRSAGRRKVLRFARAHSRRDPETLVEQIFTALSEQTVIVPATAAVELVIPRVAGQVKELKEQRATVAHEVEGMLEDFPLASVLMSMPGIGIKTAAQILLAIGDGSAFESASHLAAYAGIAPVTRRSGTSIRGEFPARSGNKRLKNALFYSAWVASNHDPISKAYYDRKRAEGKRHNAAVICLARRRCNVIYAMLRDGTYYQPPTTAPTPEPTALAA

SEQ ID NO: 238470 - protein, 471 aa, unidentified
MMAGGHWVWSPKQSCSRVRVKSLARGRGDHQVSLRARTGDSALHRGPLPVASDNYQEVNMKQIRDKVGGLDVHRDSVVACTRVTLPGGEVEVAKARFATTQTGLAELTAFLMDAGVNTVAMEATGIYWRTVYYALEGLFEELWLCNAQHVKNVPGRKSDLSDAEWLADVAAHGMVRPSFVPPPEIRELRELTRYRKTQVDARAHEIQRLEKILQDAGVKLTSVASSVWSKSSRAMIEAMIAGERDSVVLADMAKGVMRKKTDRLEEALESNFGAHHAILCRQVIDHLDFLDASIATLSAEICARVLPFEPQVTLLTSIPGISVTTAQIIVAETGADMSRFPTAGHLCAWAGVAPASYESAGKKRPAGTRKGAPWLKRTLIEAARAAARTKGSYYSAQYSRIARRRGPNKAAVAVANSLLDTAWHLLSTGALYQDPGADYFERRNDPAIEAKRLQRRIEALGFAVTISEKAA

SEQ ID NO: 238471 - protein, 418 aa, unidentified
MINQHHTSMEPAAWQDWPGAPTAGIDWASTDHAVAILDHRGNQVERFTITHTTSGLRELVRRLGRAGVVEIAIERPDGPVVDALLEAGLGVVVIAPNQLKNLRSRYGSAGNKDDGFDAYVLADTLRTDRARLRPLTRDSEATMTLRMTVRARQDLVKTRVAMANQLRAHLQTTFPGAIGLFRDIDSAISLRFLTRFPGQDKAKWLSSVRFGNWLRSVGYNHLANLDRMWAHLDNAPRGTTGTQAAPRAEITLTLVATLTTLRTQINALEAQIADQLAAHPDAATFTSLPKSGTVRAARLLAEIGDARGRFPTPEALACLAGAAPSTKQSGKVKVVAFRWAVDKQLRGAVIDFAGDSHHANPWAADLYNRARARGHDHPHAVRILARAWLHIIWRCWQDHEPYNPDKHRALQRLQQQAA

SEQ ID NO: 238472 - protein, 426 aa, unidentified
MLPRRDGADRKGKGVLFIGDDWAEGHHDVVVQDGAGNTLARRRLSEGVEGIARFHELVASCWGEDREPDPARVVIVIETDRGPWVKALAAAGYRVHAVNPKQAARHKETIAVSGKKDDFFDAGALADMGRTRAHQIRELAADSDIAEAVKIAARAHQKLIWERTRHLLRMRSALREYFPAALEAYSALTLAGADTLELLAKAPDPASAARLTLTQITASLKRAGRRGDLAQRARDIQAALRAPHLAQPAVITEAYAASVQAGAAVITTLNQQVKAMEAKVSGLFRSHPDAGIYLSQPGIGDVTGARILGEFGDAPGRYASAKARKNYAATSPLTIASGKKKTVHARYIRNRHLTDALHAQAFTALTASPGARAYYDQLRARGTGHDDALRRVASRLAGVLHGCLKNGRRYDEATAWSHRARLTPAA

SEQ ID NO: 238473 - protein, 345 aa, unidentified
MEITTVGLDIAKRVFQLHGVDAAGKAVLRRKLQRSEVLAFFKALSPCLVGIETCGTAHYWAREIRELGHEVRLMLPSYVAPYVKRGKTDAADAAAICEAVTRPTMRFVPIKTAEQQAVLMLHRTRDLLVRQRTMLVNALRGHMAELGIIAPQGIARVADLMAVLLREDTTNVPALAREALRGLAAELEALDRRVKEIEVAIVRWHQDNEASRRLATIPGVGPITASAIVATITDPFQFHSARHLAAWIGLVPRQHSSGGKQRQGGISKQGDRYLRRLLVLGATAVIRHSRSKSTAEAGWLKSLLERRPARLVSVAQANKTARIVWALLVRGEAYRMPAAVPSGAA

SEQ ID NO: 238474 - protein, 332 aa, unidentified
MKKKQVIIGIDASKATLDVFIHGFNHHFIVENGPRGFVILLETCCKVANCKVRDLFFCFENTGKYTRMLSVLFHTDSIPFTMEPALKIKKSLGITRGKNDKVDSKRIAHYAYEKRENIIPTVLPGEKIDQIRSLLSLREKLIKHSTAYKNGISDLYDCYKEGENDMIKEIQQRLISNLAEEIERLEKQILIIIESDDRMWKNYKLILSVKGIGKILGFYFIAYTSNFTSFTNARSFSCYAGIAPFGYSSGTVIGKSRVHPFGNKQLKSLLNLAAQSVIQIKGEYNHYYNRRVTEHRKSKMSTINIIRHKIVFRVFAVVKRQTPYVDLYKFVA

SEQ ID NO: 238475 - protein, 409 aa, unidentified
MLFVGDDWAEDHHDVEIVDELGRTLAKRRFPEGLEGITRLHALIAEHLPEPSGPADPAPQVVVGIETERGPWAAALVAAGYRVFAINPMSSARYRERHSTSGAKSDAGDAHILAEIVRLDRAHHRQVAGDSALAEAVKLAARTHQSLIWDRTRQVLRLRSALREFFPAALKAYNDLDAADTLQLLRLAPDPDQAARLTRRQVLTALAKANRRNPEVIADGILTVLRAGELRQAPPVQAAFAAIVAAQIEVITTLNNQIDTLGEVVADHFGRHPDAELITSLPGLGVILAARVLGEFGDDPSRYVDAKARKAYAGTAPITRASGTKKVVMARYARNKRLSDALQQWAFCSMRGSAGAKAYYKTLRARKIGHQAALRQLANRWVGILHGCLKTGQPYNENLAWNHHTSAAA

SEQ ID NO: 238476 - protein, 349 aa, unidentified
MNKKIVKQVAGIDVAQKELVVCLGRMYDDWAPELYSHKTFPNHEKGFMALVLWVKKLAVEEVPVRFVMEATGVYHESLAYFLEEKGYESSIVLPNKISNYSRTLEVKTVTDKTASEAIARFGLERKLDPWKRPKKLFKNLRQLTRERDQVVQMRTMAKNQLHAEQAEAEPNPGSVTRIKQQIVFLNKQELQIKKELLVLSKQDSQVQQSVKLLCSITGVGSLTATTVLAETNGFELIRNKRQLTSYAGLDVKEKQSGTSVKGKAHISKRGNRYLRKAMHLPALTAIRHDDRFKAIFARLESKHGIKMKAAVAVQRKLLEMMYIVYKTNTPYDKQYLQRNDEAQNKIERV

SEQ ID NO: 238477 - protein, 336 aa, unidentified
MRSIAVYVGLDYHQDSVQVCVLDRLGNVLRNGSYENDALVIATVVENHGTEVHAAIESCTGAADLADELTLRGGWTIDLAHPGYVARMKQNPDKTDFTDARMLADLERVGYLPKVWLAPQEVRELRRVVRYRHQLVDERRRIKLRVSALLRDQRVRSPYASGTKGWLSWLRTTKEVSEESQWILKRYARRLMSLARDLQEVEARLTRLTKKDPLVVALKKQKGIGPVTAWTIRAEIGRFDRFRSGKQLARFCGLSPRNASSGQRQADAGLIKAGNRELRSTLMEAAHRLIRFDDPWRGFAEKLLVRGKPKCVVVAAAANRWMRWLYHQMQPALLAA

SEQ ID NO: 238478 - protein, 338 aa, unidentified
MAQNKIIGIDLAKSIFFLFEINHKGKNISRKKLPRSKLLNYIAQQNECTISMEACSSAHYWAREFSKLGHQVMLFPPQHVKSQRHRQKNDYNDAEAIAEITLYQRHHPVPHKSIEQQDIQSVIIMRKLLITERTRLINQVRGLLSEYGIIIPKGKTAFGKAIPSILEDAENQLSSMLRELIYHQHERYNYINEQVSWFDNKLHHTIQHFDNAKLLTSIPGFGPLTSQAVAVWMGSGQQFKTGRDASAAMGLVPKQNSTGGKTTLLGITKQGNTYIRSLLVHGARAALRRAKFKSDKLSLWAVDIEKRRGANRAAIALANKLMRIAWAVISKNEEYKPA

SEQ ID NO: 238479 - protein, 344 aa, unidentified
MGRLSPVTRICKVGFTMENELHFIGIDVAKAKLDVDILRPDGRHRCKKFDNTLSGHEALVRWLRGHDVNRAHVCMESTSTYMEDAAAHLSDAGYTVSIINPALSKAFAQSEGLRSKTDKVDARMLAHFCREKRPSAWEAPHPTERALKALVLRHQALTEMQTQEKNRRETAPEVQLASIDILLGCLSAELARIEKQIKDLTDNDPDMKRRRKLLNSIPGIGPKTSAVLLAYVGLKERFREARQFAAYAGLTPRQHESGSSIRRVSRMSKMGHVSLRRALYMPAMVTLYKTEWGREFRERLEKNGKNAKLIIGAMMRKLAQVAYGVLKSGRPFDATLHTKNACMA

SEQ ID NO: 238480 - protein, 348 aa, unidentified
MRFYTSTHQYYCGIDLHARVMYLCIISSDGEIVLHRNMDANPESLLKAIEPYRPDIVIGVECIFTWYWVADLCAEEEIPFTLGHALYMKAIHGGKAKNDRIDSGKIAAMLKGGMFPMAYVYPAKMRATRDLLRRRNYLVRKRADLITHVQNTNSQYNQPPFGACNIAHKCRREEVLSHFIDPDVYMSMKTNMDMIDQFAIQIRAMEKHVLDNAKNHDPQSLYLLRTIYGIGKVLSLTILYEMGDIDRFPRVQNFASYSRLVKCARESAAKRYGTAGSKIGNVHLKWAFSEAAVLFLRGNPEGMKYKKRLERKHGKAKSLSILAHKLGRATYYMLKRKNAFDMNKLLRA

SEQ ID NO: 238481 - protein, 342 aa, unidentified
MKQYVGLDVSQRETAICVVGEMGQVIFEGKAKSDPGALTSLLRKHAPHAERIGFETGAMASWLWHELRRVDLPVVCIDARHAHAALSVRMNKSDQNDARGLAELVRVGWYREVKVKSEESQKIRAILVARFRLVTIRRDIENQVRSLIKEYGLLFPRAIGLQFRHQVHELLGDDHQLLSVIAPLLSIHENVCQQQNKFDDQVRRLAKQDETTRRLMTVPGVGVVTALTFRHTIDDPSRFRSAPAVGAYLGLTPRRNQSGETDTNGKISRWGDRLLRTYLFEAATVLLYRTKKWSCLKAWGMKLAKRIGMRKAKVAIARKIAVILHCIWVDGTSFDWGQAKEA

SEQ ID NO: 238482 - protein, 402 aa, unidentified
MIYIEYLGIDISKKDSVIAHYSEKQFVKEFTMQNNQNGFNHLLKYLKQFHDMCLIFESTGIYSRAMAKFCKTNHINFVEINPLEAKFKTSSLRSWKTDKSDAHKLALLAPNLSKKSMKQSDSSIYFELRERARFHLEIENNQNRLKIELIEVLHQTFPGLENLFKNRYSIIALNIAECFSHPDFVLQKAPHTLTLDILNSTNKGMSLEKADKYSTLLLQLANKSYPNVEAESFLVQKVQIITQQLKFSIQQMNKLDNEMIDLARELNCFQNIISIPGIGELTAAMIIGELGDISNFHSHKQLNAFVGIDIKRYQSGLTHYRDTINKRGNKKARRLLFLVICNILRGQHRFENHIVDYYYKLRKQPNEKSHKTAIVACMNRLLKTIHYLVTNNKLYDYQMSPH

SEQ ID NO: 238483 - protein, 363 aa, unidentified
MVETRSALSGLKHQKEKRSMDHFAGLDVSVKETSVCIVDETGGIVREVKVASEPQALLAVLKNPAYHFRRIGLEAGPLSQWLFSALAEAELPVVCVETRHMQAVLKAQINKTDRNDARGIAQMMRVGLYRPVHVKTLRSQKLRMLLTHRQLLQSKAIAIENDLRGTLRNFGLKVGMVGKVKFEARVEELVESLPDLAGLVEPLLIVRRVLREQLVILHRRLLAIVRDDEVCRRLMTTPGVGPVVALTYRATVDVPARFRKSKAVGAVFGLTCSKYQSGEIDRSGRISRCGDEMMRVMLYEAAQSMLRSKKWSWLKAWAMQIARRRGIKKAIVALARRLAVIMHRIWIDGTEFRWTREQVAAAA

SEQ ID NO: 238484 - protein, 483 aa, unidentified
MKHKQQEKTKNAAYQPTQHHWHEMNRKQRRETMRKIQSEDLSLEVIHPDAAGIDIGNESHYVAVPPGRDSQSVRRFGCTTAELKAMADWLQQCGIRTIAMQSTGVYWVAVYDILEQAGLEVYLVNARDTKNLPGRKSDVQESQWLMKLHTYGLLRNSFRPSQEIRVMRTYWRQRNDLVQSAGRHILRMQKALTQMNLQLANVLTDISGATGQAIIKAILAGERDPHKLAAFRDPRVKASEEQIAQSLEGNWQEDLLFVLKQEHEGYEFCQKQMAECDRQLQQYLQQREDRSHGAPLPEEKRKGRRKKKRANKPQFDLREGLFRMTGTDLTRIDGIDVMTATTVISEAGYDMSKWQTENHFVSWLRLCPDNRISGGKIIGKGRLPTNNSVSIALKMAASTLRESKTYLGAQFRRLRTRLGAPIAIKAMAAKLARLVYRMLRYGMKYVDQGAAFYELRHRELQIKRLKAKAEKLGYRVTPIPVAA

SEQ ID NO: 238485 - protein, 438 aa, unidentified
MSNKVIFNLDELFISVGIDVGADFSWMSIALPNQQFVGKPYKILHNSIDSLTTAVSKIKEAEELYSLESRIFLESTGIYHYPLFCYLRDKGFNCSVINPIITKNSTNINIRKVHNDRFDSKKAALVGLKPDLKVSLMPSDLALNCRNLCREYYDLIDNRSAYVNKLQGELRIAFPQYLGIFSKVTINTSLTLLETYTSPSAFLEADKQEIIDIIKSTARFGLTYAQNKYNAIIQAATDANQFGYIIDSNIKRIRLYISFIRKYDEEINSILESLHELVDANEDSDFVKQIHLIETFKGAGFLSAVSIMGEIGDFSAFSKPKQLFAYFGLDPAVKQSGKFEGTKVQMSKRGSAIARRVIHTLTLQSISISRNREAKNPVLREYYLKKCDSKPKLVAMGAVSHKVCNMIFAILRDNKPFKIIAPQEHIKQYNSAKCDIAA

SEQ ID NO: 238486 - protein, 338 aa, unidentified
MAIVSVGIDLAKNVFAVHGVDESGKPALVRPSVPRAKLLELISSLPPCLIGMEACSGAHHWAREFQKFGHTVRLMAPKFVIPYRLSGKRGKNDSADAAAICEAVTRPNMRFVPVKSAEQQGQLLVHRARQGFVEQRTATLNRIRGLLSELGIVLPLKAAVVRREAIARLEDLPGWANTVIGDLLSEVSRLDERIGQYDQHIRTMARQSTEAQRLMQISGIGETTATALLSTIGNGRDFKCGRQLCAWLGLVPGQYSSGGKQRLGHITKAGDPYLRSLLVLGARAVLAAAKNKSDPISRWANALAQRRGYWKAVVAIAAKNARMCWAVLSRGEDFRLPA

SEQ ID NO: 238487 - protein, 336 aa, unidentified
MSHYCGIDLHSNNHVVVVIDEEDKRVFEKRLSNDLSLTLNALSPYQGTLQGVAVESTFNWYWLVDGLQAHGYDLRLVNTAAVKQYDGLKYSDDRHDAFHLAHLMRLGILPTGYIYPKAQRAIRDLLRRRLSLVRTASTQLISVQSQIWRSTGLRIKSTDLRKPDFVSPPVDEYTQQAIQAGLAVYHTTQREIDVLEKSAHQAVNLTPAFKILQTVTGIGKILGLTIMLETGNIHRFAGAGNFASYCRCVDSKRTSNGKKKGEGNAKAGNKYLSWAFSEAAHFSVRFEPLAQRFYERKKAKTNGIIAIRAVARKLARATWMMLKHQVPYNAKLMFPG

SEQ ID NO: 238488 - protein, 346 aa, unidentified
MKILALDLSKFKSVGCVYEAESGDHRYRRVNTTAQALHDLLVEVEPDRVVIEVSSVSGWVSDLVRALGIELQVVNTNGEAWRWRSVKQKHDQADALKLARLSAMNQLDLVHVPAPEIRQWRAVIKYRQHLVGRRTDIKNHVRELLVREGVILPRGRKCWSQEGCAALEEMCRSWEEVEIAELWRGELQSELQQLQVIQERLREVEAKLETLAAADDRVGLLRTIPGVGPRLAEAMVTLIDDPHRFKRGRDVGAYLGLVPRQYQSGEMNRLCRITKRGSKLLRSLLVEVSWVSLRHNPWLRSLYERMNRGSKTRKKIAIVAVARHLAIYCWAMLRDGTTWRQPCATQ

SEQ ID NO: 238489 - protein, 342 aa, unidentified
MREKRSIGIDLHRRRFTYCIRLENGRNYLSEWSLEQLPGFTQKLRRTDEVAVEVTGNTRLFYEAVAPFVARVVVVDPHQFRVISHSVKKTDPHDARNLALYLAKGLLPEVRMKEKEQAEVASLTQTRDRLVKLRTALKNKVNNLLSARGIELDKESLSSEKGLTWVLEQKVEELAHLELDVIVEQIRSLNRSIARLERVIDEAGKKLEGHRNLTSIKGIGSLGASILLSVIGNVNDFAQEGKLAAYFGIVPRVQDSNETEHRGRITKRGSKLGRTALVQCALIAKRYSPYLHRYYERIRARRGTGKAIIALARKFLSIIYHTLKNNWIFEDFPNFVLAEAKT

SEQ ID NO: 238490 - protein, 456 aa, unidentified
MGHARARKIPAQLVEDEDYQLRHERVAGIDIAKAKADVCTRLPAARDGGRRASRLEEVPATAREILALAGRLLADGVELAVMEATSDYWRIWYYLLETAGLRVQLVNPAHARQLAGRPKTDRLDAQWIARLAEMGLLRPSFVPPPEIRALRDLTRTRLQLVRDRTREWQRLEKLLEGALIKLSSVVSRLARVKTARDILEALADGQHDPGALAALIHGNVKGGRAAVTRALDGMMPGEHHRMLIRVHLDHITLLDRSIAALEDEIEAALDAIPAARGIAADGVPSPDPGPDAAVLPAVQRLAEIPGVSPALAMAIIAETGLDMTRFPTAANLVSWAGLAPVARQSGPRNRKPKKGHGDAYLKGYCTQAANGAARTETFLGERLRRLSKRLGGNRAKCAVARSILTIIWHLLASPEARFTDLGPDWHDRKTDRDRKIRAHLRQLHALGLDVTITPAA

SEQ ID NO: 238491 - protein, 387 aa, unidentified
MKKINSNVACAGMDVHYKFSNVTFRDASGKVVSRQRLDHPDRKQLQERLSRWPRGIPVVMEASFGWGWLSDLVEQAGQDVHLSNCYKVEQMRKARGWVKTNKKDADLVSLLAFEQSDWWKVWRAPPEVRNRREQMRFRGDLVGFQTAVKSRIHAIFHRHGIFHEFSDLFGGQGRKYLVELCLHNPANLPPEALLALRGQLKLLDHLRRQLADVARILHKQLLKTPLTMRLKTIDGIGLILAHVLAAEIGKIERFKNQKALASYSLLAPRSDDTGQDDPRHSPLGRHLGVRGNRTLKWAFIEAAHGAVRSGGKWRAMFDRVTSGGKKDRNRGYIKVARELVKVVYAVWAKGVDYQEIPPVRPGRQRNKKKSRSETGQLLHPMVHTLPA

SEQ ID NO: 238492 - protein, 324 aa, unidentified
MDQETGEYGERRLNHPEEAEQFYRSLSGTRVRVGAEATGNFRWFRHLMEELGHEFLLGDATAIRAACPRRQKTDKRDARHILNMLVEDRFPTVWQPPMENDHVRQLLLHRCRLVRMRTRIKNQLDSMAKNEGVLSSRVWSPRRRSEIEALPLPGWYAHRRADLLGLLDELDKRICPLDKAVQEAAEGNLEARLLMTHPGVGPIVSLAYVLTIGDWRRFPRGKQVGSYLGLIPAEESSGNSRRLGHVSKQGSSLVRWLLVEAATTAQRYDASWHRQYVRLSMGKHHGVAKVAIAHKLAVRLYWMLRSGEDYSKVMERGSHAGQSV

SEQ ID NO: 238493 - protein, 388 aa, unidentified
MPQSNDLSRSLAAFDQDRTLIAVIEMSQSNWLVAGLVPGLERRPLKKLSPDEDALLKLVQRWRNEAAQAGREIKRIVVAYEAGRDGFWLARWLRRRGIEAYVIHPSSVAVSREHRRAKTDRLDTELLMRAFLGWLRGEKRHCSMAAIPTIEDEDAKRPSREHEKLVGDRTRLVNRMKAMLARFGIRTFKPTLRKAADRLDDLRTAEGTPLPENTRAELRRDMMRLRMVREQIKEIEQERLRKLTAAPAEKGPPTMVRFIARIIGIGIETADMLVSEILSRGLRDSKAVARYAGLTGAPDESGRRRREKGLAKAGNARVRRGMIQLAWRFLIFQKDSALAQWYRARTADAHGATRKRMIVALARKLLIALWRMATTGEIPEGISLRAAP

SEQ ID NO: 238494 - protein, 360 aa, unidentified
MRIIGCDLHARQQSVAMLDTETGEVVNRTLMHEGKEVREFYSQLPRPVLVGIEAIGPMQWFLQLLDELGIECRVGDATKIRAAEPRKQKHDRRDAELILKLLLENRFPAIWRPSQELLDLRALLLHRHQWVRLRTQIQNGLQAIALANGLRRGPGLWSYDGQAKIAFLPLPPHASYRRSMLQALYRQMEEEVEQLTAQVAEQAEQRSGARLLMTHPGVGPVTALATEVFLGDPQRFADGKALASYVGLIPREYSSGAHQRLGALTKQGSPFLRFLWNEAAAHAVRRDPDLQRFYRRKLVQKGLGKSRVAAARKLGIRLWIMLRDQIDYEEFCRRGQKHSSAACAGMPEVAFGANRHRPVD

SEQ ID NO: 238495 - protein, 519 aa, unidentified
MAATDTRKRGRTRRPDVLQKPRGVIHPRVQKVGPEHFGIVAIDCAKARSKWMLADFYGNVLVPPAVVEHTREGFDAALAALAEAVRQREIRDLLVAVERTGRYHHPPQRAFAAAGHEVRTVHPFTTKQFRQPADPGNKTDDTDLAAITRAAINGFALAEPALDEFWRQFQLLTRHRRDLVIKASTLCCQIKEHLEAALPGYAACFPTLWEHPAAMTLALEVGGAEALGRTGLAGMSALLRRMQVGYQERTLRRVLQWAQGASAADAAADHHRRIAGDLEADRRRKEREIQALEREIAGLLVRTPYVLLMSIPGVNVVSAAEYAAEMGPMRHYANARCITGRSGIYPSRHQSDQVDFSGPMVRCANRRLRHSILMIADNLVCCNHYFANLAAKWRERKDDPRLIRVRVAMRFCRISFQMVAGGKVFDHPAARQRDYVLSKLITFHHQHQTPALAVQQDLAQAAAQLPTDRHAAEAKPLQEELTRIQEQRRRGPQPLGEILPAVLAALSVNVVPSSVVREQ

SEQ ID NO: 238496 - protein, 383 aa, unidentified
MRTVCGLDVHKDTIYLCILCDDGLIFEKVYGVLTKELKKMCSDMKQHGVTEVTMESTAMYWIPIWRVLEPHFCLKLVNPYFIKQLPGRKSDVKDAQWIAECTLKDLVRGSFVPPELIQQLRQYDRRIFDLDAEIVRKLAKLDGIMQRCNIRLSNYVSNTDTKSYKDVVDKLCEGVTDPEELIKEIHGRIINKHGRETILASLTGVVSEAEKDTMRQLRAELKLAEEHKQECQDKMMHICKTYYPEELRRLMTIPGIKERAVTSLIAEIGVDMTKFQTAAHLASWSGLKPRNDVSNGKYKSRRITHGNVYLRKTIIECAWGASRTKDCFFSRFSYHQIVVRKKNKMKVLVAVARKLLIAVWHVLHDGTDYVDFNPDCKAPATNG

SEQ ID NO: 238497 - protein, 370 aa, unidentified
MKTKTKTPSVVLTSPATLVSSGCTVGLDLGDRSHHVCVLDAAGQVVREGALVNTRPALARLLAEFPRATVAVEAGTHSPWISRYLTELGATVLVANPRKLHAISRNERKSDRRDAQMLARLARVDPALLHPIQHGSAQAQHDLLGLKLRDALVRTRVNLINAVRFTLKSLGHAVRNPSSESFHKTALADVPADCRSVVQPLLTVLAQVTEQIKGLERDLVQRSKKDYPATQRLQQIAGVGPLTALCFVLKIGDPQRFGRGRDVGAYLGLCPRRDQSGGTDKQLRISKCGDGLLRRLLVSAAHYILGPFGPACALREHGQRLTGAGSAREKKRAVVAVARKLAVLLLSLWKHGTDYEPRVTARPALVLTPA

SEQ ID NO: 238498 - protein, 409 aa, unidentified
MEGLIERCAGVDVHQATLVVTLRLPDGSGGRHVETRTFGAMTVDLLTVRDWLHACGVTHVAMESTGVDWKPLYYLLEDGFTLRLVNMKHLKQVPGRKTDVKDSAWLAQLLECGLLRASLVPPAPIRDLRDLTRYRKKQIEDRAREVNRLYRVLEEAGLKLASVLSDVMGRSGRRMLDALLQGTTDPEVLAELARGRLRAKIPTLRLALQAQFRAPHAFLIGQILAKIDFLEEAIGTLSEEIDRQVRPFEPVIAGLMTIPGVKRRNAVALLAETGGDMTRFATAGHLCSWGAMCPGQNESAGKRRSGRTREGNRFLRGALIESGLAAGRTKQTALQARYLRVKRTRGHKKAVVAVGHQILEIAYYIMRDGTTYHELGPHYFAARDKERTIRRSVRQLEALGYRVTIEEAA

SEQ ID NO: 238499 - protein, 388 aa, unidentified
MIYVGIDVAKDKHDCFIVNSDGEVLKNVFSFSNNISGFNLLLDSIPKDSNETIKVGLEATGHYSINLISFLCENNLDPIVFNPLQTNLFRKAHTLRKTKTDKTDAKLIALMLSSCDLQPYLNLSYHLSELKSLTRHKFRIKNQLSKLKVSLTRIVDIVFPELPSAVYSIHQKSSYALLYEFSSPLDISNAHLTKLSNILSSNSHGKYSKLKALEIRSIAKDSIGTCSSSLKFELKQTIDLIRFIKYEIDKIDFHIKSLMNEISSPIVSVPGISHNLGAVILAEIGDIRRFNSPAQLLAFAGLDPSTHQSGKFNATNTSMVKRGSPYLRWALLQAARLVAMRDTTFRNYYLKKKSEGKHHYVAQSHVAKKLVRVLFYLLTNNVSFQPQS

SEQ ID NO: 238500 - protein, 435 aa, unidentified
MEEVEDEPLFCDRVAGIDIGKATVMVTIRVPSEARAKGRQQETREFGTTRRELLALADWLRCWQVERAGMEATSDYWKPVLFTLEQEGFDCLLYQASQVKALPGRPKTDKLDSVWLARITEQGSLAGSFMPPEEIRRLRTHTRYRRKLVQMRTAQKERCEKLLEDAHLKLSSVISDIHGVSGRDMLRAIAAGERNPKVLAQMARGVMRSKIARLEQALDCSFFTGEHAFILTMMLDSIDSLTAQAGVLDARIADMCQPYQRQLEQLDEIPGFGITTAQDLIAEIGTDMNVFPTAGHLASYARQAPRVKESAGKRKGKNATGRGNPYIGGALGEASISAGRTQTFIGEKYRRLTRRMPKRKAQVAIMRSQLVIAHALLSDPDARYQDLGPDYYERKADIRRRARNHARALERLGYKVTLEAIDPGTGELHLVATAG

SEQ ID NO: 238501 - protein, 391 aa, unidentified
MTILVGIDVAKDKHDCFIMNSEGEVLAKSFTILNNKEGFDFLYKKIQSVSSSDKIKVGLEATGHYSYNIIGFLLNKDLATFILNPLHTNLYRKSLSLRKTKTDKIDSKTIAMMLLSDVSLKSYSDISYHNEDLKSLTRYRFSKVEERAKLKTSLSRLAQILFPELEKLVPTLHMTSIYQLLEEFPSASAIASAHLTRLTKLLSKASKGHYNRETAIKIREAAKNSIGSNMPAKSLELKHTIKLIRALTIDIGEIEAEISKMMDKIASPITTIPGIGRNIGAMIISEIGDFSRFSSPDKILAYAGFSPSIYQSGKLDNCYAHMEKRGSRYLRYALFHAAKLVCHWDKTFADYLAKKRAEGKHYYVAISHAVKKLVRVIFHIEKTKQAFLKAS

SEQ ID NO: 238502 - protein, 453 aa, unidentified
MRWYHEQLLRWRTGPEGRVLGLGRCVVPHELVTSINAQAVPGGTLIYCGIDWAEKTHDVALVDHTGTLIAKRHITDDAAGYRVLLDMLAEHGDTEDDPIPVAIETSRGLLVAVLRTGRRKVYAINPMAAARYRDRHSVSRKKSDPGDALVLANILRTDMHAHRPLPDDTDLARAIAVLARAQQDATWNRQTIANQLRSLVREYYPAALAAVEPWKNGLCRPEAHALLKAAPTPTRATRLTRTQLQATLKRAGRQRGIEAEADRLQEVLRAEWAHQPPLVEDALGEQMLALLIQLEAACTAADQLAKPVEEEFPQHPDADIYLSFPGLGVQLGARVLAEIGDDRTRFTDARGLKAYAGSSPMTRASGKKSSITRRWVKNDRLNAADYLWAFSAPNASPGAKAHYRHRRDDCGDWHAGAQSHLFNRMIGQLYHCLQRNELFDEHTAFPVELAEAA

SEQ ID NO: 238503 - protein, 376 aa, unidentified
MPRYFGLDLHKRYVHGYEWQVDQHKGRHFRFPNTEAGWATFVQQLHADDEVALEVTGNAFAVHDLLSPHAGKVLLTNPLELKRLGPGRHTDRKDAERRAKTLALGMMPAVWVPPPAVREVRYLLQYRDRLVRNRRRYRTQAKSVLQRHGLPIPWKVDPRQWLDRDEVNRLPQAERVILLSAIRQLEAVDADLHAVEAEIARQVADQPGVQLLLTITGVGLITAVTIWAYLGDPTRFRTAKQVTRYAGLDASVHQSGEQDHRGRISRNGSKLLRTALVEAAHAVARHDQGPFGEFFHRKQQQIGHHKAVVALARKLLIVAWRMLLTGQPYRAAKPTLVAQKQRRLVEVAQAVTDWDAVAEALWPDSLEDRHRRRRVA

SEQ ID NO: 238504 - protein, 318 aa, unidentified
MPQSTRVVGLDVSKHKVDACIRSRGLRLSTPCTPEGEAELVAWLRQYRVGRAVMEASGGYERPWAEALRRAGIEVRIVDPKRIRHFAKAAGRLAKNDPIDAETIAWFAETFSQAEAQPHDPSRAQIDRLLTARRVLTELEAQIAQQGEHSQPALAAKAYGTVAKAVRSERRKLDAAITAKIKADPAFARRVEIIKSVPGLGDQAAAGVIAWLPELGHVANEVAAALLGVAPYDDDSGERKGARHIKGGRRKLRNLLYMPTMGAATRHNPVLKAYYQRLRAKGKEAKVALIACMHKLIIILNTMLARDQTWNSPATAAA

SEQ ID NO: 238505 - protein, 418 aa, unidentified
MPNLILCSHFSKFTHYSITNILKEQRQIKIVKPNKHKASSTRLSLPPFLLYVVQFVKPLRACARMITAARMFFHFFVLHSNIKSIQSFKKSKKMNPTTLYCGIDMSAETFDICVQSADNNFAWHQLPNNTTGFKKLLQLCPVNYHFVMETTGAFHLPLCFFLHENNCSYSVVNALQIKRYIQMNLERSKSDKKDAKHICMYGIERKPEQYQMPCLQYFECKQLNNAIESLTQEIVSFNNKIYAAEKLKMDSTVVIKSYKNIIKNLKAELKKLEAELDKKLKLWQPDLAKKVQSVKGIGKRATAILIVFTQAFEHTETYQQLISYAGLSPKEYSSGKSIRGKVRISKIGGKQLRHTLYMCALNAKATNAACKQLYDRLVAKGKNKKLAIIAVCNKLLKQVFAVVKSGVMYQDNYSKNIA

SEQ ID NO: 238506 - protein, 414 aa, unidentified
MKVVYPICCGVDVHKTFLVGTIISTTNGVQPHYQKKRFSTYNSDLHRFADWLHTNNCLDVCMESTGKYWVPVFNILEERGIRVTIANPKWVKAVKGNKDDTKDSKWIGDLFRLGLVPGSFIPSKKIRILREFTRYRYKLVSMKSSEKNRFQNAFTVCNVALDSVVSDMFGKSATAITDYLISEESFNPEYCVSLLQRSLKKKSDSVLESIEGYSITDEQKFRMRIVRSHLDYITDAIAQVDSAIDAMVAEFENTISLLRTIPGVDRNSAITIISEIGNDMSQFDSSKRLCCWAGLTPGNNESAGKKKSVRITRAGVYLKPALVQVAHAAVKATDNSYYRLKYEQISKRRGKKRAIIAIARMILTAIFQMMTTGEVWNPSDLFKVDMPESLKERHLSKAVKQATKFLEKQGLTVS

SEQ ID NO: 238507 - protein, 392 aa, unidentified
MRRSASVTHMGLDIHRNFSQVSACGQEGQLLWRARLEHADRTALRAELAKWPKVPVVLEGSFGWGWISDELLAVGAQPHLSSSRKVAAWRLARGIAKSNRTDADLLGDLWLEKKKWWEVWRAPADVRDQREWLRYRMGLVQMQTQIKNRIHATLHRHGVVSRHSDLFGVAGRRWLSLLIGEECSQSLLRHSGRQTLKAHLILLDQVRRHIAQATRELRGQIKTLPAARRLMTLAGISWILAYTIVAEIGRIERFAGGRSLCTYSLLAPQAEDSGDETDQAPIGRRIGHAGRRTLKWAWIEAAHTAVRKGGRFKSIFDRRSDNGKRDRGRAYIAVAHDLCRIGYALWKNDVDYSDCPPPRPGSRSEPSRPGTGQPEHPMVPALAASAGRQASS

SEQ ID NO: 238508 - protein, 418 aa, unidentified
MKKHSKSSQRSEPSLKRTKARGPVQRDAKEVLAEVLGKLTGKLDAPAVSTSAKGNRRGNTVGPNRDRLTVGVDLGDRWSQYCILGLEGETLAEGQLRTTQEDVREFFQALTVARVVIEVGTHSAWVQDVITEWGHEVLVANPRLMEGSKRRKRKSDRIDANKLARLGRVDPQSLYPIRHRSREVRQDLVVLRARDALVSVRTELINTARGLVKSMGTRLPRCSSPSFAEKVKDAIPVEVREALLPLVQLVETVNDCIARYDQKIEELGREKYGHTTLLRQVKGVGPITSLAYVLTLEDPHRFASSREVGPYLGLVPKQEDSGDSQPQLGISKTGDRMLRRLLVGSSQYMLGAFGPDTDLRRYGLRLCERGGKNAKKRAVVAVARKLAVLLHHLWVTGDVYEPLHHTGAEIRTAQATAA

SEQ ID NO: 238509 - protein, 358 aa, unidentified
MTIVAPDTPIVIGVDTHKDAHVAVMLSALGARLAELEFRTTAAGLASVQVWAGTHGRVLAWGVEGTGSWGAGLARSLRTAGEVVIEVNRPDRQVRRMLGGKSDPIDAEAAARAVLAGHASVIPKTGDGLIEMIRLTRSTRRSAVKACTAAMNQLRSHLVTAPVALRDDLEGLTRGRLLARCAGFRAAAALDVANHTKRVLRGLARRVQALDTEVRDLTRDLRQLTQTAAPELLAQHGVGPDTAAALLTAAGDNPDRLRSEAAFAALCGASPIPASSGKTDRHRLNRGGDRQANAALHRIIVVRLKTDPETRAYMAAHLNPNASNKRHVMRCLKRYLARRLYPLILNAATTSQPTEIAA

SEQ ID NO: 238510 - protein, 385 aa, unidentified
MTVPAQFVPRNYDVFAGLDVDKKSMAVIFTDHEQLMQSLRLPYSAAQLLNYVRKRFPGQRLAFVYEAGPTGFGLYDELVAAGHPCLVVAPPMVPTAPGARVKTNRLDARKLSTALRGGELKSIHVPSPKYRELRHLVQLRDTHVQQLTATKCRIKALLLYEGIAFPADEGKEKQWSQRVLDELLALPCSEAVRFKLDQLIGTLHFNFNAAAAAQKQIRHYCKKDQELRQSIAWLKSLPGIGEIVATHLVARLGDPVLITNVRQIAGFLGLASSEHSTGDKQNRGEITRAGDSRLRNKLIQSAWVTIRRDPELREFYQRVYQRHPKKVAARKAIVAVTRKLTTRIYAVLKEQRPFVLREVSTAPLTTEETAGHRERLDGQQNEQPR

SEQ ID NO: 238511 - protein, 428 aa, unidentified
MRTSKPENRRIVNILGATMGIDIGKYNHVVTAQNWDGQRLKPLIFENNINGFNRLMAAKEDAQQCFGVTDIRFALEPTGQYWMALAEWLERRNEEVRTVQPAHTHKAKELEDNSPGKHDVKDSGIIADLDRQGKSLRLVRKQGIFAELRHLTVCRQRLKQDINREINRLYGVLDLLFPELLGLFKEHIGKGLLGLLKVTACPDKIAQLGAEAIGQLLMEKSRGHLGSERAALIVQTARISIGIKEGRQVLELGLNQILERLEFMRRQLKQVEGCMKDTLKEVPDRAILLSLPAIGEISLGIILGEIGDIRGYNSAQQLIKLAGLNLYELSSGQHHGIKRISKRGRPLLRQMLYFAALRLINVKGGFYDFYQRLTGKGKHKIPAIIAVVCKLVRVLFAMARNKQSYDDNKVGREYLTNGNINRMELALN

SEQ ID NO: 238512 - protein, 424 aa, unidentified
MEVMHERVAGLDVHKDAVVACVRIMAGGKALRECRTFETTTDGLKSLLAWLTETGCTHVAMEATGVYWKPVWNILSDGKFELILANAAHIKNVPGRKTDINDAMWIADLAACGLIKASFVPDEAIQELRSLLRARKQLVREQVSHVQRIQKTLEEANIKLDSVISDVMGASGRRMIEAMIGGVRDPLKLAALASGRIKAKPKALYDALHGRLTDHHRFMLRLHLGQYDALASSIRDVDQHVDEAIARMDKEAASSGQSPFRSLIELLSTIPGVSALGASTILAEIGRDMSRFPTAGHLIAWAGLCPGQNESAGKRKSSRLRKGAPWLKTMLVQCAWAASRKKDSYYKAQFNRLKSRRGPKKAACAVAASLLTAIYHILKDGVEHRDLGAEYLDRRSTANKTKRLLAQLAKLGYHAELKPLAEAA

SEQ ID NO: 238513 - protein, 409 aa, unidentified
MDVIYERCCGLDVHKRTVTACLLTTKPEGGRQQETRTFGTMTDDLLTLADWLAQAGCSHVAMEATGAYWKPVYNILEGQFETLVVNAYHVKAVPGRKTDVRDAEWLADLLQHGLLRGSFIPDRPQRQLRELTRYRTSLVRERASEVNRLQKTLEGANIKLASVATDILGATGRAILEALAKGTGEGPELATLARGSLRQKRAELERALKAETSDHQRLMIREHLAHINYLDEAIGRLSREIEERLRPFDHTLSHLQTITGVGRRTAETILAEVGIDTSRFPTHRHLASWAGLCPGNNESAGKQRSGHTRKGSPWLRSALVESAWAAAKTKQTYLSAQYHRLAARRGGKRAALAVAHSILVIAYYIMARGQTYDDLGGNYFDERDRRQVERRLVKRLEDLGYSVTLEAVA

SEQ ID NO: 238514 - protein, 457 aa, unidentified
MAPRHKGNPSKPKSSTPPLPVLHLHAAGIDIGARKIYVAVPPGSSARPGRAFATFTEDLHCLRDWLQECGVTTVAMESTGVYWIPLFQILEAAGVEVCLVNARHCKNLPGRKTDVQDCQWLQHLHCVGLLRGSFRPADQVCAVRTILRHRDALVRGAGRCVSHLHKALTQMNVQLHHVISDLTGVTGQAILQAILAGERDPQTLAALKDHRIKASRDVIAKSLRGDWRAEHLFTLQQTHALWQQHQTLIAGCDAQIQAMLQAFDARADLKAAPLPPAKSSHKKAQRNEPQFAAREECYRVLGVDLTAVPGFQTPTVLVLLGELGPEFAEKFPTAKHFGSWLGLCPDNRITGGKIYSVKTRHVKSRVAEALRLAAQSLWRAQNYFGDLYRRWKARLGSPKAITAMAHKLARILWHLLKFKQPFNPAVFAKEEEKMKRKKLARLQNLAASLNYQLVPQP

SEQ ID NO: 238515 - protein, 347 aa, unidentified
MRFYTKQHKFYCGIDLHTRKMYVCVLDGNGEIMVHRNLDTDADAFLELIAPYREDIVVAAECMFTWYWVADLCAREAIPFVLGHALYMKAIHGGKSKNDKIDSHKIAVLLRGGMLPQAYVYPSKMRATRDLLRRRNHLVRKRAELFGHIQNTRSQYNLPEALGRIAKPKNREGVAQRFDDPCVRKNMEVDLKMIEAYDHILIPLEREIIKIANGHDALSYHLLQTIPGVGRILALVMLYEIETIERFESVQDFASYARLVKCAKESNGKNYGTSGRKIGNAHLKWAFSEASVLFIKGNEPAKKYLDRLANKHGKGKALSILAHKLGRAAYYLLRNKVAFDQDKFLSH

SEQ ID NO: 238516 - protein, 338 aa, unidentified
MKAYAGIDLHSSTNYTAVIDDQDQRLFGKRLPNTMDAVVSALEPYKEHLKGVVVESTFNWYWLVDGLKEHGYKLHLANTSAIKQYEGLKHTDDKWDSFWLAHMLRLNILPEGYIYPKDKRPVRDLLRRRLLFVRHRTAQILSLQSSITRNLGYTMSSRDIKKLDQPDADTLFKDPFLILAAGNTIATIRFLTTRIAEIEKAVKAHIQLTPQFRYLLTTPGIGEVLGLTIMLEVGDIRRFPKVGNYSSYCRCVKSERFSNSKKKGEGNRKNGNKYLAWAYVEAANFAIRHYPEIQSFYQRKKVKTNGIVAIKALSNKLARASYYIMRDKVPYDEGKFFR

SEQ ID NO: 238517 - protein, 346 aa, unidentified
MGMDIAVLGVDLGKTVCSVVGLDTSGAVVMRRKVRRETLIALAEKLPPCVVGMEACCGAHHVGRVLTAHGHDVRLMSPEYVRPYVKAQKNDDRDAEGIAEAATRPTMRFVELKSQDQLDMQTLHRSRDRLVGERTALINQLRAILLERGYVAPQGKRKLEQFLSVLMDEQGGADLSPRIALLVADARAQWAELDRRISAFDTEFVHWVKENEEARRLTTIPGIGAIVASALVAAVGRAESFDRGRDLAAWLGLVPRQFTTGGKPKLLGISKRGNKYLRRQLIHGARAALPYVAERDTALGRWAKALLKRAHRNVAVVAYANKLARIAWAVLRRGERFAATGTPMAA

SEQ ID NO: 238518 - protein, 400 aa, unidentified
MSKHKSYLRFCGIDVAKNKHVLCIIDRDGQTVVRSRSFANDSAGYQQLLECLKSSGRTASLLVGMEATGHYWYSLHDFLTRNGYQVVVLNPIQTAMQAKKGIRKRKTDQIDAFHIAMLLKNGEYKAASVPRELGMTCRQLTRLRYRLVGQRAALKQLVWAKLHPVWPEFEGLFANAFCATGRKLLTITPTPADVLALGQTELAELIRKTSRGRYGPAQATKVWLAAANSAGMQRGLEGTRIAIHTLIQQIEAMTAIRETLEEDIRELAQRLPAYLFTLPGIDPLRAVSVFGETDPIKNFPSPAKMVAFAGLDLNVYKSGNYDAPHRHISKRGSPFLRHTFWAMAYQAVYREGDLRNYWLRKQAQGLKHKAAVTAAAIKVAQITWRILTDKRDYLPQGRQN

SEQ ID NO: 238519 - protein, 409 aa, unidentified
MMKQNIIFGIDVSSKSSTVCVVIDRIKQGETFKITNDSFGYQDLLDRLNQYLITPLVVFEATGVYSLSLQAFLEDYHIKYLKLNPLKAKKLMDNNLRHNKTDKVDAYRLALIQFNAPQKLRAPQPKEYHELQNASRYYEELTQALIINKNQLHRNLQSTFPQIESILSTSSGRVYWTIVSLFPHAQYVLNHNENQVFQSLLAISGIGRQRAHYLTTRLYALARQAYPYDNESSITIRAIQRNIANLLSLSAERDNVINYMEKLAMQANARSLNIYESIPGIAKTTAVRLVAELGDLRRFDTSAQIDAFVGIDPGRYQSGEKDSHLGITKHGNHLARKILYRTITQMETVKATQPCHITDYYDKKKRSSNSRGYKKIATASVHKLIRTMFTLIKHDQLYDYNVATHNQRL

SEQ ID NO: 238520 - protein, 354 aa, unidentified
MNTVKYIGIDVHQATSVFAVMNHQGRMVGEAILETKTQVISDFLKSQRGTLWVTFEEGTYANWLYDVIQPRVAKLVVCDPRKNKLDGNKTDKIDAKRLADLLRMNALKPVYHGQNSTRTLKELARSYVTLQQDSTRAMNRVKAMFRGRGIPCRGTSLYQPSNRKEWLAKLDGDGPRRRAELLLKQLEFLRKLRLEAQKNLVRESRKHKENKILRTIPGLGSIRVALILAFVMTPYRFRNKRQFWTYTGFSVVRRGSAEYEISQGTVTRTRKKPLPRGLNRNYNHVLKNVFKGAALTAAYRGQFQGIFNQRVANGAFPNHVLLTLARKIASITLALWKKGEPFDIERHCLSEQKT

SEQ ID NO: 238521 - protein, 352 aa, unidentified
MARLTGDVDVIIGVDTHLDSHTAAACSTTGRQLALAQIPATPAGYSQVLAWAHAAAGGGQVAWAIEGTRSYGAGLARYLAAEGEQVTEIDGSHHLGKRRAGKSDAIDAVRAARELLARPHPAQMRADGDREALRLLLIGRDHAVGAAKAARTALASILVSAPAPLREQLRRVPAKRRPAACAAWQCPPGADRLTRTTCQVLASLGQRITALAAEAAQAEAQIAGLAGGMTPGLVAAEHGVGALTAARILLGWSHAGRIRSEAAFAMLSGSAPVPVSSGRTDRHRLNRLGDRQLNCALHTIAVTRMRSHPATLAYVARRRAEGKTDREIRRCLKRYLARHLYRELNHRAPPAT

SEQ ID NO: 238522 - protein, 403 aa, unidentified
MNSVGIDISKGRSTIAVMRPFGEVVISPFEVRHTGSELSKLAKQLKSLDGETRVVMEATGNYHASVAKLLHDAGLYVSVVNAKLVHDYGNNELRRVKTDRKDAVKLANYGLDRWLTLPRYIPEEDTRLLLKNCYRQYRQYSKVQTVLKNNLISLLDTVFPNANRLFSSPIRGDGSEKWVDFVAEFWHCRCASEKSERAFTSKYLRWCRKHGYNFREAKAHTIYAEASGHIGVMPKSETTKLLVKQAVSQLRATSTALAALKQEMQSLASVLPEYPVVMDLFDVGPTLGPQLIAEIGDVRRFYSKKALVAYAGLDAPPNDSGDVTGRHKSMSKIGASSLRRTLFLVMSVYLQTAPLDEPVCQFMDRKRAEGKLYRVYMMASANKFLRIYYATVKAYLESLEHTA

SEQ ID NO: 238523 - protein, 353 aa, unidentified
MNDSTSIAWLGLDAHSKNCLLGHLDNHGTEIKWWQFATQPQLLVKHVQAIPATDKRLMLEESNLARWISQLLKPHVQQIVVCDARRNRLISHDHHKHDKRDAFTLARLLRLNEFKPVWQPTEDQRVLFKRVAKSYENAVQRQTRLKLQLKSLFQHWGLFPAGATIYSKPGRVTWLRQLPFDTLRSQALLLYELLDQALAGQSQFRRLMCQTGRQFPEIQRLSTTPGVGLVGSHLFVAYVQDPARFPKFSRLSRYCRLGIRDRSSDDKPLGYQQLDRQGIGTLKAISYRAYLQAAKRRAGPVWDFYQLSLRRTGSTTHARLNTQRKILLTLWTLWLTGREFDPKEFSRAQPIDV

SEQ ID NO: 238524 - protein, 339 aa, unidentified
MNAVGIDVSKGKSTVAVLRPFGEIVVSPFDVSHSPKELSKLVTLLKTLNGDTKVVMEYTGNYYLPIALFLRNNGFFVSVVNPILVKDYSTKSLTVRKVKTDKKDALKIASFALDRWNELSPFSAQSEARLLLKSYNRQYNQYNKLKIILKNNLIALLDQTFPGANTLFSTPTRKSDGHEKWVDFVLKFSHSECISKKSFSFFLKSYLSWCKKFGYKFSKSKAQAVYDFACNCSPSLSFSDSSALLVSNAIIQLNSINETLASLASEMNKIAATLPEYDSVMSMFGVGSVLGSQLIAEIGDVSRFPNKKALVGFAGLDASPFQSGNFNPQSRSISKRGSK

SEQ ID NO: 238525 - protein, 415 aa, unidentified
MNNTISDIDIDLTAVCEAEDDAAQAEAQPAQNESDDTYAQKMQEQLALACSSANCRYIGIDLHSNNIWLSVIVNEQRPSGSVGKVIFSRSIGTQRVDGTLPEDLIKPVIERFCKDQPHIACVEATYNWYWLADLFERNGWNLVLADPSTVSEAKTKAADDRKDAEYLADRLRYNALRYAVIMPKQLREIRDLVRTRGTAVKQRAREKIIVINKLTNLIGRKITGKELRELIKEHAEFGTEAPMLLNWGLTEEVRTILDYHLTMATNIDQGIQKLEEHINAVGRNLRYTRELQKMPGCGPVISSILASEIGSIRRFATAANFVSYCRLASTSKLSNGKSKGLGNAKNGNAYLSWAFTELATLMVRYSEAAKRHFEKLMRKYGQLRVKAIRVLAAKLARSVYQCLSKNEPFDVLRCF

SEQ ID NO: 238526 - protein, 340 aa, unidentified
MQMTTIGIDLAKSVFQLHGVDAAGSVVLRKKLRRGAVLSFLRDLDPCLIGMEACPTSHYWAREISALGHEVRLIPPSYVKPYVKRQKNDAADSEAICEAVGRPNMRFVLIKSEQQQSVLLLHRSRDLLMRQRTMILNAIRAQLAEFGIITAQGPRRVVELVKRLGEPDELALPAIARSALLALGAQLFSLAAQIGKIERQLMAWHRQNTQSQRLETIPGVGMITATALAASVPDPSVFQSGRQFAAWLGLVPRQNSSGGKERLGHVSKMGNGYLRRLLVVGATSVTRRAPTLTSRTGAWARSLLERKPYRVVTVAIANKTPRTAWALLAKGETYQPAPAI

SEQ ID NO: 238527 - protein, 327 aa, unidentified
MISIGLDVSKLKLDLGWLRDSQSGKVKTKVFNNSDKDFKKMSDWIIKNTKADPADILITLEATGVYHEPICYFLHKLGFPIYVANPAHAKSYADGMGITHKTDKSDSIMLAKFAVDRREKVRIWQPDPIEVRELKSMITRLNALESDYQREENRLGSSEFSLPSERVLESLNLMIKIIKEEIERLKSDINDHIDQHPKLKETHRNLMTIPGVGPVLARMMTLLLVSKDFKNAKQVAAFLGLIPKIKESGLMKGRSTLSKTGSPLYRAKLYMAAICASQWNPDIKRQKEILLANGKSKMQALGAAMRKLVQICYGVYKSQKEYQPQVN

SEQ ID NO: 238528 - protein, 352 aa, unidentified
MSIVGGLDIHRKQITFDYLDVDSGQVWRGQISPADREHLAAWLAERFDPDRDGLVELAVEACTGWRYVAEELARAGIIAHLAEPAETAVLRGPKRRAKTDRADARLLRELVATGRLPECWIPPAHILECRALLECYHDLRMAHTAWTQRVHAVVFHQGTPTLGVGALGTAEGRARLGQVAEQQLSPAGRVQVQTALAMLEATKGQLDVVGRQVRGAAGRVHGARVLAQRLYGVGPMTALALVCWLGGQGRFHSARKAVRFVGLDVTVYSSAGKRSPGRLSRQGPGVLRWLVYEAGKTHARQAAPDHDYYTTVKDRIDGKRATLSEARKLVRRAVHILDELGDQALALVEPRS

SEQ ID NO: 238529 - protein, 350 aa, unidentified
MSIIGCDLHSRYQQIAMLEMETGEIVTRRLEHENGEAKAFYARLPKPSLIGIEATGYTQWFERMLAEIGHELWMGDPAEIWARSVRRQVTDTRAAEHLLDLLLTKRFPRVWIPRPEERDLRQLLKHRDKLVRMRTSVKNQLHFLAMSQGICRRRKLWSARGRAELEGLSLGLWASQRRKELLELLDSLGPRIEQLDQAVKTEAERRREAVRLMEQKGVGPVTALAFVLTIGAVERFPNSRKLVSYLGLNPREHSSGGHQRLGHISKQGNEMLRWLLVEASQSAAQFDAELRRKYQRLKFRRGGNVAKVALARHLAVRLYWMLRQASSATPPVRTPGSPARTLVEATPSTL

SEQ ID NO: 238530 - protein, 356 aa, unidentified
MSTLETVHSGHVVIGVDTHKHIHVAAVLDTIGGILATLTVPTDTGGFKQLLGWANSFGTVLVFGIEGTGSYGATLTSFLRRHGHKVVEAGRPDRRQRRLNGKSDTLDAENAARSVLAGFATVIPKTADSGVEMIRQLKIAHDSAVTDRSAAIISIKAMLVHADDTLRRETNRMTPIKLARHLAALRPRNLETPADALRHALRSLARRWQHLDSEAKELRASIEALVIRTAPQLLEQFGIGVDTAAEILIVAGDNPERIHSEAAFAKLAGISPVPTGSGMTSGRHRINHGGHRQLNAAIYRTVIVRMRFHEPTIAYVARRTAEGKSKRDIIRCLKRYVIREVYHLIKVNPRTGEIAS

SEQ ID NO: 238531 - protein, 411 aa, unidentified
MDMFHHLYVGIDIGSHYHQVAICDGEGKLVDEFTITHDASGFEHFFSRLASLQENTGLSVLVAMEGLNGHARPLDSLIHQSGYPLYNVNNLKLNRFKEIFPAPAKTDRIDARYIAQLLRLSPVLNHKKEALQLVTSVPSENKQLKRLTRRRRQLVREKVMILNRMYDDLQATAPGLSNITTTRDARWFLCFLTSCSQLTQLPTMEEKSLLAIPGVGKVYARKIQSWQKQASFSADQELVSPMIIADAQRILALKEAIARLHQAISSLVSQSSLASLIQTIPGFGLISSAELAGEIGDISRFPSERSLALYLGMAPLDNSSGCQQGGRSARQVNKRAKLAMLTGAAHNAQMCPQSKAYYLKKRGEGKRHNQAVRALGRHLVRVIWSMANQERAYEIYQIKEDNKDGYLIPTP

SEQ ID NO: 238532 - protein, 396 aa, unidentified
MNTYLLRNVSKVQPQASLLPPSPTGPTLCIGLDVHSDSIAVSLAPSDTTEVRRYGLIGGAHDDVLRLAKKLQTAHPQSQLRFCYEAGPHGYPLCRFLSRHGYHCILVSPSKMPRKPGERVKTNRRDADQLARLYRAGELTGIYVPDPQDEAIRDLVRARYQVQKQQHRARQQLKMFLLRHNLRYAGTTSWTPKHLRYLASVKLPFPEQQFVFQEMINVISDATQRLERYDGQVPRVVAGWRWEPVVKALMSLRGLALLNAVTLVAELGDLRRFTTARQLMGYLGLVPSEDSTGDERRQGGITKMGNGIARRALIEAAWNYRVPARVSRELQRRQEGLNKPITDLAWRAQTRLHHRYQHLTTLKHKKAPVAAAALGRELSGFVWAIGQIVSPHPAKP

SEQ ID NO: 238533 - protein, 429 aa, unidentified
MNDREIIRLEQFRQLKKEIRGSEEHLIIGIDVAKQKHNAFVGTATGKTLLKRLVFENNKEGFEKLLMHVESISASNSHKRVTFGIEPTANYHKPLAEFLINKEHDLVLVSGVAVKRNRELLDGRWDKNDMKDSANVADLISQGKCLFYEYPTHVLRDLRSFLSLKKKFKKIEHGFRVRIRNHLLAQYFPELDRYYGHNEPENLAIVRWCLSPSKIAEMKYEDFFRLVTTRDRGLTQHRRLKAIWDSAHYSIGCSTGMAAEFEAEVLVEALKRIRETIGSINEKVIEICVLFPEYQYLLSIPGFGPVISAIVIAAIGDPFRFESGNQVLKTAGWDLNANRSGKRSDSVIPVISKRGKSDLRYALYQAALVASTRNKHVTSWFIEKLRGREKEQGIKTKMRVKLAAKLLIIAWTLMKKKESFNPELLKIKK

SEQ ID NO: 238534 - protein, 461 aa, unidentified
MKIRLGVDIACRAPHQASCADEHGVMLVTGHRFRTDPDQLETLWARLPDDVDEVMVIMEPTRNAWVALAAWFRRRGATVVMVPPEQSADLRAYYSKHAKTDRLDSKILARLPLLHPEGLHREDTLGPGDALKRAVKIRSGLVHRRTSSMARLDALLEILGPAWAAAIGSDMTLTALRLLARYAHPEKVKTLGKARLAAFLRRSSRQQWGEQRAAAIVDAAAATLRLWGTDGMDFDALAADIAVEARLALTLSEEIKALDRRIADLYEQVDPDGIVRSAPGVGTVGAPQIAGRLGDATRFANLAAIRCFAGLVPHQDSSGQAARAGGPTKAGDACLREALYMAADHARKIDPTLAARYHRLITEDGKHHNSAVCTIAAVLLTRIAACLRNGTPYQLRDTDGTVITEQQGREIIARRYTIPPAVRAARRQLTGTTRQPRRNERAEKGVAKRSEAPPVHEPACT

SEQ ID NO: 238535 - protein, 447 aa, unidentified
MQRRTVGIDLAISAVQVAQIFDDGVPVGKPLRFRLTANDLKQFVDAVVRDIPAGIPIVAVMEPTGMAWFPVASWLEGAGVRVIRVKGQRVKALRQYLSEHAKTDLADAHVLGALPSFGCRSLDPVHVPSPQHHALQRLTKQRHRYQELICSSRRRILDLIRWACPELESVLPDTTTRLTLAILADFFDPHRVLKTRRDTLARFIADNASGNHPHSGPFVDELVESLKETARRTIALHADRLDFHALQFEVRQEVEMVRLLSQNIAELEKRSELLYEQVHPSNALRSIPGIGMTLAPLLAGVIARTERFRNERQIRGFCGLFPKKNSSGGIERPGQRITKSGSDRIKRALFLAADTARKIDPDLAAVYWRLMVKKGHHHKQAICAVATRLVNRIYKTMKTGQRYILRAPDGREVSVAEAKQIVRDQFSVPEEIRRARRRQAETAPSPA

SEQ ID NO: 238536 - protein, 395 aa, unidentified
MEYILSFDIAKGKSVYCFINDRREIIIEPTLIEHNKKEFDKLFNNIKEYRKLTVIMESTSIYHLPVENYFRSKGIKTVVINPKLVKQFRDTLNKSKTDKIDCFKIARCYLGTIDKLYQKNDDYFMFNPLARQYWSLVEGQTRLKNRYKQLIEIVFPEFNILFDDLYSDLALNFIHDFPHPALFVNRRTDFLMNYLKDKNGTSQAYRFKNKVLTMKSIASNSLCYVSFDSLQVQNLVQVIEMIQYHKKEITKIKEQLINNLKNTIQFKIINSIPGFGDFSTALFLSEVGDITRFNECKQFISFIGIDSVTSQSGTSEYHGPISKTGCKFARTILFNVVTTLLQISAHTDKENPIYLFFRKKQSEGKHHYKCIIACETKLCKIIYKLCTSNCFYKNK

SEQ ID NO: 238537 - protein, 351 aa, unidentified
MMIIGVDYHPSFQTIAFLMEETGEYGEQELNHSDGEAERFYRELKERGVSVRVGMEATGHAHWFERLLAELGFELWIGDPAEIKTKRVRKQKTDREDARLMLKLLRENRFPKIWVPSPENRDLRQLLWHRHRLVQMRTRIMNQLQAVAMNEGYRWKKKLFSEKGRALLEKLSLAPWASRRRKELLELLDQLDPKIAELTAAVEQEAKKRPEVLLLRSHPGVGPITGLAYVLIIGTPDRFPCGKKLGSYTGLIPCEDSSAGRQRLGHISKQGNSLLRFLLVEASQAAARCNPDWRRRYAHLMMRREKRIAKVAMARKLAVRLYWMWRNNWQYSQFVEFGSNAGKLGTVHGVK

SEQ ID NO: 238538 - protein, 466 aa, unidentified
MTPRRTKTFRMPPQPAEPLPVQHPRAAGIDGHAAQHWVAVPPEAAPPPPADHPPNLPSHVRRFGAGTADLEALADWLTACGVTTVAMESTGVSWIPLFELLERRGFQVFLVDPRQTRQVSGRPKTDVLDCQWIQRLHSYGLLAASFRPEDQVVVLRGYLRQRHRLLRYAGQHVQHLQEALEQMNGKRAEVVSAVTGVTGLAIIRAILRGERDPLELAELRHDKCHHTESEIARALYGNWRDEHLFALRQALELYEAYQAKLRDCDDCIERHLRTFADRSGGRKLDQKARRRSRPRHEPAFDVRAALFRFRGVDLTVIEGVDRTTALTILGEIGCDLSKWPTVKHFVSWLGLCPQHQGSAGQIKSRHTRRGANPAARALRLAAQGCHHAKNALGAFYRRIQARCGGPKAVVATARKIAERVYRLLKYGEAYVRQEMAAAEEAYRARVLKGLARKATELGYPLVPATP

SEQ ID NO: 238539 - protein, 389 aa, unidentified
MKIFVGIDIAKLNHFAAAISSDGEILLEPFKFTNDADGFQLLVSKLESFDKNSIIIGLESTAHYGDNLVRYLVAEFYQVCVLNPIKTCQMRKNNIRKTKTDKVDTFVIAKTLMMQDNLRFVSFFDLDMMDLKALGRFRQKTIKQRTRLKIQLTTYVDQVFPEIQYFFKSGLHQHAVYALLKEAPSPKEIASMHMTHLANLLKVNSHGHFTKELAKELRVLAQKSVGANDSAISIQITQTIQQIELLDSQLEKIEAEMTDIMKFNDSVIMTIPGIGYINGGMILGEIGDIHRFSNPNKLLAFAGLDPSVYQSGNFQAKTTRMSKRGSRVLRYALVNAAWNVVRNSATFKAYYDAKRAEGRSHYNALGHCAGKLVRVIWKMLTDEVEFNLE

SEQ ID NO: 238540 - protein, 338 aa, unidentified
MNIVFLGIDLAKNVFQLCGLNQAGKPVYTKRTGRKELLQTLANIPACLIGIEASTGAFYWQREFEKLGHKVKVISPQYVKPFVRGQKNDGNDAQAIAVALMQPTMQFVPPKSPEQQDIQALHRARQRIVNRRTATVCQIRGLLLDRGIPIGSAVSRARRAIPLILEDAENGLSSRMRRTIAELYELFNDLGRRIHFFDKEIETVFRQSEACQRIARVKGIGPKTATAVVAAIGKGTEFKNGRHFAAWLGLVPRQHSSGDRQVLMNMTKKGDKHLRTLFIHGARAVVRVATNNDDGHMNQWVNQLKERRGFNKTTVAVANKNARIIWSMLRNETEYQVV

SEQ ID NO: 238541 - protein, 371 aa, unidentified
MKQYSTFVGMDVHKNSIEITIAQRGRNGEVRNYGKIDGTPEALDKVVRKLVSKGGPLHFVYEAGPCGYEIYRHLTAKGYDCAVVAPSRIPKKSGDRIKNDRRDACMLARLDRAGELTPVYVPFAEDEAIRDLTRAREDAKIDEKKSKQRLLSFLLRSGLRYTGKSTWSKAHMRWLSDIKMPHPSQQIVLQEYIDTITECSLRVRRLTEQIRQLLPQWRMFPVVKALQALRGVSLIVSVTTIAEIGDLKRFKNPTELMSYLGLVPSEHSSGEKTRRGSITKSGNGHVRRVLVEAAWAYRLPAKVSRVILKRQEGLPKEVCEISWKAQVRLCSRYRRLWAKGKPKQVIVTAIARELCAFMWAIANEIQVLAAT

SEQ ID NO: 238542 - protein, 317 aa, unidentified
MEAPVAGIDVSKDKLIVYFQGKLYEFTNDKRGYEEIRKILPKGCKVGIESTGVYHVNLAKYLNNEYDVRIINPFILKKFKDFRGKKSDKNDAKKLAELVVSMGSGFTTSDARELTSQWDFVIRSIARVKNRLRRDLVLLGYRDSLSKKNLEEFLRGGGDSVVLSEVRFLLEELERLEGRKREIEKELEDFVPKDSLIFTIPGIGKTLGCIILARVGDVRRFSDKKRFVAYCGLDPLVESSGKSVVSRGISKRGDAVLRRAFYLAALTAIKVNPVIKRFYEEHKGRLRGKKLIVACARKLAAITWAVLYYNKPFDASE

SEQ ID NO: 238543 - protein, 491 aa, unidentified
MNSIFQKSNPAIEKVFKNAGSPQKVMCLPIDYAKRQHTALVCNGKGEELRGPFNIHNTPAGVDFVEGIIHGLCKKHSIRKENVFFGGEDCSAIAFNFIHALLEKGYVGIGLNARDAAKERENQVASTDKLDLLGIASCLINKKWGRTLSIEYSDARVLRELTHHRRALVKARTASAYRIHHLVDQLLPGFLDEKQSGLTPFSKPSLWVMSQRFSPKQILARKNGVLAEKLRLFMVRNPKQKVTMLKDLACSVLPPPAALCSTLQVNMSHEVSVYEHLGGCIHDVNRAIAQHLAPTPGAMLTTVPGIGITSAAELYAEIGDPNRQRCIKRMSSYAGLVARLKQTGGPDKEARTQGRGRRACVPLKRTIMGIGLRMGQYGHDELKMDYQRRVNEGQDPRLTMGRRMLRICMHLIKNLDFFVPPSLMHGASREALRDYYTRSWDKVLIKWRDRSAIKQALADDAPLEQWRRMLNELYDLDLSRISPQYDRLRDR

SEQ ID NO: 238544 - protein, 368 aa, unidentified
MRKRTTLDIACPNAAGIDIGSASHYVAVPPDRDDEPVREFKSFTCELEKLVTWLTACGIDTVAMESTGVYWIPVYELLESRGFTVHLVNARHVKNVSGRKSDVLDCQWLQQLMSYGLLSGAFRPTDEICALRAVSRQRDMLLRYQARHVQHIQKALSQMNVQLANVISDIMGATGQTIVRAIISGERNSTTLARMKNARIRASEEEIVKSLQGNWRDEHLFALKQAMALFDAYGMQLIECDQQLEAMLATLQRKACGSDKPRRRSSGKNAPRFDLRMYLIGMCGVDLTRINGIDTSTALKVISEIGPDLSRFRSAKQFAAWLGLCPGTKISGGKVLSGASKRTGNRAAQALRLAAAALRTSQSALAGC

SEQ ID NO: 238545 - protein, 392 aa, unidentified
MVCVGIDVAKDKHDCFILNSEGEVLADVFTIDNNREGFETLLQRINTCASPADKIRAGLEATGHYSYNILGFLLDKGMPTFVLNPLHTNLYRKSLSLRQTKTDRIDARTIATMLMSDVDLKSYTDTAYHNEELKSLTRYRFDKVRERAKLKQSVSRLVVILFPELEKLVPSLHMASVYAVLSEFPGAKQLAEAHLTRLKAVLSDASKGRYDREKAIEIREAAKCSIGSVMPAKSLELRHTIALIRELDAEIEEVEAEIRSLMNEIQSPITTIPGINFRMGAMILAEIGDFSRFDSPDKLLAYAGLSPSTYQSGKLSATGAYAHMEKRGSRYLRYALFNATKYVCHWEPTFAAYLAKKLAEGKHYNVAISHAAKKLVRLIFALQQSGRAFQTA

SEQ ID NO: 238546 - protein, 354 aa, unidentified
MQIHTIGVDLGKTVFHLVGLNLRGEVVVRRKCSRPQLLQFTANVKADLIGMEACAGAHFVGRALRDQGHEVRIIPAQYVKPYVKTNKSDFIDAEAIAEAVGRPTMRFVPIKTDDQLDMQSLHRVRERWVIRRTAVVNQIRGLLLERGITLRQGRRHLEAALPGILEDAKARLSGALRMLISQLKHELEELANFIGEADGIMERTSRDNESCRRLLAVPGIGPVTATALIAAIGNGAAFRKGREFSAWVGMVPRESSTGGKQKLLGISKRGNPYLRKLFIQGARAVMLRGTKQSPGLKTWIENIALRKHHNVAAVALANKMARIAWVVLARGEAYRPALLTKSEQNLCGLQMMPA

SEQ ID NO: 238547 - protein, 435 aa, unidentified
MSNFIFENLFLSVGIDVGADFSWMSIALPNQTFVGKPFKILHSDLNSLALAVSKIKEAEELYSLESRIFLESTGIYHYPLFCYLRDKGFCASIINPIITKSSTNMNIRKVHNDRFDSKKAALIGLKPDLKVSLMPSELALDLRNLSREYYDLMDNRSSYVNKLQGELRMVFPQYLNIFSKVTTNTSLTLLEKYTSPDAFLQASKDEIIDSIRSTARFGLSYAFNKYHAIVQAATDAKVFGSSVSSNFKRIRLHIRFIRQYDEEISSLLEDMHQLVNANEGTDFVKQIRLIESFKGAGFLSTVSLMGEIGDFSAFNTPKQLFAYFGLDPAVKQSGKFEGTKISMSKRGSRIARRVIHTMALISISKSRDGSAKNPVLRDYYLKKCESKPKMVALGAVMHKVCNIVFAILRDEKPFEIITPEEHQKNYLKAKCDVAA

SEQ ID NO: 238548 - protein, 369 aa, unidentified
MDYQSVAYIGFDTSKTKHAVAVAEGGREGEVRYLGEIEAAPAAVERLLRKLARQYKSLHVCYEAGPTGYGLYRHIRALGQVCDVIAPSLVPIRPGDRVKTNRRDAVTLARLLRAGELTAVWVPDEVHEAVRDLVRAREAAARDLRHKRQQVLSFLLRHGRIFTGHRHWSRAHLRWLAGQAFRHPAQQVVFQDQVDAVADAQARLERLDRHLAELVPTWSMAPVVAACQAMRGVSFLVAVTFVAEIGDVRRFESPRQLMAFLGLVPCERSTGDTVRRGGLTLAGNRRVRRALVEGAWSYRHPARVTETIRVRLEGLPKAVREIAWKAQVRLSARYRRLVAAGKRAPVAVAAIAREMAAFLWAIGRVVEPA

SEQ ID NO: 238549 - protein, 405 aa, unidentified
MKVVYTRCCGLDVHKKNVVACLVTPRGSEMRTFGTMTKELLALSDWLCANKCEAVAMESTGVYWRPIHNVLEGSGMELLLVNAKHFKAVKGRKTDMKDAEWLADLLRHGLLTGSFVPERGHRELRDVVRYRRGLIQDRAREANRIMKLLEGANIKLKSVISDVLGVSGRAMLELLAAGETDPGRIADGATTNLKAPREQLELAVEGLMSDDQRIMLVTQLHHVDFLTERIEVLNARIEERMHPFDEVITRLDGIPGIGRRGAEELIAEIGVDMSRFPSADHLCSWAKVCPGLNESAGKRANTSTGKGNRYLRSMLAEAAWAASKSRDTYLSSLFWRIAGRRGKKRAVIAVANSILRIVYYMLRDTTEFKDLGGAYFDERSFHAVTRSSVKRLERLGWEVHLVKVA

SEQ ID NO: 238550 - protein, 350 aa, unidentified
MTIVGGLDVHRKQITFDYVDTATGLVRCGQIRPATRKTWRGWLAEHCPDGDGELAVEGCTGWRYVVEELRAAGAGAHLADPAETAARRGPKRRAKTDQADARLLRTLLLQGRLPESWIPPAHVVEVRTLGRLYRALMEERRAWQQRIHAQLYHQGCPPIRTLLSAAGRDSLATAELSAAGRQYVDAALRRIDELTAEIIPLRTQLVDFARRQPGCRALQARHYGVGWLCAAIIWAEIGDARRFHSSDQLVRFAGLDVTVYSSDNKRAPGHLSRQGSPELRWAAFEAAKSAARRGSPDHNYYRRLAARRDSGKKPTLAVERKLLRRCYHSLRALGDAALAPPAPEPHKDAA

SEQ ID NO: 238551 - protein, 345 aa, unidentified
MEPMYYIGLDVHKRKISYCVKDNSGKVYAEGSLPATRTDLDLWMKTLPRPWSAAMEATMFTGWIYDHLKPHAAALKVAHPLMLRAIAAAKKKNDRVDANKICDCLRCDFLPECYVASTAIRERRRTLRYRNPLVRQMVQMKIKISSLLMEAGVSYNKQRLHKAGYFRELLASNPDIDEGLRALLRQCREAVVRLGKTEAALIRSLEHDRLLAERVERLMSIPAIGPITALTWALEIGEAQRFSSIKKAISYCGLCGAEKSSGNTVQRTPLSKQRNKHLQTTLIEAAKMAPRYSPTLALLYDREKLKGNANRATLAVARKLVAYLMSVDRGQCHFLVLDQETRTAA

SEQ ID NO: 238552 - protein, 343 aa, unidentified
MKISRVGVDLAKNVFQVHGVDRSGHSVWKRQLKRSSWLRMLSEKLEPGCEIGMEACGGAHHWARELRSRGYEVKLIPPQFVKPYVKSQKNDATDAEAICEAMSRPSMRFVGIKTLEQQDIQAIHRVRSSLIGHRTAQANQIRGLVAEYGLVAPKQLGPLRKAIPDWLEVAENGLTDRFRALLHGLWEALLQLDERIGDLDQEIECIANTHPDATRLKQLRGVGPLIATALVARFGDGRHFNRGRQAAASVGLTPRHHGTGGKNRLMGITKQGDPYLRSILIHGARSVVSTAHRKEDRLSCWATELKERSHMNVAAVALANKTVRVAWAMLRNGTDYEPEFAVA

SEQ ID NO: 238553 - protein, 310 aa, unidentified
MESIIVGVDISKDQLDVFVLPSKASFSVPRDSAGLDSLVAQLSSLQPKLVVMEATGGLETVVAAALAAAKLPLAVVNPRRIRAYAQALGRLAKTDRLDAETIALFGEAAKVEAQAVPDEAAQTLGEFVARRRQIVEMMSSERNRKRTLTRSRLVRGADRIIAALQKELSDLELEIDETVRGTPAWREKDELLQSVPGVGPNTSSMLIAELPELGTLTRRKIAALVGVAPMADDSGQHRGRRHIRGGRAQVRSGLYMAALVGRRHNPVLAAFYQHLRAVGKTPKQALTACMRKLLVILNAIIRDKRPWQTA

SEQ ID NO: 238554 - protein, 461 aa, unidentified
MNKKTNMPKKPHPQPTVKKKAVTSESHRYDPAIWDMINPHAAGIDVHSEEMWVCVPADRTERTVRKFGAYTNDLYAIADFLRTCRITSVAMESTGVYWIPLYQILEERGFTVCLTNARHLKSIAGRPKTDRLDCQWIQRLHSYGFLKTSFRPADEICRIRAIQRHRGTLIQEASRHILHMQKALDQMNLKLSKVLTDITGVSGMASIEHIVKGERNPKTLAAFRDHRCKRSEAEIANALTGDYRDEHLFVLAQALEGYRFVQTQRQACDREIEARVTALDKQVDASQTPPLPRPQVSRSRRANTIQFVGDGHTLLYELFGTDVTAIPGLDVTNSFVLLSELGADLQAWERGANFVSWLGLSPTAHSSAGRVKSTRTNTVKNRASQVFQLAAQSAGRSKTALGAFYRRMKARIGAPKALTATARKIALIFYQMVTKREPYREASEVAYTQQQKDRVVTRLKR

SEQ ID NO: 238555 - protein, 338 aa, unidentified
MPLYGGIDLHANNSVVVLLNEQDQVIYQRRLANHLPTILEPLAPHQADIMGVVVESTYNWYWLVDGLMEAGYRVHLANPAAMQQYNGLKYTNDHSDARWLAHVLRLGVLPEGYIYPKAERAVRDLWRKRAHLVRQHTAQVLSVQNLMARNTGSRFSAKRLVDLTPADLQGMLPEAAHVLAVTSSLAVVHCLGQQIKTLEKTVNTCLKPTPAYAQLQTVDGIGTTLAQTIVLETGEIGRFPTVGHYASYCRCVGSTKISNGKRKGQGNIKNGHPYLEWAYMEAAQFAIRFSPTVQRFYQRKQAKSHLMIARKAVAHKLARACYDILRDLVPFDVHKAFG

SEQ ID NO: 238556 - protein, 340 aa, unidentified
MKHIGMDVHSTTTDACVRNARGVIVLQRRIQTTQNELIDFVASIQGQKRVVVEEDQMADWVTRLLQPHVDEIIRCQPQYNKLISGSEDKCDKMDARALSELLYLNRVKPVHHPGMKYRILREAVRAYWVASRDLTRAKNRLKGWYLFNGLYESGRSIYSVRNCSKRLKAMQQEGRNTELAELLYEQMDACRLIKAKHIQMLRKTARPVKEQVQLVTTMPAIGPISGYTLVSLLEDGWRIPNKRKLWRYAGLSLRRYESRDFGIKGASKSGNRLLKRVAMSAAITIVARGESNGLLALWERDIRQNVSPKRARRNLARKIVVIAQHLLRSKQEYIDERIKA

SEQ ID NO: 238557 - protein, 354 aa, unidentified
MEIKYIGMDVHKEAISIAVMNGDGKLVMESIIETKAITILQFIQGLRGALHVTFEEGTWAAWLYDLLKPHVTKLVVCDPRKNALLKEGNKSDKIDARKLADLLRGGYLRSVYHGENGLRTLKELSRSYLTISKDLTRIMNRLKAIYRGWAIPCEGQQVYDPRHRAEWLDKIREAGVRRRAEFFYQQLDALQALRQEVRRDLLAESRKHDATKRLRQIPCIGPIRAAQLVALMQTPHRFRTKRQIWTYSGLGLETHDSAQYRYVEGQLQRSKKPQQLRGLNENHNHDLKNIFKGAATRASSCPGPFHDFYEALRAKGMKPTMARLTVARKMAAITLIIWKKGVSFDAKHLKQQAA

SEQ ID NO: 238558 - protein, 342 aa, unidentified
MQIRSVGIDLGKTTFHLVALGTSGKVLVKKKFSQKQLLAFTAKMQTSLIGLEACAGAHFLGRALKQQGHDVRLIAAQFVKPFVKSNKNDFVDAEAIAEAVERKNMRFVPIKTDDQLDLQAMHRVRDRLVSRRTAVINQIRAFLLERGMVFAQKPAKLKAAMVDVLENADNTLTPMIRNLIGMLWDEWKTVEQQIDELTDRLEQIAESDAGCCRIRQIPGIGPIVATAIVAAIGNGAAFRKGRDFSAWLGLVPRQYSTGGKAKLLGISKRGNIYLRKVLIHGARAAAMRIKRDRFPIGAWMNALEARAPRNVLVVAMANKLARIAWAVLSSGEDYRPAVNAAA

SEQ ID NO: 238559 - protein, 312 aa, unidentified
MPEQDTRDYVGLDIAKSQLDYAITDADEARIDYTDAEVKQWIEKLRRLPRPCVVCEATGGYERRVVQALMAADIEVCLVMPGRVRAFARAEGLLAKTDRIDARLLRRFGQKMVPRSYCLAAPEVKELRGLLDYRRLVVGQLAELCSRREVAVDVLQRLLASHQKMLEKALEKTDARIAAHLKKNAELHAKSQRLQEVTSVGPVLAATMLAHVPELGQLTDKTLSAVIGVAPHPQDSATTSRPRHVRGGRGIVRRVLYMAAVCAARFNPILKIFYQRLRAAGKPAKVAIVAVMRKLLCLLNRLLADPNFVLAG

SEQ ID NO: 238560 - protein, 325 aa, unidentified
MQNQIIIGIDVSSATLDICVSNTDGQHSFVINNEVKTICQFFKPYKECLIIGMENTGRYNWALYEAFKETSHRIFVIPPLHLKKSMGLIRGKNDKIDAIRIAAFIAKNHNELPQWKPSSQAVQKLKILLTERNSRVKAKRQLLKQQYDYAKMKHLGMDKYLMGLNKQELALVNKQITAIEKAIESLIKADEPMHSQAQLIRSVPGAGKVLCWMMLAKTESFTTITEPRKMACYSGVVPFSSQSGTSIRGKNRVSCYADKAIKATLHLAAMSAIRLENELREYYLRKIAEGKNKMCALNAVRNKIVHRIFAVIKNQTPYQNHLLLS

SEQ ID NO: 238561 - protein, 377 aa, unidentified
MHSENIAAYIGLDVHKETLAVAIAAPERLGEVRYYGTINNEAQAVRRLFQKLQGLYGNILSCYEAGPCGFGLYHQLTAMNIKCQVIAPSRIPKSPTDRIKNDHRDAISLARLLRAGELTPVWIPDLTHEAMRDLIRARAAAKRDSRVARQRILSMLLRTDKRYAGKHWTGKHRTWLANQSFSQPSQQIAFQHYCQSLEQIEDRILQLDQKISRLLPEWSLCNLVCQLQALKGVGQLIAITLVAELGDFSRFSNPKQLMAFLGLVPGEYSSGNSIRPRGITKVGNSELRRLLYEAAWSYRTPAKVGAWLIYYRPDSVTQYSKDIAWKAQQRLCSRYRTLTAKGKKSQVAITAVARELTGFMWDIALAAQSSFSQQKQN

SEQ ID NO: 238562 - protein, 342 aa, unidentified
MKNLIIGVDLATKEIQVCVYANKKVHSNREMTPSQFSDYLANLSPSLIVFESCAGSNYWNQLATELGHQSRLISPRLVSVIRQNQKTDKNDALAIIQASQLPDIKFVSGKTNSQQQAQSMLKLREQAIKQKTALKNQLKGLMREFNLPVGRSHQSFILMIELTLEDAENGLKSEFRHMLNTSLDLYLVLCKAIESYDDLLNQWVCQSSECKKFMKIEGIGKLNAMHLYIGLDSGELGQFKKGKDAAACIGLTPLQHSSGGKVKLGSIGKRKNTSLRSLLITGAMSVAQQVVKREPRTSKEAWLKSLIDRRGKKCAAVALANKNVRTAFSILRNQTEYRAVTL

SEQ ID NO: 238563 - protein, 349 aa, unidentified
MKILAIDLGKTKSVACVYDVDSGSATFRKIPTAADAIRGLLTEHRPDRVVIEVCPAAGWIGDLVSCGCTELQLANTAAPAWRWSNTKRKTDRDDALRLAQLSALNQLPQVPATPRPTRQWRALIRYRHHLVCRRTQIRNRIRALFDREGLVLPQGKICWTQNGTAALRKYACDVKEVDDDDLWRGELDCELDALQSVDELITRVESKLNVLEQKQAKCRLLRTIPGVGPRLAEIVVAVLGDPHRFQNSKHVGSYVGLAPRQYQSGDSDRKGHISPQGNGLLRAMLVEVSWVSLRYNDWARSVYERVRRGSPARKKIAIVAVARRLLVRCWAMLRDATCWKQPTIAASRG

SEQ ID NO: 238564 - protein, 349 aa, unidentified
MSQTAQTAVAVIGIDIGKNSFHIVGHDERGAIVLRQKWSRGQVEARFANLPPCLIGMEACVGAHHLSRKLNGLGHDARLMPAKYVRPYSKGQKNDFRDAEAIAEAVQRPTMKFVATKTADQLDLQALHRVRERLVSQRTGIINQIRAFLLERGIAVRQGHRFLRAELPRILATPPDVLSPRMARVIEDLAGDWRRLDERIESLSSEIEAVARQDAGCERLMSVPGIGPIISSAMVAAIGAGDAFTKGRDFAAWLGLVPRQMSTGDRTILGKISKRGNRYLRVLFVQAAWAVLIKPKSWERHGLKPWIEAAKKRLHHNVLAIALANTLARIAWSVLAHGRNFEVSKIQTA

SEQ ID NO: 238565 - protein, 360 aa, unidentified
MDSVYYLGLDVHKKAISYCLKQSDGQIVREGSVAARRGALAAWVAQLPGPWKGAMEATLFSGWIYDFLLPHALSLEVAHAAMIRAIAASKKKNDRVDARKIADLLRCNLLPVCYMAPAELRQLRGLLRYRNLMVREAVRMKNKTAGLLMEAGAEYNNGRLDSKGYFQELLASVEHVPEPVKELLRMSRAARDLFEQAQRRLVQGLLNNALLKERVARLRTIAGVGEVLALSWALEVAEPQRFPTVGQAVSYCGLTSAQVSSAGQEHRAPISKQRNKHLQTVLVEAAKVAPRWNPRLKEVYERERGRGNPNRATLAVARKLVAYLLAVDRSGKPFQARAAGADTTNTTENGIKEVAAMATL

SEQ ID NO: 238566 - protein, 368 aa, unidentified
MQKDTKTQTATSSKKLRDCPAGSTVGMDIGDRWTHVAVIGLEGELLCEERIGSKGPEVRRCLSQLPAGVVAMEVGTHSRWMAKVARECGHKVLVANPRQLRLIYGGDNKHDRLDAQKLARLARVDWRLMKPIEHRPAEEQADLARIGVRESLVEMRSAAVNLIRGMVKAAGARVKSCSTESFVEKAADQIPEELRNALAPMLEQIEELNERIAECDEMIEHVARTKYPEVELMMQISGVGWLTALTFRLTISDPHRFERSRDVGCYLGLRPKRSQSGEQDPQLGITKAGNERMRRLLVNCAHYIIGPFGADSDLRRWGLKLCEQSRARGAKQRAVVAVARKLAVLMHRLWVSGEAYEPLRANGKSLAA

SEQ ID NO: 238567 - protein, 433 aa, unidentified
MLKLNYMSTLFVGIDVSSKTNAVYAMDFEENKYISSSFGNNQPGADQLVNMIAECMQKHKNLDTVLIVLESTSVYSVHISNFLSASEVLMPYRPYVFCVNPKAASNYRKSYIGMEKTDPTDAYLIADFGRVGRTKKLEPWRGGQFISLKRLTRHRMHLSECITREKTYMVSNLYLKFSELQLLEGDDKPFGSLYGATSSAVLTEFLSPQEIIDMPEEELLTFLAGKSRNRISDLSKTSELLRKAARDSYRLDKCMYEPLSISLASSFNCIHAYQKEIKLIEQAIEKCINGMNPNALLILQSIPGIGPIWASGILSEIGDITVFHSSDALAKYAGLYWPKGDSGDFTSEDNKMSKAGNPYLRCYLGEAANSVRKHIPEYADFYARKYAEVTKHQHKRALALTSRKFVRLVFGLLVKNQLYTGEKLDTEYNIESN

SEQ ID NO: 238568 - protein, 365 aa, unidentified
MLYLGIDQHKRQLTVNLRSEDGSVVLKRQVSTQWERVRAFFADLAEKARPEGGFWAILEVCGMNPWLLEMLEEYGCGEIVVTQPTTRSKQKTDRRDASQLSHMFWVHRQQLAGGKHTSGLRRIEPPTAQQAEDRQLTTLRATLTKKRTAVLNAIHKILRKHNREQERPTKVFQTKKVRRWLAEMELSTVDRLEMDLLLPQWELLDGQLEVVEAKIAERAEADEDARLLESMPGMGHYSAVAVASRIGDIRRFRQPGSLANYFGLTPGCRNSGDANQRLGSITKRGSKIVRYLLGQVVIKVLRFDTAMRDWYKRIKRRRGSKIARVAVMRRMVTIIWHMLKKKQRYHYELSLKKHKEFEAFEGAAA

SEQ ID NO: 238569 - protein, 358 aa, unidentified
MRIIGVDLHTRQQTVAMLDVETGELIEKTLKHDGDEVRKFYSALPGQVLVGIEATGSMHWFLELLEELGIERQVGHPAKIRAAEPRRQKHDRRDAALLLKLQVENRFPAIWMPSTELRDLRTLLLHRHQWVRMRTRVQNALQAIALSRGLRRGKTLWSQGGQHSIESLSLPPNAAHRRTELQRLYRNLNEQIDELDKRVNGRALQRPGAKLLMTHPGVGPVTALATDVFWGDPARFEDGKAVVSYVGMIPSEYSSGGQQRLGGLSKQGNPFLRFLWCEAVVHAVRRDPELQRFYRRKLAQKGLGKARVAAARKLGIRLWIMLRDQIDYQEFCRRGQMRQKNGGACAGMPEVGHSPAMQ

SEQ ID NO: 238570 - protein, 362 aa, unidentified
MKKGIKRASQMEAKHNINAAMTVGLDLGDRFSRYCLVNALGEVVEEGRIQSSLEAMRRHFEGELRLRVALECGTHSPWVSRLLSELGHQVVVANARKIAMITASTSKNDRNDAAQLARLAAYDPRLLSPLRHRSQQRQQDLNLIQVRATLVRARTMLINALRGLVKSAGSRLPSCSTESLAVRAPAHIPSALAAAGRPLLEQIVALNGQIAGLDREIEKLREKYPEIGVLRTVPGVGPVVAAAYVLTLDRCDQASNRAAGAWLGLRPRQKQSGDSDPQMRISKEGDRYLRSLLVQSAQYILGRFGPDSALRRWGMKLAQSGGKRGKKRALVAVARKLAVLLHSMWRSGKRFEPFPQPAAAAA

SEQ ID NO: 238571 - protein, 348 aa, unidentified
MRIIGCDLHARQQTLAMLETTTGETANLILLHEGNQVREFYSSLPQPVLVGLEAGGSMPWFLNLMEELGIECRVGHPAQIRAAEPRKQKHDRRDAELILKLLAENRFPAIWLPSRELLDLRALLLHRHQWVRMRTRIQNALQAIALANGLRRGPSLWSKDGQEKIAFLPLMPHTACRRSALQVMYRNIQSQIEKLTQQVAEQAENRYAAQRLMTHPGVGPVTALATEVFLGDPQRFADAKALASYVGIIPREYSSRGQQRLGGITKQGSPLLRFLWGEAGAHAVRRDPELKRFYRGKLVQKGLGKARVAVARKLGIRLWIMLRDEIDYPEFCRRGQMQVSGAACGGDA

SEQ ID NO: 238572 - protein, 410 aa, unidentified
MELLHRRCCGLDVHKETVVACLRLVSDGKVTTEVRTFQTTTADLLRLSEWLATNGCTHVAMEATGVYWKPVWHILDDGEFELVLANAAHVKNVPGRKTDVNDATWVTELLAHGLIRASFVPNTQTQEMRNLLRTRKQLVREQSSHVLRVQKTLEDANIKLDSVLTDVMGKSGRAMIEALIAGETNPAKLASLADRRVKASAEKLREALRGRVTKHHRFLLRLHLDQIDALQAAMATIDAQVEANLGPFRAAVELIMSIPGIKNLSAQVIVSEIGIDMSRFPSAAHLISWACVCPRNDESAGKRRSNRQRKGATWLKTTLAQCAWAAVKKKGSYLQAQFYRLKARRGPKKAIMAVVASILTAIYHMLKDGTMYQDLGCDHFKRHSTDQQKKRLVKRLSDLGFAVELKPLAA

SEQ ID NO: 238573 - protein, 360 aa, unidentified
MFHERTSVGLDVHARSVVASAIDGVTGEVRTERLLADHEAVVAWIAKLAGPVAVTYEAGPTGYGLYRALTAAGIDCVVAAPSRLIRPGGDRVKTDARDALLLARLLRMGEIAVVVVPTVTQESARDLVRAREDARRELMSARHRLGKLLLRHGHVYTGGQTWNSVHDAWLRRIHFDQAGTQVAFETAHEAVVLATARRDRLDVKIAAMAANSEYTDTTRRLACLRGISTLTAFALAVEIGNWHRLTGATIGSYLGLVPSEHSSGDKRSQGGITKTGNSHARRLLIESAWHHKPRYRPGKTMTDRWALAPAPVVARADAGNRRLHHRWVQLETRKKKHTVTTTAIARELAGWCWSLAVMDR

SEQ ID NO: 238574 - protein, 359 aa, unidentified
MDELKYIGMDVHSATTSIAVRDGQGRLVMEATVATEAAALSDFLRGLRGRLWLTFEEGNWAAWLTQVLTPQVEKLIVCNPRRNASLKQGNKSDPLDARPLAHLLQANLLRPVYHQAAGPQTLQELARAYTTCVGDSTRVMNRIKARYRARGILCSGSRVYRPRFRQPWFEQLTDPGARQRVELLYTQLDLLQELRKKARRALLTEARRDPAYSLLRTVPGVGPVRAALLLALLSTPFRFRTKRQLWMYAGLGLITRDSGQYQTVRGQIIRRDRPACVRGLNPEHNRELKEIFKGAALVATRSSSPLHPFYQQRLDQGMRPHLARLTLARKIASLTWTLWKKGERFNAHHLTSQVTSQAE

SEQ ID NO: 238575 - protein, 391 aa, unidentified
MFYIGIDIAKKNHEASIIDSSGKSLSKSISFPNSTKGIEKFNNFIAEFGVTTNNCIIGMEATGHYWISLFSYIVDLGFTCYVINPIQSDAFRKMYVRQTKNDSVDSFIIAQIMRFGEFSISNFSDENTFALRNLTRYRFALVDECSDWKRKLVAILDQVFPEYSSLFSNIYGVASKELLSKYPLPEDMLSIPAEELGNLLCKCSKGRLGINKAEEIQSRARESFGIKFAKRSFSFQIKQIISQISFLEEQLKEIEIEISCLLEDICPVITTITGIGSVLGASIVSEIGNISRFERANQLVAYAGLDTRIKQSGDFSATNTKLSKRGSPYLRRSIWLAATVAAFKDPALSIYYQGLRARGKAHGTAIGAVARKLTNIIFAVLRDQKPYTPNI

SEQ ID NO: 238576 - protein, 341 aa, unidentified
MNITRVGIDLAKTVFQVHGVDDKGKTVLRKQLKRAQVLEFFANLQRCVIGMEACGSAHYWARKLTALGHEVKLMAPQLVKPYVKSNKNDRNDAEAICEALGRSNMRFVPIKTPEQQALLALHRVRAGLVRARTAQVNQIRGLLAEFGLVIPQGVAKWRKRVPEILEDADNELPGLMRELLARCYEQFQRLDAQARELEAHIVRWHRDNELSQRLAEVPGVGPITATAYVATLGDGQAFRSGRQAAAWLGIVPKQRGTGGKQQLLGISKRGDVYLRQLLVHGARAVLRRLKPEQAHSWLGQLAKRRHHNVAAVALANKNARILWALLAHGREYQQGYAPTRP

SEQ ID NO: 238577 - protein, 414 aa, unidentified
MKVIYPICCGIDVHKTFLVGTIISTTDGVQPHYQKKRFSTYNSDLHRFADWLHSNNCLDVCMESTGKYWVPVYNILEERKIRVTIANPKWVKAVKGNKDDTKDSKWICDLFRLGLVPGSFIPTKDIRILREFTRYRYKLTSMKSSEKNRFQNAFTVCNVALDSVVSDMFGKSATAITDYLISEDTFNPEYCVSLLQRSLKKKSESVLESIEGYSITQEQKLRIRIVRSHLNYIENLISQIDLAIDGMVVKHESLISLLCTIPGVDRNSAITIISEIGYDMSGFGSSKRLCCWAGLTPGNNESAGKKKSVRITRAGVYLKPALVQVAHAAVKATDNSYYRLKYEQISKRRGKKRAIIAIARMILTAIYQMMSTGEVWNPTDLFKVDMPETLKEKQLSKAVKQATKFLEKQGLTVA

SEQ ID NO: 238578 - protein, 481 aa, unidentified
MKSKPQEKTKKAPCRPTQGHWHEMNRKQRRETMRRIQSDDLSLEVVHPDAAGIDIGNESHYAAVPPTRDTESVRRFGCTTAELKAMAGWLKQCGIRTVAMQSTGVYWIAVYDILEQAGLEVYLVNARETKNLPGRKSDVQESQWLMKLHTYGLLRNSFRPSQEIRTMRTYWRQRNDLVRAAGRHIQRIQKALTQMNLQLANVLSDLSGVTGQAIIKAILAGERDPHKLAAFRNWRVKATQEQLARSLEGNWQEDLLLVLKQEQDGYEFCQQQMAECDRRLKQYLQQREDRSQGASLPEEKRKERLKKKKGNAPQFDLPTELFRMTGTELTQIDGIDVMTATTILSEAGWDMSKWQTEHHFVSWLRLCPDNKVSGDKIIGKGRLPTNNRITNTLKMAASSLRTSNTYVGAQFRRLRTKLGAPVAIKAMAAKLARLVYRMLRYGMQYVDQGAKFYEAQHRNLQIAHLKWKAAKLGFRITQLAA

SEQ ID NO: 238579 - protein, 355 aa, unidentified
MPSILAERLADRVDVVIGVDTHTDTHTAAALTPVGNVLAELTVAATAAGAAILLAWADQQTSGFGSGRRVWALDSARSHGVGLLRVLRAAGENALEAPKPATARRRRGGKSDALDAVHAARAVLAADHLATPRVDGDREALRVLHVCRRHYSDTRTATVNLFKSLILTADDELREQFRGRSTIRQLQHAATLIGNTADSILERLRRTQLRVLAEQIHALDRMLKDNLADIRALVQTMCPALLAQPGIGPVTAAIALTAWSHHGRFRSEAAFAALAGVNPVPASSGRTVRHRLNRGGDRTLNAAIHTIAKSRQRCHQPTKDYITRRTAEGRTPPEITRNLKRYIARQIWRIIQATP

SEQ ID NO: 238580 - protein, 406 aa, unidentified
MICIGIDIAKRSHVASAVDEDGGTVVESFKFDNTANGFAKMLKRLRKADATPENSLVGMEATGRYWVALFDFLISHGYEAAVINPVQTDAFRDVWTVRKVKTDALDAAMIADLVRYKRYSPSALGDEATEELRNLARYRMSLVERSTALKNRATAILDRTFPELAGLFSNAYCPTRRELLQHCATPDQVLGTDVGTLERILREASRGRCGRAKAERLKALAEASVGVGFGSKTLAFEVRLLMEELDFVQGQIKEVEGELESLLERTRGKWLVTIPGIDVPLASVIAGEIGDPDGFDDPHRLMGYAGMDPTRSESGETVKSDGRMSKRGPGALRWALMQAADCARKNDPYFGDYYDRKKGEDKKHHYVALSGVARKLMGVALAVMKEERPYEPTPPKNHRPGHLRGA

SEQ ID NO: 238581 - protein, 389 aa, unidentified
MKIYVGIDIAKLNHFAAAISSDGEIIIEPFKFTNDADGFQLLVSKLESFDKNSIIIGLESTAHYGDNLVRYLVAEFYQVCVLNPIKTCQMRKNNVRKTKTDKVDTFVIAKTLMMQDDLRFITFFDLDMMDLKALGRFRQKTIKQRTRLKIQLTTYVDQVFPEIQYFFKSGLHQHAVYALLKEAPSPKEIASMHMTHLANLLKVNSHGHFTKEQAKELRVLAQKSVGANDSAISIQITQTIQQIELLDSQLEKIEAEMTDIMKFNDSVIMTIPGIGYINGGMILGEIGDIHRFSNPNKLLAFAGLDPSVYQSGNFQAKTTRMSKRGSRVLRYALVNAAWNVVRNNATFKAYYDAKRAEGRSHYNALGHCSGKLVRVIWKMLTDNVEFNLK

SEQ ID NO: 238582 - protein, 393 aa, unidentified
MGSDSATTRTGLHAWKLELMHVAVGQPTQEVKETPMNSVGLDVHKTRCVACVKTPEGRILEEFAFRNNPHGHEEVVTHLKAYPDVQVAIESTGNLWIPIYNRLEDEHIHTILTNPKKTRLIAEAKIKTDRLDARILADLLRANLLSASYVPPPEIRIQRSIIRERARLTRLRTIIKNRIHTLLDKHSIKTPYTDISGKHSLEWLSKLELPAGDRILLDVNLEQLNSLNRSIDRLTETIAISAIENPEVKLLMGFTGIDYYSAMLLINEIGPTARFPSPKKLVSYAGLAPSTHQSGNHTTHGHITKEGNSHIRWILVEAAQHASRYDPRLSQFYLRVMKRRGHNRALVAVARKMLVTIYHVLNHHREYRGLRPELYTNKIRRLQRIANSSLQTA

SEQ ID NO: 238583 - protein, 307 aa, unidentified
MHTTTIGVDLAKSVFQVSVANRAFRIVERKRLTRSQFERFIAQQAPANVVMEACATANYWSQFAQAHGHHTKLLHALYVKPYVHRNKTDACDADALVAASRDPQLHPVPTKAPAQQALQALHRCRQAMVDTRNRRISLARGILAEFGITLPRRASAIAGKLLSRLDALPPVLLPRVQELITEISDLKERLDHIDHALGDIAKADPVAQRLITIPGVGVVIATAFIASVPDIHIFMRPRQFSAWLGITPREHSSGGKRKLGSISKKGNRYLRMLLIHGARSALLAAHRKAASAPEQLTDLQTWVVSDN

SEQ ID NO: 238584 - protein, 366 aa, unidentified
MKKTSTVQVNGNMIFKGHKLTIGLDLGDRWSFYCVLDEAGQVILEQKLPTTPEAMKQTFGKIPRSLIALETGTHSPWVSRQLTELGHEVIVAHAQKVQLITKSNRKDDRHDARTLARLARIDPALLGPVRHRSAKAQLHLTVIRARAELVSARTALVNAARGLVKSYGERLPKCGTYQVSEKLAEGLSAELREVLVPLLKEIESLNERIKEYDERMEKIAKEVYPEVSLLKQVKGVGTQIALTYVLTIEDPYRFAKSRQVGCFLGLRPGRRNSGESEPQKGISKEGDRYLRTMMVQGAHYILGPFGEDSDLRRWGRKLSERGGKNVKKRAVVAVARKLAVLLHRLWVGGEVYEPLRNSQKAMREVA

SEQ ID NO: 238585 - protein, 393 aa, unidentified
MFYIGIDIAKNSHEVCFLDEIGNVLDGNSFKIANTASGVDKLQKMFGKHALSPDNSIVGMEATGHYWLVLYSWLVEKGFDVKVINPIITDAYRNMLIRKTKNDRIDAQVVAKVLMLGEYQESPVSDKDTLALRQFCRFRLWQVQSCADLKKKVIALLDQIFPEYEKLFSDVFGLTSKEILKNYTSPEEIASINTRKLTHLLEKASKGRFGKEKALEIKAVANHSLGIQLAIDAFSFQLRQLIEQIEFVEQQIALLDQQIENYMEKLQSPVTTIPGVGPVYGAIILAELGNIKRFPSGKQVVSYAGLDASVHESGDFVGTRSHISKRGSPYLRRALWGAAFVASWADPELSAYYHRLRARGKHHNVAVGAVARKLCYILYAVLSENRPFDKRPI

SEQ ID NO: 238586 - protein, 317 aa, unidentified
MSSGHVHVGIDISKDVLDVACIPGDMAWRVGNDEEGIKELVGKLREMAPALVVMEATGGYEILPAALLSHDGLPVVVVNPRQVRDFAKAAGILAKTDRLDAKVLARFGEAMKPTLRPIPDLQQQELSDLVLRRRQLVTMIVAEKNRLEKAKKAVRDSILKHLSWLEKELGNLDKGLEDKIKSSPVWQEKNDLLRGVKGVGPIFAATIIADVPELGRLNRKEIAALVGVAPLNRDSGTMRGHRRIWGGRSRVRTVLYLATLSAIRFNNVIFSFYQRLVTKGKAKKVAITACMRKFIVILNTMLKTGAPWNDMLVAENP

SEQ ID NO: 238587 - protein, 311 aa, unidentified
MKQTTTVGIDVSKGTFDVHIDTTCRFLHLENTTEGILLLLDELRELSVSLVVMEATSKYHYLLTSMLSGAGLPVAVVNPRQIKNFARAMGKVAKSDPIDAKTICEFGKRMRPDVRQLQDRDSQELSLILTRRRQLVQARTMEIARYQEKPTPYIEQGITKHIAWLSTEISELEDELRIRIKESNSLTERRKLLETVKGIGPVTQAALLIQLPELGRLNRRQISALIGVCPYDRDSGSMRGKRAIWGGRSGVRATLYMAMLSAVRYNPQIRSFYINLVSRGKPKKVALTACIRKFITILNAMFRDEAQWRSE

SEQ ID NO: 238588 - protein, 351 aa, unidentified
MTADQDRAGEVIVGVDTHADTHVAVVIDDVGRRLGELHVATTPRGYRELVVWARQFGRLDRAGVEGGGAYGAGLVRFLRGEGGEVIEVDRPNRQRRRRKGKSDPVDAEAAARAVLAGDATTTPKDTTGVVEAVRILHLTRRSAVKAKTQAGNQMKDVILTAPDELRSQLRGLTTRQRVKVCARWRPGPVTDPLSAARRSLHDLAKRWEALHDEIKAHDADLRRLLDGLVPTLLDEAGVGTEVAAKLVIAAGENPGRLRNDASFAALCGASPVEASSGKHQRHRLNRGGNRQANNALHVVVLHRSRTCPETRAYIERRRAEGKTDREIWRCLNRPVARRFHTRIQHDLHLLR

SEQ ID NO: 238589 - protein, 485 aa, unidentified
MDYYPIQENVYNTEEQIALTILKTSKHPINMEKNIKNRELGGFEMINPDAAGIDISSREHYVAVPKDRDKESVKKFGTFTEDLHTIAKWLQSCRIKTVAMESTGVYWVQLFLVLESYGFEVFLVNASHVKNVSGRKTDVKDCQWIQQLHSYGLLRNSFQPENQIRELRNYVRHRRKLIEDKSRYVQLQQKSLEQMNIKLHTVISDINGTTGSAIIRSILSGERRPEELAKYTHPRIKASRAVIIKSLQGNWRDDQIFMLKQAYESGEFVDKQIFDLDKQIETVVQSISEKPGKSDNQKNENKTKSSYKNRLKFDSKVYLNSLFGVDITKIEGIDEISALSLLSELGVDIKSKFKTEKQFLAWLNVVPNNKITGGKIKSSRIMKKKNKAGQIFRNAAYTLFNSKGYFGQYLRSRKAKDGTPQAIVATASKMARVFYKMVTEKIEFNADILYLSNEKYLRRKLAKMKATIENIENVINTNTVNYAFS

SEQ ID NO: 238590 - protein, 315 aa, unidentified
MTTQVFVGIDVSKAMLDVCVLPTGEAFRVSNSAAGIAELAGKLQPLSPERVVMEATGGYEKEAAFTLYLAGLKVCVVNPRQVKSFAKADGQLAKTDRIDAGTIAKFGERMRPEVREIVGEELSELDVLVTRRRQLVQIITAEKNRMATSAASMRPRIQAHIDWMEQEIKTITQTLEEAIGKSPVWQEQVALYTTMPGIGDKTAHSLIAELPELEALLPKKVTALVGVAAYARDSGVFKGQRRISGGRASVRCALYMATLSAIRWNPVIKAHYTQLRARGKPFKVAMIACLRKLLVILSAMARTRMPWNPTFAATV

SEQ ID NO: 238591 - protein, 403 aa, unidentified
MTKESLCVFAGVDTHKDVHVAAVVDERGKILDTASFDANAKGYAALQRWLEEFGTLVRVGVEGTGSYGTGLTRHLQGNDVEVVEVNRPNRQMRRQRGKSDPVDAEAAARSALNGEATVVPKDHDDIVESIRVLRVAFCSARDTRTRLALQIRDLIVTAPAALRESMPAKTADRVAHCAKFRPGNVRDPHEATRLALKTLSRRYQDLTDEMRDLTKFLDELTKEANPALRAAKGVGVDVAAILLVAAGSNCHRLRNESAFASMCGVSPILASSGQTNRHRLNRSGNRQANNALWRIAMVRMTSDEETKTYLARRTAQGKTKRDVTRCLKRHIAREVFHLLQHPAYEEVGPQLRSTRTAAQISLQAVSDNLQVTLSKVSRIERGLQHDPEFVERYEAWLTNQIAA

SEQ ID NO: 238592 - protein, 418 aa, unidentified
MGAGYRCWIGDRLSRTKDCFMDTSYAVFCGIDVGKGEHHAVGLDAAGARLFDKALPNDEARLRAVFADLAAHGPILVVVDQPNTIGALPVTVARACGHDVAYLPGLSMRRVADLYPGQAKTDARDAFIIADTARTMPHTLRRVDVGDETLTELGVLVGFDDDLAGEATRISNRIRGLLTGIHPALERALGPRVAHPAVLEILSRFGGPAGIRQAGKRRITTLAVKHAPRMGARLAEEVFAALDAQTVTVPGSKAAEIVLPKLADSLKEVMQQRRSIAVDVERMLDDHPLSQVLTSMPGIGVRTAARILIEIGDGSGFATAGHLAAYAGIAPVTHRSGSSIRGEHPARSGNRKLKRALFLSAFAALHDPTSRAYYDRKRAEGKKHNAALICLARRRCDVLHAMLKNKALYRAPVSAEAA

SEQ ID NO: 238593 - protein, 354 aa, unidentified
MPEFKKGQRVAGYQNALKRAVAQYVWTSARCPSTTGGDAMASIGEKRVTIGVDPHPGSHTATAVSHLGEVLGSITVDNSQQGCQQLRGWVKQHRHRCWAIEGAGNRFVAPLVSELLDDGEQVYGIPPSMTAQYRSRRGRKKDDEVDAENAAKAFLANPGISQYLPTRYEQRLKELTRSYQRLSHQLKASRMASKAIDDALISQVTLKVVRALEEALATLKKEIENTVRKVAPELLEIRGVGPIVASVVLAEAGRVTRFANRDHFVAFAGCAPIRWESGAHQTVRVNPGGNRRLNWAVHIIVICRLRIDTNTKAYRDRKLAEGKTQRQVIRLLKTYACRELYKNLKRRQLSAVGA

SEQ ID NO: 238594 - protein, 291 aa, unidentified
MTSQTAVIGIDVAKESLSICGAPAGEVFELPNESCSIRNWLKTLPSGCSIAIEATVIYHVLVATLTHARGHRIYVINGYRLSNYRQGIGGRNKDDRSDAQLLARYLAHEQAQLGPWQPPSKVYSRLQAMLHRRAVVVRSATSLRQSFSQDRELASELKPVLKRMATLERRLEDAIQSTLDEAGLTAQSKRCQKVEGIGPLTAAALSMAFLRGSFRNSDAFIAFIGLDVHLKESGRYSGRRKLTRQGDPEIRRLLHSIAMSAARTQRWQSIYQSYLARGLKKTEALTILARK

SEQ ID NO: 238595 - protein, 345 aa, unidentified
MKYYSGLDVSVKETSVCIIDETGKICREVKVVSHPDDLIAALKDPARPIERIGLEAGPLSQWLFEGLATAGLPVVCIETRHTKAFLKAQVNKTDRNDARGIAQMIRVNLYKPVHVKTVTSQKRRALLTARKLLQEKAIAIENDIRGLLRNFGLKVGVIGTIGFDDRIRELVDDSAELLEIMEPLLSARQKLRETFTVLHSKLLAIVREDRACQRLMTIPGVGPVTSLAFISTIDVPARFSKSRAVGSALGLTPVLNQSGESHRIGRVSLCGDGMMRALLYEAAQVMLSRVKKWSWLKAWAMNIAKRRGRQKAIVALARRMAIIMHRMWKDGTEFHWTKDSMLAAI

SEQ ID NO: 238596 - protein, 412 aa, unidentified
MVETIIERPGALGVHKEQVTACVRLPGEGREREQHVSEFATTVRGLLALRDWLAAHGVTQVTMEATGVFWKPVWAILEDEFECVLVNARHVKQVPGRKTDVSDAAWLCQLAEAGLLRASFVPPKPIRTLRNLTRYRKTQIQERQREANRLHKALEDTGIKLDCVASDILGASGRLMLDALIQGTTDPEVLAELAKGALRRKIPALREALEGRFDRHHALWIGAILSHIDFLDEQIDGLSEMIEEEIRPSALAVELLCSIPGIQHRGAQCIIAEIGVDMSVFATAKHLASWAGQCPGNDQSAGKRRSGKTRKGSKWLDYTLEEAAMAALRAKDNYLTAQYQRLRPRRGHKKALGAVKHSLLCAIWHMLQTGELYRDLGGDYFHTRDPERQTSRLVKQLEALGHHVTLQEAVPA

SEQ ID NO: 238597 - protein, 442 aa, unidentified
MANRGSTTRGMDILRQGGAEVKDPEIRVVGFDCAEDEHVAVLLDEHGAFESRGSVVNRRDHVEAAVAQLMLKIGPNVQLVVVVESKRSHGRVVAEVAKKLGCEVWQANTVALNHFRDLEGQPRKDDEWDAYLGARMVYLRMGGCRVAIETTEEERALSRLTRTYSRTTDDRKRQVARLRSVLLELAPETLHAEWEGPQPGSKAMLYLLERWPGFEGLEKAQLRSIEKILHTCRYGSKAAHVAKLIRDMARRIDIAAEERSAFTLEISFLVRQIRICNESAGQVYAEISRRVKHHPVGQKLLEMPGIGPVIAGVLVSELLPVARTSTEPKCATYSGVTPLGRKSGKSLDKDRLTQGVNKRVLHALYTSSVVAVKNSAMDRTYFHKKLRDYAGHPKPHVAAFIALSRQRHKVIHKLVTTDARYDKEALIGRHLGRIEQVRAAAA

SEQ ID NO: 238598 - protein, 406 aa, unidentified
MICIGIDIAKRSHVASAVDEDGGTVVESFKFDNTANGFAKMLKRLRKADATPENSLVGMEATGRYWVALFDFLISHGYEAAVINPIQTDAFRGVWTVRKVKTDALDAAMIADLVRYKRYEPSALGDEATEELRNLARYRLSLVERSTALKNRATAILDRTFPELAGLFSNAYCPTHRELLQHCATPDQVLGTDVGTLERILREASRGRCGRAKAERLKALAKESVGVGFGSKTLAFEARLLMEELDFMQDQVKEVERELARLLERTQGKWLVTIPGIDVALASVIAGEIGDPNAFDDPHRLMGYAGMDPTRSESGETVRSDGHMSKRGPGALRWAFMQAADCARKNDPYFGDYYDRKRGVDGKHHYVALSGVARKLMGVALAVMKEGRPYEPAPPRNHRPGHLKEA

SEQ ID NO: 238599 - protein, 461 aa, unidentified
MNKKKFRGGQTGSAQKKVDWKALEIVHPDAAGIDIGGSEHWVAISPDRDSEPVRRFGTFTADLHEMARWLVEKAVRSVAMQSTGVYWMPVLEILEQHGLEVYLVNAQHTKNVPGRKSDVEECQWLLKLHAFGLLNNSYQPSDEIRIARTLWRQRGNLVAEAASAIQRMQKVLIEMNIQLSNVLSDLSGVSGMTIIGAILQGERDPWILASLVQPEVKATPLEVAKSLEGNWRQELLFILSQHVELYRIYQNKIVDCDLQLRKHLETFGSKVDLQTQPIGPKPKGKKGSRNAPQFDLRTELYRITGIDWAQINGMDVLTAQTVIAEAGADLSAFPTEKQFTSWLGLCPTNEQSGGKILKRRTRNVVNRASGAFRNAASGLIRSQSYLGAQYRRLRTRLGAPKAITAMARKLACLFYRLIKHGQQYVDKGTEYYEARYREQQIRSLARRAQKLGLQLVIPETA

SEQ ID NO: 238600 - protein, 319 aa, unidentified
MRIIGMDIHRVFAEAVVLEDGAMRRLGRVDMARDKLMAFASSLRPTDHLVVEATGIAATLVEILAPKVARVAVANPLQVHLIARAKTKTDKIDARVLAQLYAAGFLPEVWSPDAETQVRRRQVRRRNQLVKSRVRLKAIVQSILHAHLVPRYPHLDLFGIKGRAWVLAQDVPTDERAAIARHIEEYDRQTAAQRLVEQDIARAAMPDADVRRLMTIPGVDMVVAVGVMAAIGCVSRFASADQLSAYLGLHPSVRQSGDGPAYHGRITKRGRSDARHLLVEAAWQAVRSPGPLRSFYKRVKARRGAHVMSKAWQYATWTR

SEQ ID NO: 238601 - protein, 326 aa, unidentified
MFQVHGAATDRSVLFRKKLTRPQFARFMAEQPPCRVAMEACASAHHWAREMSRHGHEVRLIAPHYVKPFLKRQKNDAAEAIVEAALRPTMRFVEPKSADQQARAVAFRTREQLVKQRTEAVNALRSHLYEFGHVAPEGIGYVPRLAKVVDDPDTGIPELVRDICRMLLAQIAHLTDRINALKARIAALSNEAELPRQLQTMPGVGPITALAVETFAPPMEQFRRGRDFAAWLGLVPRQHSTGGKQRLGKTSKMGQRDIRRLLVIGATAVIRWATRRGAPKGSWLARMLERKPIPVVAVAMANKMARGIWAMLTRDEDYRGPVLIGA

SEQ ID NO: 238602 - protein, 361 aa, unidentified
MTDGSKEQPRTTAGLDLGNKYSYLCLIDQQSGEVVEEGRLRTTPEALRRRFSSEEPMRIAIEAGTHSPWVSRVLEEECGHEVLVANPRKTRLIYSNKRKTDEIDAENLARLARLDPKLLYPLKHRGEDSQAHLAIIRSRQALVGCRTQLVNHVRGTVKSFGGRLPKCPAVSFHKRAAEHIPEALWPALEPILAQIDSLTQRIRDYERQLEAICKEHYPQETDLLRQVEGVGLLTALTFVLTLEDPYRFEKSRSVGAYLGLVPASDQSGDRDPQRRISKEGDEMLRKLLVGSAHYILGPFGSDSDLRRHGEKIASRGGKNSKKRAAVAVARKLSVLLHSLWINAQVYEPLRNTQRSTRGQAA

SEQ ID NO: 238603 - protein, 369 aa, unidentified
MLKNVRFIGLDVHAESIVIAVANSGDTPAEFLKIISYDCSRLLKELRKLAKLSDLRVCYEAGPTGFGLQRFLVGENVSCIVVAPSLVPVQTGSRVKTDRRDARRLAHFLRSGDLTPVWVPDEQTEALRDLERAREDARLAERSARQQLLKFLLRHERRFTAGKTNWTQIHWAWIRQQAFDQEATNCVLADYVHAAQQAGERVQRLTLQIAQCVNDWALAPLVQNFQAFHGIQLVTAVGLSAEIGNFERFEKAGQFMAFVGLVPSEHSSGGSRKQGGITKTGNRHVRRLLVEAAWHYYDARPGVSAALTKRREGVSPEVVAIAEKARLRLSRKAMRMRASRKVPNKIVTALARELAGFIWAAAQATKLNI

SEQ ID NO: 238604 - protein, 408 aa, unidentified
MEVLYPRCCGLDVHRRTVVACVRLQEHRRKRTEVRTFGTTTSEILELHRWLAEACCTHVAMESTGVFWQPVFNLLEGSFVVILANAQHIKAVPGRKTDVKDCEWLADLLAHGLIRASFIPPAEVRALRELTRHRKSLIRDRARVINRIHKLLETANIKLGTVVTHLDGVTGRAVLKALAAGETDPGRFAAFARGSLRSKTALLSAALEGRFGVNHRFLLDQLLAQLDSGATLIAQCDARIFELARPLEPHLERLQTIVGIGRRSAEVMVSEIGVDMTRFASAAHLASWARVCPGTHESAGKRRPAAAGFGNQWLRTALVESAWAATRARRTYLSVQYRRISRRRGSKRAALAIAHRLLVIAYHVLRDEVPFANLGADYFDRLNAAKAMRYHLKRLTELGCNVSSVSPA

SEQ ID NO: 238605 - protein, 456 aa, unidentified
MTSKSKAKPRLSGRMLPIMHPDAAGIDIGAEEIFVAVPPDRDVDSVRRFDTFTRDLFALADWLRQCNIRSVAMESTGVYWIPLYQILETRGFEVFLVNAHHVKNVPGRKSDVSDCQWIQYLHSVGLLKASFRPPDEICVLRSLWRHREGLVQMAAEHIQHMQKALSEMNLQLHHVLSDIVGVSGSAILDGILAGERDPAKLANLCNRRIRSPRQTVAKALEGDYRPEHLFALRQSLAAYRFYKHLMAEVDLELAQKMRELPRAEHAPDKRPAGTKKRIYQRAGNEPSFDLKEEMFRIAGVDLTDVPGISTLTAHTILMEVGTDVSRFRNASAFASWLGLCPEKQVSGGKVLYTRTRKVKNRAAIALRLGAHCLYHAQNYLGDFYRKMKWRLGAPAAITATAHKLARILYHMLSTRQPYSDKVFARCDQQATIRAEMRLRKQAAELGFQLAPITETT

SEQ ID NO: 238606 - protein, 342 aa, unidentified
MTRFVGLDVSQKLTALCVVDETGRRLWRGQCATDPERIERAVRDHAGEEPRIGVETGPMTPLLVHELRGLGLDVTCLDARHARAALKMQLNKTDQNDAEGLAQVMRTGWYRPVHVKSLDAHRARALLGARAQLVGMTTRLSNHIRGVLKTFGLLPGAMRGVPFDRRVETLLAERDDLVLIVRLMLEAWRQLREQTAAFDKEVRALAKKDPTCRLLMSVPGIGVVSVLAYVSTVEDPARFARSRSVGAHMGLTPRRYQSGEVDRSGRISRCGDALARTLLYEAAVVILTRVKRASRLKDWAQAIAKRSGPGKARVALARKLSVILHSIWRSGEPFRWSEQSAA

SEQ ID NO: 238607 - protein, 369 aa, unidentified
MAETTEAFVGIDVAKLRNAVAVADAGRDGEVRFYGEVDASPEGMRRLAAKLAGKHERLHFCYEAGPTGYGLHRLLTGLGHSCVVVAPSLIPRKPGDRVKTNRRDALSLARLLRAGELTPIRVPDTAHEAVRNLVRARAAAVKDVGLKKRQVGAFLLRHSRLFPRKKNWGARYRSWLETQSFEHPADQIVLREGIESVRLAEERLARLDRAIGEFLPTWSLAPLVEALQALRGVDLVTAVTFVVEVGDIRRFESPRQLMGYLGLVPGERSTGETVRRGSITKMGNARVRHLLVESAWTYRHPPRVGKAKLPKLERVSPKVREIAWKAQSRLTARYRALTARGKKTTVTCTAIARELAAFMWAVAREARPA

SEQ ID NO: 238608 - protein, 395 aa, unidentified
MNTLALGWDVHRKFSEVSLQQMSDEGQIAVVERARLEHCDRQAMRQWLARVPRGTPVALEAAFGWPWIADLLEEVGLEPHLGHPPAVKVLAQHEAKGDRCDADRLGKFQLRGILPESYLAPPEVRQRRERMRYRIALVCLQTGMKNRIQAILHRLGVLHSFSDLFGKGGRAFLSDLELPEASQAVLRGYLRLLDDLAEEIKQVEQWMRRNLPRDEVVRWLKTIPGIGLILAYVIRAEIGQIERFPGYRHLGSYGGLAPLSDDSADRHGRRHCSPACNHTLRWALIEAATGVLATKGQKAWRLRRLYARLTGGGHYNKNQAKVAVARELAKLVYLVWKKGEPYREVAPFRRGSRPARQQANQSRREDKTTKRTLRPDQPRPPMVGRRLRTVGQTRL

SEQ ID NO: 238609 - protein, 384 aa, unidentified
MYIVDIDIGKNNHEATIIDDKGTIIGKSIKFSNSHNGADKLIEHIAKNIGNSEVIFGLEATGHYWLSLYSFLLGKGYTVNVINPIQSDSFRNLYIRQTKNDTKDSFIIAEVIRFGKYTNTKLADEKVLALRQLCRYRSYLSCEIGQLKCKIITVLDQVFPEYEKLFSDTWGTSSKKLLEEYQTPEDLLSIDIAELASILKKLSRGQLGYDKAEKIHEAAKNTFGIKIAQDAFKFQLKQLIDQVVFLEIQIKDLDEKIDSYYKEFDCHLTSLPGIGSVTAAAILSEIGDIKIFKDASSLVAYAGIDPTVKQSGQFLANNNKMSKRGSPYLRRALFLAASNAVLYDPVLNEYYNKKRNEGKHHLTAVGAVARKLTYIVFRFINTFT

SEQ ID NO: 238610 - protein, 399 aa, unidentified
MAAPSLWAGIDAGKLDHHCVLIDASGERLLSRRVRNDEAPLTALIDDVIALADGGLVQWAIDLNGGGAALVISLLLARDQHLLYIPGRIVHHASAAYRGDGKTDAKDAAIIADQARMRRDLPEFRHRDEFTVELRTLCARRTDVAADRNRAINRLRAQLLEYFPALERAFDYSHRKGALILLTGYQTPEALRRIGRTRLEKWLRGRNAYNSVAIADRAIAAANAQHVVVTGQRLGSTIVARIAQQILDIDAELSDLDDMIEERFSQHQQAALIRSMPGFGPLLGAELVAATNGGLDSFHSADRLAAVAGLAPVPRDSGRISGNLKRPRRYDRRLLRVFYLAANNSIKTCPQSRAYYDRKRAEGKHHRQAILSLARRRVNVLWAMQRDNTAYRSTAKTAA

SEQ ID NO: 238611 - protein, 330 aa, unidentified
MELGSGCDLPNPNSCTGPGSRTGKEGSQDDTGCSVCRHRREQDEAGCRRHDRAGWTELIDRLGPLAPAAVGLEPSGGYEREVIGALFEAGLPVRRVDAGAVRAFARVLGLKAKTDGIDARLIARFVQTLPGRTVEPDEKARALAELVNARRALCEEQVRVRNQVEQVRDPMLRRMATRRLTRLRADVVLLEKRRAEKVAADPELADRDRRLRSVPGVGPVFSWTLMARLPELGRLTHKQIAALVGVAPYDRQSGTLKGHSMIRGGRAVVRNVAYMAALIGARHNPVLKAMKQRLADKGKPGKVILVALINKLMTLLNAIIRDRSEWKHAA

SEQ ID NO: 238612 - protein, 392 aa, unidentified
MIFVGIDVAKNKHDCFITNTDGESLFNSFTITNNLDGFNDLYRKISSVTENITKVKVGLEATGHYSYNLLGYLLDKGFPTYVINPLHTNLYRKSLSLRQTKTDKVDARTIASMLMSDVNLKSYSDTSYHNEELKSLTRYRFDKVKERSALKVSISRLVCILFPELENLVPTLHMTSVYSLLYEFPGASFVASAHLTRLANLLSKASKGHYNKDTAVLFRQTARDSIGSVIPAKSLELKHTIKLIQELTSEIDEIEAAIKQIMDEEIKSPILTIPGISYRMGAMIIAEIGDFNRFDSADKILAYAGMSPSTHQSGQLDNCHSRMEKRGSRYLRYALYNATKYVCHWDKSFGAYLEKKRSEGKHYNVALSHAAKKLVRTIFAMERSGQSYIASV

SEQ ID NO: 238613 - protein, 334 aa, unidentified
MEHFAGLDISMKETHICVMDRDGKVILEAKVATSTAAELARAPALQRIVFETGRMATTLYHGLEALSLPVVCIESRHAYQALKSLATHKTDRNDARGLAHLARTGFYKPVHVKSLPAHAVRALIIARKKLVGQRVTLENQIRGLALVFGVRLPRGLSPAFARQVNTTGGELAALSSALRGLLAARDALLAAIAAINRDIKRLAHSLEACQRLMTIPGVGHLTALAFVAAIDGPDRFRSSRDVGPYLGLVPRRWKSGEVDYTGSISKVGDQRVRTLLYEAANVMLTRYRGDLALKDWALRIGRRSTMRKARVALARRLAIIMHAMLRDGTEFHVP

SEQ ID NO: 238614 - protein, 343 aa, unidentified
MRIAVLGIDLGKNSCSLVGLDGQGKVVKRRRMRPANIAGFTKGFPPCVIAMEACCGAHHLGRILKAQGHEVRLMSPEYVRPYVKAQKNDDRDAEAIAEAATRPTMRFVELKSEEQLDMQTLHRARDRLVRERTALINQLRAILLELGIIIAQGRRNLERELEAMLCEQDGLAVSPRLRLLIEGMREEWRSLDRRITAFDDEFAARAKTDEVVRRLATIPGIGVLNATALAAAIGEGETFARGRDLAAWLGLVPRQITTGGKPRLTGITKRGNCYLRKLLIHGARAVLPTLSKSETPLGGWLRALLARVHKNAAVVALANKLARIAWAVLRRKDTFNPSVTALA

SEQ ID NO: 238615 - protein, 364 aa, unidentified
MLYHSQQHGWFQKLLQTIQDCSKKSDKIKVGLEATGHYSYNILGFLLDNDLPIYVMNPLHTNLYRKSLSLRKTKTDRVDAKTIATMLLSDVDLKSYTDTAYHNEELKSLTRYRFDKVQERAKLKQSVSRLATILFPELEGLVSSIHGTSIYALLSEYPGAKQISEAHLTRLANILVKTSRGHYRKDKATHIRDAARTSIGSVMPAKSLELKHTIKLIQELTSEINEIEDAIRKIMDELKPPILSIPGMGFHSAAMILAEVGDFSNFNSPDKVLAYAGCSPSTYQSGKLTNCYAHMEKRGSRYLRYALYTATKYVCYWNPVFTEYLTKKQAEGKHYNVALSHATKKLVRLIYALQKSGKAYLAVT

SEQ ID NO: 238616 - protein, 368 aa, unidentified
MEKFITFVGLDVHKNTIEVALADAGRNAEVRHYGKIGGGLDDLDRLVKKLSSTNKELHFVYEAGPCGYDIFRSLTDKGFDCAVVSPAHIPKKPADRIKTDRRDAMMLARLHRAGELTYVFVPRADDEAMRDLTRAREDAKKAQRVAQQQLNGMLLRLGFRYPKDNWTKQHFLWLADQKMPMPAQQVVFQEYINAINETNARVERLTQQIETLVPTWRMAPVVKALQALRGVSLIVAVTTIAELGDLTRFDHPKKLMTYLGLVPSEHSSGEKTQRGKITKTGNGHARRVLVEAAQAYSHPARITRPLLKRQEGLSQDARDIAWKCQVRLCTRFRRLMAKGKNRNAVITATARELAAFMWAIANHTPIAV

SEQ ID NO: 238617 - protein, 348 aa, unidentified
MRLYNQQHRFYAGVDLHARSLFTHVLDHAGRTVFEKDLPAGPDAFLDAVRPFRDGLVVGCECMFAWYWLADLCEDHAIPFVLGHALYMKMIHGGKAKNDRIDAAKLAGLLRGGLFPMAYVYPRAKRQTRDLLRRRSFFVRQRAQLIAHIQNTNSQFNLPPFPKKLTYAGNRSPQIAERFAHPSTRLSVAADLAMIDAFDDQIADLERHLIQHAKVDDPVTFHLLRTTPGIGPILGLILLYEIDAIGRFPEVGNFLSYSRLVRCQHESAGKVKGTGGKKIGNGHLKWAFSEAACLMIRGCPPVKAWVQRQQKKRGKRKALALLEAKLGRAVYHLWRKQVPFDLKRFLNG

SEQ ID NO: 238618 - protein, 355 aa, unidentified
MNVTHYIGFDVHKKSISLCVKTADGQIAEETKLIAEREPLRKWASARLQPWRGAMEATLFSGWVYDTLKPYAAQLDMAHPAMMRAISAGKKKNDKIDARTIADMVRCDWLPVCYVAPPEVRELRRLLRYRGLVLRESVRMKNKIAGLLMETGASYNKEKLHGRKYFTDLLKNLQEVPDSVKDLLRMSRGAMETFEATQKQLVNRLLAEPALTERVERLASIPGVGEITALTWALEIADANRFSSSADVMSYCGLTAALKSSAGKEQRGPISKQRNAWLQTALIEAAKLAPRWNPQLKVVHQRELERGHCNRATLAVARKLAAYLLAVDKSGKPFQLRTPPPAEETAATSEAEKAA

SEQ ID NO: 238619 - protein, 346 aa, unidentified
MDRYIGLDAHSQSCTVAVMSAAGKRLREERLETNGEALRQFVRTLPGRTHLCLEEGSMSEWLYELLEPLVDEIVVVVPERSRGNKNDSVDAWARADELRRNATQRRVYKAPQKFTALRDAVRAYEISQRDMVRAKNRVNAIYRSRGLSGMGDAIYDAEQRKRWMEKLPPHRRELAGLLSAQLDGLLQSHAQAEKWLREEAQRVPIVEKIKTAPGIGEIRAAQIVASVISPHRFRTKKQFLSYCGFGIVTHSSSDWVRLGQAWERRQVSQPRGLNRNRHPMLKRVFRGAADAVIGNMPRHPLHIAYQRSIAAGTKPNLARLTLARRLAASVLAMWKNNEDYDPIRQS

SEQ ID NO: 238620 - protein, 344 aa, unidentified
MQDSIFIGLDVHKATISVAVAQGGRGGEERYWGTIPHRPDHVRKLVERLGADRSRLHFCYEAGPCGYGLHRQLVDLGHDCIVVAPSLIPVKAGDRVKTDRRDAVMLAKLHRAGELTAVWVPDAAHEAMRDLVRARATAVRVTGKARQHLQGFLLRHGRVYPGKKGWTKAYRRWLTTVRFEHPAQQIVLQDYIHAVTDAETRIERLTGQITDLLPSWSLAPVVEAIQAMRGVAFIVAVTVVAEVGDFNRFDNPRQLMAYLGLTPSEHSSGSSVRRGGITKAGSGLARRVLIEGAWSYRMQARVSRKLHDRIEALPRAVRDIAWKGSCGCASATAIWLPRVRRRWS

SEQ ID NO: 238621 - protein, 349 aa, unidentified
MKKIVKQVAAIDVAQKELVVCLGRMYDDWSPQLYAHKTFANTVKGFEVLLLWLKKMTDETIAVRFVMEATGIYHESLAYFLDEKGYEISVVLPNKISNYFRTSDVKTITDKTASEAIVLFGLERKLDCWQKPKAIFKKLKQLTRERDQIVEERTMVKNQLHAEQTEAEPNKKSVQRIKERIKMLNSQESEIKAEVDALIKQDEQLTQHVNVICSLTGVGLLTAAIVLGETNGFELIRNKRQLASYAGFDIKEKQSGTSVKGKPRISKKGNKHLRKAMHMPALCAIRYDERFKAVFARLVSRHGIKMKAAVAIQRKMLEMIYTLYKTGNRYDKNYLKKNDSLIEQHENVL

SEQ ID NO: 238622 - protein, 457 aa, unidentified
MSEKEKRTRGRSSGRLSTINEHAAGLDVGSTFHVVAVRGDQDDKPVRTFRSFSGDLHQMADWLTSVGIKTVAMESTGVYWIPVFEILEARGFEVLLVNARDVKNVPGRKSDVNDAQWLQQLHQHGLLRGSFRPRAAVAQLRAYLRHRERMVEYAAAHVQHMQKALMQMNVQLHHVVSDITGATGLRIVRAIVAGTHAPEQLATYRDVRCGASGETIREALTGNYRGEHVFALKQALELWDFHQTKIAECDVEIEAVLKSLNETQVEPEKPIPAVRHAKARNEPKFDVRSALYTLLGADLSQIHGLGPYTVLRLVAECGDDMKKWPTAKHFTSWLTLAPGNKISGGRVLSSKTRRSANRAAALLRIAAVNIGKTQTALGAFYRRLSARTGKAKAVTATARKLAVLFYRALRFGLAYADPGAEYYEERYKRRVIENLHRRARGLGFTLVEISETGAGVS

SEQ ID NO: 238623 - protein, 318 aa, unidentified
MTNKTYQFNIGVDIAKHKLDVSFSDQRVVSFENNQSGFKLLLKEIENKSQTRVVMEATGGYEKPLAHFLQDHGVAVSIVNAKRVRDYAKALGLLAKNDVIDAKVIRLFADAVNPKLLPAANDTQQALDAQVHRREQLVKQRAMEKQHLETVGNKDAVRSIKRTITFLDKEIERIEKAIKALIKTDSTLTEKVDRLSAIKGIGDITALTLIADLPELGQLSNKEISALVGVAPFCRDSGTQKGKRTTWGGRIQVRSILYMAALSAVQYNPPLKAFYNRLLMKGKTKKVALVACMRKLLTVANSMLRNNTEWNPNHGKLA

SEQ ID NO: 238624 - protein, 359 aa, unidentified
MPVYVGIDVHRKRSQVAVIDEGGEVLANRNVPNGVQPVLGVIGGLPPGTPAAFEAAFGWGWLVELLEDYGFDPHLVHPLQCKAIASARLKNDKVDAAILAQLLRADLLPEAWIAPPQVRQLRALLRHRIQLVRLRTLLRNRIHAILADHGHDRPGGCWSGPGRAWLASLELPAVSREVIEDDLALIDALQVPIDRLDWEVHQHARSDPSVKVLTQLPGVGPFTALVLLAEIGDVTRFGSARKLAAWAGLTPTVRGSDRTVRHGHISKQGSVWARWALCEAAQTAKRHPDFAASYQAIARRRGKNIATTAIARKLLARAYHLLTDAQITAPAPAATTPAPAGAPTDREGVASPGRARKTA

SEQ ID NO: 238625 - protein, 395 aa, unidentified
MSLNHHHEDPTAIRTNLGALFVSLELSRSTWLITSLAPGGGEKMSKHSVPAGNIAALLARFSELQQKALARTGKSFPIIVIQEAGLDGFWIHRVLQSEGFESYVVDPASIATSRRRRRAKTDRIDGEALVRALLAYKRGEPRVCAIVRPPTPEDEDRRRLCRERKTLTVERIQHVNRIKGLLFSQGVSDYEPLRRNRRQRLDELKTGDGRPLPPHLKAQISRELDRLELLIRQIKAVETERDALITPATTKPEGMNVGSTPAPQAMLMELNGIGAEIAAVLCSEGLYRNFANRKQVAAYAGLAPTPWQSGSVAHEQGVSKAGNPRLRTTMIQLSWLWLRHQPQSALTQWFKERVKRNGGRLRKTTIVALARKLLVALWKYVTAGVVIEGVIVKSA

SEQ ID NO: 238626 - protein, 402 aa, unidentified
MGNDQGYQSGTEEVVLAVSLELGVSKWKVALHDGRRERPAVHTVAQPQATARLQAVLALIDAHRDRWSLPADVRVVVCYEAGPDAFWIWRALQARGIECYVLDPASIPVERHKRRAKTDRLDAIRLVISLRAWLRGERDRMHVVHVPSAQDEASRHLMRDRGQLQKEVLQHLDRMRKLLATLGCWDKVDHRDFAGRLARDEVRCHDGTPLPPELRERLLRECERLALATQQLATLEKTRQASVPAPARARSDALARLKGIGEVSASRLALELYWRDFHNRRQVGACVGLVPQPYDSGESQTDQGISKQGNGRVRGLLVEMAWTWLRYQPRSALTQWFNRRTQGTGPNRRARRIAIVAVARRLAIALWRYLRDGLIPEGAQLKPQPVPVRHVTPPRASRLLPT

SEQ ID NO: 238627 - protein, 391 aa, unidentified
MTILVGIDVAKDKHDCFIMNSEGEVLAKSFTILNNKEGFDFLYKKIQSVSSSDNIKVGLEATGHYSYNIIGFLLNKDLATFILNPLHTNLYRKSLSLRKTKTDKIDSKTIAMMLLSDVSLKSYSDISYHNEDLKSLTRYRFSKVEERAKLKTSFSRLAQILFPELEKLVPTLHMTSIYQLLEEFPSASAIASAHLTRLTKLLSKASKGHYNRETAIKIREAAKNSIGSNMPAKSLELKHTIKLIRALTIDIGEIEAEISKMMDKIASPITTIPGIGNNMGAMIISEIGDFSRFSSPDKILAYAGFSPSIYQSGKLDNCYAHMEKRGSRYLRYALFHAAKLVCHWDKTFAAYLAKKRAEGKHYYVAISHAVKKLVRVIFHIEKTKQAFLKAS

SEQ ID NO: 238628 - protein, 341 aa, unidentified
MGRAVGVDLHKNSFTVCFYESEAAHTFKTYRVSVVGLGAFRKQLQAEDELAVESTGNTAFFVREIAAHVQRVRIVNPMQFKVIANSVKKTDTIDALTIARFLSKDLIPEVRMRSPEDSQRSSLIGTRDKFVKLRTVLKNKIHNILNANGIVTKLEMFSSAVGLEKVLQVPLETSYRFEVELLVTEIRHLNEAIKKLDQELKRQGEQLPGHQNLTSIKGISDTGATIFLTTIGNLADFKDEKALASYFGIVPRVYQSNQTLHYGRITKRGNKIARTTLVQSTLVAIRYSPYLRAFYDQVKARRGSGKAIIATSRKLLGIIYNTLKHNWVFEDFTTFKLATSS

SEQ ID NO: 238629 - protein, 321 aa, unidentified
MSHSVQFIGIDVGSTMLSAAIVGAKPHDFPHTARGVAALAAWARRRCDQPLQAVCESSGPYSLKLAGFLAHEQIPVAIVPPQRVRANAKALGRLSKTDRIDAQVILDYGMHAQPEPWIAPPPAQARLAALWNACCDLRAEEQRWANRLHALQQVPSTPPEVLALPLRLSACFASERRQLEAALEQLILDEPELAERREILLSIPGIGPQTALVLLSRADILLTRSPKELTAYAGLAPLHRQSGTSLRGRSYIGRQGDAQVRTLLYMAAMSASRCDPQLKEFYERLRAAGKTHKQARIAVARKLLLIAQTILKSGRRYEVRL

SEQ ID NO: 238630 - protein, 349 aa, unidentified
MAMTIVETTRLITGGVDTHLDVHVAAAVDANGGVLGVESFATTPAGYGELSAWLESFGTLARVGVEGTGAYGAGLARHLRGQGLIVVEVDRPNRQERRRNGKSDELDAIEAARAALSGRASGIAKSADGDVEAIRALLVARRSGRNVRVKYLNQIRHLGFTAPDELRERLRGVPVDQLAATAAALRPTVGSDTVIHATKLAIATLGRRVLALDADGTRLDRELDALVRRRAPRLLEIYGVGIHTAAILLVAAGDNPHRLKNEAAFAHLCGVAPLPASSGKSRARFRLNPGGNRQANHALWRIVFTRMSGDERTRKYVARRLAEGRSTREIMRCLKRYVARELYPHLIAG

SEQ ID NO: 238631 - protein, 323 aa, unidentified
MGIDVSKKTLDCHLFVQQKSLPAVSNDSKGFKAIKRWLKKELKSLDGLLVVMEYTGIYTYQVERFLQQHGIQFVKRPALDIKRSLGMVRGKSDKIDARFISKYGWMRKEELQPMSVLSDTQLELQQLMGHRDKLVADHASYQCKLKEMISQMGEKINEKLITSMKLVMEVLKQEIKETEKAIKELIGSDEPLQTNYELACSVTGIGFATAVHMLIATENFTRFSDVRKLICYCGVAPFEHSSGTSIRGKVRVSHLANKKIKSLLTMAAISAIQHDPELKAKYEQKLKEGKAKMCVINIIRAKLIERVFAVIKKQKAYEVRLAA

SEQ ID NO: 238632 - protein, 362 aa, unidentified
MTKSTTIIAFDQHAATTVAAVLLPGQPTPALHSLTSDSARILRFIDGLRRTRAVQCCYEAGPCGFELQRALTAQGIACDIIAPSLIPRRPGDRIKTDRRDAGQLAVLYRAGALTPIHIPTDQEEAVRDLLRCREDIRADLLRARHRLSHFLLRHGRRFTATKKAWTKRHHEWLQAQQWPLAALEQTHQAYVRAVHEGVARLQTVDLELREFLTLEPFRPRVERLRCFRGIDDLTALTIAAELGDPRRFPSAPSVMAFLGLIPSEYSSGPKRVQGAITKTGNAHLRRVLVESAWHYRHHPFIGDALRHRQRGAPSAVIDHAWLAQRRLHRRYRRLAARGKPKQVIVTAVARELTGFLWAALTQ

SEQ ID NO: 238633 - protein, 411 aa, unidentified
MHNRQNYLYVGVDLHKEHHTAVIINCWQEKLGEIQFENKPSAFSKFLLEVETYVCDGITVVFGLEDVGGYGRALAKYLVDHEQVVKEVNPALSFLERKSEVMIKKNDSWDAECVARILVNKFNQLPDAKPNDLFWSIQQLVSRRNALVKAQSALKNQLHIQLKHHYPSYKKFFSELDGKTALAFWQQYPSPSCLEGANIKQLTAFLLDVSNNTCSVKKASDILKLVKEDGHTMKEYQETRDFLVRSIVRDIEFKKTEMKYIERELKQLVKLLDYQLDTMPGIELVTASALIAEIGDVRRFLNANKLARFAGIAPVYFGSGGKGKVHKSKQGNRALHALFYNLAVQQVQVAKGSKTPRNPVFHAYYQKKLKEGKTKGQALVCIMRRLVNIVNAMMKYKTAYELPVVEEKEVV

SEQ ID NO: 238634 - protein, 357 aa, unidentified
MESQEVKYVGVDCGKKSIEVIRINSENSLERRQFSTTESGINNLLQWLTLNDIVGLEAGSQSFRIAKSILNKGVQVIVLNPGNLATIYQSLKKTDKEDSLKIARLIQRHPIEELPTVPIPNDEEEDNRRLCSEHENWTKQLTQGKNRLHSLFTQAGLTQITKKHLRTKVSREASVTLLSDRYKKEAERILKVLDLVELNLKLVEEEIQEALKKNKTYVQTIMSMPGIGMITSLAIMSYMGDCKRFSSAKQAAYYAGLVPRVDISGDTVRYGRIINRGCHSIRRVIVQAAWSLVRCQHGGKVKEFYQRLYLKKGAKKSIIATSRKMIEVLYVMIRTGKLFDSMPENILNRKLTQYGLM

SEQ ID NO: 238635 - protein, 322 aa, unidentified
MTEEKVYVGVDVSKSTLDVAVTDSEEARQFANNDKGISQAVSYIAGLKPAVIILEATGNLEMPLAAALQADRLPVVVINPRQVRDFARATGALAKTDTIDARIIALFGARVKPQIRPLPDKKARDMRSLLTRRRQLVEMLTAEHNRLFQTHEDIRLGVETHIKWLEEALSDINDDLERRIKCSPSWREKDSLLKSVPGVGKVVSTAILIELPELGKLNRRKIAALVGVAPLNRDSGTMRGRRTVWGGRAKLRSTLYMAALVASRRNPIITAFYQRLLYAGKAKKVALVACMRKLLTILNSMMRTMTAWQPQTILNSVSMEVK

SEQ ID NO: 238636 - protein, 336 aa, unidentified
MSTYIGLDVHKDWSFATVLDQTGRVVVQKRLENEHVPSFLENFNVLEIGLEASTHVAPLYRALVGKGFAVEVCHPKKTRYIAEARIKSDRVDSKAIAELVRLDALPKSYMPPPEIAGLRERVRRRAFLVRERAKLMTKIRGLLAYEGVRPPEDFNLFTRKGFDWLRSLGLEPVDCYLRVMEVFNGEIRRLSFELRHMACGDEDVKLLMTIPGLGYYLALLVKAEIGDVNRFKSGDHLCSYAGLVPSTRSSGGVTKRGGITREGSRWLRWAMVEATITHVKCDTAISRSYHRIAERRGRKAALVAIARRLLLSCYRVLKSRRPYEAFPSWSGVYESP

SEQ ID NO: 238637 - protein, 393 aa, unidentified
MDKQIQLIVGIDIGKHFHQATVIDASGNMLGKSLRFPNTTAGGELLMSKITSVNPKGLPLLFGLEATGHYWLPLFAYLTEKGYQIVVLNPYQSDAFRKVSMSSTKTDKEDALLIAELLRFGSFPETKMADEDMIALRNLTRFRLTLNQQVTDSKRRILTILDKIFPEFESMFSDIFGKTGRHLLKKYPTPEEMETVSLRKLTSLITKLSKGHFKKEKAQEVLEKAKTSFGITLALESLTLQLKILLETLEFTEKQLKVVDIQVEDLLPDTCVLLTLPGVSKTLAAAIVSEIGDIKRFRTSAQLVSFAGINPTVRQSGNFLGNRNHMSKKGSPYLRLALWQASITSSRFNPVLKEYYQLKIKEGKSHMTVIGAVARRLTGIIFAMLRDQTAFTV

SEQ ID NO: 238638 - protein, 315 aa, unidentified
MREKNERFVGIDVSKQTLQVCVLPDSVQRCFDNSPSGHLELRQYLASALPQLVVLEPTGGYEMEPLCALWQAGIAVAVVNPRQIRDFGRSLGKLAKTDMLDAELIARYAQTVRPPVRPIPDEESQQLQALVVRRRQLVETRAAEQARKHLAKSRVQASIETLIAHLSAQIDELDGELQKLVEAHPAWHKHDEILQSVEGVGDVTSATMIALLPELGTLNRKQISALVGVAPLNRDSGRKQGKRLIWGGRAAVRAGLYMATLAATRFNKQMSSYLQALRQRGKPFKVAMVACMRKLLCILNAMLRDGRPYNPQLQT

SEQ ID NO: 238639 - protein, 364 aa, unidentified
MVKTPAITGGVDTHADVHVAAALDGIGGLLGVSEFPATPSGYAQLLGWLNSFGTVCLVGIEGTGSYGAGLARHITAAGIRVVEVDRSDRQDRRRKGKSDPLDAVSAARAAQSGRASGAPRGRDGAVEAIRALMVAKRTARAQRTQTINQARALILTGPDGIRARFTRHGPAELVAGLAALRPHPGSMVRYHTLLSLRELGRRAQFLDGQLERLDVLIIPLVTARAPGLLKLYGVGPDTAAMLLIAAGDHPGRLRSEAAWAHLCATAPIPASSGKVARAPAQPRRRPPSQPRPVAHRHHPDELPPRHPRLRPAPHRRGPVQERDHPLPQTLRRPRDLPPPARLAPPSSGSGLTRESAAAPPVLAF

SEQ ID NO: 238640 - protein, 340 aa, unidentified
MTLTTLGIDLAKSVFQLHGVDEAGTVIIRKKLRRSAVLDTLRMLEPCLVGMEACATAHYRAPEISALGHEVKLMPPAYVKPYVKRGKNDMADAEAICEAVTRPTMRFVPIKSAERQGVLVLHRTRDLLMRQRTMLLNAVRGHLAEFGLIAPQGPRKVMELIAQMREGARADLPEIARTALLGIGLQLDALARQIHALERQLLTWHRQDAASQRLETIPGVGIITATALAASIPDPSVFCSGRQFAAFLGLTPRQNSSGGKDRLGRISKMGDGYLRRLLVIGATSVIRRAETNPSATGAWVRSLLTRKPPRVTTVAMANKTARIAWAVLARGEAYRAPAMA

SEQ ID NO: 238641 - protein, 427 aa, unidentified
MAAREKVGEPEFVAFVGIDWADQKHVWCLQPANSTKREGGELEHKPEVVEAWVSELCQRFGHGAIAVAVEQVKGALVYMLGKYECLHRYPVPSTMSASMRQALYPSGAKDDPRDADLLLDLLLQNRDKLRRLTPDNEATRRVQNLVEERRKLVEEKTAQLNRLTGYLKVYFPQMLEWFAKLDTKLACEFLERWPSLEELQAAAPAEVRKFFRQHRGRHPELTEWRLQGIGQAMSAIGDGAVIEAKGMVVQVIARVLRTLLEGIAALDAKITEAAEAHPDFFIFQSFPGAGAALAPRLLAALGSQRDRYGSAEEVQKYSGIAPVTERSGKKKWVHFRWACPKFLRQSFHEWAGHSIAQSVWARAYYQQQRQRGKDHHAAVRSLAFKWIRIMFRCWQDGAAYDENRYLATLAKRGSLLIPVPAAAATSL

SEQ ID NO: 238642 - protein, 386 aa, unidentified
MRKSNDLSRCLAALEQDSTLIAVIEMGKSSWLVAGVVPGIERRPLKKLAANEGALLALLYRWRDEAKKAGHPIKRICVAYEAGRDGFWLARWLRKRKIEAYVIHSTSVCVSREHRRAKTDRLDTEHLMRAFIGWLRGETDHCRMCAIPTLEEEDGKRPSREHEHLVGERTRIINRLKSCLARLGIRDFNPASCKAPERLAKVRTPEGTLIPPNSLDELKHDMAHLRFISDQIDEVEKARLARLQKAPKKGPHAMVRLLASIHGLGIETADTLVHEVFSKNFRDRRGAPRYAGLTGSPDESGERRREKGLARAGNTRVRRSMIQLAWRFLQFQKESALVQWYYKRTADGRKDTRKTMIVALARKLMIALWRFVTTGEIPAGVQLRAA

SEQ ID NO: 238643 - protein, 455 aa, unidentified
MNRKRSKARIDRKMLMVHPNAAAIDVGATMHMAAVRADRTPEPVRSFGTFTTDLHRLVDGFTECGVETVVMESTSVYWIPIFELLDARGFTVFLVNARDAKHVPGRKTDVSDAQWLQRLHSYGLLRASFRPKGQIAELRAYVRQRERLLEYAASHIQHMQKALTQMNLQLHHVVADITGATGLRIIRAILAGDHDPKVLAQLRDYRCHARAETIEKALTGSYRPEHLFALEQALALYDAYHEKVSACDVRIEAVLKELSIGRGRRSDSLLSPRRPRTNPVNGLAFDVRAALFALLGKDLTQIDGLGPYLSLKLVAECGDDLSAWGSAKHFTSWLGLAPSNKISGGKVLSSRTRRCGSRAAALLRLAAVTVGRTDTALGAFYRRLSARVGKAKAVTATARKIAVLFYNAVRHGMEYVDPGASYYETRYRTRVIDNLHRRAKAFGFVLQPVEPSAVS

SEQ ID NO: 238644 - protein, 365 aa, unidentified
MSFVFPSTCPKRYLATFDTTTKGLRAYHDFLSQFHVEAVGMESTGVYWRLVWHALCDDFELILAQPAHMKAIPGQKTDKKDAHWIAKLTRIGLLPRSFVPDETIQELRELTRQRKHYVESRNRETNRIHKFLQSGGIKLTTYIEDIMGLSGRNLLQLLVDGTPITPRIVHQSVYTSLKKKVPQLLEALDGYFSDHHRFMLKQSLEIYDFYQKQIELLEERITVYLSQYENHVETLDSIPGIDVITASVIISEVGVDMSQFPTSGHLASWAGLCPGNNESAGKKRSTKIRHGNSYLKKCLCQAAFAVKRQKGSPLAERYYQIQSRRGSQKATIALAHQLLKIAYILLKEQMTYPEFLAQKRLLGTS

SEQ ID NO: 238645 - protein, 387 aa, unidentified
MQAETPATVVATTTPSDVDTLFASLELSKSKWLLTVNSPGGEKFSKHQLEGGDSGSLLGLLARLRTKAEQRCGRPVRVMAIQEAGLDGFWLHRLLVDNGVESTVVDPASIAVDRRHRRVKTDSVDGETLLRTSMAFARGERRVCSMVRAPSPEEEDRRRLTRERGTLLKERIQHTNRIKGLLNGQGVRDYDPLARDRIARLEAVRTGDGRALPQMLKAEIRRELERIEMATAQLAIVERARDAQLRTQAEGGENPAAMLLEIKGIGAEFASLLWLEALFRNFANRRQVAAYAGLAPSPWQSGAIDRDQGISKAGDRRLRRTMIELAWFWLRHQPSSALSRWFQERVGAGRGRIRRIAIVALARKLLVALWRYVAQGIVPKGAVLKAA

SEQ ID NO: 238646 - protein, 326 aa, unidentified
MQVAIGVDVSKAKLDVALLNPQGKYRSKVFSNEQSGFKALLQWLREQVPDAPAGVHVCMEATGGYHEALALFLHDHGVLVSVVNPLLVKRFAQASLVRNKTDEGDAKVLARFCQMQQPGRWEAPAPGVRALQALVGRLDTLQAMRQAERNRLEMAHDSIRASIVKLIAELDSEIVQVRKQIKKTIDDDPDLKERSGLLQTIPGLGGKTIPQLLAYIGRPERFRSVKAISAYSKMAPMIRQSGSSLNQHRGTHPMGHTGLKQALYFPAMVAGRFNPLVAAFWDRLKAQNKPGKVIVEACMHKLLAIAYGVLRSGKPFDANHQKPTAA

SEQ ID NO: 238647 - protein, 338 aa, unidentified
MGPRRPCPRNPNGHQGREARIQRNRVMDKAPTFVGIDVSKHRLDVHARPSGESFATDYDDEGVAGLVERLAALAPALVVLEATGGLEVRLAAALAAAGLPVAVVNPRQVRAFARATGRLAKTDRLDAEAIARFAEAVRPPVRPLPDEATRHLGALVARRRQLLEMLVAERNRRHAADPALHEGIDAHLRWLEEALAGIERDLGTAVRESAAWCAKEALLRSVPGVGPVSARTLLAELPELGSLTRRQAAALVGVAPFSRDSGKMRGKRTVGGGRATLRACLYMAAVAAARGANPPIAAFYERLRRAGKPAKLALTACMRKLVVTLNAMLRTGTAWKQA

SEQ ID NO: 238648 - protein, 342 aa, unidentified
MATYHIGADVDSRITELAVLGGRRLRHFRVPTAIPPLREVLNSIGGKKVLIIEEGPMADWLCRNLRPAVSEMVVCDPRRNKLICQDGDKTNRIDARKLAELGRAGMLRPVYHSDSQDRICLKQWVSLYVDRVGQAVREVNKLRARCRMWGVRPPRGALRNPPVRTPWLAKLDGGLAGQLRLLFLAFDTMTEIVARCRRELARRAKAYEIVARWQAMPGVGLIRAVTFLAYMDTPWRFASRKKVWRYCGVGLQRFASGTDKRGREKTGSLRLAWSANKRLKNVVMGATMSAIHQGDNVIAMGYHQRIRDGMSEGNARHSLARKQLDRMMAMWKTGGAYAPDLA

SEQ ID NO: 238649 - protein, 383 aa, unidentified
MIIIGVDPHKRVHTASAVEPATNQRVATLEVEASLNGYRRLLRWAGGFSERRWAVENARGLGRHLAQWLVTRGEIVDDVPSTATARVRELSRGGRRKNDVIDAAAAASVAALHGDANLVVTEDLSTVLALLDERRNNVITQRTRLVNQLHALLRDLLPGGGSTDLTAAAASRLLTSVRPQGPVEAARKQLARDLVVEIREADRRLKTLTTQIAATVADTGSRLTKIDGVGPVIAGRLLGRTRQASRFATASAFANYAGVAPVEVASADRARHRLPRGGDRQLNLALHIIALTQVRMHGSSGRAYYDTKIVAGKSHNEAMRCLKRRLADHIWRLMIRDEQEQAAGPGGHSGATLKSSAASPTPAADSSDKSLPGPADRQPTPAP

SEQ ID NO: 238650 - protein, 259 aa, unidentified
MHWFGIDIAKRKFDISLLEGEKSRSKVFDNTPAGHQALVGWLAARGVTPGEAHTGMEATGQYYETLAEFLYASGFRVSVINPLQIKAFGESRLSRQKTDRADATLIAHFVKQQAPLLWQPAPPEIRELQRLLSRLEAVQQMRVQEQTRRHEAQGDALASIERVLALLNEEGQLEQCIKDHIDRHPPLCRQRDLLTSIPGVGDRVSSYCLAWLQAERFADVRQAVAFVGLLPRHRQSGDSVRGKSRLCKLGHARLCQRRM

SEQ ID NO: 238651 - protein, 584 aa, unidentified
MLPHPVPPPQPPRRFGVGIDTSRYGHYAAFLKDDLQPAADELAFAECAAGYALLHERLEQIARRHGPAHYVVRLDAAGQYADNLLHFLHRLAGPGAGTPPAFTLAVSCGDPQRNKNYRAAVFGSQKSDPVEARAAARFALTERPAATSPMPDELRILRQVAGRLQAVVRQRTRLINQFHHLLALTFPELALVTKDLAAGWVLELVHRWPTAALLGVSTTEAIANIPYLPDRHAGALLEQARSSVASLAGPAIEELVRDQVRQLRDSGARQKRLEKLLVGAYRDLPAPNHLESIPGIGAVSAAVLTAFVLDIDRFDMPGKLVAYFGVLPIEVSSGVDRDGQPRGPKRYVMSRRGNDLVRRYLWMAALSAIQHNPAVRALYARVVAKHPQRKAVAVGHAMRKLLHLVFALWKTGRPFDPVHYRWDTPAHVEEEVRDLPLSQESQAAGHKRSAEPARTVVTAACVDTVAPEDALDEHTAVDFAHLKQQLPLARVLDQLGLTPRLRGSGAQRRCTCPLHRGDARGRTFSVNLDTNVFQCFDSGCGKKGDVIDLWAGVRGLSLREAALDLVRTFGLEPAPQKRTEKRNG

SEQ ID NO: 238652 - protein, 306 aa, unidentified
MHACVGIDVSKATLDVAVYGSSEVRAFANSPTGFRRLAAWLLPQCPRQVVLEATGGYEQAALDALFAAGLPMVRANPRQVRDFAKALGQLAKTDRLDARVLAQLAATISLTPYQPACDWQRRLAQWHQRRGHLIQMIGSERQRLERLADPTLLTWARRHIAMLQRELRRLDAQIKHQVATQPALDPLRSLKGVGPVLQAALACQLPELGQLDGKAIAKLVGVAPLARDSGLMRGQRHVWGGRRQIRAVLYMASLTAIRYEPRLRDFYQGLRARGKAAKVALVATMRKLLVILNARMRDARIEQQSA

SEQ ID NO: 238653 - protein, 357 aa, unidentified
MPIVGGLDIHRKQLTFDYLDTVTGEVKRGQVAPADRAHLRAWLARFAGRDDVAFAVEGCTGWRYVAEELAAAGVAAHVGEPADTAAARGRKRHAKTDKTDSRHLRRLLAEGRLPECWVPPAQILEYRALLETYHDLRAAHTAWVQRIHAVFFHQGAPALGEGALRTEPGLEALRAAAAACLSPAGQLQVATALDMLAAVEARMEMLRAQLRDAARHLTGAKVLAARLYGVGPVTALALTCWLGGAGRFSSSRKAVRFTGLDVTVWSSDRKGPPGRLSRQGPPVLRWAVYEAGKTHARSSAPDHGYYATVADRKNSKRAALSEARKIVRQACHILTELGAVSRCRPLRAHQWPGGRPD

SEQ ID NO: 238654 - protein, 354 aa, unidentified
MIIIGVDFHPEFQQIALLNTTTGEVEEKRLAHPDEAEKYYRALASAGETVRIGMEASGHGRWFERLVAELQFDLWIGDAAEIRAKRGRKQKTDRQDAQHILKLMLKDDFPKIWVPSWENRDLRQLLWHRHRMVQARTRVMNQLQAVGLNEGLHCKKKLWRERGRQQLESFALAPWASRRRRDLLELLDRLSPAIAELTQAIEREVENYPAAQRLRTHPGVGVLTALAFVLILGDAERFHCGKQVASYLGLVPLEDSSGKHRRLGHITKQGSSIVRFLLVEAAQVTVRSLPEWRSKYFHLVLRRGRKIAKVAMARRLAVQLFWMMRKQWDYEQLKKFGSHAGQPGNRHGVQSNTE

SEQ ID NO: 238655 - protein, 453 aa, unidentified
MNRKRSKSKIDRTMPMVHPNAAAIDVGATMHMAAVGADRTPEPVRSFGTFTTDLHRLVDWFIECGVETVVMESTSVYWIPIFELLDARGFTVFLVNARDAKHVPGRKTDVSDAQWLQRLHSYGLLRASFRPKGQIAELRAYVRQRERLLEYAASHIQHMQKALTEMNVQLHHVVADITGATGLRIIRAILAGEHDPKVLAQLRDYRCHASAETIEKALTGSYRAEHLFALEQALALYDAYHEKVSACDARIEAVLKELSIGRGRKSDSLLSPRRPRTDQVNGLAFDVRAALFALLGKDLTQIDGLGPYLSLKLIAECGDDLSAWASAKHFTSWLGLAPSNKISGGKVLSSRTRRCGSRAAALLRLAAVTVGRTDTALGAFYRRLSARIGKAKAVTATARKIAVLFYNAVRHGMEYVDPGASFYETRYRTRVIDNLHRRAKVFGFVLQPMEAVS

SEQ ID NO: 238656 - protein, 354 aa, unidentified
MKSKINEFKKETQKNIRKTIKQVIGIDVSKDTFYVCMGIIDQAQVVQVVTQSSFPNTAKGFKQLTDWKSKHVFPSVALFHVMEATGVYYENLAYFLAEGKQNLCVLLPNKAKHFAKSLDIKTKTDKVDAAMLCRIGLERVLPIWQLPSPLMKQLKALGREHRSLKNQMAKIKTRLHAYKHSYCPEKKTITRLKRQHLFLQKQHAEVEKEMKAYVKQDVHLKQRINNIEQVKGLGFMTIVTVIAETNGFAAIENAKQLASYSGMDIVMNQSGQYYGRTRISKKGNSHIRSALYLPAMSAIRYNTRLKQFYENIMLKKTCGKVGIVAVARKMLILIYTLWKSNTIYDPMLNLQKII

SEQ ID NO: 238657 - protein, 330 aa, unidentified
MKDIKVLGIDLAKNVFQVYGTDKRGKGLLSKRLSREKLMEFMAKLSPCLVGIEACTAAHYFARVFKSYGHTVKMMSPQFVKPYVKGNKNDFNDACAIAEAVTRPCMKFVPQKSLEQQDMLLSHRARALLVKQRTAQANQLRGLLAEYGIHLSQGLSTIRELPKMLEPHMDKLTEKAKHIFKHLHEHFKHVDKQIEQSAKRDVRCRELMKVEGIGPVTASAFVATVGDPSVFKNGRELSAWLGLVPKQYSSGNKLRLGGISKRGDCYLRKLLIQGAHAVVRICEKKTDRKSLWVADKKRARGYNLSAVALANKNARVAWALLAHGECYRRA

SEQ ID NO: 238658 - protein, 347 aa, unidentified
MRFYNSPHKHYCGVDLHARTLYLCVINRDGVVLLHRSLPCDPQRFLLAIAPFREDLVVTVECVYSWYWLADLCAKERITFVLGHALYMKLIHGAKAKNDRIDSNKAAVLLRGGLMPQAYAYPADMRATRDLMRRRLHFVRQRGSLLAHIQITHHQYNLDAPGKRITYRSNREGLGEGFEDPSVRQSISADLALADHFEVVIGELELAVLRQARVHDPCALHLLTSVPGIGKILALTILYEIHDISRFPSVRDFASYSRLVKCERSSAGKSLGTGGNKIGNAYLKWAFSEAAVLFVAKSAQGRTVLARLERKYGKSKALSVLAHKLGRAVYFMLARKQPFDPQRFAES

SEQ ID NO: 238659 - protein, 366 aa, unidentified
MKKTNTVRVDGNMIFKGHKLMIGLDLGDRWSFYCVLDEAGKIILEQKVATTPEAMKQTFERIPRSLIALETGTHSPWVSRLLTELGYEVLVAHAQKVQLITKSNRKDDRHDARTLARLARIDPELLGPVRHRSAKAQIHLTVIRARAELVSARTALVNAARGLAKSYGQRLPKCGTQQVSRELAAGLKAELREVLEPLLKEIESLNERIQEYDVRMEKIARESYPQVELLKQVKGVGTQIALTYVLTLEDPHRFPKSREVGCFLGLRPGRRDSGESQPEMHISKEGDRYLRTMLVQGAHYILGPFGADSDLRRWGLKLAARGGKNAKKRAVVAVARKLAILLHRLWVSGEVYEPLRNSDKALRAVA

SEQ ID NO: 238660 - protein, 351 aa, unidentified
MKTNAEQDRVATIGIDTGKNTLHLIGLNSQGKIVLKQKISRGQAARRFANLRPCLVGIEACVGAHHLSRELMALGHEVKLVPAVYAIPFRKSHKNDFRDAEAIAEAVGRPTMRFVPTKTPEQLDLQALHRVRARLVGQRTAVINQIRCFVLERGIAVRKGVRFLRQSLPDILAKRTDVLSPRMIHMLEDLSGDWRRLDSRIDDVTSEIEALAKADAACQRLMTVPGIGPIIASAMVAAIGDGAAFRRGRDFAAWLGLVPKQISTGDRTILGRISKRGNSYLRMLFMQGARVLLLRPANWPKHSFGPWLTTAAQRLHRNVLATALANKLARIAWSVLSRDDDYAPMLRARAG

SEQ ID NO: 238661 - protein, 399 aa, unidentified
MLAVGIDISKSKSVAAILNQDGSLHTSPFEFHHTQPELDAFIKYILNSNQSATILMENTGHYHYPVLKAFREAGLPVCMVNAYQIKKFGDMDLRKAKTDKKDAVRIARYALEKSYSLVPYTSMEQKYEDLKFLARQYNQRMLTLKTNKVFLLNLLDETMPGITNILPLTTRTPETSLSVLFINRFKSYDRIKKMGKSRFLDAFEKIARKSRNRQTKTYGLAIYEAALRNITTRGDNEYTLAAQDQCLELVCESQKAADSIIPKMQTLAETLPEYAVLRSMAGVGDRLGPLILAEIGDIRRFHSGKALNAYAGNDAPPYQSGTFESHNRHISKRGNAALRKYCFEVMQALKLTRPQNDPVYLFLLKKEQEGKPYNVAKMAGVNKFLRIYYARAMETLKQQ

SEQ ID NO: 238662 - protein, 383 aa, unidentified
MQPTQHNDCMPGEVVLAVSLELSGASWKIALHDGKRDKPAIYTVSEEAPASRLEHAVAVIEAVKQKWSLPEQAPVTVIYEAGQDGFWISRALSARGCQVLVVDPASIPVERHARRAKTDRLDAIRLVMCLRAWVRGERGQMRVVQVPSLEAEAQRHLVRDRGELQKEIGQHHDRIRKLLRTVGCWDPVDSKLSSSLEQGLVRCADGSALPALLQARLERECERLVLVEKQFHELEATLMEQLPAPVQQRVTHLMKLKAVGPVGATRLVLELFWRDFHNRRQVGACVGLAPQPYDSGQSQVDQGISKQGNRRVRALLIEMAWFWLRYQPRSALSQWFACRTQGSGPNKRARRIAIVAVARRLAIALWRYLKDGEIPAGANMKAV

SEQ ID NO: 238663 - protein, 346 aa, unidentified
MKKIFIGIDFSKEKFDATVIKAEGVEERAERLHEVFDNKVSGFRRLLRWVKSVADEPDAGLWLFCGENTGGYSKALCNHLYGSGYDMWLENALSIRRSSALQRVKSDKADSGVIAEYAMRNYDQMRLYKPLGKNLERLREVFLYRHNLVKMKASMTVRKGEKKLTQEKSDISRFMAQSSKHLISEFNKKIAECDMKIEKIISEDEELRRNFEIITSVPGVGTQNAVCLMVYTDNFSRFDYDSRKIACYYGVAPFGRQSGTSVNTPPHVSPFANKLIKALLTQAALASINFCPQMAVYYRRLVEAGKKKPVAVNNVKNKLLHVITAMVRNGEMHNPDHDYYAALKVA

SEQ ID NO: 238664 - protein, 482 aa, unidentified
MKKKNSIALVVGIDVHKKRHYARVKNLETREIISPILKIYNSKKGLDFLLEKVKYLMKEHEAKEVIFALEPTGVYWKPLGYALHDRGYRVHLVNPVQVHYKRKEEDPAANKNDKIDPGLICDLVCDGKSNPARFMLGIFRLLQKTVRNRRDLVLDLSSKKIKLKTIVYELCPELVDAFTDITGRLSMAILRFFPSLDIFESTSLKELSSVFRIYGTNNTKITPKKLHSLIQFSLGIKGNNRAHIRQIQMILEQILLLKRQISILNKDINNILKELNQTLTTIKGIGPVLASEVIAEVGDVNTFSNAHQLVKLAGLDTVENSSGQTHKKRYISKKGISSLRVTSILAAFSLMRSCPPFTNYFLYETKVLGKKPMQAVIALADKFLRICFYMLKNKTSFDPKKVGTGNLKTRAKALNQPLNVSLDSKEIANLDINLLEVFRKSSKVVLFDEEDATYVKIRINSKVETFDLEEPRGRILALLNAL

SEQ ID NO: 238665 - protein, 351 aa, unidentified
MMIIGVDYHPSFQTIAFLMEETGECGEQELNHSDGQAEKFYRDLKQRGISVRVGMEATGYSRWFERLLAELGFELWIGDPAEIKAKRVKKLKYDRYDARLLRRLMLENNFPQTWVPSPENRDLRQLLWHRHRLVQMRTRIMNQLQALAMNEGYRWKKKLFSEQGRAQLEKLSLAPWASRRRQELLELLDRIHPTIEELTAAVEQETKKRPEVLRLMTHPGVGPLTALAYVLIIGTPERFHCGKQIGTYVGMIPSEDSSAGKQRLGHISKQGNSLLRFLLVEAAQAAARSNAEWRRRYTHLAMRRNKSIAKVAMGRKLGVRLYWMWRNGCAYSPSFEFGSYVGQLGTGHGVK

SEQ ID NO: 238666 - protein, 399 aa, unidentified
MAAPSLWAGIDAGKLDHHCVLIDASGERLLSRRVRNDEAPLTALIDDVIALADGGLVQWAIDLNGGGAALVISLLLARDQHLLYIPGRIVHHASAAYRGDGKTDAKDAAIIADQARMRRDLLEFRHRDEFTVELRTLCARRTDVAADRNRAINRLRAQLLEYFPALERAFDYSHRKGALILLTGYQTPEALRRIGRTRLEKWLRGRNAYNSVAIADRAIAAANAQHVVVTGQRLGSTIVARIAQQILDIDAELSDLDDMIEERFTQHQQAAVIRSMPGFGPLLGAELVAATNGGLDSFHSADRLAAVAGLAPVPRDSGRISGNLKRPRRYDRRLLRVFYLAANNSIKTCPQSRAYYDRKRAEGKHHRQAILSLARRRVNVLWAMQRDNTAYQSTAKTAA

SEQ ID NO: 238667 - protein, 450 aa, unidentified
MRMQPEEIPDDDHELVIERVCAIDVAKASGKVCVRTPHPNRPDRRTSRVWDVSATSRAVTELAEHLIGEGIERVTVESTSDYWRIWFYVLEAAGLDVQLVNAREVKNVPGRPKTDKLDAVWLAKLTEKGMLRPSFVPPVEVRQLRDYTRLRVDLTRERTRYWQRMEKLLEDALIKVSSVVSRLDSMSVRDMLEALIAGERDPRRLAELARGKMRPKRAALIEALTGRFDDHHAELARLLLSQIDALSSHIDTLTRRIDELLAILTDPRRGPDDGYRIGDDGAAPFVNGLQAAERLAEITGIGPVSAPVILAEIGTDMTRFPTAAHLVSWAKLSPRTIQSGATQRGGKTGKGNPYLKGVLGEAAAVAARTDTFLGERYRRIVKRRGKLKALVAVARSILVVVWNLLADPTARFHDLGADYHTRRADTDRRLRNHLAQLAALGYRVTVEPAA

SEQ ID NO: 238668 - protein, 413 aa, unidentified
MNKMYAGIDVSSTTNYVYLMKPDGSKHSSFSAKNSPDGSKKIADSIVSALTSLDLFASAIGIEATGVYGDNLMFYLRDESNLSQFDCDYHVLNPKQVKKFKETYSDLPKNDPVDAFVIADNLRFGRITKPLYIDDDYKYKALQTLTRARFFAVQNLTREKQRFANYLFMKCSGLAQEKVFSQATGATSMALVSEFESIDELVYMDIDELAAFIAEKGRGKFANPNVVAETVKSAARGSYRLPKTINDSVNQALSVSVASIRAMKEPIKTYDHAIQKQLQLLPNTLTSIKGIGLVYAAGIISEIGDINRFDSHAALAKYAGIAWSENKSGNFTGEVTNLVKSGNRYLRYYLLEAADSIRKCDSEFRRYYDLKFKEVNRFQHKRALALTARKFVRLVFRLLKDNRLYTPPELFKR

SEQ ID NO: 238669 - protein, 402 aa, unidentified
MNNQTLFVGIDVSKLKHDIAFMRPDKQLLGQPFVINDDRDGYQTLLERLQSVAGRHHIQHYKIGLEATSDYWKNIYYFLKQQPDNFQLTVINPLQTHNWAKTELRRATTDPLDAKNIALFMVEKNPLPSLTRAPLLDIIKDIDRQLCALKKQLTMSKNRLRLELTKVAPELEKATSSLNTKRILSVLNCFPTAKEIASASVEDLRQITYGKRNYSLPASFIEKLKILTEHSIAYKTGIGAGYVVQSLVRQIIDSHQEMARLNEQIVRLYQQVNDQQSLLTTIPGIGRETAIALEAYIGDVNRFPNAKKIVAYFGLNPVIHQSGKSKRKSRLQKKGSPMVRQKLFMAVLGIVSNKGGPIYRFYRRLVDSGKPKMVAIGAAMRKLLVTIYAMLKNQQTFDENKM

SEQ ID NO: 238670 - protein, 313 aa, unidentified
MQMVGQAVGIDVSQAWLDVAVGERTALRVPNNREGVRSLVRMVRRERPVRVVLEASGGYEAAATEALRRAEAPVVVVDPTRVRAFARALGQRAKTDAIDARLLALFGQQVATPLRAPAAPQQRELRSLVAQRRRLQALLGRPAPVGAPAAGLAARQRAALKRLLTRQRHEVDRAVVALVRSVPGWRERVELLQTVPGVGPVLASTLLAEFPELGTLNRKQAAALAGLAPYNHESGTLRGRRMIAGGRRPVRNVLYMATLTAVRYNPVLGAAYRTLVARGKPAKVALVACMRRLLLILNTIARTGQPWRSPMAA

SEQ ID NO: 238671 - protein, 374 aa, unidentified
MPTNNASPIVYLAIELSSSSWIVACRQPWNEKVKLHRMDAGDCETLLALILDLRRKAAAQFGVDAIIASCFEAGRDGFWLHRLLSAHGVINHVVEPTSILVTRGARRAKTDRLDALGLLRVLAATFTGDHDACRVVNVPSVSEEDAKRPHREREHLVKERVRIENRIAALLATQGISKRPSLRSWEADLNAIQTGDGRAIPPLLKAELNRLRRRLVITLEMIREVEAERQEALERQDDEAGRTIGALCKIRGIGDNFAAVLTREIFYLTFENRRQIASYLGLAPTPFQSGGMDRDRRINRAGNSRARKTLIQLAWLWLRYQPESSLAQWFRQRVGELKGRTRRIAIVAMARKLLIAIWRFAKLGIVPEGAILAA

SEQ ID NO: 238672 - protein, 338 aa, unidentified
MRYVGVDLHKHSITVCVMILVGRKRKIIERRRFRCDQEEEMAEYFASLGEYQLVVEATASYEWFVRLVEPTADRVVLAHPGHLRVIAKSKRKTDKLDAQTLAEFLALDQIPEAWRPTPRVREHRVLVRHRQYLVGRTTSVKNKLRRVLSHYNADLKGLFTQQGRKYLAKIELSESDRFVTNLLCEELDQHSERLKQANKQLKAFAKQASVAEQEARAVLESIPCVGPVTIDVVLAEAGDIRRFGSQRKATAYAGLAPGIRESAGKSKQLHITKEGSRLLRTILVETAWRLVIKTRRWANVYEKLKARCGAKKAIVAVARRVWCVMVSILQSGQKYQPT

SEQ ID NO: 238673 - protein, 348 aa, unidentified
MKKVMAGMDLHSNNVVIGIVDMDGKRLGSRKVPCELKEVVKFLAPYKKRLERAAVESTYNWYWLVDGLQALKYPVVLANPAGMEQYSGIKHADDTNDAFFLAELLRLNILPTGHIYDAQLRPVRDLLRRRLGLVHQRTSLMLSFKSLYTRTTGQDMALSRLKGLEVKEAQKLYDHPANQLIAGVQIKHIEQLTESIEKIEKAVMGCARELPYYAKLETLPGVGRILGTTITMEVGEIKRFADPGRFASYCRTVEAQRTSNSKKKGENNSKCGNKYLAWAWVEAANFARRYDEQCRKWFDRKAAKTSKVIATKALACKLAKAAWYLMAEGTDYDPKRMFGQAGTTKMNT

SEQ ID NO: 238674 - protein, 349 aa, unidentified
MVIIGADLHKRSHTLVAVDDTGRKLAEKTAPATPAGHLELVRWAARWPERAFALEDCRHLSRALERDLLLAGERVVRVPPKLMAGARRSSREPGKSDPIDALAVARAALREPDLPVASLDGPERDLRLLVDHREDLVAQRTQIENRLRWHLHELTPGDEPSPRSLGHAVVLAELERRLADRPGTVARIARELVLRIGELTADINALQREIGQLVADLAPSLLALQGCGDLGAAKLVGETAGIMRFGSSAKFARHNGTAPQPVWSGNTVRHRLSRGGNRQLNVVLHRIAITQIRLGGPGRAYFDHRLAAGDTKTEAIRALRRRISDQVFRRMRDDEAARAAMPLGLAAAA

SEQ ID NO: 238675 - protein, 313 aa, unidentified
MSQNNPVIVYVGLDVAKLSLQLHLAGRFHSLANDPKGHAQLLKLLRAQPGAQVVCEATGGYEQPIVRALQAADLPVSILEAGRVRHFARAQGQRAKTDPIDAAVLTHYGEIFQPAATPALSAPQQRLAEVSQRRRQLIHTRTMESNRAEHYTDPLCVRQTRQLQKALEKQIDQCDQLITALIAEDAELAHKAARLQTIPGVGPVVAATVLAEMPELGKLNPQTAAALAGVAPYNRDSGNHAGSRHISGGRRPVRCALYMATLSAVRYDRILKDFYQRLRSAGKKPLVALTACMRKLVVLMNHLLKNEKFQLAN

SEQ ID NO: 238676 - protein, 388 aa, unidentified
MIYFGIDIAKLNHFASAIDSDGVVLIEPFEFFDDNDGFYMLLSKLNSFDKDSIIIGLESTAHYGNNLVSFLVSKDFNVCVLNPIQTSSLRKNRIRKTKTDKVDTLVIAKAIALMENPRFVTLYDIALMQLKNLGRFRLELVKQRARTKIQLTSYMDQTFPELQYFFKSGLHQKAVYAILKEAPSASQIASMHLTHLKNLLVSNSHGHFKKEVALELRVLAQKSVGHSDKSLSIQITQSIAQIELLDSQINTVDDEIKDIVESIDSVILTIPGIGPINGGMILGEIGDINRFSKPRKLLAFAGLDPSVYQSGNFSASKTRMSKRGSGALRYALINAAHNLVKNNATFKEYYDSKRAEGRGHYNALGHCAGKLVRVIYKMLTDHVEFNLD

SEQ ID NO: 238677 - protein, 341 aa, unidentified
MKSVGVDLHKQSISVCVMVKDGQKRKVEQRRSLRCADQEGIRRLFEQLGSFQVVVEATSSYEWFFLLIEDLADRCVLAHPKKLRVIAESKHKSDKIDAQVLAEFLLLDMIPESYRPTPRVRQHRVLVRHRNAVQKQITAVKCKLRHKASFYNADIAALFTARGLLHLGKIAMSSADRFECRSLQDQLAFLKGQLQAANQELASFAQTAPVAEREARAVLATMPEVGPVTTDVILSETGDVRRFRGAKRIVAYAGLDPGFRESAGKGKQLSITKEGSRLLRWALIETAWRLVRKTARWRGLFDRLRATTGHKKKAIVGVARRLLCVLYAMLRDGQAYRLASG

SEQ ID NO: 238678 - protein, 358 aa, unidentified
MTTAAEAAAGTILAIDLGRYKSVACVYDRASAAGRFHTLASDRTDLERLFARHPGSLVVIEACANAGWVHDLARTHGLSVRVANTTAEAWKFKHLKRKTDRDDALRLAELAALGQLPTVSLPDPATRQRRGLIAHRQALLAQRVAVQNRIRGLFAGQGLPAPRGHRAWNQTGLAGLDLQAKPLAECGAAELWRGMLHVDLANYRNLLGLIAECEAVLDRLAAADPATQTLLTTPGVGPRTAEVVVAHLHDPKRFASGKQVSAYAGLVPRQYQSGQTDRKGRITRRGPSVLRKLLVECAWVMLQYNPWARATYARLTRGGATRKKPAIVALARKLLVRLWAMLRDGVPWRVDPAPAPAC

SEQ ID NO: 238679 - protein, 344 aa, unidentified
MKIAVLGIDLGKNVCSVVGLDPSGAVVLRRRVRRDTLIDLVAKLPSCIVGMEACCGAHHLGRLFAAQGHDIRLMSPEYVRPYVKAQKNDDRDAEGIAEAATRPTMRFVEMKTEDQLDMQTLHRSRERLVGERTALINQLRAILLDRGIVVPQGKRKLEQYLVILMNEHDGEGLSARMRMLVADIRAQWQELDRRIGEFDAEFVRWAKENEDARRLVTIPGVGVTISTALIAAVGKAETFEHGRDLAAWLGLVPRQSTTGGKPRLMGISKRGNKYLRKLLIHGARAALPYVAEKDTALGRWAKSLLSRVHQNVAVVAFANKLARICWAVLRSGQRFAAKGAPLVV

SEQ ID NO: 238680 - protein, 337 aa, unidentified
MEYFAGLDVSMAETHVCVMDRDGIVIYEVKVPSTPADIAAALARAPACRRIVFETGRMAPMLYHGLSQLGLPIICIESRQAYQVLKSLATHKTDRNDARGLAHLARTGFFKPVHVKSLPAHALRSLIIARKKLVGQRVTLENQIRGLAVVFGVRLPRALTAAFIRQARQASEGITGLSAAMRGLIAARTAVLAAVAAIDADIRQLVRASAACRRLMTIPGVGQLTALAFTAAIDDPSRFRRSRDIGAYLGLVPRRYQSGEVDYTGSISKCGDRRVRTLLYEAANVMLTRYKPALKLKDWAFAIAKRSTMRKARIALARRLAIIMHAMLRDGTEFKPA

SEQ ID NO: 238681 - protein, 337 aa, unidentified
MHFIGLDAHSASFTMAVVNEKGKLCWNRSRPTSEKYLIEMVSKVEGARHLVVEESHMAQWVKMALEPYVDKLIVCDPRHNRWISGEDFSDDRTSAIKLAQLLRGGFIKEVYHPDDTGAQLRSLFLHYYDLNHQIARFKCKLKATFRQVAAPTAGQAIYDGEKRKEFLERLDGYPHIALEAKQHFATIELLERQKEKTFMSIHRKVKKLRAFQIIKNIPGAGPVISAGYVAMIVTPERFSRKNKLWRYARLGNARHESDRVVYKDQPSASGNRVLKWVVMQHFQGAVERSKKLNRFKRRHQELIARGLPWRTARRHVCRHILSVVRAVWMQEEPYRDK

SEQ ID NO: 238682 - protein, 348 aa, unidentified
MKNKSFVGIDISKNVIDVSIFREDTNIKMFPHEVFNNTRKGFGDMCSWLKKSRVVLSQAMFGMEFTGCYSLDLEKFLTSKNYSFCMLSTRIVKHHPMGTIDKRDKNDSAKIADFLYRYDGTECAKPYKLPSKAMQQLKQLVNERKFLVEQRTNFMNRMQMFETKEDSAMYESYIKKLNHDIEKIDQEECELMSKEEDVFDTFQNLLTIPGIGFVNATNIIAITRNFTAFDTARQYARYVGVAPCSHTSGTSVKWRARPSAHCNGQVKADLSMAALRAVEYDVEMQMFYNRKLGGRKDSDTKRKALNAVKFKLIRRMFAIGKQKRKWEVLNTSDDRKNLHIEKSKASEL

SEQ ID NO: 238683 - protein, 353 aa, unidentified
MKAKTETTTASLAVVGVDIGKEVFHLVGLNTDGTIAFRRKIRRSSLKDVFEQLPPCVVGMEACLSAHFVSRTLRTLGHAPRIIPAIYTKPFVKGQKNDYNDAEAVAEAALRPNLRVVQEKSQNQLDLQACHRVRSRLVSRRTATINQIRAFLIEQGIAVRAGARALRNSLFAILENRKDEISPRMVKLIHGLYEDWCCLDHRIETVTGEIEELSRIEPKCQRLMSVPGIGPLISTALVAAIGTGEAFDRGRDFAAWLGLVPRQYSTGGRSILGRISKRGSRYLRTLLIQAARVLLMRPHNWNRFSFGPWLRAASERLHRHKLAVALANKLARIAWSVLRHDKAFDTHLEIAAI

SEQ ID NO: 238684 - protein, 339 aa, unidentified
MQVTTVGLDLAKNIFQVHGIDDHGEVALNRALRRAQVLAFFERLEPCLVGIEACGTSHHWARELIKLGHNVKLIPPAYVKPYVKRGKSDAVDAAAICEAVTRPTMRFVEVKTPEQQAILAVHRTRDLIVRQRTQTINMLRAQLAEFGVILPQGVYHVLQFAKVCVAGEPLNLPKDAEEVVFDLCDQLLFLHAKILRHTRHMTQIAKSEKRVALLRTIPGVGPITASAIVATVGSGKQFNNGREFAAWLGLTPLNRSSGGKERLGHISKMGDQYIRRLLVLGMTSRIRSIRLQPEKFDPWFADILSRKPSRVAAVAMANKTARMIWAVLTRNEPYKVRTV

SEQ ID NO: 238685 - protein, 321 aa, unidentified
MSSKKAKPFIGIDVSKNTLEVAAHEQEKYFRCSNQTSTFPELIAELIPLRPALIVLEATGGWEIPVTQALHQAGLPVVVVNPRQVRNFAKAVGQLAKTDRLDARVLAHFAAAVKPPVRPIKSEPAQQLDALLDRRRQLVEMLAAEKNRRRAAAISPTVREEIEEHIDWLEDRIEALDQQLKQQIKQSAIWERKHQILLSVPGIGSLVALACIAQLPELGQLNRQQISKLVGVAPLNCDSGDRRGTRHIYGGRAHIRNLMYMAALSGIRHNPVLRDFYHRLRANHKPFKVALVACMRRLLSIINVMVRDNTFWVHEAAEASS

SEQ ID NO: 238686 - protein, 356 aa, unidentified
MSQKLDNSPAVIGIDIGKNSFHVVGQYQRGVIVLRQKWSRGQVEARLANLPPCLIGMEACVGAHHLSRKLQALGHQARLMPAKYVRPYSKGQKNDYRDAEAIAEAVQRPTMKFVATKTADQLDLQALHRVRERFVSQRTGIINQIRAFMLERGIAVRQGLRFLRAELPGILATRTDVLSPRMLRVIEDLAGDWRQLDVRIEGLSSEIEALARQDTHCERLMTVPGVGPIISSAMVAAIGAGDAFSKGRDFGAWLGLVPKQLSTGDRTILGSISKRGNRYLRSLFVQAAWVVLVKIGPKHWDRYGLKSWIEAARKRLHHNVLAIALANKLARIAWAVLHKGCAFACIKTNEAASQPA

SEQ ID NO: 238687 - protein, 372 aa, unidentified
MEERTKIHVGLDVHKDSISVAAAELGRAPARLIGKLTHDLNKLLKVLTKIGTAEELHIVYEAGPTGFGLQRALKEKGYVCEIIAPSQIPRRTGDRVKTDGRDCIQLAECSRAGQLSAVWIPDPGDEAIRDLARAREDAVNGRVQARHQLKGFLLRHDIRYTGRTSWSIAYYRWLSTLNFGAGATQTAFTEYWHAVEAADARVERLTKALETSITGWRFEPVARALQALRGVAAITAISLTAEIGDLARFSHPRKLMGYLGLVPSERSSGERTSRGSITKTGNAHARRLLTESAWNYRFKARIGREALARQEALSESIRTTAWKAQLRLTQRFAALRNRGVQINKACVAVARELAGFIWAIGLQAQREKAQAA

SEQ ID NO: 238688 - protein, 343 aa, unidentified
MGEVSTIGLDIAKSIFQIHGVDVDGAVVIRKRISRAKLLEFFATLPACLIGIEACPSAHYWSRRLEALGHAVRLMPPSYVKAYLKRSKNDANDAAAICEAVTRPSMRFVATKSEQQQCGLMLHRSRQPLVCQRTMLSNAIRGHMAELGIISAKGRNGTAELLEIIADEHDDRIPAAARLSLDVLARQYRGVRAEIVAIEKRIHAWHRSSEESRRLEEIPGVGPIVATALVAEVGDWKTFSSGRSLAAWIGLVPRQHSTGGKQRLGGISKQGNRHLRWLLVAGAMAVIRYARQRGTKRPWLARLMDRRPIKVAAVALANKIARMAWAMMVRGERFKEPKLLPAA

SEQ ID NO: 238689 - protein, 345 aa, unidentified
MTLYCGVDFHARQQTIAYCNLQDGEILFTQIRHDDRDALQRFYTQFQTPVIVGLEAGGYSEWFERFLSELGIETWFGNPTEVRRRARSRQKNDWRDAELLLDLMIKNEFPRVSRQTAESRAVLAQLRYRHKLVQARTRATNSLHALAIREGLSLRATILTKAGRAKLNALSLTALQARQREEWLALIDQLSENIKRVEEELIQLAAQNEQVIRLRTHPGIGLLTGLALVHTLAPISRFSNSRKVTAYVGLEPREFSSDTRQRWGGISKAGSPLLRFLLVEAAQQAARADTELKNTYQHLSARRGRPKAKVAVARRLLVRAYILLRDEIDYSTYLRRTVAVRSARD

SEQ ID NO: 238690 - protein, 319 aa, unidentified
MAQNDVVVVGIDIAKDKVDVCIRGLGMRHTFPSTTQGRRKLVAWLRKHQVGKAVMEASGGYERAWTKVLREAAIEVRIVDPKRVRSFALSAGRLAKNDAIDAEMIAWFAETFSEAPSQTHDPAREELQRLVKARLGLIGSRMRLVSQSEHAAPGLVQKAHAHVLKSLASEIAKLEAAICAKIKSMPDFAERAEIIESVPGFAETSSANLVAGMPELGQVSNEIAAALIGVAPYDDDSGKHRGERHIKGGRRWVRNAIYMPCVGAATLNNPVLKAYYQRLLAKGKEPKVAIIACMRKLIVILNTMIARRQKWDPSRYALG

SEQ ID NO: 238691 - protein, 355 aa, unidentified
MNDAKYIGMDVHTATISAAVRDSSGNLVMEATLETKAETILEFVHGLRGSLHVSFEEGTCGAWLHDLLKPHVTEVLVCDSRKNALLRVGNKNDREDARKLSELLFLNKLHPVYHGETGIRTLKELARSYLTITRDLTRVMNRLKAIYRGWGIACAGQQVYAPRYRAEWLAKITEAGVRRRAEIYYQQFDALAALRQEVRRELLAESRKHPAMRLLRQIPSIGPIRAALLIALMQTPHRFRTKRQLWAYCGLALRTYDSGEYRFVGGQLKRSKKAVTIRGLNKNHNHDLKNIFKGAATRAAAAAGPFQNFYEARIANGMKPPMARLTLARKIAAITLLVWKKGVRFDAEQLKQQAA

SEQ ID NO: 238692 - protein, 311 aa, unidentified
MEHSSFIGIDVSKVHLDVHVRPTGETFRVAYDDAGLAMLLERLSGREGAMVVLEATGGYEVRVAATLANAGLAVAVVNPRQIRDFARARGQLAKTDTLDARVIALFGEAVRPPARPMPDDQARALAEVIARRRQLVDMLGAEQNRRRLVRDGRVQREVDAHIAWLEASLSRLDHELTTLMRSTPLWRATDDLLRSVPGIGPVTACTLIADLPELGRLDRRRIAALVGLAPFARDSGAFRGRRMIGGGRGHVRRVLYMATVTAIRYNPAIRVFYSRLRAAGRPAKVALTAAMRKLLTILNAMLRDHRQWQPA

SEQ ID NO: 238693 - protein, 457 aa, unidentified
MKKSHNKRGSRKIVKLESLKQINLNAAGLDIADEEIWVAIPEGRQDISVRQFATFTADLHALADWLEQSQVNTVAMESTGVYWIPVFEVLEARGFEVLIVNARHIKNVPGKKTDIIDCQWIQQLHTYGLLRGSFIPGAEVRSLRAYIRHRDSLIRHRSAHIQHIQKALQLMNLKLTNVLSDITGSTGMSIIRAILAGERDPHKLAQFRHGQCAKSEEEIAKSLHGNYKPEYLFSLRQMVDMYDFYNQQIADCDAQIEAQFAVMKPQVDLETKPLSPAKHSGWRSRNEPAFDLRTSLYKSVGVDLTSIDGIHVLTAQTVLSEIGLDMSRWPTVKHFTSWLGLCPHNDVSGGKVQKRYAKKSKNRTAQALRNAARSVSRSQSSLGAYYRRMRARKGVMQANVATAHKMARIIYFMLKHKTEYHDPGIETYEANLIAQRMKRLQHQATRLGMKLEPISAN

SEQ ID NO: 238694 - protein, 414 aa, unidentified
MRIIHERCAGLDVHKKTVVGCVIVPDGQQEWRHELRTFKTMSGDLLQLADWLRQYGITHVAMESTGVYWKPVFNILEDEFEVMVVNAKHIKFVPGRKTDVKDAHWIAELLQHGLLKGSFIPEAPQRDLRELVRYRTHLIQERTREVNRVHKVLEDANLKLGSVATDIMGVSGRAMLAAVIAGKDDPAALADLAKGRMRTKIEELEQALTGRIKDNHRLLLRLHLEHIDDLNAKLGELEEEIGKLLPPFDQDDLIERLDEIPGINQVTAQIIIAEIGTDMSRFPTANHLTSWAGLAPGKNESAGRNRSSRTLKANRYLRPALVQVAHAVGKTATYLGEKYRRLARRRGKKRAAVAVARTLLVIVYHLMRDGTRFVERGADFFDQLKPRSTQQWLTRRLERLGYKVTLEPIEPAIA

SEQ ID NO: 238695 - protein, 375 aa, unidentified
MIATTRPAMSVSEPTLYVAFELGKKTWNLAMTSGFGVAPWLRSVASRDWRSVERALAQGCVRFGLPAAGPVVSCYEAGRDGFWIHRALDERGIRNRVVDSASIEVNRRARRAKTDRLDALKLVTMLVRVCYGEKKVWSEVHVPSVAAEAARQVSRERTALTQEQTRLTNQMRGWLATWGAVLPRRRTTAWWTTVRDWAEAPLPVEVQARLARAEARLAVIEAQVAELDGQQQAAVTTAAPASALRQLVRLKGVATTGASVLLDEGLLWRAFRNRRQIGGLLGFAPTPYDSGESVREQGISRAGNTRLQSISIQLAWNWVHWQPLSALTQWYRDHFGAGKRMRRIGIVAVARKLVIALWRYVTTGVVPAGAILKAA

SEQ ID NO: 238696 - protein, 449 aa, unidentified
MLTAASRSQHTSKKEGKMSKKESKRSTTNRLSSPVDPTGFASVVGVDVGSQSLVYTICQPDKRPVVKPTELSNDRAGFQQLDQALGTLGVEPSRILIGLEATSRSNENLYQLLADQGYTLCLLHPRQTHQFAQQRGLRAKTDRLDASTIARLLLSGEARVGYVPDELIATYRELERLHSQLSQESARYQNQIHALLVVLFPEFVQVFADPCRPTALGVLKRYPGAAAIRAAGVEAVRATLRELAPRHYGRRTAVELVRLATETAASAVATSARALSLKVLCDQLEQTLANLAQVDGELDRVLDGDEGASHLSSVPEFGRQTVAVLRAELGDVTRFNRMDQAVAYVGLDLEVRQSGKWKGQVKLSKRGSGRVRRLLYLAALRALALPNSPFATYYHRLVARGLKGRQALMAVMRKMLIVACHLLRCNESYDPAKVCAVAGPRPHTPSPGS

SEQ ID NO: 238697 - protein, 343 aa, unidentified
MMIIGVDYHPSFQAIAFLIEETGECGEQELNHSEGQAEKFYRDLQQRGICVRVGMEATGYSRWFERLLAELGFEVKAKRVKKQKFDREDARLLLRLMRENNFPQIWVPGPENRDLRQLLWHRHRLVQMRTRIMNQLQALAMNEGYRWKKKLFSEQGRVQLEKLALAPWASRRRQELLELLDRMNPTIAELTAAVEREARKRPEAVRLMTHPGVGPLTALAYVLIIGTPTRFQRGKQIGTYVGMIPSEDSSAHKQRLGHISKQGNSLLRFLLVEAAQAAARIHPDWRRRYIHLAMRRHKSIAKVAMGRRLAIRLYWMWRNGCEYSKSVEFGSYAGQLGTGHGGK

SEQ ID NO: 238698 - protein, 329 aa, unidentified
MASVSHLAPIHLGLDVHRGTISVGILAADQQVPEVDRIPHDEPSVRGLVGRLGDPRRLRACYEAGPTGFELVRLLRSMGVGCQVVAPSLIPRAPGDKVKTDKRDCRLHRAGELVAIRIPTVQEEAVRDLCRTRADMVADRTRARHRLGKFLPRHGRVWRGGATAWTQAHERWLLAQQFDEPAPRATYAHYRVVLESRDAHLDAVEADLAGWYDRPPFAGQVARLGAYRGVTRLGALTLAAEVCDWRRFAKASQFMGFCGLVPSEYSSGQRTVRGHLTKAGNAHLRAQLVESAWSYQHRPGVGAQIADRQQGLDPWVPRSPVASRAWTRR

SEQ ID NO: 238699 - protein, 484 aa, unidentified
MAKRKMSTFERLSTGRMNRVQRRELGRRVAASDPGMAIVHPNAGGIDVGNESHFVAVPPDRDTSPVREFGCWTAALNEMAEWLKSCRIDTVAMQATGVYWIALYDILEQHGIRVVLVNAQHTKNVPGRKTDVQECQWLMKLHTYGLMRDSFRLQQDMEYVRTIWRVRDRHVKEAGREVQHMQKALTKMNIQLANVISDISGASGQAIIAAILKGERDPHKLADLADYRVKASREEVARSLEGNWRADVLFELQQAVDSHHFAHRQMQECDEKLTLYLASLPARMLAIPARSEDAPETALQKRKKARKPRDNEPRMDMKEELKRICGVDLTSIDGINVMTAFTVISEIGTDMSRFQDESHFTSWMGLAPSKDISGGKAVGRGKKKVKNRVAVVLRTAATSLLASDSHLGARYRHLRRQLPTFKAAVKAMARYLAVLIYRLLTNGEAWVDRGAVQFERRRLEWELISLQSKAKAKGYTLVPLAKAC

SEQ ID NO: 238700 - protein, 321 aa, unidentified
MLRFRLMIKRGLNVSVKETSVCIVDESGKLCREKKVVTHPDDLVAVLSDPAFNFERIGLEAGPLSQWLFEGLAKAGFAVVCIEKRHTKAFLKAQQLNKSDRNDARGIAHMMRVGLFKDVHVKTLTSQKRRALLTARKLLQEKAIAMENDMRARLRNFGLKVGTIRAFKFDERIRELVEAAPDLAEIIEPLLAARQKLREQFVKLDRKVRGEARVDPVCRQLMTVPGVGPIVALAYTSTIDIPSRFRHSRAVGAVLGLTPVLNQSGESSRIGHVSLCGDGMLRGLLYEAPADPRQEMVVAESVGDECRQTARDQKGHRCIGA

SEQ ID NO: 238701 - protein, 361 aa, unidentified
MLSAVNRNNEPKGNRMTVKCMAGIDLHSNNLFCAIVDMDGKRVFEKKLPCDLESVLQALKPFKKRLEKIVVESTYNWYWLVDGLQDHGYTVVLANPAAMEQYHGLKHADDKSDGFFLAEMARLNILPTGNICDRTIRPVRDLLRRRMGLVHHRTSLILSLKSLHTRMTGRDLDTGRLKTLEPADAEKLFAHPADQLITRLDLQLVGQLGRSIQEIERRILAEAKRMPRYQVLQTMPGVGKILGLTIMLETVDPQRFAGPGHYASYCRCVDSRRLSNGKKKGENNSKCGNKYLAWAFVEAAQFARRHDLACRKFHDRKRAQANGIVATKALACKLAKAAWHMMSHHTDYDGGRMFPEVKKNK

SEQ ID NO: 238702 - protein, 384 aa, unidentified
MEKSITLHVGLDVHKESIDIATADVGRDGEVRHVGSIGGDLASLDKALRKLTSKGHRLHVVYEAGPCGFVIWRHLNALGQACDVVAPSSIPKRSGDRIKTDRRDAMMLARLDRSGDLTAVRVPDAADEAVRDLVRAREDGVRECRNARHRLKALLLRNGIAYAGKSSWTAAHLRWLATLKMQHAARQIGFQEYLHSITESTARIARLEQAMREALPEWSLKPLVHALMAMRGVQLIAAMTLVAELQDFLRFESPRKLMAFVGLVPGEHSSGPKRRQGSITKAGNSAARRMLVEIAWHYQHSPRVSPIIATRQDQLPKAVTDIAWAAQLRLHAKFRHLLARRVMKNKAVVAVARELAGFVWAIGCEVQTSGWQGLEPAPASIAAN

SEQ ID NO: 238703 - protein, 345 aa, unidentified
MPIVGGLDIHRKQITFDYLDTATGQVRRGQVSPADREHLRAWLARFAGREDVAFAVEGCTGWRYVAGELAAAGIAVHLAEPADTAFARGRKRHAKTDKTDCRHLRQLLAEGRLPQCWIPPGHILECRALLELYNDLRREHTAWAQRIHAVLFHQGAPALGEGTLRSEQGLAALRAAAADCLSPAGQLQVATALEVTAALEARLHAVRHQLLDAARHLTGAKVLAARLYGVGPVTALALTCWLGGAGRFSSSRKAVRFAGLDVTVWSSDRKGPPGRLSRQGPPVLRWAVYEAGKTHARSSAPDHAYYAQVKENNGGKRAALSEARKIIRQACHILAELGDDALTAA

SEQ ID NO: 238704 - protein, 371 aa, unidentified
MKSIIYLGMDVHTTNYTLCCYTLEDDRMCHLQQIAPDYRLILKYMDQVRRLYNNDVEFLCGYEAGCLGYSLYHQLTAHQVRCVILAPTTMGAVLGVRKVKTDKRDAMLIAKCLAFHTYHPVHIPTPEEEQVKEFIRMRDDHKLALKRIKQQISAFCLRHGFHYTATKSKWTQAHWKWLKSLKPDGLHQETLNEYLLTCSSLCDKLERLDRRIEELAAQEPFQERVRQLTCLVGVKTHTALSIIVEVGDFNRFPTAGKFASFLGLTPGEASSSDRQNRFGITKAGNTHVRRLLVEAAQSYARGQTGRKSKDLKARQAGNKEQVIAYADKGSERLRRRFRQLLYKGKQHNVIKTAIARELSCFIWGMMTDRIA

SEQ ID NO: 238705 - protein, 361 aa, unidentified
MRIIGCDLHARQQTLAMLDTETGEVVNLTLMHEGNQVREFYSQLPRPVLVGIEATGSMHWFLNLMEELGIECRVGHPATIRAAEPRKQKHDRRDADLILKLLAENRFPTIWLPTKELLDLRALVLHRHQWVRIRTRIQNALQAIALANGLRRGPGLWSYDGQAKIAFLPLLPHASYRRSALQALYRSMEEEIDNLTQQVAEQAEQRSGARRLMTHPGVGPVTALATDVFLGDPKRFLDGKALASYVGIIPREYSSGGKQRFGGVTKQGSPLLRFLWCEAGAHAVRRDPELKRFYRRKLVQKGLGKARVAVARKLGIRLWIMLRDEIDYEEFCRRGQKQQSGAACAGMLEVGNGANSHRPVD

SEQ ID NO: 238706 - protein, 323 aa, unidentified
MTKDTIYFGIDISKDVFDVTNSKECYYQFENNHKGFRKFLKLLDNTSHCVMEATGYYHYQLAYYLQENQIKVSVENPLSVKRFIQMKLSKIKTDKSDSKLICQYAEKVDLKLWKGHAKHQIECLQITRLLSVYTKQSTMIKNKIHGESVLRNPSLFVVRSLKRSLKSIKKEMDTLENKLLKLVRETHQDLLTRIETIPGIGRKTAIMLVVLTDGFERFNSASELCSYSGLTPMIRQSGSSVKGRPRISKIGNKKLRNLLFMCSFNACKYNKACKELYERIVAKGKSKKLALIAVCNKLLKQSFAIAKSGLIYDETYRSTLVKN

SEQ ID NO: 238707 - protein, 354 aa, unidentified
MHIVGCDFHSRYQQIAVLNEETGEVVERRLEHGNGEAHAFYASLPKPVRVGIEATGYTQWFERLLQELGHELWVGDAAAIRASVVRKQKYDERDARHILLLLTENRFPRIWMPSLSERDLRQLLIHRVRLVQWRTRIQNQLHAVAMGQGLCRKKKLWTRSGRQELESLPLDPWASRRRRELLELYDRLNPPIEELDRAVWREAHGNPSAARLMTHPGVGPLTALAFVLTMGPARRFARGKKVASYLGLNPREDSSGGHRRTGAISKQGNALLRWLLVEAGQTAARRDPELHRLYQRVKFRRGSPIAKVAVARKLAVRLYWMLRNQSDYAPRKSAAPPMPGSSSSAVMSPCASGR

SEQ ID NO: 238708 - protein, 351 aa, unidentified
MFHQSGEATEMKVTTIGIDLAKNVIQVHGVDERGKAALKKQLKRAQVAAFFANLPPCLIGMEACASAHQWARKLQSFGHSVKLMAPQFVKPYVKTNKNDVADAEAICEAVSRPNMRFVPVKNAEQQAVLALHRARQGFVKARTAQANQIRGLLAEYGIVIPQGIGHIAKRLPEILENAENELPGAFRQLLDRLGDHLKELDRQVGELEVQIQTWHRENEVSKRLAQIPGIGPITASALVASIGDAKSFENGRQLAAWLGLVPRQHSSGGKQVLLGISKRGDTYLRTLLIHGARAVIRVAERKVGHADSWLARLMGRRNHNVAAVALANKNARTVWALLAHGRDYEANYGVA

SEQ ID NO: 238709 - protein, 346 aa, unidentified
MLYAGLDLSRKRLDVHLLDEAGVTIGVDAAAPHADGLRVLAARVARFGEPVHAAIESMNGARFIHDQLELAGWRVDIADAVRVNGMAPLACKTDRIDAWVLAELARRELVPAIWLPDPEVRAERERARFRLHLVRHRSSLKQRVHALLLTHGQPCPVSDLFGASGRALLERLALPEPWAGTLAASLRLIDELDEEIAGCERELRQLGAEHRYVPLLLSVPGIGWVLAYTIAAEIGTIERFASPRKLAGYSGLCPRVYQSGASDRRGALAKNGPRYLRWALVEAASGACRHPVYRERYERTKRRLGRQRGAKVAQVDLARRLAEAIWHMLTRERPFAPAGATDPLAA

SEQ ID NO: 238710 - protein, 345 aa, unidentified
MKHFAGLDVSLDETAVCVVDEAGTMVREARVPSEPEALVGFFQGSGLVLERIGLEACSLSAWLHESLVAAGLPAVCIETRRAKAAMGAMPNKTDRNDARGLAQIIRTGWYRVVHVKSPACRSWRALLAARRLVLNKMRDVENGLRALLREAGLKLGTPARKEFAARVRELTAADPVLSVLAEPLLTIIAAMARELAQLTRRVLDIVRDEPVCRRLMGVPGVGPLTALAFRATIDRPERFRHSRDVGAHLGLTPKRYQSGETDMQGNISRCGDELARTALYEAAHSLLIRSRKWSTLRAWGMQVAKRRGMARARIAVARKLAAILHRMWADGTEFRWGKDDAAVAA

SEQ ID NO: 238711 - protein, 421 aa, unidentified
MTSLATGEFAAYMGLDWANAKHDICLQAASSHQREMTVLEHRPEVIEAWATALLQRFAGGPIAIALELNKGPIVEALRKYDGLVLFPINPMMLARYREAFTPSRAKDDPTDAELQLDLLLRHRDKLKPLAPQSGEMRALSQLVEHRRRLVGDRIRLTNRLTSTLKAYFPHVLEWCPNKDTRLFCDFLSQWPTLKAAQLARRRTLERFFLQHQVRGEQRIRERLDAIKSAVPLTTDEGVVMPHALMAQSLVTQLRVVLEAIERFDQAIAERAQHHPDFALFDALPGAGAILASRLLVAFGEQRERYGSAEEIQKYAGIAPVMERSGKQSWVHWRCQCPKFLRQTFVEWAAVSIRYSFWARVYYEQQRHKGASHQAAVRALAFKWIRIVFRCWQRGTPYNESTYLAALQRQGSPLLSNLTKTS

SEQ ID NO: 238712 - protein, 343 aa, unidentified
MEQLTIGCDLGDRWTQICVLAGGGESIEEARVRTTPAGFRRYFSKRPTARVVIEVGTHSPWVADLLAELEHDVVVANPRVVRLIYANRTKHDRLDAEALARVGRIDPNLLSPVQHRGRQSRADLALIRARDELVQTRSALVNHVRGVVKSAGERLAGCETATFHRKVREAIPPSLRPALNPVLVVLEQLTEQIRHYERLIEDRAERAYPETSRLTQVHGVGSLTALAFVLTLGDADRFEKSRTVGAFLGLARRQRQSGESDPALGITKHGDRYLRRLLVGSAQRILGPFGEDSDLRRWGLEIAKRGGRGGKRRAVVAVARKLSVLLHRLWISGEEYVPIGYTG

SEQ ID NO: 238713 - protein, 307 aa, unidentified
MTENVFGVDVARDWVDVAGPRGVRRVMNEELDALAAEIAACGGRAVFEASGGYETPLREALARAGATAVRVNPARARSYARAMGRLARTDRADAAVLRRMGQRHPDLPRTPLESEDLRKLKALHARRRQLVEDRKREKTRRAQAREPFVLASIERVIALFCEEIAALEARIAELVASNPDFAERAKLMRSAPGIGPVAVAALLAEMPELGTLTPGAAAALVGLAPIARDSGYRTGKRRIGGGRKPLRDTLYMAALSAARHAPVLSAFATRLREAGKAPKQAVIAVARKLIVILNAMIRDGRAYQIRA

SEQ ID NO: 238714 - protein, 428 aa, unidentified
MAKTKAQSVMQTDDDTLYYERCAGIDVHKKLLVVCLRIGRKTESREYGTTTGEIREIVRWLKESGCQMAAMESTGSYWKPLYNIFEQEELPAMVVNAYHIKNVPGRKTDWNDAFWIAKCLAQGLLKSSFVPNREQRELRDMTRFRKSQIEERSRNINRLQKFLEGANIKLGSWLSDIEGKSATALLELIIGKPDFTIDDVKDRMHGKMKSSPEEIFAAIEGYITPTQRTFFAHVMNIIREQTRLIEATDDMIKSSLNDEQKEAVKKLDVIPGIGIVSAEQIVAETGIDMSHFRNQHAFSNWIGVAPGNNESAGKRKSGKTTYGNKTLKSTLTQCAKSAVKNKRTFFSAQYSRLVCHRGKNRATMAVAHSMAIAIYFVMSGAAFEDLGADYYHQFNREKKINSHIKQLAKLGLTFPDEVLLNATLQSTA

SEQ ID NO: 238715 - protein, 404 aa, unidentified
MKYTVGLDWGSAAHAACVIDQEGAIVARFDVEHTAEGLRKLLSQLARIAPPEQLPAALERPSGLVVDILVDAGHPVVPIHPNQLKACRPRYRAAGGKSDPGDAYILADVLRTDGHRFRSLEPLSDEVRALRAMVRSRDDLVAKRVAFANQLRALLESFWPGAAVIFADVDSPIALAFLKHYPTPQRARRLGPKRLAGFLARNGYTGHRTPIELLERLRSAPTSLAGPLEQQAKGDAVLDLVSVLSTLLDRIRRLTSAVEHAVAQLPAGQIVMSFPRAGKVNAAQIVAELGDDPERFPSERQLAAEAGVAPVTSASGKSRAVTFRWACNKRLRSAITTWANNSRHQSPWAQDIYSRARERGCDHPHAIRILARAWIRVLWRCWRDQRPYDPHRHGAASNFLQHAA

SEQ ID NO: 238716 - protein, 349 aa, unidentified
MTSLAEVVDVVIGVDTHKHAHTAAVVAASTGGELEILTAPADPDGYAAFVELADAHSGLRAWAIESTGGYGAGLARHLRELGEWVIELDRPDRPARRHGAKSDPLDAVRAAREALSRTKLAEPRAPGERAALSVLLAGRRSAVEAATVAQRQLHALVTAAPECLRSKFRGQTTTAMVATAARLRCHASWDVETTSTAMVLRSLARRSQAMTAEAADHERQILAIVRSWRPDLLELCGVGPIVAATVLCAWSHPGRVRDDAAFAKLGGVCPIPASSGQTVRYRLNRYGDRQLNRALHTVVLSRLRYDEDTRAYRDRRRAEGKTDREIKRCLKRYVARQLYRQLEALPSTT

SEQ ID NO: 238717 - protein, 392 aa, unidentified
MYIVGIDIGKNHHEASIVSPKGKQIGRSLRFATTHKGADSLMSFIFKNIGNSPCVFGMEATGHYWYPIYSFLKAKGYTIYVINPIQSDSLRKMYIRQTKNDSIDSFLIAEVIRFGQFGTTSMADENILAMRQLCRYRDSVISSRTEIKLRIGTIMEQIFPEYEKQFSSLWVSTSMGILEKYLTPENIENAPIDELFEIIKDKSHNKLTMKKAISIREAAADTFGIKIAQDAFSFQLKQLIDRMNFLDKQIEALDCQILEYYEKFDCYLHTIPGIGMIAAATILAEIGDINRFKSSSALVAFAGIDPTVRQSGEFSSTHNHMSKRGSPYLRHAIFLVATTCSFHNSPLNAYYKKKREQGKHHLTATGAVARKLTTVIYAVLRDGKPYEPKSFC

SEQ ID NO: 238718 - protein, 318 aa, unidentified
MDGKRVIGIDIGKQWLDVAREDVAEVERYANTTPMIAALVKTFNPARDIVVFERCGGYERELEAALAAAGVPWAVVHSAWVKAFRQVQGIKAKTDAIDARLLQGFGRDRLNAGRLRLGRTEDVVLDALMARQRQLKAALHAERCRRETAAIAPARASIERMITQLATELAAIAAELSAHESTDPLLAFKEAVMCERKGVAVATARALLAELPEIGRLDRREIASLGGLASRVHKSGRMEIRRGLVRGRAAVKTILFNPARTAMRCDPEIRAFCDRLRARGKPGKVILVAVMRKLLVRLNAAVRDALNCDHVPAANAAV

SEQ ID NO: 238719 - protein, 464 aa, unidentified
MATSSRQPTRARLEELHCVHPHAAGLDIGSEEIVVAVPPDRDPRPVRAFRTFTPDLNALVAWLVSCRIDTVAMESTGVYWVPLYEALERQGITPYLVNAGHVKTVPGRKTDWNDAQWLQKLHMLGLLQASFRPDADMCVLRTLLRHRAQLIEHRAPHIAHMQQALTQMNLRLSVVLTDIMGTTGQAIIRAIVAGERDPVVLARLRHPRCTSPEETIAKALTGRWQAEHLFILQQALELFDSYTAKIQLCDAEIERQFSVLKPRFESDEPASALPPAKPNSKSKNAPTFNARAEVARISGVDLVAVTGIAASTAQTILSEIGTDMSRFPSVKHFCSWLGLAPHNDISGGKVLRRRTLKVSSRANQAFRAAAQSVARSDSTFGAFFRSMRARLGPQQAIVATAHKIARVVYHLLKYREAFNPESAAAYTCKRREREVKQLTRRAQKLGYTLTPADSASAVSTPSPS

SEQ ID NO: 238720 - protein, 353 aa, unidentified
MSKILAIDLGKFKSVTCLLDTETNETEFWTDRPYLLTVLQKYQPDLVVIESCSTSGWVHDACTAAGFKVLVCNANQEAWKWKNVKRKTDRDDALKLAKLAAVGQLVPVYIPCERQREYRSLVKYRKVVLGRLNRVQNNIRAIFSARGMGMTSGQKAWAQERWEQISQHRKPLQDCCPDELWRGELDLELAEYQRLCEHHQQINHKLQQLAAEDERVQLLQTIPGVGRKTAEVVVAYVDDPHRFQNARQVSSYAGLVPKRYQSGTMDRHGKIHKRGPRLLRGALVEAAWLTLRYNPWAREVYQRICGKQKTRRKKAIVAVARKLLVRCWVMLLRKERWNPEALPRQPQVVVSLG

SEQ ID NO: 238721 - protein, 418 aa, unidentified
MKSIKTEKIKTINQKSLIVALDIGKKIHYGYFRAPNGHDIKPFPFYNTAQSFKKFWEKLCRFKEDHMLNEVVIGFESTGPYAEPISNYLQKKSVKLVQVNPMHTKRIKELTGNCPNKTDQKDPRVIADVISLGHSLTVIVPEGAAAQLRRLTQARERAIERRTAMFNQLQHLVFVIFPELVSIIKPSTKTGMYLIKNFSDPESIVSTGIESLYDIIRKISRGKLGMDRAERLYDAAQQSVGIKEGKESILLEITYLVSSIDSENKHIEILEEQMVSCLGQIPYSHTILSVKGIGHITVAGLIGEVGDFRKFKTISEVLKLAGLNLYEISSGKHQGSRHISKRGRSLLRKLLFFAAINTTRKNGIFHISYQRHLAKGMPKVKALVAIARKLMRIIFAMVRDHCEFDIDYSTQMELRKAA

SEQ ID NO: 238722 - protein, 431 aa, unidentified
MKNNQDKFLIKRGHFSNTLQGYEKFLNTVLSKCLNKDKILFGMEVTGIYGTNLYERLKSDGYHVVMISPDSVKNYRDYKRLNKTDKIDSGCIAELLLNGDAQIVHVAKNGYTDLKAYIRRRNALKVTCTQETNRFLAKVCLYFPDLLKVFPSGRATLKAIFSIYPTPYSIIEADFDELVSVLQKASKNKFGVDKANELIHAARNSIVVRKSISDGELYNIHSLIDSIDSLESEIRNLEKIIDSKAEEFPAYHVLLTLTRCGKITAATIVAEIGDISRFHKASQIVSLAGLYGDNSKSGSSVNKRGKISKKGSRYLRHAIYMVAEFARRNNPIFKAYFTRKKNGDRTKHTLAVNAVANKLCKVIYSLMKNQSTYIIQYRDLVKLSESTQNEFFQNAETDFSAKTRRKKYLYEDEYGELHEFVFKSIKTALIE

SEQ ID NO: 238723 - protein, 347 aa, unidentified
MKRIAVDLAKSVYQVAESVRSGQVVQRKRLNREAFKRYIQEQAEPVEWVMEACGTAHYWGRIAQAQGHRVRLIHPRYVRPYRRRNKTDRNDCDAMLEAARCKDIHPVPVKTQEQQLLQQLHGMRETWKKTRTQRINLLRGILREAGIEAPASTAAFMRAAHELVDRPEIAPLSHQLHIVLAEINLHEQCMVECEQQLKRWHFDDEVVRKLDEVSGIGLLTASALKTAVGKPERFANGRQLSAWLGMTPREFSSGDRRKLGHISRQGNVYVRTLMVHGARSALLAAQRCQARTPEKLTQLQRWAIETAARIGHNKAAVALANKLVRICWAVWCNERRFSGDWQSVKPA

SEQ ID NO: 238724 - protein, 335 aa, unidentified
MEKITTVGIDLAKRVFALHGVNAQGQVVLRKTVQREGLVALVASLSPCVIGMEACSGAHAWARHFQAFGHEVKLMAPAFVVPYRKSGKNDGNDAEAICEAVQRPNMRFVPVKSAEQQAVLALHRVRQGWIEERTATINRIRALLTEFGVVLPNRAPHVRRGALAAGEGLPALARRALDDLLEQLRQLDERIGAYDRELQSQARASEPAQRLMAIRGIGPLTAVAIVATVGNARDFDSGRQFAAWLGLTPRQHSSGGKSRLGHITRRGDAYLRCLLVQGARSVLHTALRHSDRLSRWVLSVQARRGYHKTLVAIAAKNARIAWALLSKGQELRLTA

SEQ ID NO: 238725 - protein, 411 aa, unidentified
MIHARCGGIDVHKRQVTVCVRVASGSKVDLEVREFGTMTRDLLSLSDWLKECGVSHVAMESTGAYWKPVYNVLEGEFTLLLANAQHMKAVPGRKTDVKDAQWIAELHAHGLLRASFVPKLEQRGLRELTRTRTTLLAERARLANRIQKVLEDANVKLASVATDVLGVSGRAMLRQMIAGRDDAKATAQLAKGVLRKKIDSLELALEGRIRSHHRIVLDELLNQVESLDASVTRLDEAIGEALKEADDPFEAAVAILVTAPGAGRVSARAVLAEIGTNMEQFPSAHHLAAWAGISPGNKQSGGKRLSSRINPGNKWLKTTLVQMAQAASHQRGTYLHALYSRIAARRGKKRAIVAVAHSLLVSFYHMLKNGIAYQELGAEHFDKLNQTRTIDRLTARIATLGYRVSLEPVPA

SEQ ID NO: 238726 - protein, 346 aa, unidentified
MNKMDYGGIEVSAEKLLVALERDGVRQPQREFTNTPSDHAALCRYLLRAGRTVRVCLESTGVYGLDLALALSRHPGLQVMVANPRAVRHFATALMRRSKTDPLDAEVLREFAQRMPFQPWRPPSPAALALHALARRLAALTEMQKEEKNRLHAARVSETTPAAVLRDLQRSLRAQQRALQRLTREALKVIEQDPDLKLRFQLLLTTRGIAETSAVQILAELAVLSPNLQVRQWVAHAGLHPRQYSSGSSVHKKTRISKTGNRHLRRALYMPALVAIRHEPHLRAFYQHLLERGKLKMQALVAVMRKLLHALYGMFKSRQPFDGAKLYRLPEETCVLQPGFSTAEAA

SEQ ID NO: 238727 - protein, 490 aa, unidentified
MRFPIVETIHRRCSGEATRFGSERITQMRTPRDGRLHYKVFDEPKPAPAATDPANAIPKEEPMPTAHHQPDPSQFAAWIGIDWADQEHAVCVVDAATGGFERSTLAHEPGRIDDWAAELHRRFPGPIAVCLEQSKGALIYALMKYDFLVLYPINPKQLARYREALAPSGAKDDPADAELLVEFVRRYHERLRPWRPDDETTRLIAILAEDRRDLVDLRTQLANRLQSRLKLYFPLVLELFRRRTKFYAPVVCELLLRWGTLEELQAEGAGDLAAFFRLHQLHQKTIQQDLAKIREAKPLSQDKAIVRSGALVAQALARQLLDLADAIARCEAELAKLMETHPDAQLFTQLPGAGDALAPRLLAAFGTDRERIHSAGDMQTYSGIAPVTKRSGKSQFVVRRHACPDFLRQTFHEFARCSIAKSVWAEAYYRMQRHRGKKHHAAVRALAFKWIRVLYACWKSHTIYNEFTYIEKLRNTRSPLLAYVATNTTS

SEQ ID NO: 238728 - protein, 349 aa, unidentified
MRTFTPPADTRFYAGVDLHARSLFLVILDADGQTRFARNLPAAPEPFLRAVAPFRDGLLVACECMHCWYWLADCCREQHIAFVLGHAYSMKAVHGYKTKCDRKDAEAIARLLKGGAFPPAYAYPKERRGLRDLLRARLRLVRQRAHLYGHVHTARRQANLPPVSSDVKYKSKRAAIIDDIADPFVRRRVETHLALLEPLDAAIRRLEAEIEDAARLIFPAELAVLQSTPGVGAVLSLTILLEIDAIDRFDTRQQFCSYARLCGAVQSSDNKRVGQGNAKAGNAWLKWAFSEAAVLSAQKDERIGALLNRLAAKLGKAKAYSALAHKLGRAFYHMLHTKEVFDVNRFVRR

SEQ ID NO: 238729 - protein, 339 aa, unidentified
MNITTVGLDLAKNVFHVVCLNEHNKEVKKRMLRRNHVRQFFAQLPACTVAMEACATSHYWGRELIALGHNVKLIPPQHVKPMVLGNKNDYNDACAIAETVNRPKITFVAVKTTEEHDMQAIHRMRAQCIRDRTALSNSTRGLLGEYGISFSKGLAVLRRKIPELLEDADNGLSLRFRNLLARRYGQLVEIDEHIAFYTKELELLSKQDDACERLQTIPGFGPIVASAFRSAIGDGRAYVRGRHAAASLGLVPRQCSSGGKNVLLGISKRGDKYLRKLLVHGARTVVLHAANRDDPLSRWINRIRERRGYNRAAVAMANKMARMGWAILRHNTSYEPTLA

SEQ ID NO: 238730 - protein, 334 aa, unidentified
MYKYIGLDAHSSTCTFCVIDEKGVMINSVRIKTNGRLIRNFIRSIEGKKSLTFEECEMSGWLYGLLAKEVDEILVCNPVYNRGYKGKKTDKLDALNLAQLLRGSFLTPVFHNGSQREQFRDLMSAYTDLVIDATRYKNRYKSLFRKTGNRIKGELLYSDESFLRDLQRPDLNFIGTHLYKSLQRYEENRKAFIKEIRKQSKNFKEIRRLQTIPGIGLIRAAQISAQVIDPFRFVNKYHFYSYCGLVRHILESGEREYGSRQIWGNRTLKCVYKMAAQNAIRGDNGLRLYYERLLKKGITETNVRNAVSRKIAAISLSMWKKKTNYDEKKLITVI

SEQ ID NO: 238731 - protein, 397 aa, unidentified
MIAVGIDVSKSKSTVAILNGDGSIRAKPFDVHHVADELQALVDYIKRTSEPPTILMEPTSHYHYPLLKAFTEAELPVCLINPYQMKKYGDTELRNAKTDKRDSLRIAQYALKKSYSLIPYTPQDQKYEDLRFLSRQSSQRISTLTVAKVQLLSLLDETMPGITTILPLKSRDPDNCVLLRFIKRFKSFDVIRKMGKTRFLDSYQVLVKKTKDRFAGSKGLAIYELVLNSVTTRGENPLSAMTQDQCVDLVSTSQKAADEINLQMRIIAETMPEYKVLRSMAGVGDRLGPIILGEIGDIRRFHSGKALNAYAGNDAPPYQSGQFESRNRHISKRGNPALRKACFEVMQALKLTKPQDDPVYLFLLKKEQEGKPYNVAKMAAVNKFLRIYYARAMELYK

SEQ ID NO: 238732 - protein, 402 aa, unidentified
MNAVGIDVSKGKSMVAIMRPFGEIVSAPFEIKHTASDINSLVELINSVEGESRIVMEHTGRYYEALAHQLSEANLFVSAINPKLIKDFDNDSLRKVKSDKADAVKIARYALDKWQNLKQYNVMDELRNQLKTMNRQFGFYMKHKTAMKNNLIGILDQTYPGVNTYFDSPARSDGSQKWVDFASTYWHVDCVRKMSLNAFIDHYQNWCKRKKYNFSQSKAEEIYGKAKELVPVLPKDAITKLIIKQAVDQLNSASTTVESLRTLMNETASKLPEYPVVMAMKGVGTSLGPQLMAEIGDVSRFTHKGAITAFAGVDPGVNESGTYEQKSVPTSKRGSADLRKTLFQVMDVLIKMMPQDDPVYQFLDKKRSQGKPYYVYMTAGANKFIRIYYGRVKEYLASLPES

SEQ ID NO: 238733 - protein, 339 aa, unidentified
MKYTPVGVDIAKHLIQVHFINEHTGEVVDKQLRSKDFLTFFSNREPCLIGMEACGGSLHWARELKKLGHEVRLLQARFVKAFVMGNKNDVMDARAIWMAVQQPSKEIAVKTEEQQSVLALHRSRRQLVKFRTAQINALHGTLLEFGETLHKGRAAMDRELPAALERMKTKLPPYLITVLEDQYTRLSELDMLIDDLEKQLNSVARQSETCKRLMEIPGVGPLIATAAVATMGKASAFKSGREFAACVGLVPKQTGSGGKVRMLGISKRGDTYLRTLFIHGARSAALLTKEPDPWITELKKRRPTGVAIVAMANKLARTVWAIVAHDRKYDKNHVSIRPY

SEQ ID NO: 238734 - protein, 345 aa, unidentified
MQNKTLWVGMDVGAKSFFAAIDFPSIYENQIKRDVSELESREFKITPAGIKSFLRWVDFMQNEFHAEYSSEDCDSLPVHFLMESTGVYSTNIEKMIYAIAPSSTIIITNPEPIKAFRTSLNIKNKTDKIDSQVIARYGIERTPKSRAKLSPELQSLRDLSRARSFLKDQRTAINNYHDNINNSLPKRMCTNISKQIDREIEGLDREIKKIVRENQGIKHEVKIMTSMPGIGLASAVAILGEMGSLKDYETREKMVAMSGLNPVRKQSGSSVNMTRLSKGGSPLVRRFLYMDSKTALPKIPTLQDLYNRLLAKGNTRMQARCAVMRKMLLILRGMVKNDQEFRVLE

SEQ ID NO: 238735 - protein, 340 aa, unidentified
MEIAVLGIDLGKNSCSTVGLDDAGAVVLRRRMRREGVIKLAGKLRPCVVAMEACCGAHHLGRVLRAQGHEVRLMSPEYVRPYVKSQKNDDRDAEAIAEAATRPTMRFVALKSEEQLDMQTLHRARDRLVGERTALINQLRAVLLERGITVAQGRRKLERHLAGLNGPEGLSQRMRVLIEDMRLQWSELDRRIAEFDKELAEWVRNEEAARRLMTIPGIGVLNATALIAAIGQGESFARGRDLAAWLGLVPRQVTTGGKPRLVGISKRGNKYLRKLLIHGARAALPTLLESPTPLGAWLRGLMTRMHKNAAVVALANKLARMAWAVLRHNETFRFAVSATT

SEQ ID NO: 238736 - protein, 429 aa, unidentified
MAGKSLKAARGGPPRRRAQAIGFLPAGGQDWAEKHHDIALFDADWKLVAKGRIKETVEGFAELTAMLAEAGDGVGDPIPVAIETPRGLLVAALRATGRRVYPINPMAVARYRERHVTSGAKSDPGDAKVLADLVRTDRQHHRPLAGDSQQAEAVKVLARTHQMLCWMRGRQHNQLRNTLREFYPGALEAFEDLTHGDALAVLELAPTPSAGRGLSRSKIASALRRGGRQRNVETKAEQIQTALRAPQLEQPPLIADAFGVTVKALVTVLAASTSQVRTLESELEASFGRHPAAEIVLSQPGLATILGARVLAEFGDDPTRYANPKARKNYAGTSPLTIQSGKKKTVHARYIRNRHLIDALHTQAFAALTASPGARAYYDELRAREIGHEAALRRVAGRLTGVLHGCVTTGREYDEATAWSHRNTPAHAA

SEQ ID NO: 238737 - protein, 348 aa, unidentified
MDEITRIGMDTSKHVFQLHGVDLAERPVLRKRLRRGQVEVYFARLAPTVIGIEACGGAHHWARVLQALGHEVKLLPPQYVKPYVQRGKNDAADAEAICEAMSRPRMRERFVPVKTREAQAAQMLLVMRDRLIRRRTQLTNAIRGHAAEFGVVEAKGLNRIGPLLARLASDETLPALARELFVSMAEEEAQLAAQLEAVEARLLAWHRASEVSRRLAKIPGIGPIGAALLVMKAPDPAAFRSGRQFAAWLGLTPKDHSTAGKTRLGVITRAGDEALRWVLVAGAMAVIQQARRGRGVPSAWLTGLLKRKEPKEAAVALANKTARIAWKLMVTGEAYDPHRQQATRAAAA

SEQ ID NO: 238738 - protein, 373 aa, unidentified
MNYSTVYVGMDVHKETFSLCCYTNEKEQAEYPQKVDGHYSKVINYIEAMRFHYGDDALFICGYEAGCLGFTLYHQLTDHNVKCVILAPTTMLQQTGRKKVKTDKRDAALIARCLAHHDYSPVHIPTEQDEQTKEYIRMRDDHKLALKKVKQQILSFCLRHNYRFDGTANHWTQAHLKWLRALKPEGLYAEILQEYLLTYDNLIDKLGRFDKRIEVLASNEAYQENVRKLSCFIGVKTVTALAVLTEVGDFKRFSSAQHFASYIGLTPGEDSSGGDQHLLGITKAGNRHVRSLLVEAAQSYSRGLIGFKSKALKARQDGNPPEVIAFADKVNERLRRKYYRMVLKNNKKTNVAKTAVARELACFMWGMITGNVA

SEQ ID NO: 238739 - protein, 391 aa, unidentified
MDKAWAGVDVGKEFHWAYVANASGKELLSRRVENDETELLKLIDEALALAEEVIWAVDQPGGSAALLLALLWERDQRVLYVPGLSVDRARDAYRGESKTDARDAHLIADQARMRSDLGELRAGEQELSELQLLLARRRDLITDQSRTIARLREALLSLFPALERALDLNSKGPLTFLTHYQTPTQLRRAGHKRIATYLRNRGVKGSNKVANKALAAAKAQSVTLPAQGVAASIVAELARDVLGLKERLKSIDEEIGQRFFARPEARILTSLPGMGPILGAEFLVAVGEITAFESADRLAAYAGLVPAARDSGKRVGNNKRMRGGNKVLKRVFYQSAFASLRSAPESRTFYERKRAEGKRHTQALIALARRRVNVVWAMLRDGTTFESRSAA

SEQ ID NO: 238740 - protein, 315 aa, unidentified
MSENKVEVFVGIDVSKSTLEVRIEPPGEAFQVDNDEKGIKELCTRLSELAPTLIVMEATGGLEMRAAGELAAQGLCLAVVNPRQVRDFAKASGQLAKTDRIDTHVLCGFGRAIRPVARPIKDALVQELDDLVSRRRQLVEMRVQETLRLHGASKVQAKSLKAHIGWLDKRIKDIETDLGARLRSSDAWRVKDDLLLSIPGVGEITSRSVLSRCPEIGKLTRREIAKLAGLAPLNNDSGKYRGERHILGGRADVRSVLYMATVSAIRCNPVIKQFADKLKLAGKAPKVVIVACMRKLLTIMNAMIKSNTPWSPKTA

SEQ ID NO: 238741 - protein, 456 aa, unidentified
MAKPRRSGGHSPSQDELSVCHPNAGGIDIGAKSIYVAVAPNRAEAEVRAFGTMTKHLIELASWLEDCAVDTVAMEATGVYWIPLYEILEERGINVHVVNAHHVKTVPGRKSDVLDCQWLLRLHRFGLLQSSFRPTAEIVELREYLRQHHNHVKGAGSQVQRMQKALTLMNLQLHNVISDITGDTGMAIIRAVVAGEHDPKVLAEFRNHRCKASKPVIEASLTGNYRKEHLFTLRQALELYDHYQRLGNQCHNAADALLQSVNASPDAAHRPPLPKKPKKRTKSTPPVDYRTSLYQLSGVDLTDVPGFSEYTAATLLSEIGTDMTRWPTVKHFTSWLRLTPRTTITGGKHKDRRKLPTTNRASEIFRRAALCASRTKTLIGAVYRRFAQRPDRAMHAIAATAHKLARIVYCMLKDGVPYQEQNIEEWNMQHRDRAIKALKKRAKAMGMELVELLEQA

SEQ ID NO: 238742 - protein, 433 aa, unidentified
MNDHPLPVGIDFSQKQAAIALLLPDGQPLEGHRTFANSTSGYVQAKRYLLDALHAQGLAGLDISGEATNYYWLPFFVRLADDPDLAAQEVQLFLLNPRWVRGFKKCFAPDDKTDAKDAFYIAERTRTRRPPVPWQPQTEWWPLRFYTRLRFHLAQALTREKNFAHVYLFLRCSAYHRTRPFSDTFGATSRRVLTALPALPALTAQPLAERANLLDGWSGHHLPDPLDNARKLQQAAAESFPLEAALAEPVQRVLDLTLQHIADLEALIAQVEQWIADEVQAHHPEVLNLAGILGIGPVLASGIAAEIGDLSRFFHGQKWDKKRQRFRAKNLRDVEDAVAKLAGLWWPPADSGDFVAQERRMAKTGHRYLRYYLIEGADGRRRYLPEYAAFYARKYREVTKHQHKRALVLTARKSVGLIVGLLHRNEAYRAQEG

SEQ ID NO: 238743 - protein, 459 aa, unidentified
MVRKGPSRRDVKVDWKALDIVHPDAAGIDIGSREHWVAISPEKDEQPVRWFGCFTADVERMADWLQSRGVRSAVMQSTGVYWMPVMEILQQRGMEVYLVNARHTKNLPGRKSDIAECQWLLKLHTFGLLNNSFQPSDKVRALRTLWRHRSGLVGQAGSSIQRMQKALIEMNIQLSNVLSDLSGVSGMAIVGAILGGERSPQKLACLADPGVKASRKVIAKSLQGNWREELLFVLRQEVEMYRECRERIAACDGQLQQQLRQMESKVDLQAQPLGPRPQGKRARGNAPKSFDLRSELYRLTGVDWVQVDGFDVQIVQTVTSEVGFDLRAFPSAKQFANWLGLCPTNETSGGKVLKRGTPKVVNRAKVAFRQAASTLLKSKSYLGAQYRRLRTRLGAPKAITAMARKLACLFYRLMTKGSEYVDKGAQYYETRHREQQVRTLLKKAHQLGLQVIQPEGKTA

SEQ ID NO: 238744 - protein, 364 aa, unidentified
MLIIGCDYHPGFQQIACVDTDSGELSERRLAHREQAEQFYRELKQQELWVRVGMESSGHSRWFERLLQELGFELWIGDPAEIQTRRVRKQKTDRQDAQLLLRLMLENRFPRIWVPDAENRDLRQLLWHRHRMVQMRTRVMNQLHVVPLNEGLRRKKALWRPAGRKELESIALAPWASRRRQDLLELLDQLTPKIEELTRALEQEVERRPVTRLLMTHPGVGPLTALAYELVIGTPERFHCGKQLASYVGLVPEEKSSGDRRRLGHISKQGNVLLRFLLVEAAQVTVRSQQEWRSKFFHLAMRRGRKIAKVAMARKLAVHLYWMWRQGCDYGQTQKLGSHAGEPGHPDGVQSNTDVMIGHPAPSK

SEQ ID NO: 238745 - protein, 411 aa, unidentified
MDTLYPRCAGLDVHKANVVVSVRCCDRPGKVFEEVRTFSTMTGDLLALADWLASHGVTHVAMESTGVYWKPVFNILEGGVQVILVNAEHIKQVPGRKTDVKDCQWIAQLLQHGLLKASFVPPQPIRELRDLTRQRTQLIQERAAAANRIQKVLEDANVKLASVATDVLGVSGRDMLEALIAGETDPEKLADLARKRLREKIPALQLALQGRVTEHHRFLLRMHLDHVTHLEELIGRLGSRIEEALAPFAQAVERLVTIPGVSQRVAETVVAEIGANMDQFPSDGHLASWAGMCPGNNESAGKRRSGRTTKGDRWLKRILVQAAWAASHTKGTYLQAQYRRLAKRRGRKRALVAVGHTLLGIIYHVLKRGTTYAELGPDFLDRLEPERLTRQLIKRLEALGHKVTLEPRPAA

SEQ ID NO: 238746 - protein, 418 aa, unidentified
MSADENTRAPRRYLALDIHKHYCVVAGVDREGRILLQPVRVEHADLEEWLKKRLLSSDHVVIESTTNAWHVYDLLEPLVERAVVANPIKVKQIATARVKTDVRDTLILARLLAANLVPSVWVPPIHIRQMRQLLSQRRQLVETHTQILNRMHSVAHRHHLKHERGKRFNEKNTGWQKDGRLSQMEQFQLSLEMENKVYIEKQIERMSGVVRKLCHQKPWADDMTYLMQLPGFGVITAMTVLAAIGEIGRFETPKHLASYSGLTPGLEQSGTKYRGKGITKEGRRELRWALVEAAQMAVKSNPLLKMRFEALQRRMHRNQAIVAIARHLLEVVWYVLTRRQPYRGFTHERIAYKYLTWSWRMDEASRDGLTRQQFARYYLMKLGIGHDLTRIALDPKHPRRLASETEVLALRPKLKQIE

SEQ ID NO: 238747 - protein, 347 aa, unidentified
MLYVGVDLHKDQLTVVGKNAPGEEVLKTRIPCRCVRRVQAFFEGLPRPFKVAVEAVGFYEWFWDLVEPLADQMILANATEVRHRSPAEPKTDYRDARRLAELLRQGLFDLDHHLRCYVPDRELRHLRHLTRRRNNLTRRLVAEKNSFRRITLRHNLAGPEKLDSLSGARWTETYTEPLPDDERDLLRQLVDAMAMFERHRTDLERRIAQLVKTRPDGPQTAQTLGSLPGFGPVVTWTLLAEIGHFARFDRPEELVNYVGLDPRVFQSDATIRHGRITKTGPRDARWVLIQAAWVAAAHDPRCQTLFRRIAKRAGRKKAAVALARKLLVWAWYLIRSGQSYQTNRRSA

SEQ ID NO: 238748 - protein, 316 aa, unidentified
MSKLVTQITLGIDVSKDELVICEWEAEETSTLENKAGAIKAWLGSLYGPVRIAIEPTSSYHLEVVEQAHALGLEVYLINPRQLVHYRLAVNERNKTDPADAALLARYLVREAGSLRPFKPLCAKAQRLWALLKRRATVVKARNQIEQSFRETKLSIKALLSEIRRLLARIDRQMLALIRALGWWPDYQRCLSIPGIGPLNAAALVSTFHRGVFAGSDAFVAFIGIDVRLRESGKYKGKRKLTKCGEAEVRRLLFCAAQGARSYPLFDDYYQNQLTKGLSKIAAKVILARKIVRIAFSLMTNQQLFKKKEITYRQSP

SEQ ID NO: 238749 - protein, 497 aa, unidentified
MGTMGPCGKIRKELHMKKKSIFQQQSQELMRIYEEAGNSKKVLVVAMDYAKKEHTIMFCNGDGYILRKPFGVKNTPEGVNYLIKQVHKSCNYHKIKRKHVFYGGEDCGSYTENFAQCLREHGWLVAGVNAQDAKKQRENIQASTDRLDLLGIARMLINRRGNCSPCQSGAYRNLRTLVRHRRKLVVLTTEERCRMHCVVDRLFPGFLAERNSGLFPFHEPSLRVMEGRFSAAQIKRRKRATLVDLLARAGAQEPAQKAKKLQEYAANVLQPPKEYIATLQTSLTQHVGLYRCLKNNISSLEREMAIWLAQTQGAFLMTVRGIGMVLAAGVTAEIGNPATQKPVNNLVSYAGIIPRVSQTGGSEGSTYVGSVAKRCNRILKDYLVQSASHLGLHGADDLMADHKRRDAAGQHANYGIARRYLRIGMHMMRHCHIYLPEDLRENSTFEARREYYQVTWPYLLDKWKKYGAHEVAFAPENPLGQWRDMVQDVYNITLRIK

SEQ ID NO: 238750 - protein, 467 aa, unidentified
MKRPSEGLRKLPPLRKTADDAVSHRGLENAARFPQLPQPAVPGREPKGVRVPKKKKVEGADLRRVAFADGTPRAQRRNRSGAEGRPAMRTVALDLGGRRIDFCEVSNGVVIERGSVRSLRELRRILGPNTPPAQVAFEACREGWHVASQVEQWGHTPVMVDTTRVKQLGIGQHGRKTDRIDAETLAVGLAAGRIPQAHILSPARQELRLQLSVRRMLVETRAQYVTAIRGLVRARGSRVSSCRTSAFEGKLSQAGLDERTRLLIAPLREPLAVLEQRLGEVDLKLEQLCRDQPEITRLMTAPGVGLIVAAAFVSVIDEARRFRKAHELESYLGLVPREDTTGGRRRIGAISKAGNTYLRALLVESAWCLLRSKGEDPLRRWVRQVTHRRGQRIAVVALARRLAGILWAMWRDESVYDAERVGRMSAMGLTRQAVRVEFEAEALRRAAEKLAWRKRIGRRAALTQTKA

SEQ ID NO: 238751 - protein, 348 aa, unidentified
MLADQLDYVVGVDPHRDLHALAVVHVLSGAVVFEETVAANSDGYALALKFVDAHASGRRAFAVEATGSFGAGLTRFLSGRGERVLEVSRLRRERRSGGKTDALDAVRAARSVLAQERPATPRAGGERQALQALVAAREGAVNAKCAGLGQLRDLLVTTPEPLRSELRPLTQARLLRRLAATRPDTRRDPELRGSMLALRSIARRVLELTAEERALGREIEALTRKLAPQLLEQPGVGPHAAAQLVLSWSHQGRIRSEAAFARLAGAAPIPASSGQTIRYRLDRSGDRKLNRALHMILVTRKRLHPPTIAYIERRLQEGKTRREANRCLKRYLARSLYRLLEHGAPPAS

SEQ ID NO: 238752 - protein, 366 aa, unidentified
MLYLGIDQHARQITVSLRDEGGDVLQARQVSTQPDKINAFFQQLTRERLHDGESFVAVLEVCGFNDWLIRLLHEYHCHQVILIQPDQRKKCKTDRRDAAALSELLWVNRDRLLQGKPVRGLRQVDIARGTDQENRRLTTLRKDAGQARTRLVNRVRHILRRHNLQWQMPTKKFPTKAGIAWLKQVALPEIDRLEMNHLLADLERVQERRKELEQVIAQRCGVSAEAVLLSSMPGVSYFTAVSLACRVGRVERFPRAQSLANYWGLTPGCRNSGENTQRLGKITKAGSGMARWLLAQVTHKVLRKDARLREWFKRIKRRRGSTIARVAVMRKLATIIWHMLSKRKTFAECRALAEAGTKEREKQECT

SEQ ID NO: 238753 - protein, 309 aa, unidentified
MEIVVGIDVSKDRLDVHVWPSGEAFAVARHHAGLLELQARLDGLGPARIGVEATGGYETVVAASLAGQGHPVVVVNPAQVRAFAVALGQRAKTDPIDAAVIARFVAATRPEIRPLPDAATQLLADLVARRSQIVAMIGAEQQRRKRTGERRLLRSLDRLVAALEKELSQVETAIDDAVRGSPAWREKEDLLASVPGVGPQTARRLIADMPELGALDRRQVAALAGLAPFTRQSGRWRGRSVIGGGRASVRSALFVAAMVAARHNPVLKAFADRLKAAGKPRIVALVAVARKLLTILNAVLRDKTPWRTT

SEQ ID NO: 238754 - protein, 395 aa, unidentified
MAVNDDAGRALASFMVEHSAEGFDKLVARLRALGEPGGLTVAIERPDGRLVDHLLEAGHPVVAVSPNAIKAWREGEVVSGAKSDPGDAAVIAEYLRLRFHLLEPLQPFSDHTRALRAAVRARGDLVVQRTAAHNQLEATLDAFWPGAKEVFSDVTCKIALAFLRRYPTPASAAKLGEKQMAAFCKKHGYSGGRSAAELVERLRRAPAGITAVAETAARKAAVGAYVGVIASLNAAIKDLDKEVATALGEHPDGKIFASLPRSGLINAAQMLAEWGDCRPAYDAPEAVAALAGMSPVTKRSGKYKAVHFRWACNKRFRTAVHTFADNSRHGSDWAAGVYAQARARGADHPHAVRILARAWIRVIYRCWSDGVAYDPAKHKAAVALSAGDKPAPQAA

SEQ ID NO: 238755 - protein, 326 aa, unidentified
MEYGAIDLHLRRSQIRILAEDESIVLDRRIDTTRAECDRVFAARPPMRILLESSTESEWVAQHLEGLGHAVIVADPNYAAMYGSRSRKVKTDKRDVAALAIACRRGIYRRAHRVSAAARTLRQTMRVRRQMVRMRSGLISLLRSVLRQHGLRLATGSAEAVLQRLDRLSLPADLTAVLAPVRTVITQLTATLTTTEADVEARATADPVTQRLMTAPGVGPVVALTFQAVLDDPARFGGDAARASAFTGLVPREDSSAERQHKGHITKTGPGDLRALLVQASWVIWRGRRGRRIAIIALARRLTRILYAMWRDQTDFVARPRVAVAA

SEQ ID NO: 238756 - protein, 347 aa, unidentified
MELHAIGIDLGKTLFHLVGVDAGGNVVVRKRCSRTQLLRYTANLRVQRIGMEACSGSHFLGRALREQGHDARLMPAQYVKPYVKTNKSDFIDAEAVAEAVQRPTMRFVPIKTEEQLDLQAVHRVRERWVMRRTAVINQIRGLLLERGVTLSKGRSHLEQALPQILEDANLQLSDSFRVLLAQLKLELEQLTARIEQMDSVIQHTVKENEACQRLTTIPGVGPVTATALVAAIGNGSGFRRGRDLAAWLGMVPREYSTGGKQKLLGISKRGNNYLRRLFVQGARTVMQHRAKQSPGLSSWLAQLLARTHQNVAIVALANKLVRMAWAVLCKNEVYRSPVLATSSLGQA

SEQ ID NO: 238757 - protein, 330 aa, unidentified
MRKWNVILGVDVSKLTLDISSYELELHVKIDNCSAGFKVFQKWCKTHYINLEETLIVMEHTGGYEYRFIQFCEAFSIAYCRVPGLEIKSSMGMTRGKSDEADSFRISKYGEQKIKEIEPSKPMDKNILTLKQLLSFRKRLIRERAGLKSTVSERQHMYEIKTADTITNVSKAKIKSNTKYIDQVEKEIMEIIRANEAMLLNYRIITSIKGIGKVNAWMTIAYTENFTSFPDGRTYAVYVGVLPFGHRSGTSIKRRTKVSNLANKELKQELNQAGKTAMRHDPEIRAYAERKLKNKCFSLVLNNVKFKLILRMFSLVKRQEMYVENYKRVA

SEQ ID NO: 238758 - protein, 394 aa, unidentified
MYYVGIDWAEEKHQVAVVNEEGKCVSEFVVQEDGQGFAHLQAQLAALTPSTINIEHSDGLLVDWLVQAGYSVFVTAPRAAASHRSRDSKDDRQDARLLANLLRTGQEDCRPLVRHSDTVYQLLHLLRALEQLQRQQVRLTNQLRQVLQQYYPTMTHLFSDLHTEIALTFLHTYPTPAAAQALSLSQLEAFLKQQHYNHIQRLPKLYQRLQTPMPTAAVWLGYQQHALALVPLLQTLNQQLTQLRRTMRTIFATHPEASWWQSLPGAGELTTARLLAHIGDNRDAFLSCETLQALAGTVPVTRRSGKYLVVRYRWGCTKALRRALMDFARNSLTTSGWARSYYFDQLQRGHGQQRALRALANRWVRIIWTLWQRHDVYDEARHVANRARNGKAAA

SEQ ID NO: 238759 - protein, 464 aa, unidentified
MPRAPRQLSSRRRPGRLPKELRHVNLLAAGIDVGATSHFVAVPEGRDPEGRTVREFGAFTPDLYALAAWLATCGVTTVAMESTGVYWIPLFEVLSERGFDVKLVDPRQLKHVPGRKTDVLDCQWLQQLHTFGLLAAAFRPDDAICVLRGYLRQRAMLVSYAADHIQHMQKALEQMNVKLPEVVTDITGVTGMGIIRAIGKGERNPQVLAALRDVRCKHDEATIARALTGTWRDEHLFALHQAVDLFDVYQGKIAECDASIETCLQGFEDKRDGDALPPAPRTSKRPRNTPAFDVRTQLHRLTGVDLTRLDGIDGHGALKIVAEIGLDMTRWPSEKHFASWLALSPGNKISGGKLLSSRTKASANRVAAALRMAASTLHHSRSALGAFFRRLKARLGAPKAITATARKLACLVYNMLKHGTAYVDQGQQYYEQRYQQRALSNLSRRAQELGYTLVKASAAGPLPA

SEQ ID NO: 238760 - protein, 425 aa, unidentified
MDARAWCHCRGRHGQHLREGAILDTEGIGVFLGMDVGKTAHHGHGLTPAGKKVFDKPMPNSEPKLRAVFDKLKAKFGTVLVIVDQPASIGALPLTVARDAGCEVAYLPGLAMRRIADLYPGEAKTDAKDAAVIADAARTMPHTLRSLELTDEITAELTVLTGFDQDLAAEATRTSNRIRGLLTQFHPSLERVLGPRLDHPAVTWLLERYGSPAALRKAGRRRLVELVRPKAPRMAARLIDEVFDALDEQTVVVPGTGTLDIVIPSLAASLAAVHDQRRALESQISTLLEAHPLHQVLTSMPGVGVRTAAVLLVTIGDGTSFPTAAHLASYAGLAPTTRSSGTSIHGKHAPRGGNRQLKRAMFLSAFACMNADPASRTYYDRQRARGKTHTQALLRLARQRISVLFAMLRDGTFYESRTPTITLAA

SEQ ID NO: 238761 - protein, 350 aa, unidentified
MNVNHYIGFDIHKKSVSYCVKGADGLIFEEGKLRATHQVLRQWAQKRWEPWRGAMEATLFSGWIYDALKPFAAELQVGHPAMMKAIGASKKKNDKLDARKIADLVRCNLLPACYMAPAEIRELRQMLRYRNLVVRQAVRMKNKMSGLLMEAGAEYNKRRLHGKEYFTELLDTVAEAPESVKDLLRLSRGVLEMFETTQEQLLARLQKDPLLAKRVNLLKSIRGVGEVTALTWALEVSEPQRFSCVARAVSYCGLTSALISSAEKQQRAPISKQRNAHLQTVLIEAAKLAPRWNPQLAALHARELKRGNRNRATLAVARKLVAYLLAVDKSGQPFQVHRQAAAEPEVEMAA

SEQ ID NO: 238762 - protein, 323 aa, unidentified
MTAATGAVVAQATVAATPAGYRQLLKLAGQEPGQRVWAIEGTGGYGAGLTRFLAAHNERVVELDRPKRVARRHGAKSDPIDAIRAAREALGRDQLAQPRAAGQRAALAVRLTARRSAVQAATDAQRQLHALVVAAPDPLRTRLRGLTTARLVATCGRLRQQAAWDPETAATAASLRALARRIQLLDAEIAEHTRAITTLVRAWRPDLLSRTGVGPIVAATVLCAWSHPGRCPSDAAFAMLAGAAPIPASSGQTVRVRLNRSGDRHLNQALHLIILTRLRYDPATRADATRRRAQGNTNREIRRCLVRYVARQLYRLLEANPGL

SEQ ID NO: 238763 - protein, 322 aa, unidentified
MAMLSFGGIDVSKDRLDITVLPDEQCSSVSNDAAGWAELVEQLRGSSITAIGVEASGGYERGVVRALLAAGMSVRQINPFKLRQFAKASGTLAKNDRLDARMIASFVAIMPTRPAQRQAPMIEQLAAMLTVRRQLSDQKVATENASRLLEGAMLQRLSRRRVAGLTADIDLLDQRLVEIVTADAALAHRFRLLTSMPGVGAVLGCTLIALLPELGQMSRKQVAALVGLAPYDFDSGKLKGRRCIWGGRARVRHVLYMAALSASNWNPALKAFHDRLAATGKKPKVVIVAVMRKMITTLNAMLRDGTAWVDRYSGRRSATTAR

SEQ ID NO: 238764 - protein, 387 aa, unidentified
MSQTVAALIPAAVDYERTLVLAIEVSNKSWVLAAQVPDLPHTKAKRTIEPEAEALLAAIAGYRARAAATGRSIERVIAVYEAGWSGFWLARWLMRRGVEVYVVQPSSVPVDRRMRRAKSDGIDSELLLRTLLAWLRGEPRVCSMVPVPDEADEDARRCVRERTELISERVGLTNRIGAVLATLGVSDYNPLLRNRSRRLAELRTALGEPLPANAQAKIKRLLARLELVLTQIAELERERDAVVETEASDRASRMIQQLTALRGIGVQSATVLVREAFVRRFANGKALGSYAGLASSPYSSGGIDREQGIGKAGNRRVRTVMVELAWLWTRYQPGAAQVCWFRERVGATGRRVRKIMVVALARKLLIALWRFVTDGVLPEGAVLKPTA

SEQ ID NO: 238765 - protein, 348 aa, unidentified
MMHFVGLDVSVKATSVCIVDAAGTVILEQKVPTEPADIIALLASLGTPYSRIGIEAGPLSQWLVNALIAAELPVICVETRHMKALLTAQQINKTDRNDARGIAQMMRVGLFKPVHVKTLAAQEQRMLLTSRKLLQRKLLDLESDLRGTLRNFGLKVGVVSNSRYEARVRELVAGFPRLCAITEPLLNVRRVMRQQFAVLHKMLLDTVRGDAVCRRLMTAPGVGAVVALTYRATVDQPQRFVHSRAVGAHVGLTPKRYQSGEIDYDGRVSKCGDALLRTMLYEAAQVLLTHSGKWSWLKAWGMRVAQRRGIRRAIVAVARRLAVVLHRMWVDGSEFRWSKNSTTVPTVA

SEQ ID NO: 238766 - protein, 405 aa, unidentified
MSELEKDLVFAGVDTHKDTHTLCLLDHMGRAIGTFRFAADAKGYDALAGKIGGPATCAGVGVEGTGSYGAGLTRRLLELGYCVHEVMAPGRARRKPGRPKSDPADAEVTARQVLAGANLSKPKDQSGRTEELRQLMIARDRLVQATSAMINAAKPLIVTAPEDLRRSLEGLSRKNLRSALSTLDPAAGGIILALGSLGKAWDLQDREADAIEERMKRVLEANAPALLAIYGCGTVSAAAPAVAGGGNPERLKSEAEFASLCGVAPLLASSGKTERHRLSRGGDRRANRALYQIAVTRMSHDQRTKDYVGKRKCDGKSKKEAIRCLKRYIAREVFRALRNPLEIKGPSWKNLRPARQTLGITLVEAGKALNVGFQRVSYAETGRLMNVRFLEEYDAWLKSQAKRES

SEQ ID NO: 238767 - protein, 320 aa, unidentified
MRNAVGLDISKLTFDASAIVGNAEYSAKFDNDSKGLDQFSDRLKSLGCQNLHICMEATGNYYEEVADYFAQYYSVYVVNPLKISKYAESRFKRTKTDKQDAKLIAQYCRSAQESELVKRQKPTDEQYRLSRMIAAYAQIKSECAAMKNRHHAAKDEEAAKAYAQIIKAMNEQLEVLKEKIKEQTEKPNCKEGVKRLETIPAIGRMTAAVLFHHLTSSKFETSNKFAAFAGLSPQQKESGTSVRGKGKLTKFGNRKLRAVLFMPAMVAYRIRAFPDFIKRLEEKKKPKKVIIAALMRKLAVIAYHVHKKGGDYDPSRYKSA

SEQ ID NO: 238768 - protein, 334 aa, unidentified
MTTWILGIDISKRKFDAALSMGEKFKTKAFPNTPSGHRALLEWLARYDADHVHACMEATGSYWEALATFLHDEGHRVSVVNPAQIHAFAKGLLTRTKTDRQDARLIARFCEAMKPGFWQPRPREERELFALIRRLDALKGMRDQERARLQEAHEAVADEIEGHIEGLERAIRELEARIRDHIERHPGLRDKRDLLASIPGVGETTVHQILSRLSVLSLLGSAKQWAAYAGLSPGERSSGQRQAASSGMVRLGDARLRKALYFPAMVAKQHNPVFRRFAQRLRSNGKRPKQIVVACMRKLLHIMYGVLKSGQCFDPSCYGMPAHTISEMRVARTS

SEQ ID NO: 238769 - protein, 347 aa, unidentified
MKHKLIGIDLAKNVFQVCAVNQAGKLVFNHKVNRARLAEVMTSQEPTQVAMEACASAHYWGRKFERMGHHVILIPPQHVQPFVRGGKSDARDALAIVEAAQRPKLHPVPIKSVLQQDLQSIHRIRSQCIGQVTAAGNQIRGIAREYGVEFKPGIHSLVKQLLEVLEDGENELTAVVRELLFEQHDHLRRLRLRSEALHARMIELASQDPAYSRLLELPGFGPVVSSAYLASIGNGHQFYKGREVSAWLGLVPRQHGTGGKIKLYGMSKNGDRYLRTMLIHGARAAICWSRNKDTPLAQWVNPMVARRGMNKTVVALANKIARIGWRIVARGEYYDVNKAFGSSHPAG

SEQ ID NO: 238770 - protein, 312 aa, unidentified
MTQIICGVDVSSEALDARIGPQGAVARFSSTPEGIESLAVFCREHRVTLVAMEATGGYEKLTYALLWSHGMPAAIVNPRSVRRFAEAMGFLEKTDRIDAGVIAWYAAVKHIVAHQPASAAQERLRALVTRLRQLTELRTMQSNQRRLVGDADINAMFSEMIALITRQSREIEAKIAALLETDPVWRALAACFRSIKGVAGRTVARLMAEMPEIGALSNKAVSKLAGLAPLARDSGKSQGKRATRGGRANLRSILFVVAETVRRHNPEFAAFHKRLTEAGKAKKVIRVALAHKLLVKLNAKARDARKELAIAA

SEQ ID NO: 238771 - protein, 355 aa, unidentified
MDPIGIDVHKRESQICILAEGGELIEQRIRTEPERFAAVLGKRPRARILIEASTDSEWVARCLEGLGHEVIVADPNFAPMYATRTRKVKTDRRDARTLADANVLGAYRPAHRLSDAQRHVRGRLGVREALVRTRTRYISLIRALLRQQGYRVPSGSAEGFVHRVGAMALPGQVRSMIAPLLAVMLPVNRQLAYSDEVIEHLAAQDPRVQRLRTVPSIGPVTAAAFVATLDDAQRFRHAHQVEAYLGLVPREFSSGDSQRRGPITKAGPGRARWLLIQAAVSILRRRPPEAEALWTWALRIAARRGKHVAVVALARRLAGILYALLRDGSVFQPRRAVGVPEAAVEAMNRHATRAR

SEQ ID NO: 238772 - protein, 382 aa, unidentified
MDCVYSCCAGLDVHKKTVVACVRRIASDGQIHREVRTYPTMTASLIDLADWLDSEGVSHVAMESTGVYWKPVYHLLEGRFELLLVNAHHIKQVPGRKTDVKDAEWIAQLLQYGLLKAGFIPPPPIRELRDLTRQRAQLIRERASVANRIHKVLEDANIKLASVASDVLGVSGRSMLTALIGGAENPDQLAGLARGQLRKKQPELILALQGLVTNHHRFLLRTLLKQIDQLENLIAEYASRIDQVMAPFAEAAARLETIPGLGSHAAEAILAEIGDDMSVFPTAGHLASWAGLCPGNNESAGKRRTGKTTKGSQWLRMILVQVAWSASHTKDTILSWTYRRWAKRMGKKKALVALSHKIIVIIYLLLKNQTEYREAYAGPVAA

SEQ ID NO: 238773 - protein, 464 aa, unidentified
MASISNAPVRHRTVGIDLAISAVQVAQIFDDGRAIGKPIRFRLTSTDLRRFVSAIKSGVGADTPITAVMEPTGMAWFPVANWLQRAGIKVIRVKGQRVKALRKYLSEHAKTDAADAHVLGAIPGFGGRGLDPVHVPGPEQHSLQRLTKQRHRYQELVCSARRRVLDLIRWACPALEPVLPDTVTQLTLAILGELLDPRKVVAMRRDVLARFLSQHASGNHPKSGPFIDSLVEKLKAAAEETIELHGDSVDFTALQFEVAQEVEHLRLWDRHVRAIEREVEQIYQRVHPSDALRSIPGIGATLAPLLIGVLGYAKRFRNEDHIRGFCGMFPTRSSSGGIEKPGQRLTKSGSDRVKRALYIAADVARKIDPDLAAVYWRLMVNKGHHHKQAICAVATRLINRIYRVLKTGEPYVLRDQEGNSISVQEGKRIVAAQFKVTARGPPVSPQPAYARTGVEPCSEAANMR

SEQ ID NO: 238774 - protein, 287 aa, unidentified
MAIVILGIDLGKNICSLVGVNEDGAVVLRRRMRRQTVLTFAAKLPSCVVAMEACCGAHHLGRLLTAQGHTVKLMSPEYVRPYVKAQKNDDRDAEGIAEAASRPTMRFVDLKSQEQLDLQSLHRVRSRLVGVRRTLLNQLRAILLERGHIFPQGRRRFEAAIDTLVADPAYEISSRIRQLVIDIRSEWQALDSRIEALNGEFVAIARHDETARRLVTIPGVGVLNATALVAAVGDGAAFRRGRDLGAWLGLVPKQHTTGGKPKLLGNVVCGRDTKDGLTVDRRPVSLI

SEQ ID NO: 238775 - protein, 367 aa, unidentified
MSSVASQAGLIHLGMDTSKNTIMVATLLPGEESPVTDRIANEEAAIRRLAGRFADWSVLRCWYEAGPGGYELYRLLASMGVACQVVAPSLIPKGGSDKVKTDRRDARRLARLGRAGELTPVRVPSAAEEAVRDLARARDAMLADRKRAQQRLTAVLMRHGRVWRGASYWTRAHRDWIAAQRYAEPALAAAISCYRATLAVREAELAAIEAELIPWAQREPLAGPVARLGCYRGIAELGALTLAAEVADWRRFPAARAFMSYTGLVPAEYSSGERTRRGHITKAGSEPVRTALTEAAWSYRHAPAIGAGLRRRQAGATPETLARSWTAQRRLHARYVHLVHDGGKAAPEAAVAVARELAGFAWAEMTA

SEQ ID NO: 238776 - protein, 327 aa, unidentified
MVREGQVATTKGGMLETFGSLGRVRIAIEVGTHSPWVSRLLEGLGHEMIVANPKQVKLITESSRKDDRLDAPTLARLARIDPQLLRPIQHRSYKAQGVLMIIRVRAALIAVRTSLVNTARGLAKSMGERLPKCDADQMGVLQAVSLPPELRQVLEPLLKEVESLTEKIKDSDREIEQIARKDYPETALLQQVAGVGPLIALTFILTIEDKDRFQKSRDIGCYLGLRPRRSDSGKSQPQLRITKEGDPYLRTMLVQGAHYIVSRRGPDTDLKRWGLHLSKHGGKRGKKRAVVAVARKLGILLHRLWKTGEVYEPLRNHNPRKERKKAA

SEQ ID NO: 238777 - protein, 467 aa, unidentified
MKHNQQRKRTGKSERRVSTSLFERIQPNAAGVDCGQKSHFVAVPPERDPEPVREFRTFTADLQRLAQWLAQCGVKTVAMESTGVYWIPLYEILEQHGFEVVLVNARDVHNVRGRKSDVKDCEWLQQLHSVGLLRASFRPAAAMVPLRSYLRQRAILVEELTARIQRMQKALTEMNLMLHTVVSDITGVTGLKIIHAILAGARDPERLAVHRDGRCHASHQELVAALTGNYREEHLFSLRQNFTAYQFHLQQIAECDIEIEALLNTLAAQQPPPSALPAPRAKTTKKHAPAFDIRTPLHVLTGGADLSQIHSIGPQAALQLVAEIGTDMSRWPTEHHFASWTTLAPNNKISGGRLLSSRTPPSANRAAVILRRCAMSLGRTSTALGAFYRRLAVRIGKAKAITATARKLALLVYRVLSGNLVYNDPGATAYRQLNRARELKSLRKRAKLLGFDLFDQSTGDLLVNAVS

SEQ ID NO: 238778 - protein, 457 aa, unidentified
MQQYYLGSDVSKGYSDFVILDSQKRRVEENFQLDDTIVGHSFLYDRLLIFFEEHPDAELCAAVESTGGYENNWYNTLRKFQSSLNIKTARLNPAGVCKNIEAGLKRVITDKISAQGVAEYLIAHSEKVMYQQQDYWASLRKQWSFIKMLTKQSTQLLNQLESLLYSANPEILKYCQDGVPAWVFKLLKKYPTAAKLGKARATSVARIPYISISRAKELVASAKTSVASTTDTITGQLISATVGQIQHLQKTIRAQTKIMAAECTLQEVELLKTFTGIGDYSAIGLMLEIQAVARFSTAKKLAAFFGLHPVYKISGDGASGFRMSKKGRKEPRRILFMVAMSAINSNSLIRDLYQKHVENGMEKMTAIGLCMHKILRIVYGMLKNNTPFNPEIDLKNRERTSEQPQKERKDKSRRYQDFDATAPISGRQRKKRAERKLSQNAVSVECGICAPAPQLSS

SEQ ID NO: 238779 - protein, 337 aa, unidentified
MEQQTQYVGIDLHRRRSVIVRRTDAGETLDTVRIDNDPVALAQELAKAGEHPEVILEACYGWYWAADVIQECGGNLHLAHPAGNNWGNRRVKNDERDATDLVDLLRLGRLAEAWVAPPAQRELRELVRYRAKLVHLRTSLKAQVHAVLAKEGVPVPMSDLFGVAGRHLLDDVALGDAYRLRVNSLRDLLGHVDREIALVENQVAPIFAGDLGYHAVQAIPGVGPVLAAVFVAEIGDVSRFTSARHLCSWAGLTPKHKESDVVVRRGHITKQGSRLVRWAAVEAVARQSTDSPIRRHHRQVGERRGTKIGRVAAARKLLIYVYYGLRDGEIRCLAQAE

SEQ ID NO: 238780 - protein, 401 aa, unidentified
MQDTQQRDAVDVFVGVDVGKGQHHAVALDRNGKRLYNKALPNDEVKLRALIAELKTHGRLLFVVDQPSTIGALPVAVARAEGVLVAYLPGLAMRRIADLHAGEAKTDARDAAIIAEAARSMPHTLRSLRLADEQLAELTMLCGFDDDLAAQVTQTSNRIRGLLTQIHPALERVLGPRLDHPAVLDLLERYPSPAALAGTNEKTLANRLTKLAPRMGKGLAAEIVQALSEQAVTVPGTQAATIVMPRLAQQLAALRQQRDEVAAEVERLVLAHPLWPVLTSMPGVGVRTAARLLTEVAHKAFASAAHLAAYAGLAPVTRRSGSSIRGEHPSRRGNKVLKRALFLSAFAALRDPVSRAYYSRKIQQGKRHNQALIALARRRCDVLFAMLRDGTIYQPKSAPNA

SEQ ID NO: 238781 - protein, 376 aa, unidentified
MTQIAPHSATVHLAIELSRSAWLVAARLPGVEKPSLHRIEGGDTAALLALVETLRARAAARLGAPIRVACCFEAGRDGFWLHRLLTAEGLAAYVLEPTSILVSRRARRAKTDRLDALGMLRVLAAYLGGDRQVCSMVRVPTPEEEDAKRPHREREELVRERVRLENRIAALLATQGVRERPSLRSWERDLAALRTGDGRPLPPHLRAELDRLRRRLVLTLELIREVEAERDAALAAEPRDAVGRKIAALCRIRGVGANFAAVLTREVFYRAFANRRQLAGYVGLTPVPHESGEADRDRRISRAGNARARTTLIQLAWLWPRYQPDSAPARWFRDRVGTLRGRTRRIAIVAMARKLLIVLWRYAETGLVPEGVEVAA

SEQ ID NO: 238782 - protein, 347 aa, unidentified
MRYVGLDVGKWKCRAAIMDQEGLILDEFWFTNNHEGIEALTAKLTIQDRVAMESTGSVWTNLYDRLDDRHIHVSLANPLKTKAIASAKIKSDKVDARILAHLLRSNLIAESYVPTKPLREIRALIRHRVAIVKIRTMVKNQIHAIIDKHGFTCEFSDMFGKSGMKWLRSRELPSLDKLMLDNHLTHLENLNQQTDRVDEEIHRKACEDDDVRLLLSLTGVDVYTALLMKSEIGNIDRFPDYKKLVSWAGLAPSLHQSGRVEYHGSITKQGSKMLRWIMVEAARVAVNHDPRMRSFYDRVKHRRGDQKAIVAVANKMLKITWFMLTRREPYESRNEKRYLQKLNSAAV

SEQ ID NO: 238783 - protein, 352 aa, unidentified
MEMVSGLDLHRSQITFRTVDLRTGELQRGKIYPGAREAVREWLDQFQSGTDAHFALEGTTGWRFVVEEIERRGFTAHLADPAELSERRGPKRRAKTDHADCELMVNLLLEGRLPQSWIPPAHILELRALVRLRKTLLDQRIEWQQRLQAQLFQQGVVPGLRLCRPEDRRRLAEMQMSPAGRQTMQTGLIMLDGFDTQLKPLSAQIVSLAKAQPGCRALEHELYGVGWLTSAAILAELGDCRRFHSADQAVRASGLDITVHESNGKRPGGHLARQGPQVLRWALFEAAQCAARQSSPDHAYYLKVRDRIDHNRACLSVARKICRRACHILKNLGDAAMAAPKPPSARQESSAA

SEQ ID NO: 238784 - protein, 355 aa, unidentified
MNDAKYIGMDVHTATISAAVRDSSGNLVMEATLETKAETILEFVHGLRGSLHGSFEEGTCAAWLHDLLKPHVTAVLVCDSRKNALLRVGNKNDREDARKLSELLFLNKLHSVYHGETGIRTLKELARSYLTITRDLTRVMNRLKAIYRGWGIACAGQQVYAPRYRTEWLAKITEASVRRRAEIYYQRFDTLAALRQEVRPELLAESRKHPAMRLLRQIPSIGPIRAALLIALMQTPHRFRTKRQLWAYCGLALRTYDSGEYRFVGGQLKRSKKAVTIRGLNKNHNHDLKNIFKGAATRAAATAGPLQNFYEARIANGMKPPMARLTLARKIAAITLLVWKKGVRFDAEQLKQQAA

SEQ ID NO: 238785 - protein, 348 aa, unidentified
MYYTGIDLHKSFSHLTTVDEKGDVIEQQKIYNHPDKIINYFQKIGDTHKAVVESTNGWYWIADLLHGNGIEMVLANTNKLKAISTAKIKTDQIDSTTMAQLLRIDYIPEAHQIDPVLRDKRDLMRARLRLIQRKTCFVNSICRLTEKFNVTDPDDLPGLFQFQYKQLDEHVNFLNEQVKELEKTIYPQVVLNEDVQRILWIPGIGKISAFTIFLEVGDFSRFPTEKQFFSYSRVVPAASNSGGKCKHGKKESKAGNNYLKIVFNDAAVCAYTNYPEIRDFYQRKCRKKNKHLARNLVAKELARIVYHVITKKSDYDFTFKGKKLSRVKVRHWPSPTSPGTVLDPRDPN

SEQ ID NO: 238786 - protein, 395 aa, unidentified
MFIVGIDIAKRSHEAIIIAEDGQVVRKAFSFRNNCTGYNLLLEQVRRLTLVKSQIVFAMESTAHYWLALYARLLKDGYTVMVLNPIQSHSLRELYIRKAKTDARDSLIIADLVRFGRCKASNVPQDKILALRELCRSRAYLVDMAADLKRKLIALLDRIFPEYESLFDSVFSKASIAVLSKYSTPQKVKNANLRKLTDLLMESSNGHFGEWKAHQLKEAACSSFGIDDSGGVYSTLLGMFLEQILSLTAQADSLEKQISVFFQEFNNPLNSIPGVGTVLAATILSEIGDITRFSSADKLLAYAGLDPSVKQSGEFKSNQNRMSKRGSPYLRRAIWLASTVAVHRDPMFQTYYEKKISEGLHYMNVIGHVSRKMTAVIFAVLRDGQPYQPILQSAG

SEQ ID NO: 238787 - protein, 424 aa, unidentified
MKVTYQTCCGVDVHKSFLVATIIKTTAGIEPSYQKKRFSTFNNSILDFKSWLLKNECHDVCMESTGKYWVPVFNLLEDQINVTIANPKWVKAVKGNKDDTKDSKWIGDLFRLGLVKSSYIPCRLIRILREYTRYRYKLVSCRSSEKNRYQNALTVCNIALDSVVSDIFGKSSSSIIDYLLEQSGTTINHEEISSKLLKSLKSKEDAVIESIEGYQMTDAQKYRMRLIRAHMDYITAEINDIDKQIESLISSDPDYDKAIRLLTTIPGVKRDSAITIISEIGIDMSQFCNSKRLCCWAGLTPGNNESAGKKKSVRITRAGVYLKPALVQCAHAAVKSDKSPYYKTKYESLVKRRGKKRAVIAIARMILIAIYRMLSTGEVWNPSDLYKIDMPAPLAEKQKAKAIKQAKKLLQKEGLLPPDEPLAS

SEQ ID NO: 238788 - protein, 394 aa, unidentified
MDEQESPRVVIGMDPHKRSVTIEVMTAGESIVGGGRFPTDADGYARLLAYARAWPERVWAVEGCAGIGKHVADRLVADGEEVVDVPAKMSARVRIFATGQGRKTDATDAHSIALVGVRMSGLRPVVNDEQLEILRMCVDRRRSLGEEHTRKVCQLHKLLLELIPGGAKTFLSAAQAKELLRTVRPTTAAGKVRKAHATELMADLAKIYARTKAADKELKALVVESGSSLMGLHGIGPSGAARLLVEVGDITRFPDRNHFASWTGTAPIDASSGEHVRHRLSRGGNRQINRVLHVMAIVQLRTRTTEGRAYYDRKKAAGKTSMEALRCLKRRLSDLVYKAMLDDLVGHTTTGPGGQRGDDSDSSATGSQPNTGSSDKPLPGPATAKPTTTLPAAC

SEQ ID NO: 238789 - protein, 329 aa, unidentified
MTNYSDQHAKVHLGIDVSKRTLDVCILGEDTPQEEGESFVVTNDQEDVEEILSRLAKMGTSVELAVMEATGRYERLAATMLAANGVSVAIVNPRQARDFAKAIGQLAKTDKIDAFVLARFARAVEPRASVIPEEEAVALQDILARRRQLIEMLGSENNRLHMAPKALAKRIQAHVQWLEKEIERTDSDLDRAIEDNAAFKANEALLRSVPGVGRVLSRTLLAELPELGIIRHKRLCALVGVAPFNRDSGQTRGKREAWGGRAPVRATLYMGALVATRHNPHIKEFYERLLAAGKPTKGALVACMRKLLSILNALMRDRAIWRCPHALTP

SEQ ID NO: 238790 - protein, 352 aa, unidentified
MRTSQKAAGIIATIGIDIGKNTFHLVGLDKRGAIVLQQKVSRGQLERRLANIPRCLIGMEACSGAHHIGRQLAAVGHDVRLIPAQYVKPFLKGHKNDYRDAEAIAEAVQRPTMHFVAIKTPEQLDLLALHRVRSRLVGQRTGVINQIRGFLIERGITVRQGPMPLRKALAEILSSDTGVLSPRMVGLVTDLVQDWRRLDERIAAVSAEVEALAEQDDGCQRLMTVPGVGPIISSAVVAAIGNGTGFKQGRDFGAWLGLVPKQESTGDRTILGKISKRGNKYLRTLFVQAAHVVLVRRPSAAMRSLWPWIEQASKRLHRNMLAIALANKLARIAWAVLARGRAYQPRNTVDAA

SEQ ID NO: 238791 - protein, 439 aa, unidentified
MHRKKSKANRSRSVNLQALPVINPDAAGIDVGAKEHLVAVPCDRDPQPVRTFQAFTPELHELARWLKRCGIKTVAMESTGIYWLSLYEVLEQYGFEIRVVNARHVKHVPGRTKTDVLDCQWIQKLHSFGLLNGSFRPDQQIRKLRTYMRLRENLVVSRTEAVHHMQKALFEMNVQLTNVISDITGETGLHIVQAIIAGERDPKQLAALCSSRIKASRETVAKSLHGNWDEALLHCLKSALETYGFIQGQIQECDHCIQRQLAQLDSRAPLPNPPISLKAQLHRVCGVDLTKIPGIKEQAAQVIISEVGLDMTKWNTEKQFSSFLGLSPDNSISGGKVLRRSTRKVYNRAADALRLCAQSLTRSKSALGAKYRRLRARLGAPKAIVAMAHHLARLVYRMLRYGQSYVEKGIHDYELKFRLQRIKWLKKEAKSLDLQLVAA

SEQ ID NO: 238792 - protein, 298 aa, unidentified
MKLTRIGVDIAKQVFQLHGTDRSEQTVWRRRVPRERWLQALREVAAPGCEIGMEACGGAHHWARQLQAMGYRVKLIAPQFVKPYVKSNKNDANDAEAICEAMSRPGMRFVTLKSTRQQDIQALHRVRASLMEQRTAKGNQIRGLVAEYGLVAPRELSSLRRAMPCWLEDADNGLSACFRQLLDGLWRDLRGVDDRILELDHSLADLAQADPDARRLQKLRGVGPLVATALIAAVGDAKQFASGRQMAASLGLTPRQHSSGGKDRLLGISKRGDAYVRSLLVHGARSALRTAPAKRRST

SEQ ID NO: 238793 - protein, 348 aa, unidentified
MATTYIGIDLHRTVIQICVLDEQGEVVREERISYHSLAEGLRAVEAVKGFAPGCRVAVEALGLNRWFVNACQAAGLDVLVCDARKLGLRKLGKKTDRRDAYEIARRLRLGDLDRMARTYYPSDTEYGRRKLLRVRHYLVQMRLQTTNQLRAILNAYQLEAPRCELYSGPSQAKLAALRLPEPDLQAAFDALRAVLERVQAEIRALSRRIDALPRQEAEIQTLVAMLPRIGAQSAATLRAEIGDARRFRTARAVAAYGGLVPTVAQSGDVAHHGRLTKQGNRELRWILSQWAVRLISFDPLVADWAKRKGRRMHRNKVRMALARRLLVGVWITLSRGEVFDLRRCLGLA

SEQ ID NO: 238794 - protein, 340 aa, unidentified
MEYGAIDLHTRRSQIRIVTADGTAVLERRIDTRAAEFARVFAGRPRMRILVESSTESEWVAQGLEALGHEVIVADPTYAAMYGSRTRRIKTDRRDVAALADACRQGIYRPAHRVSAEMQRRRQQLRTREHLIRMRTQTINAVRAILRQAGVRVPSGMTRTMVSRVREAPLRPEFEAAIAPLLETLDALAPIIARQDAWVRQTAAHDPVAQRLMTVPGVGGVVALTYQAALDTPTRFAGQAGRASAYLGLVPGEHSSGERQRKGAITKAGPRAPRALLVQAAWTLWRTGARQAPALHAWVEQLAARRGRRIAVTALARRLSRILYALWRDDTVFVRRPLAA

SEQ ID NO: 238795 - protein, 285 aa, unidentified
MGQFVGLDVSVKETSVCVVDDAGAVLHESKVRSTPRAIVGAVRRYAPEACRVGLEAGGASSWLCRELIEAGLPVIHIEARHAHRALSMRLNKTDRNDARGLADLMRVGWFKPAHPKTMESHRLRSTLLARKRLVDIRRHMENQLRNIIKTSGAVLGSTAGRGLLKKVETACEGDASLTIICKPLMEVIKTVRSQTAEYDRLLRGMARLDATARRMTTVPGVGMMTALAFMSTIDDPNRFRRSSDVGPFLGLTPRRHQPARWTGRGVYRSKAMALCEPISTRRLPC

SEQ ID NO: 238796 - protein, 392 aa, unidentified
MLLDPPFDGQTAIHTQFGAIFISLELSRSSWLITSLSPGNGEKMSKHSVVAGDIAGLLARFAEFRGKAELRTGKRYPIIVIQEAGLDGFWIHRVLEGEGIESHVVDAASIATPRRRRRAKTDKIDGEALLRALLAYKRGEPRVCAMVVAPSSEEEDRRRVCRERQTLIGERIAHVNRIKGLLFSQGISGYEPLRRDRRTRLEALRTGDGRALPAHLKAQISRELDRLELLLEQITAVEAERDALLAAVSGDVRNQPEGPQPVAMLLALKGIGAEFAAVIWSEGLCRRFSNRRQVAAYAGLAPTPWRSGAIAHEQGVSKAGNPRLRTTMIQLAWLWLRHQRQSALARSFHEQAQHKGRRKSAIVALARKLLVAFWKYVTSGVIIEGAVMKNSA

SEQ ID NO: 238797 - protein, 388 aa, unidentified
MSQTAAVLTPAAVDYERTLVLSIEVSNKSWVLAAQVPGLPHTKAKRTINPEAEALSAAIAGYRARAAAVGRSIERVIAVYEAGWSGFWLARWLMSHGVEAYVIQPSSVPVDRRMRRAKSDGIDAELLLRTLLAWLRGEPRVCSMVPIPDEADEDARRGVRERAELISERVGLVNRITAVLATLGVSDYNPLLRNRHHRLAELRTGLGKSLPLNAHAKIVRLLARLELVLTQLAVLEHERDAVMEADASDQASKMIQQLASLRGIGVQSATVLVREAFVRRFANGKALGSYAGLASSPYSSGGIDREQGIGKGGNRRVRTVMVELAWLWTRYQPAAAQVCWFRERVGSTGRRVRKVMVVALARKLLIALWRFVTDGVIPAGAVLKPAAT

SEQ ID NO: 238798 - protein, 352 aa, unidentified
MEHFIGNDLHTRYQVVAWVDEQTGEICKRRLEHTGEEVETFYAQFPRGTVVGIEATLPAYWFERLLKKLGHELWVGDAARIRAYEVRDQKFDPRDAGNILDLLHAGRFPRIWVPTLEERDLRQLLVHRLKQVRARTQVKNQLHYLAMSQGLCRKRKLWSARGRAELEGLALLPWAARRRKELLEELDRRDEHVRELDRAVEEAGKARPEVALLRTHPGVGMVVALAFLLSVGPIERFPHSRKLVSYWGLNPREHSSGGRQRLGSISKQGNSMMRWLLIEAAQTAARFDPELRRTYQRLKSRRSSGVAKVAVARRLAVRLYWMLRTRHNYAQLVHMSGSPSSAVVPSPAGSRL

SEQ ID NO: 238799 - protein, 346 aa, unidentified
MEHYAGVDVSLELSSVCIVDAKGKIVREAKVASDPDALVAFFKGLGFPVARIGLEAGPLSQWLYAGLAQAGFEAVLLETRHVKAALSAMTVKTDRKDARGIAQLIRMGWFRPVHCKSPGSQEMRALLVARKQLLGKLRDVELSIRGILRGFGLKMGVVTRRNFEARARELSAGQTMLETVIGAMLTARAALQAEYAKLHKTMLAIVHDDKVCRRLMTVPGVGPVVAITFKTAVDDPARISKSKAAGPLFGLTPKKYQSGETDVTGGITRAGDTMVRTALYEAANILLSRVTRFSALKRWAMEVAKRRGLKRAKVALARKIGVILHRMWVDGTDFRWTKAECGAAVS

SEQ ID NO: 238800 - protein, 332 aa, unidentified
MAITAWLGIDIAKQKFDVALNWNTRRRAKVFRNDAEGWQVLLRWLKDLGVDRVHACLEASGHYGDGLALHLHDAGHLVSVVNPAQTKHFGRVKLGRNKTDRADAALICDYCRLFEPAAWAPPSAALRQLRDLVRTREALSASRVEWTNRRGSGQGTAAADAAMAGVIARLEAEIAALDQAIRHVIEQDEGLQVRHGLLISVPGIGTHTAALILSELPGPNVLHTAREAAAYAGLNPSHRQSGSSLDAPSRISRIGNATLRTALYLPALAAIRWNPLVAALRRRLKDQGRLKPKQIVAAAMRKLLHLCFGVLKTGKPFNPDHTTSTQEAAGTA

SEQ ID NO: 238801 - protein, 421 aa, unidentified
MRKADTRKVKAIGDDTLIVAVDIGMEMNRGYCTTPDGRSSKTFKFDNTRAGMDTLWDMITINKNRFKCNEVIVGYESTGPYGEPMLHYLMKKPVRIVQVNPMHTKKVKEISDNSPLKTDDKDPRVIADIIRWGRALSIVIPEGDAAYLRRLNNSRERHVRERTALVNQLQQLVFLLFPEFRTVIKDIKCKTPLYLLRKYPTPETLSVLDKDVLGEEMRKRSRGKLKEHHADMLINLARNTVGIREGAAGLSMDIRHILIQLEMLTNLIAELESEMEIALGRIPYSSKLLSIKGLGVVSVAGIIGEIGNFKKFNTRSEIMKLAGLDLYEISSGKMKGQRRISKRGRSLIRKILYYTAIQTIRKDGILHDYYTRLTDGGMKRMKALIAVSRKLLGIIYAIVRDDSEYSANFASMKRQVIKKAA

SEQ ID NO: 238802 - protein, 345 aa, unidentified
MNDHRVIAIDLAKTVFQVCVFDKHMKVLSNKSTRRTALLRFLAKQSPALVALEACGSSHYWGRKALSFGHRVAIIPPKQVTPYRQGHKTDGNDALAIGIASQQAKIKTVGVKTREQQSLQSDKRVQEHLSDHLTATGNLLRALVAEFGIVIPKGLAAFRRMMPCILEMADNGLPDAMRQSLSLAWQQWQFLAEQLAQAQRLLKQRVQQLEPCQRLMALEGIGDKNAIGLYVCIGNGQHFKNGRETAACIGVTPKQYSSGGQVHLMGIGKFKGDQRLRSSLIVGCRAAVNALGKRPPRNAKEVWLKQLIERRGPGRAAVALANKNIRTAWAMLHNNTAYEPQRLVA

SEQ ID NO: 238803 - protein, 343 aa, unidentified
MKIYALGIDLGKTVFHLVGLDASGQVVVRKRCSRTQLLAFTANLQVQLIGMEACSGSHFLGRALRAQGHEVRLMPAQYVKPYVKTNKSDYIDAEAIAEAVQRPRMRFVPIKTEEQLDLQALHRVRERWVMRRTAVVNQIRSLLLERGLTLPKGRRHLDEQLPRILEDAELNLSDSFRVLLAQLKLELEQLAARIEEMDRVIQKTARENEACQRLTEIPGVGPVTATALIAAVGNGSTFKKGRNLSAWMGIVPGEYSTGGKQKLLGISKRGNKYLRRLFIQGARSVLQQRHKQAPGLSSWLAQLLGRTHQNVAVVALANKMVRIAWAVLYKNERYRAPALAVTT

SEQ ID NO: 238804 - protein, 386 aa, unidentified
MPQPKDDLSRSLVAFEQHRTLIAAVELSLATWLVGGIVPGIERDPLKKLVSDEEGLLKLLYRWRDEAVKAGHKITRMVVAFEAGRDGFWLARWLRARGIEAYVIHPTSVAVSREQRRAKTDRLDITLLKRSFLGWLRGEKKHCTMAAVPTLEEEDAKRPTREREQLVGKRTGIVNRMKAALVRLGIRGFNPKLRKAARQLAGLRTPEGRPIPPNTLAELEREMAHLRFIDEQINQIETSRLKQLKQALQQGANTRVLQLQRVNGLGIETADMLTSEVLSRDLRDQRAVARYAGLTGSPDESGSRRREKGLAKAGNARVRRGMIQLAWRFLVHQKDSALAQWYQASVAAGKKRKTMIVALARKLLIALWRFVTTGDVPQGVVLRPAA

SEQ ID NO: 238805 - protein, 340 aa, unidentified
MTITTIGIDLAKNVFAVHGVDQNGKTVLVKSRVTRAALPGLIAGLPPCVIGMEACSGAHYWARLFRQYGHEPRLMVAKFVSPYRMAGKSGKNDAADAQAICEAVRRPHMRFVPVKDESQQAMQCLHRTRQGFIEEKTAIYNRLRGLISEFGVIAPQSTDALRHMVSAHKNSLPLQVQQCVDDLLEHVDRIEANITEYDRILSRMARTDHRSQRLMKLKGVGPTTACALVACIGNAHDFKNGRQLAAWLGLTPSQYSSGGKSKLGRITKAGDSYLRTLLVQGARSVLIGAERRTDSFSRWGCSLVKCRGYWRAVVAIAAKNARLCWASLHYGDDFRLYSAS

SEQ ID NO: 238806 - protein, 366 aa, unidentified
MIVIGADTHKRTHTCAAAKAGTGEVAGELTAAARKPGFRELLDWGRSLDEERTWALEDCRHVSGNFERFLVDHGERVVRVPPKLMGESRKGERSRGKSDPIDALAIARAALKEGPETLPAAHLDERALEVKLLLDHREDLVRSRAEDQQRLRWHLHDLWPDFELPAGCLDRSVWLNRVARKLARAEQMARVRVSRELVRTIRDRSKRAKELERELTTLVATEAPELLELQGCGTLTAAKLIAEIAGVGRFQSDAKLARLAGVAPIPASSGNRQRHRLDRHGNRQLNCALHRIAVTQGRVHPPAREFLARKQAEGKSRMEALRCLKRHLVRAVWQALRASRDGESLNSLSPLADSPNLRPAADLALT

SEQ ID NO: 238807 - protein, 343 aa, unidentified
MNNNHYIGADVHCNNIEIAVRYRGEIAQRFSLPTTLSAIRPVLDSIKGPKQMAIEEGPMSGWLYRSLNADVDKFIVAEPRRNKLISSDGDHDDPIDAAKLAMLLEGGFLKPVYHSSQQNRAILKKWVNLYHDTIKNAVRSINKIRACCRMEGVKIQAVAIKNPEKRSSWLGQIKTPGLADQLIMLFVGYDAVAKQCRMAKQKLITLSKAYPVVKQFEQLPGVGVIRSITFFAYIDTPWRFKKKNKLWKYCGIGLERVTSGKDKKGRPKPAKLQLPWICNRVLKNAMLGAALSAIRQKNNPFACDYERMVSHGMIQSNARHTVARKLLTAMWGLWKSSYQQTLN

SEQ ID NO: 238808 - protein, 370 aa, unidentified
MKKNSTAKQSPKRARAWQEGPITIGLDLGDKTSRYCVLGDQGEVVSEGSVATTKKAMLGKFGTMRRCRIAMEVGTHSPWVSRLLASLGFEVIVANARQVQLISASSRKNDRIDAQTLARLARVDPQLLRPIRHRSERGQQDLMTIRIRATLVEARTGLVNAARGLAKALGERLPACDADEMGVEQMKELPEALRDRLKPLLEEVESLTEKIQALDTSIEQIARTQYPETELLQQVSGVGTLIALTFVLTVEDPQRFHKSRDVGCYLGLRPKQSESGQSQPQLRITKEGDRYLRSLLVQGAHCILRQKSPDTDLQRWGRKLCARGGKNAKKRALVAVARKLAVLLHRLWVCGEVYEPLRNSQAAALSRQAA

SEQ ID NO: 238809 - protein, 463 aa, unidentified
MGIRYAGIDWATEKHDVRVADETGAKLLAATFAHDEAGLSALCRTLVKMEVGLVAIERPDGVLVERLLDAGLKVLALHPNKVAAARDRFRVSGGKSDRFDAFVLCELARTDNHRFRVLEPDSDQTKALRAMTRAREDLVHTRTAVVNQLRAELDRCWPGPLRLFSHMDSEILLAFLERYPSPVDAHGLGIVGMQAFLKREGYSGGQKPEALLAKLRSAPEGRVGELELAARRQLVLTYVAMVRTLNGQIKSLEREIRTAVRAHPDGRVFLSLFKQAHSFITAAELLAEIGDCRARYPSRDALAADAGQSAVAKESGKRKTAQFRWGCNKRLRVAFSRLADSTRHWHPWAQAVYAQARQRGLEHPRAIRTLGRAWCRIVWQCWQSRTAYDPRHDTGRCNDTSPSPSQARQAPSPTSLPPRGWPPISLLQPARSSRAHSTDDQPSSTHSHRGLTQDVYGDDAVAV

SEQ ID NO: 238810 - protein, 393 aa, unidentified
MRKPKKQKKPLNDLSRSLTPFDPNQTLTAVVELSKKSWLVAGIIPGVERQPLKKVAADANQLLKLLERWRAEAEKAGHKITRIAVAFETGRDGFWLARWLRARGIEAHVIHAASVPVSREHRRAKTDRLDTEQLKRAFLGWLRGERNHCKMATIPTFREEDDKRPHRERETLVGEQTTIINRVKATLTRLGIRNFDPKLEKAPERLEQLRTPEGEAIPPNTLAELNRDFARKQLVAEQIQQIEKARLEQLKMAPKAGPNLMILVLMRVIGIGIETADMLVKEILSRNLRDRRAVARYGGLTGSPDESGSRSREKGLSRSGNARVRKGMIQLAWRFLRFQNESALAKWFEIRTKNARTSRKKMIVALARKLLIALWHLVHDGVVPEGVVLRPAH

SEQ ID NO: 238811 - protein, 340 aa, unidentified
MGEVTTIGLDLAKHVFQVHGVDADGATVLRKSLRRAQVLTFFSRLPPCLVGLEACATAHHWARELSALGHEVRLMPAQYVKAYVKRNKNDAADAEAICEAVQRPTMRFVAIKTAEQQAGVLLHRGRERLVRQRTGLVNALRAHLAEFGIIAPQGLRHVGKLIAIVRDDNDARLPALARQVLMVLAGQIEQLEAAVAALERQLVAWHRVNPVSQRLATIPGIGPIIATAIAATVTEPGQFRSGREFAAWLGLVPRQNSTGGKTRLGGISKRGNQYLRRLLINGASANLLRSRATKADPWVIGLRRRRPSLVVAVALANKTARIAWAVMQRQQPYQRMAAAA

SEQ ID NO: 238812 - protein, 354 aa, unidentified
MVTIISDELPRIVVGVDSHKETHQAAVLDTTGALLGNERFAASRAGYLELEEWLATLGTIDRVGIECTGSYAAGLTRFFRERQVDVFEVNTTHRATRARRGKDDAIDAEMAARKVLSGEARARAKDTTGDIESIRLLKLSRESAIKARTIALLQIRDVLITAPAELREWIESAGGARHRVNRAWALRPDLERLGEPLQAAKFALRQLSRRVKFLDEEIADVDRQLAALVERCAPHLLQCRGIGTQHAAQLLITAGQNLERLHSDGAFARLCGVAPVPVSSGKTNRMRLHRGGDRQANRALHLIVIARLRLDPRTQVYMARRQAEGLSKMDAVRCLKRFVAREVYNSLKLDLLEN

SEQ ID NO: 238813 - protein, 311 aa, unidentified
MEKLIRIGMDTSKQFFQLHGVDAAEQPVLRRQLRRRELLPFFKRLEPTLIVLEACGGSHYWARELAGLGHAVKLIAPQRVKPYVPRGKNDAADAAGLCEAASRPTMRYVPVKTAEQQAALMLAGVRDRLVRNRAQLANTIRGYAAEFGLVAAKGMARIEGLLSSAQTDETLPVLARELFTGLGREYARLDTELVVIEAKLLAWHRASDLSRRLAAIPTIGPVIASLLVMKTPDPHAFGSGRQFAAWLGLTPKDHSTAGKQKLGAITRAGDETLRSLLVVGATAVIWQTRRGKGRNPSPPAFARAGSGWSSS

SEQ ID NO: 238814 - protein, 327 aa, unidentified
MPMLADLIDAVVGVDTHRDTHEVELALPTGTPIGIRKISNDSSGLAELLAWILDRAPGPRVVVSIEGTRSFGVGLARAVAAAGLTVIECEQPNRKARRGKGKSDPIDAHLAVLAALRLDADRLPIPRADGDREAPRILLGTRHELTVVTTAQTNRLRALLLGGEDTERDLARATLTDPVLLAMVRRREPPQASREQTVRHGEIRRLAHAIRAGRHALAANRAQLQAIVDQIAPGLTERRGIGAVTAAQAIVSFSHPGRCRSDAAFAALSGTNPLQASSGKMVRHRLNRGGDRALNSAIHTIAITRMRCCPITRQLRRPSHSRGQVQP

SEQ ID NO: 238815 - protein, 337 aa, unidentified
MFVIGIDPHKGSHTAAVLDRQERLVGELRVVADRRQRDRFLHFAEPFTPRTWAIEAASGLGALLAQQLVAAGEVVLDVPPALSARVRLLDAGRNDKTDPHDARSAAVVALRHAGLRSVVAMDHSAVLRLLADRHHDLIALRTQAICRLHALLCLLIPGGLSRRLSAERAGRALRAMRPLELVEAERKRLASALLADVRRIDNQLVALKARIDQAVATSGTTVTNIHGVGPIVAALLVGHTGDVRRFPTSGHYARYNGTAPIEASSGPQVRHRLNPRGNRQLNHALHMAAVTQVGHDTPGRIYYERKLAEGKSRKEALRALKRRISDAVYRQLVVDAG

SEQ ID NO: 238816 - protein, 324 aa, unidentified
MTDAVLGIDVSKNTFDTNLGAGIKARSQSFANSPDGWHHLIAWLGEHKIGQVHACLEATGRHGLGIALALHEAGHVVSIVNPAQIRDFARTKLGRNKTDQVDAVHIREYAELFKPRPWTPPSPAMRRLCELQTIRAGTVAGLTEWKNRRGSGMADDLALSLVETTIQHFSSQLKVVDQAIAETIDNDLELSAKRDLLVSINGVGEALAGIVLAELPGPDILGCSAAVAAYAGLNPQQHQSGISVNRPVRISKIGNAVLRTALYMPALSAMRYNPAVIALVDRLKAQGRLKGKQIVIAAMRKLLVLCFGVLKTGKEFDPAMAMGK

SEQ ID NO: 238817 - protein, 533 aa, unidentified
MSFAFAPSFVSAPSFASAPVVEWPADGPPLSPATLLALRDLVHPNEIAYRRSRLKGATRFFGLDLHREYVVAYAVDETLNAVVRPTTLSWERFPAWCARTLTKTDAVVIEMTTNTWATHDVLIEHCHSVTVVHPQHLKVITSVPVMTDRKACEALATFLAAGLLRGIWVPEHKYREWRRLVAQREDCVVRSAIAKNRLHSLRFSKQIEKPKATDAFRPSLRDWWLSLPGTPVEKLTVELLLSQIDHDQAQIVRLDRIIAQELMTDDRAPFLLQITGVGMLGAMKILAAIGPIERFPSPEHLVGYAGLGGRVHASGQRRVQGAITKTGRVDLRSAMVMAARHARNVNTHWKEVYQRLEPRLGRNKAIVALARQMLVAVWHILTKRQPDRYADWAKVATNFMTIAYDDFGGAEYIPGGRTAPEFTRWCLDSLGVCAEMPRVKFSGKTYLLPQSSLPGAPPAAEPKGNGRKQNTKAAQEKRLADAVAKREALATKRAEAEAQRGKPRKPRSDKGTKRGPNRLTKEKQAQSSSANAE

SEQ ID NO: 238818 - protein, 450 aa, unidentified
MATRNRALNRKGLELTHPNAAGIDIGSASHYVAVPADRDDEPVREFASFTADLHRLADWLRDCGVDTVAMESTGVYWIPLFELLDARGFTVLLVNARHVKNVSGRKSDVLDCQWLQQLMTYGLLRGAFRPSDQVCVLRALARQRATLLRTQARSVQHMQKALVQMNIQLANVIADVAGASGQAILRAIVAGERHPYALARLKNSRVHASNEEIARSLQGTWRAEHLFALRQALDAFDFCGGQLQQCDQEIEAQLQRLHITEVEPDKGKKRSKARNAPKFDLRTRLYQMCGVDLTRIDGIDVTTALVVVSETGTDMSKFPSDKHFASWLGLCPGTKITGSKVMSGKTKRCANRAAQALRLAAAALRASQSALGAYYRRICSRMDKAKAVTAAAHKLARLIYSMLTKGEEYTDQGQAYYEERYRQRVLHNLNRRAQQLGMTLVPTTPAAQAA

SEQ ID NO: 238819 - protein, 374 aa, unidentified
MMYIGMDLHKNFVQIALMDNQGHLLQNARIENNTQQIDQFMNNLKGKNTKIVMESCNVWYNIYRHLKDKRLDVTLSNPLKTKAIASAKIKTDKVDARVLADLLRGGYIAECYVPDKRTLDLRELVRHRAFLVRTRAKMKNKVHGILLMDGIRITDAKKPFSKKYIEKLKELHNYRIDGYLRIIKSLDSEIDNTSKMILAAAKEDSMARLLMSIPGVGYYSALLISSEIGDIDRFADSHHLCSYAGLVPSTYSSAATTYHGKITKMGSKYLRWALTECVHTHIRYQSNSNITKFYNRISKKKGTAKATVAAASKLLRVIILHAKGRQGIPALQLGNNHVWAYENICLEELTVGILNKRIETVMRDKPRIGMYPSL

SEQ ID NO: 238820 - protein, 375 aa, unidentified
MKEKLRFLGLDVHAETIAVAVADPDGEVRSMGAIPNRVESIRKMIRKLGPVEKLRACYEAGPTGYVVYWQLAELGVQCEVVAPTLVPVKAGDRVKTDRRDAEKLARCYRSGDLTAVWVPDEGSEALRDLVRAREAAKQDQMRARHRLSKFLLRSGQRPPTGVRPWTRPYLIWVAQLRFTQIAQEATRQDYLHEVEHMRERVARLEQAIMEAVKLASPALQQVINDLQALRGIADISAVTIAAELGQVSRFGSARQLMGYCGAVPSEDSSGKRIRRGGITKTGNAHLRRIVGEAAWSYRRPPCIWYGLRRRQESISEEAKEIAWKAQHRLHKRYMRLGAAGKPQGKIITAVARELLGFIWGIGTKAETTVSQRAAA

SEQ ID NO: 238821 - protein, 335 aa, unidentified
MEPTTIAIDLAKRVFQIHFVDPDGTIHSKMLKRAQMLPFFANRPASRIVMEACGSAHHWARVLARFGHDVRLIAAQFVRPFVKSNKNDAADAAAIWEAAQRPGMRFVAVKTEDQQAMLAMYRIRQQLVRIRVMQVNQLRGLLYEFGVVLPQGRRASIDAAKAALASLADELPAMLLDSLQDQLSRLRALDEQIARIEQRILNWRRNDDACLRISEIPGVGVLTATAAVSVIGQARTFRSGREFAAYLGLVPRQNGSGGKIKLGGISKRGDVYLRTLLIHGARSVISSSKHLPERLRQMLSRRPTNVVAVALANKMARTIWALLAYGRTYEAAPSQ

SEQ ID NO: 238822 - protein, 318 aa, unidentified
MEKKYVGVDISKDSLDMAVFDSNQRWHFNNSPIGIAKAIAALEAVKPVFAVFEATGGMEIPFWEALYKAGIDAAPINPRQIRDFAKAKGRLAKTDTLDAQVIAHYAQAMQPRPMPFPDTQELKEVMARRNQLVEMISAEKNRLKAARKEDIKEDIRAHIKWLETRVDNVDKELRKAIEASPVWREKDQLLRSTPGVGPVLSATLLTQLPELGELNRHQVAALVGVAPLNRDSGLMRGKRTVWGGRGRVRGALYMAALVATRCNPVIRAFYQRLCSLGKPKKLALTACMRKLLAILNSMVKYHTAWTHCATPILIGTCQ

SEQ ID NO: 238823 - protein, 342 aa, unidentified
MQISTIGVDIGKNSFHFVGFDARGGIVIRRQCSRTQLIRALANLPPCLVGMEACCGAHHLGRMLVAQGHDVRLIPPQYVKPFVKSHKNDLLDAEAIGEAVQRPTMRFVPLKTMAQLDLQAIHRLRTRLVARRTAVINQMRGFLLERGVTFPIGREALVKRFPEVLDNPALGLSVRFCRLLQQLRDEWRLLDDDIEDVDQEILSLARDDEACDRLMQVPGIGPLTATALVAAVGNGAAFAKGRDLAAWLGLVPRQHSTGGKTVLRGISKRGNAYLRCLFIHGARSVCRHHHQKPHRLGRWLTSLEARAHPNVVVVALANKLVRTAWAVLQRNTHYDGRLLANA

SEQ ID NO: 238824 - protein, 349 aa, unidentified
MSILAEQFVHVIGVDTHKLTLTAAALNASGGCLELLEVSADSRGHRKLVELGSRLAGPLLWAVEGTGSYGASLTEHLLAHGQTVTEVDRPKRPARKRGKSDEIDAIRAGRDALAMKRLNPPRRRREREQLRILFTTRQELVGNRTRLANHLMQLVVTASENLRSRFLDFGSHGAERLVRQCLASRCSSSLSAEDRTRLTTMRELAQMIRKLSADADRYQREIAVLVEQMAPGLRQQPGLGALTGAQILLSWSHAGRMPSEATFAALAGVCPIPASSGQTIRHRLNRGGDRQLNSALHRVVLTRCRYDQTTRDYVVRRTAEGRTLPEIRRCLKRYAARQLFRFLNSLDKA

SEQ ID NO: 238825 - protein, 411 aa, unidentified
MEAAVITAVGIDVSKSKSTVAVRRPGGEIVLRPFEVHHTNSDLKKLASTLKKLGGDIRIVMEHTSTYWRPIALTLKEAGFFVSVVNAMLIHDFSDNTIRKLKTDRADALKIANYALTFWDTLPPFNNEEETRLLLKMQSRANERITATATALRNGLIALADQTFPGVNIAFDPNTKNANGHEKWVDFFLRYWHKDCVCQYSMEAFTESYRGWCKRKNYKFRTDTAHKIYLLAQEGVATLPKCESTKMLITQACKSLNAVCEAKQSTQLEMQRLAAMLPEYEVVMRMEGARPVTGPALMAEIGDVRRFKNKKALVAFAGIDAPPFQSGAFESKSRHVSKRGSPHLRRTIFIVSNIILTRSNPENAVYCFMDKKRSKGKHYYVYTVAGSAKFLRVYYARVTEFLRSQPSPGAC

SEQ ID NO: 238826 - protein, 904 aa, unidentified
MTHGHEKSDSAIVAVKPANKAVQPAAELVEPRAGTKGNAEQQSTYRTQSRESVSQALDRIRKVAKERKKEKFTALFHHINIDLLEEAFYELKENAAPGVDRLTWKDYEAAFERNIEDLHNRVQRGAYRALPSRRVYIPKPDGRQRPLAVAALEDKIVQRAVVALLSTIYEEDFLGFSYGFRPGRGAHDALDALCVGIHGKKVSFILDADIRSFFDEISQQWLTRFLAHRIGDRRITRLIQKWLRAGILEDGVVSVSDRGTGQGSVISPLLANIYLHCALDLWAVRWRRRTATGDMIIVRYADDFIVGFQHESDAQRFLNEMRDRLREFALSLHPEKTRLIEFGRFAAERRQRRGLGKPETFNFLGFTFICGKTRAGRFQIKRKTRADRMRAKLREIKQEMRRRMHQPIPAQGRWLERVVRGYFNYHAVPTNGQALEVFRHHVTNLWRRTLRRRSQKGRMTWARMMQLVDAWLPKPIILHPWPSDRFAVTHPRWEKLWGGAAEVVAPSSSIRTDGGCPVPQVNDLSRNLAAFDPMSTLVVVVEMSKASWLVSGAVPGVERQPLKKLEPDATGLLRLIERWRSEAVRAGRPISRIALAYEAGRDGFWLARWLIARGVEAHVIHSASVAVSRAHKRAKTDRLDAAMLMRVFLGWLRGERGHCGMVAIPTMEEEDARRPSRERESLVNERSRIFNRMNSALARFGIRGFKPHLRRAPERLACLRTAEGTGLPANTIEELRRDMARLAMVREQINSIEKTRATRLERAPDTGPHAMVRLLSKVIGIGIETADMLVREILSRKLRDRRAVARYAGLTGSPDESGLKSREKGLAKAGNARVRRGLIQLAWRFLTFQKDSALAQWYRMRTEGPSGARKTTMIVALARKLLIALWRLVMTGEVPDGVQLRPAA

SEQ ID NO: 238827 - protein, 342 aa, unidentified
MKHYAGLDVSLEETFICVVDESGKRVWRGATKSDPQTISRVIRKRAPKLVELGFEAGPLCTWFWHEFKEMGFPVVCLDARHAKAALSMQVNKTDANDAYGLARIVRTGWYRAVEVKSIESHVVRSLLAVRSQLVGIRTRLSNQLRGILKTFGLVVGKVSGRSLESRVRELTAGNLMLKDVVESILNVWRTIYDQLAVIDKKLRQFSHSNEVCRRLMSVPGAGPVTAAAFMAAIDDPDRFKRSSSVGAYFGLTPKRYQSGEVDRSGKISKCGDSRVRSYLYEAAGVLLTRVKKWSKLKAWGVRLATRVGLRKAKVAVARKLAVILYRIWVDNSKFQWGDAPSL

SEQ ID NO: 238828 - protein, 343 aa, unidentified
MEIRTIGIDLGKTVFHLVGVNARGEVVIRKKCSRLQLLRFTSNLRECLIGIEACGGSHFLGRALREQGHDVRLMPAQYVKPYVKTNKNDYIDAEAIAEAVTRPSMRFVPIKTDDQLDLQSLHRVRERWVVRRTAVINQIRGMLLERGITVAKGRRRIEAALPGILEDPDNKLSGALRVLLTQLRLEMQYLHGQIEESDKLILRIAVELEPCRRLVAIPGIGPVIATATIAAIGNGAAFKKGRGFAAWLGVVPGEHSTGGKQKLTDTSRRGNKYLRKLFVQGAHTVLQRRTKQVTALNAWLAQLTTRKRIQVAAVAMANKMARMVWAVLSKGEAYRPPLLPQTA

SEQ ID NO: 238829 - protein, 343 aa, unidentified
MEYYVGLDVSLKQTSICVVDQTGSVVREGVVDSDPEAISVYVRSKAPDAVRIGLETGPTSTWLWTELKQLGLPVICIDARHAKAVLKMQINKSDRNDAIGIARIMQTGWFKEVHVKDIDSHSVRALLASRALLVKIKRDLENHVRGLLKNLGLVIGRAKFNVFAVRAEELIEGRPELIAAIRPLLEARNAVGQQVSELDRKVMKLARHDAQVRRFMTVPGVGPITALAFKATIDDPARFSRSRSVGAYVGLTSRRHASGEVDWTGRISKCGDGMLRSYLFEAAGVLLTRVPKWSAVKAWGVRLAKRNGLRKAKVAVARKLAVILHRMWIDGTEFNWSTKEIAA

SEQ ID NO: 238830 - protein, 394 aa, unidentified
MQVDDIDVFIGIDVGKSEHWATALTTAGECLHDRPLPNDEARLREVYEHLGEHGPATIGALAVAVAQDMGITVGYLPGLSMRRIADLSPGSAKTDQRDAAVIASAARTMPHTLRSITSSDEDAAALSMLTGFDLDLARQVNQVSNRIRGLYTQIHPALEGVLGPWLEHDSVLEVIATWPTPAALRKAGRARINAKLKANGCRRHAAWAQAIVEALSKQTVTVAGTDAAGVVLPHLARQLIALHTQRADIAAQVEALVEAHPLYPVLTSMPGVGVRTAAVFLAGTLGKTFTTGAHLASYAGLAPVTRRSGSSIRGEHVSHGGNKRLKRAMFLSAFASLRTDPVSRTYYERKRAQGKRHNQAILALAHHRILTLHAMIRNGTLYNPQPAQPLTTTA

SEQ ID NO: 238831 - protein, 343 aa, unidentified
MYIGLDVHKKLSYYSMVDGDGTEVKKGRFPTTCEGLDEFASKLPEGAKVAIEASTSGIFAYERLDEGGIEVHLAHPVYVKPFAKKHVKTDKVDARVLAQLLRMAYLPESYVPGKEIRDQRVLIRHHASLVRLRTSIKNRIHALLAIEGIQTSEFSDLFGKKGMEFLKGVKLREVRRKALDNYLDVLKALEERIEEMEDILKEKTKITDEAKWLMSIPGIGYHNALLILSELGEIERFSNPKSMVSYSGLAPKVEQSGDYTRYGHINKHSNGFLRWAFIQSARAAVRSSKPNRFQRIYNKIKARRGEKVAIVATARHMAESVYWVLTRKEYYKENKAIRASYFS

SEQ ID NO: 238832 - protein, 356 aa, unidentified
MRQLYAGIDLHSNNNVIVVTDEADTVVYRKRRRNDLRAVLEALGPFAGQLAGIVVESTYNWYWLVDGLMAEGYRVHLANTNALQQYTGLKYSDDESDARWLAKLLRLGILREGYIYPRAERPVRDLLRKRAHLVRQRTSNILSVQNLLARNTGQTISGAGVKRLEESSVNQMLPDEDLALAVHSGVAVMSCLDTQIARVEKVVLKRTQLRQEYQGLLTVPGIGPILALTIVLEMGDIGRFAEVGDFASYARCVNGSRNSNGKRKGGVNTKNGNAYLAWAFMEAAHFAVQYDETIARYYQRKRAKVHVMVARKTVAHKLARACYHLLRDHTTFDVNRAFGPPKGRKHLDETANSQRD

SEQ ID NO: 238833 - protein, 322 aa, unidentified
MNPKNYGGIDVAKKNFVIGIYSQDKTKTEANTPKGHAKAVEYLQKHNVDLVVLESTGGLEVPLANALHAADIRVVIANPQRTHQYAASFSLGKTDHLDAKMLADYAQALDSRKMADDMCYAPPSEEALALEALVKRRSQLVEMRKMEKNRLEQTHASQKASVVAMIKHLGELIAALDKEIDQSNRGGFNGKGEILSEMKGVGRITCATLLSMLPELGKVPHKRAALLVGVVPPPRQSGEKERKSGCVGGRMVVRNALYMAALAATRSEPKIKAFYEKLMSRGKAFKVALNACMHKLLRILNARMRDYLASLKETEESELQGA

SEQ ID NO: 238834 - protein, 376 aa, unidentified
MRSVALDLGRKITFCEVEDEKVVRRATVRSFGDLERLLGPRTAPARVAIEACREVWHVERRLREWGHEPLVVDTTRVKQLGVGQHKRKTDRIDAEVLARAVETGGVPLAHVLSPHRQALRMQLSVRRGLVETRANHVVMVRGLARAHGVSLPSCAVEDFVRDVDASVLGEELRMLVTPLLEVIRVLDPRIAEMDRKLEKLSATEPVVLKLCTVPGVGLIVAAAFVSVVDDAKRFRRAHQVEAYLGLVPSERTSVQRRLGSITKQGNGYLRALLVQAAWCILRSRGQDPLALWAKAIAQRRGKRIAVVALARRLVGVLWAMWRDATVYDTERLVHAAVRGLQQQVQTLEQQRRALERAARKNRRQHLDLLLARGGVA

SEQ ID NO: 238835 - protein, 400 aa, unidentified
MAVAVGVDVAKELHWAAIVHTETGKVLASRRVNNDPEAIQTLVEDIRATEAEHGPATVAIDVLGGIAGLLQVMLLDAGLRLVHVSGLAVNRARQATRGGEHKSDPRDAKVIADQIRLRGDELRTVEPAGELDAELRLLVGRRRELVVEQTRRINRLRDLLASIHPGLERVIDATNKADLALLARYVTPAEIRKAGRRRISDYLRHVGGLRATSIDALAEQALASAQRQRVTVPGEAVAADLVRDLATEALTCRTKLTELDKRIAEALDNHPDAALVQSLPGMGATLTAEFLAVAGGTTRFPTGDQLACAAGLAPVLQQSGKVHYLRRATSGDKTLKRIFYQSAFCALQRDPASRAFYDRKRAEGKRHHQALIALARRRINVLHAILRTRQPYRIDHAVAA

SEQ ID NO: 238836 - protein, 337 aa, unidentified
MERQYVGIDFHRRRSVIVRMSATGERLSVLRVPNEAPAIANAMADAGPDPKVVIEATYGWYWVVDLLQDLGATVHLANPKALNWGDRRVKNDVADATDLADMLRLNRLPEAWIAPPAIRELRELVRYRTKLVKLRSGLKAQVHAVMAKEGVLPRVADIFCDKGNAQLDAMELAPNYGLRVESLRDLIVIYDREVVMLERKIHQHLRRHQGYQAIQMINGVGRTIAAIAVAEIGDVSRFCSPEALCCWTGLTPKQRESDTKAHREGISKQGSRLLRWALVEGTARYHGGPKFAADYRRIAERRGTNRARVAVARKILTLIYYGLRDGEIRCLARARAA

SEQ ID NO: 238837 - protein, 344 aa, unidentified
MNHYAGIDVSLESSTICVVDGTGKILRETKAASEPEALIAWFRSLGLALERIGLEAGPLSQWLYAALREAGFAVELLETRHVRDAFKSMPVKSDRNDARGIAQLMRLGWFRPVHCKSMEAQETRAVLTARKLLQSKLRDIENSLRGVLRGFGLKVGKTTECTFAERIRELVAGHPGLELVAKALLEAHAVLRREFNDLDKHTQKLARAHPQAKLLMTTPSVGPIVALTYASAIDDPNRFRSSKATGAHFGLTPKKYQSGQTDYTGRISKIGDASVREALYQAAHVMLTKPIKNCSALKGWAMRIARRAGMRKAKVALARKLAVILHRMLADAKPFNPTAKAAAT

SEQ ID NO: 238838 - protein, 355 aa, unidentified
MQNYKTSFKGQNIYVGIDVHLKTWHVTTLTESGYKYSFAQHADAKELFDRLNRKFPEAHFKSAYEAGFCGFSVHYALTGLGFENIVVHAADIPTTGKEKALKTDAVDSEKIAWSLKRNELTGIYIKDKDYMDDTNLMRLRQRFIADLSRQKNRTKHLLYTQGVAYPERFSKKGTHWSRNFMKWLREEVVLLSEEKRTLMLLCDQVEHIRKDILAVTREIRRLSRTDRYKENYSLLTSVPGFGLITSMSMLTELDNNPMRFPNERKFVAILGLIPTCHDSGEKKVNGEKINRGNKQIGPLIVEASWVAIQRDYQLGCYYTNCCQSMKPQKAIIKVARKLACKAYAVMKTKKPYVLS

SEQ ID NO: 238839 - protein, 344 aa, unidentified
MGEVSTIGLDIGKSVFQVHGVDDAGAVVIRKRVSRARVLEYFGELPPCLIGIEACPSAHHWGRELQLLGHMVRLVPPSYVKAYLKRSKNDANDAAAICEAVTRPSMRFVPIKTREQQAALMLHRTRQLLVRQRTMLSNALRGHLAELGIVSAKGRNGTAELLRIITNGADSRVSPAVRDILDVLARQYSAIGIEIASIDRSIMALHRGCEASRRLAEIPGIGPIAATALVAEIGDWKTFSSGRSLAAWIGLVPKQYTTGGKDRLGSITKQGNRYLRWLLIVGAMAVIRYARKHGTEKRPWLGRLMERRPTKVAAVALANKIARMAWAIMVRGERYKEPKLLLAA

SEQ ID NO: 238840 - protein, 398 aa, unidentified
MTRKNTLKSLPTDTEFRVVGLDLAKSDVSVAAIPVDDNTPSLVDRMTYADLLDWAGKISPTLFAMEPCNGYSLLCLQLENLGHEIKVISGWTVSMWINTHLSGQKTDLKDAIALARLAVSDAELTPIRHKSITEIRIQTVQAVRQQLMSQRSKSIVSFKALAQQWGIPCAAGHRNLKKLRESIKAKVDLITRPVANAMLFLLDAVKSLDRQIGQLNQTLQELVMSDERGRLLQSVLGVGTQISARVITVVGNIERFNSPRSLVAYVGVAPRNFITGHKNLTKKKHGNCPDLSHKGQGKISRRGDKLLRSLCIQGAACLYMQFCKDQLPECQLKRWILKQLASQKPYGKLIVSLAAKLIRIVWAVLTYGEKFNIQKAGMTRSMWSEMALETPLNKEVPA

SEQ ID NO: 238841 - protein, 345 aa, unidentified
MEQITRIGMDTSKHIFQLHGVTAAEEPALRKKLRRKGMVTFFQQLAPTVIAIEACGASHHWARLLQSFGHSVKLIAPQLVKPYVKRGKNDAADAEALCEAASRPTMRFVPVKTAEQQAALMLVGVRDRLIRNRTQLANAIRGYAAEFGLTAAKGSAHLKPLLARLQGDESLPALARELFAAQAKEYAQLREQIDEIDTKLMAWHRADECSRRLAKIPGVGPIGAVLLSMKTPEPELFRSGRQFAAWIGLTPRDHSTAGKIRLGVITRAGDEGLRSVLVVGATAVIQHVRRGGRSSPWLIELLKRKPPKLAAVALANKMARIAWKLMVTGDNYAAKSASATLVGTA

SEQ ID NO: 238842 - protein, 370 aa, unidentified
MLDTTTFVGLDVHARSIKAVSLDVMTGEVRCATFGYDAGAVAEWVRSVDPKARCVYESGVTGLDLQKRLSGLGVDCVVGAVSKMIKPSADRRRKNDRNDAEFLARMLSVGNVVEVWVPDDECEAARDLTRALEDARDDLSRSKQRLSKFLLRHGLVFDERTPTGRRKGNWTRAHWSWIESIRFAEGADNDVLAYYVDAVRRAAEEKARLEGLVEAEARKPRWRRRVDSLRCLKGVDTATAADLVFEAGEFSRFGNARSFAAWVGLTPSEHSSGESDRRGAITKAGNKHLRKALVEAAWHYLTCSGRPKDLARGQAPDRVARRHAAKGVRRLVERREALLARGVHNNKANVATARELACWVWAVGLMAEGA

SEQ ID NO: 238843 - protein, 408 aa, unidentified
MTVVGIDVSKGKSMVAAMKPGGELVAAPYEVRHSDIELSHLALDVLCMEPDTRVVMEATGRYHEPVAALLHSEGIFVSILNPLLIKQSGAGSLRKVKSDPKDALKIAKYGLDNWSTLREYTPMEAIRQQLKLCARQCDLYNKNIVMLTNNLISLSDKTFPRVNELFSSPEKADGHLKWVDFYRSFWHCDCINRMSPDAFEERYKKWCKRKGYHFSTDAADALYAARCGSYTTLPRDNNAKLLVTVAADQLIALRENQSKLEAEMLNLCKQLPEYETVMAMYGVGKSTAPHLMAELGDVRRFPHRSSIVAFAGVDPGVVGSGKMQLSSVATSKRGSPQLRKALFQVVSAYVKRKPENEAVYQFYAKKRDEGKPYYVCTTAAANKFLRIYYARVKECLNAAESATQAEEG

SEQ ID NO: 238844 - protein, 338 aa, unidentified
MIVIGVDVHKYSLTAVAVDELGRTLAERSGPVDDELVVWARSLAEGRLLWAVEDCRHVTRGVEQILLAAAEHLVRVPPRLTGPERRRGRTRGKSDSLDALAVARAALREPRLDEPRPQEPLLRELKLLVDHRDDLVAERRRGQQRLRWHLHELDPALRVPLGALDRTLWLERLRRQLARREQTTQVRIARDLLGRCRELTRAVAELDRELQARMQTTAPRLLELAGCGPISGAKLVCEIGPIDRFASDAQLARHAGVAPLDASSGKHQRHRLDRGGNRQLNCALHRIAITQGRTYAPARAYLERKQNEGKSRREAIRCLKRQLARTVYTTLKTESALT

SEQ ID NO: 238845 - protein, 391 aa, unidentified
MSTYFVGIDISKYKHDCCIINAADQSIVAKFAIQNNRNGFNELLISLQSLSTPEDIRIGFESTAHYALNLELFLEKAHHSFMEVNPVLISEYKKSTSLRRTKTDSVDCESIARWLMTVEYKPHSKGFYHAYSLKSLTRLRDRLIRQRSFYLVKITNVLDHTFPEFKPFFQERFSKTALYLLENYGSAEKMARMNSASYDNLRRISRGKFTPQKFIELKYLASNTVGVNNSIFDTELNCLLTLYKEAAKQVSILEAQITELIEEVPPHYMSIPGIGPISAAVIYAEYGDISNFSSPAQMLAFAGLEPGISESGTESHKGRMVKRGSSQLRYTLMNCALPLIRFDVTFATYYAKKRSEGKPHRVAISHVTKKLVRVIFALERQNTDFVSTSLR

SEQ ID NO: 238846 - protein, 327 aa, unidentified
MHGVDSAGKVVIIRQLRRKQVIDFFSKIPPCLVGMEACGTAHHWAREVSKLGHTVRLMPPSYVRGYVKRSKNDAADATAICEAVTRPSMRFVPIKSADQQALLMLHRTRDLLIRQRTQLTNALRAHLAEFGLVAETGREGLAQLAAIITDESNREALPSAMKQALQAIVDQLAALELQIGTLDRAIHAHHRANDMSCRLETVPGIGVIGATAIASTVTDPSDFKSGRDFAAWIGLVPRQHSTGGKERLGGISKQGDRYLRRLLVIGATAVVRHARQCPQKHPWVMKLLGKKPAKLVAVAVANKMARIAWAIMAKGGYYRAPELAAAA

SEQ ID NO: 238847 - protein, 507 aa, unidentified
MTPAAADPVGTAGACADSPRRAFVRPATIVEGPTVVRNTPAARRALGEATRQAARAAELAALPVQNPHAAGIDVGDASHWVCVAATPDGSDTVREFPAHTPGLRDLVAWLRRCGVTTVALEATGVYGHVLLLTLLEAGLHVVTTSPKFTKQIQGRPKTDKRDCQWIQRLHAHGLLPPIFQPDEATQTLRDYARQRANLVRLSGQHVQRMQKALGLMNLKLTTVLGDVTGVTGLKVLRAIVQGERDPQALARLRDQRCKHTAEQIAVALDGRHRPEHVCELRLCLTPWEQYQRVIAELDGVIAAQLRTMARRAELPPLSPKPRVRGRKPHDPKFDVRTALYFVTGVDLTAVEGIDEVHALTLVSELGSDFTKWPTVKHFTSWLGLCPCWKKTGGKVQSSRTRRGKGRAAHALRLAAWALMRSQGALGAYLRRQRSRLGAPKAITAAAHKLARIVYHLVRFGEAYVKQTEGAYAEQVRQRLEKQLARRARELGYELKKVEAEPGGAPPG

SEQ ID NO: 238848 - protein, 427 aa, unidentified
MPYRIAGVDVHKRMLAVVVSDVEIDGEYHFERRQLGSNPAQLRLLAAWLLEQQVEEVVMESTAQYWKPVWAALERYWKPICQKREGASPMSGTLHLAQAQSNRARRGRKNDFADAERLVKRLVAQELTLSFVPDPEQRLWRTVTRTKYQQRRNRVQLQNRLEALLEEAHLKLSSLVSDLLGASARRMLKALADGETDPAALAMLADYRLRAPQELLRDALGACQELNPVYRRLLKAVLEELELIEKQIGQLDQEIADLLRPHQNQVQRLAEIPGLGVDSAQQILAEVGATAAAFPSERNLSSWVGACPGDDETAGVSRSHRSPRGNRQMRRILNQAANAAVKYKGSIFQILYRRYVPRLGHNQTIGVIAHRLCRLIWKILHQGVHYEERGPEVNKKSQQYRAARMIRDLRSLGYRIELPNSQAPVPA

SEQ ID NO: 238849 - protein, 333 aa, unidentified
MEKKYYIGLDVHKRQTTYAVKDWNGLTVYSGETATQFADIQNVLIKYIKKSVVVMEACTNYYHLYKKMKENKIDVHVANVIQLRKLIGKNDKLDAKRLADMSRLNTMPESYIPDEKIQNLRILIGLYYSEVIARVRYNNQIHAVLDRNGINLPVKNPFSKKGLVCINQYLQNNNDFALRNLLEGLKTLNERIEHLNSEILSYLKDNFLQEYELLKSIPGVGEVIAGYLIAEICPIERFANKKKLRRYAGVVPVREQSDKKIYATYLPKHASRKLLRYALVLAANCAVRTDCRPRKYYQKKKKGSNHGHAIMCVASSLSDIIYIVLKTKQPYKR

SEQ ID NO: 238850 - protein, 362 aa, unidentified
MTATVHASAEDLDEQLEVTGGVDTHLDCHVAAVLDHRGVELATKAFPTDRAGHQALLAWMTSFGTVAVIGVEGTGSYGAGLARFLAAEGVALVEVNRSNRQLRRRHGKSDPLDAVAAARAAQSGTATGHAKGRDGTVEAIRVLRVARRSARTDRVRAINQLKGLVATAPDELREPLRRLGRRQLVATCKAFRPGEDLSPVAATKYALRLLAQRVTRLETELEDLDEQLQALVEAAASALLAEHAVGTDTAGALLVAAGDNPKRLRSEAAFAQLCGVAPLPASSGRVVRHRLNRGGDRQANAALWRIVLIRLRTHQPTREYVQRRTAEGLSKAEIMRCLKRYVARELFPLIRDALTGAGQVVS

SEQ ID NO: 238851 - protein, 426 aa, unidentified
MNYTQNSKIAQVTERTLVVGVDIGSETNYARAFNWRGQEVSKKAFRFNNSQEGFQSFLEYLRSNQVIAAAEQIIVGCEPTGHYWFTLARYLKAQQINMVLVNPYHVKQIKELDDNSPRKTDQKDPKTIAKLVVDGRYSYPYLPEGIYADLREAVSSRERIVKELNAVTNRIKRWLKIYFPEYLAVYKSFASESGLTVLETAPLPQDVVKLGADGVNHLWREKKLRAVGMKRAQTLVEAAQNSIGLDGGVCARMEMQLLLEDYRAKEVQLKKVTAVLEAEALKVPHAEKLLSIKGVGLITVAGFLSEVGDIRRFNSPKQIQKLAGLELKENSSGKHRGRTSISKRGRKRLRKILFQVMLPMIQNNAEFREVYEYFAVRQKNPLKGKQAIIAAGCKLIRVFYAILKHGAEYNPQKLRMDRIRPESAAA

SEQ ID NO: 238852 - protein, 351 aa, unidentified
MKKSTLLNVVIGIDLGDLRHAVCVIDHDGVILEEFPITNTRESITKLAKKYPEARIAMEVGAHSPWISRLLTDLGCEVIVANSRKLRAIYQNERKSDELDARMLAKLARADISLLHPVKHSSEQAQRDLLQIKLRDNLVRQRVDVISAVRFTLKALGIRLASPNTACFAKRARKYLEEQDPELLAMIEPSLHVVDEMTRQIRQLDREIEQLCEDRYPETKRLREIRGIGPITALCFVLVIEDPHRIDRTRDVGAYLGLVPKRDQSGKSDKELSISKSGNAYMRRLLVSAAQYMLGPFGEECDLKTKGLRLAERGGRGAKKKAVVATARKLSVVMLSVWKNESTYEPERHAA

SEQ ID NO: 238853 - protein, 421 aa, unidentified
MDGKGDDYALLVGLDWADETHDLACLSEVGGTPGQMRIGSDPESIRQWMGDVGSRYPNGRVAVCLEQSRGAVAYALGAYAAVDLYPVNPVALNNYRKAFKPSGSKSDPGDAALCLDLLVNHRDALTKLEPDTERTRMLQLFCELRRKAVGRRTQVTNELVSTLKQYYPQALKLVGDDRHSEMACALLMRWPRFESVAAADPQAVRKFYYAHHSRSERCIGERLELIASGCPLTTDPAIVEPLMMHATQLVSEIRALNASVARYDKRIRELFADHPEAALFRSFPGAGEQLAPRLLVAFGTNRERYGAADEVAAYSGVAPVVERSGKGEWVHWRWHCPKFVRQSFVEFAAKSIGQCEWAAVHYRKQLERGKEHNAALRSLAFKWVRIIFRCWQERQPYDERRYLDALAKHGSWIAGDLGRAG

SEQ ID NO: 238854 - protein, 356 aa, unidentified
MARYSLSALKTFVSTHQSDPFWIGVDVHKRSYHIALLRADNKTFTLTSQASPEAFIEQIRRLAIPVAGVAYEAGPTGFGLARALMTAKIPVIVAAPSKIPRSVSAGAKTDRLDCLKLAHYAAKGMIRPIAIPTAEEDAQRALLRRRHQLVDRVRQCKQRIKGFLLYHGFKETDAIRNWRSDCEAQIAALPLLPEGRLTIESHLRELRFLKQELSDVADQLGRLNRKPEHHPVIHSLTSVPGVGQVVATTFHLELFRPERFQRGDEVASYLGLAPTVRHSGEKTPRGYLVPVGQKRLRSLLIEAAWIWRAKDPKACELYNKLLGKTGVPQKAIAALARKLAIILWRLSIEQRAYRPI

SEQ ID NO: 238855 - protein, 393 aa, unidentified
MILVGIDVASNKHDIFIMNALGEVFNKHFTIDNTRQGYKKLLSEISLAKEFFKDSNVRIGLESTGHYSRNILHFLILEGYDVMFINPLLTNMDRKASSVRKTKTDSIDAKAICMFLIRNQNDFKPYTLSSYHIDELKILVRQRKSLKKQLNKTSNQLHAFLDQAFPEYDQVFKKILSNASLTLLSEYASLSELKRVRVSTLSELLRKASKGKHGVTKAELIKTLVKDSIGIDSTSLSLSIKQSVQTIRTIQSQIDQINQLLEHHILESKTTLLSIPGIGIQTGAIILAEIGDINRFKTDDALLAFAGLDPSVYQSGNYQGNFKISKRGSSILRWALFQAAKIAVIHDPVFNAYYEKKKSEGKHYLTIIGHVTKKLLRVIRSILKNNSVYTVSH

SEQ ID NO: 238856 - protein, 375 aa, unidentified
MKGTRFVGLDVHAATIAVAVAEPTGEVRGMGTIPNEPEAIHKLMRRLGPAEQLRVCYEAGPCGYTLYWQLTRAGISCVVVAPTLIPVKPGDRVKTDRRDAEKLARSFRSGDLTPVWVPDAAHEALRDLVRAREAAKKDQLRARHRLQKFLLRHGQRPPAGTTAWTEKYRRWLSTVRFDTPAQEATRADYIAEVEHARERIVRLERALDEAVEATPAAMRAVIDALQALRGVAKLTAVTIVAEVGRLSRFDRPRQLMGYSGAVASECSSGPRVRRGAITKTGNAHLRRIVVEAAWSYRHRPGIGPTLRQRQAGQSAEVTAIAWKAQQRLHGRYRRLMARGKAKQQVVTAVARELLGFIWAIGVAVEGKQPPDSRAA

SEQ ID NO: 238857 - protein, 425 aa, unidentified
MKKIDYLSTLFIGIDIGSRINVVSAIDFNQEFFIRMKSIPNAQGGAEILEDMIADVLEKNHQFRYLIIGLESTGFYGVHIANYLSTCEKLAPFSTHVYCLNPKEVANYKASFNSLDKNDGIDSFVIADFARVGRITIKPWRGSQYLALQRLTRHRLHISECIAREKTYLLNNVFLKFSEFAMLKNEEHPFSNKYGATAEAILTEFMTNEDLINSSTEELIEFINTKSRGRISDPAETATLLQTAARNSYRLDKCLYEPLTVSISSSFNCISAFEKELKAIDDAILRTVNGLNPVEYQVLNSIPGIGKVYSSGILAEIGSVKCFKNNDALAKYCGIVWKENQSGNFKAENTPMSKAGNRYLRYYIIEATNSVIRHCPEFHAFYSKKYAEVTTHQHKRALALTSRKFLRMLFGLLDKSQLYSVDKSR

SEQ ID NO: 238858 - protein, 343 aa, unidentified
MTISILGIDIAKSTFQLHGADYSGRAVLKKRLPRHKLVAFVVNLPPCVIVMESCGGANYWARVFQRSDHTVKLISPQFVKPFVKTNKNDANDAEAIVEAASRPSMNFVPIKQVEQQDIQSIHRIRTRIVKNRTALINEIRGLCLEYGVVLTPGAARVKSSLCAVIAASDNELTPSSREFMRDLYNELVDVEGRLKRLDAKIRQLCRQNERCKRILKVPGVGELTATAIVAAIPNPKEFRNGRHMSAWLGLVPRQSSSGDKRILLGISKRGDRYLRTLLIHGARAVLSHCKDSDNDYSRWVARKKATLSHNKAAVALANKNARIIWSMLNTGEEFNYGTQATAA

SEQ ID NO: 238859 - protein, 356 aa, unidentified
MSYDVKYIGMDVHKEAIVIAVLNEGGKLVMESVIETKASSILQFLHGLRGELHVTWEEGTWAAWLYDLLQPQVQHIVVCNPRRNALLKEGSKSDKVDARKLAELLRTGMLRPVYHGENGLRTLRELGRSYQTISKDLTRVMNRLKALYRGWGIPCAGTQVYAPRYREAWLNKIPQAGVRRRAELLYQQLDGLQGLRRNLRPELLAESRKHKAAKLLRQIPCIGPIRAARLIALMQTPHRFRSKRQLWTYSGLGIETHDSAQYRYVGGQLQRSKKPQQLRGLNQNHNHEMKEIFKGAATRASCGRGPLRDFYAALLAKGMKPEMARLTLARKIAAITLTLWKRGEGFDAEQLKTQTA

SEQ ID NO: 238860 - protein, 357 aa, unidentified
MGEGSWVGLDVHARSVVAVVLDGVSGELRSLRAPVVGDETVVWLLQLPAPVRVAYEAGPTGYGLARACAAAGIACVVAAPSKIPRAPGDRVKTDRRDAERLARLLRLGELVAVRVPEPQVEAARDLVRAREDARGDLMRARQRLSKLLLRHGLVYDASAWTLAHDAWLRRQRFERRPLALAFDESYGAVLQAKTRRDALDRAIAELASEPPFAEVVARLVCLRGVSTLTALALTVELGDWSRFRPQSLGPFLGLTPSEDSTGERRRLGAITKTGNSHARRLLVEAAWHQRRPLRASVALERRRQGQPAAVRARADASGRRLHARWEALEGRGKRRTIVAVAVARELAGHCWAVATMA

SEQ ID NO: 238861 - protein, 431 aa, unidentified
MKHNRRRRSRQQSTSPSLLERINPNAAGIDCGSAEHYVAVAADRDPTPVRVFKAFTDDLHRLADWLLACGMTTVAMEATGIYWVPLYEILEARGIEVVLVNARHVKNVPGRKSDVSDCEWLRELHSVGLLRGSFRPAAAIASLRAYLRHRETLVQSAAMHIQRMQKALVQMNLQLPLVVSDITGVTGLRILRDIIAGRTDPHVLAKHRDYRCRASEEEIVAALTGHYRPEHVFVLKQNLELFEAYQRQMADCDTAIEAQLQTLAANATTPPAPLPAARSKRKPRHNEPRFEIRSPLHRLTGADLSQIDGLAPHSALRVISEIGTDMSRWPSEHHFTSWLTLAPKNKVSGGRLLSSRTQPSANRAAAIFRLAAMNLGRTQTALGAFYRRLAYRVGKAKAITATARKLAILVYRTLKGDLVYRDPGAAAYDAR

SEQ ID NO: 238862 - protein, 343 aa, unidentified
MYYIGLDVHKRTISYCVKDAAGQVHQEGKIGSTRRELDAWIKTLPQPRTIAMEATIFTGWIYDHLLPHAAKVKVAHPLMLRAIAAAKKKNDKIDAGKITDCLRCDFLPECHMASTEIRDRRRTLRYRNLVLKQMIQMKNRISGLLMETGVSYNKQRLHKLGYFTDLLSTNEEINESIRPLLKVSREHIMRAQRLDYALITSLERDPLLSERLKRLRTIPGVGPITALTWALEIGDVSRFQSVKQAISYCGLCSAERSSADKLVRMPISKQRNKHVQQTLVEAAKLAPRYSHELALVYERERQRGNKNRATLAVARKMVAYMLAVERRKQDFVLREECSGTDAA

SEQ ID NO: 238863 - protein, 351 aa, unidentified
MAKTFETTVAVIGIDIGKNSFHVVGLDRRGAIVLRQKWSRGHVETRLANMPPCLIGMEACVGAHHLSRKLKALGHDARLMPAKYVRPYSKGQKNDFRDAEAIAEAVQRPTMKFVATKTVEQLDLQALHRVRERLVSQRTGIINQIRAFLLERGIAVRQGRLSLRMALPQILAAPPDVLSPRMLHIIEDLAGDWRRLDERIQTLSDEIGAIARQDIGCERLMSVPGIGPIIASAMVAAVGTGDTFVKGRDFAAWLGLVPKQISTGDRTILGSISRRGNRYLRVLFVQAAWVVLIRPKNWERYGLKSWLEAASKRLHHNVLAIALANKLARIAWSVLARGRGFEVSRLDHAIA

SEQ ID NO: 238864 - protein, 315 aa, unidentified
MAMPVPVSKPIVGVDVAKNELVIYHAELDLLEVIPNNKTAIKKWLKALPGTVAVAIEATNIYHLEFADLAYEAGCVIYMVGGYELSHYRKGVNVRAKTDAQDAKLLARYLKNEADELRPWTPPSPLYRQLLSLFRRRAALVQARVSLTQSWANEPLLKASFAEQMKSMQKLESLIEKMIGDRLKEAGLSDQLKRCLKVEGIGFLTGARLVTSFQRGDFRNADAFIAFLGMDLRVSKSGQKDNRRSLSKRGDSEARRLLHNAAMAASRTAAWKEFYQAQRARGYSTTQVLVMLARKLARVVFALLKGQSEYQPKVG

SEQ ID NO: 238865 - protein, 484 aa, unidentified
MENRVIGIDLGVTSAHTACVVDGAGGVICKRQARPTLESLSGLEAAALAGAPPETRLSVVMEPTGAAWLPVAVFFIRRGHLVYRVSSAKASDLRKFLVRHAKTNAIDALTLAKIPFIDHKALIPLELAEGPAASLRRRVRVTDRLRSQATRHKTRIRELARQMMPSVDEAVTSELRMADMVVLERYADPRVLAVIPLSRLTRLIVAKTGRGAAYAERKAAGWIGAAQAALELYGDDPAVPFADLADELATEIALLHVIEAEMARHAEVREEVYRQVDPDELARSLPGVGLLGGPTLVAAMGRPGRFPSAGSFRRYSGLTPKASETGNSDAKGQVMSKAGASWLRDQLVMSANVARRVDPELARIYYVQMVERGAHHNKAVCIVASHLAGRAWTTMRRGQPYVLRDIDGTEVSIAQGKAIVAEHFTVPEEVRRRRRTRKTRGKAPQVLSARVKSVSRGDDKRGDLPHGEASSPLSRPSRGTLVSA

SEQ ID NO: 238866 - protein, 373 aa, unidentified
MQENSKIFVGLDTSKMKISVALAEEGRQGEVRFLGDIDNTSDAIRRLIRKLTGKFCELLFCYEAGPTGYGLHRQITALGHACSVIAPSLIPKRPGEHVKTNRRDALTLARLHRAGELTTIWVPDPGHEAIRDLVRAREAAMEDLRKKRQQLQSFLLRHGRIYPGLRSWTLVHARWLSNLTFEHPAQYLVLREYRQAIEDAEARLERLTQQVADVVSTWSMAPVVEAYQAMRGVAFLTAVTFVAEIGDVRRFETPRQLMAYLGLVPSERSTGEQVRRGSITKAGNPRARRVLIEGAWTCRYPARLSRALQVRQERLPKTVRAIAWKAQMRLCARYRRLMAAGKRQTLVTTAIAREMAAFLWAIGHEVEPRSAAA

SEQ ID NO: 238867 - protein, 374 aa, unidentified
MAGDYNAFVGLDLHKETISAAVADAGRDGEVRLIGVIQNQPEAIGKLARKLAARHGKVEFVYEAGPCGYIVYRQLIGLGLDCRIVAPSHTPVRPGNRQKNDTRDAVMLARLLRAGELTYVWVPDPLHEAMRDLVRARHVAAHDTRKARALIQMFLLKHGLRYEGKPWSYRHRTWLTDRRFEHRGQQIAFQSYLNRLTQAEARKKELEMQIAELVPDWSLGPMVTALQALKGVGMVIAATLVAEVGEFSRFASPRKLMAYLGLVPGEHSSGGSIRPRGITKAGNSDMRALLFEAAWSYRTTPKVGQWMSTRTSNVPQEAKDVAWKAQLRLNSRYRKLVGRGKKSNVAVTAVARELVGFMWDLARRFEPAPGAASA

SEQ ID NO: 238868 - protein, 341 aa, unidentified
MAIVAGFDVHRRQITFDALDTETGEVRRGRIDATPAAVTAWVRRFEGAVEVAVEACTGWLFVCDALVAAGAVAHLAEPVETRALRGRKRRAKTDREDARWLRELLAEGRLPEAWIPPEHVRQWRSRARLRHTLIDERTQWFQRIRATLFHHGISGSPEKLRTREGRAFLDALDVPADASERIEIALAMIDAIEVQIAPLERELRQLARRQTGCRALMGLYGMGELTALVTLCELGDVGRLSASRKAVRMAGIDIGVHRSDRRARAGKLTRQGSPQLRWALYEAALSACRPSSPDHADYLALKARGLSHTRASLTIARKLARRSYHVLRDLGPAALEPVTNA

SEQ ID NO: 238869 - protein, 338 aa, unidentified
MNTSVVGLDIAKNIFHMYSIGADNQVIKKKLKRAELLAFFVNYPTSLIGIEACGGAHHWARELIKLGHEVVLLNARYVKSFVVGNKNDFNDAQAIFDAVTRPNKRVVAIKTLEQQDIQLVHTVRQSLVAQRTALVNQIRGLLSERGIVIHQGIHQVRKLLPSILEDADNNLTPLSRELLNERYAQLVQLDDAIKQQDRRMNRLCTDNELSKRFLEVPGVGPMTATIIASDIGDGKRYASSRDYAASLGIVPRQHSSGDKLIYLGISKRGNRYIRTLLIHGARAVLKNCSDKTDKLNRWLQALIERRGFNKAAVALANKNARILWAMAAKGQVYQSLPA

SEQ ID NO: 238870 - protein, 471 aa, unidentified
MTVRRLVGIDLGIASAHTVRVLDESGEIIAKRKAWPTVESLGEVEAAALAGAPDGTRLEVVIEPTGPAWLAIAVFFSNRGHVVHRVSSAKASDLRKFLSRHTKTNGIDADTLARLPLFDPAGLQPLELPGVERAALDRRVRACDRLTQAASRHKVRIKDLARQLLPMTPLTSDLGVADLAVLERWADPNDLLKAGAKRVTALIVKASNNHQGADRAAEWIAAAESSLELHGSNPAIAFADLAAEVVTEVRLLRAVQGEHAGHAAEREAAYRWVDPAGLARSLPGLAELGGANVVAIMGDPARFARGKQFRAFTGLVARTSQTGDTNRKGQPMSKAGSSLLRTTFVRAADHARKQDPQLARIYYVQMVERGKDHLGALCVVAANLAERTWVVMRRGMPYVICDTNGRPVTPAEAKAIIAQHFTVPADVRAHRRNKKMGKAPQAARTGRQKRGDLPHQPSFRATLDQVNRRTP

SEQ ID NO: 238871 - protein, 363 aa, unidentified
MLLVGSKQSTKDTMKRATKKLYAGMDLHSNNVVIGVIDQEGKRIAQRKLECDLEQVVGFLQPYKAGLQAMAVESTFNWYWLVDGLRARGYRIDLANPARIEQYSGIKHADDQHDAFHLAELQRLNILPQAHIYEARLRPVRDLLRRRTNLVHQRTALMLSFKSLYARTTGQSLPLKEWKDLTPKAAVAFYQHPANQLIARVQVEHMEALAASISRVEKAVLACARELPLYERLLTLPGIGKILGMTITMEVGDIGRFRTDGDFASYCRTVDARRLSNGKSKGENNAKCGNKYLSWAFVEAANFAKRYDDNCRRWYDRKAAKTCAVLATKALACKLAKAAWHLMARQTNYDEKRMFPELAMKRT

SEQ ID NO: 238872 - protein, 426 aa, unidentified
MDIVNQVCAGLDVHKQSVSVCVRKVEGNGKVSSVVREFSTMTEGILQMGDWMALQGVKRVAMESTGVYWKPIWNLLEDRFELMLCNARDVKNVPGRKTDTKDCQWLVQLLQYGLLSGSFIPPRPQRELRDLTRHRAQLTGEHTRVANRMAKTLEDANIKLASVASDILGKSGRLMLEAIIAGQTDSEQLADLAQHKMRGKIPELKKALLGRVNEHHRFMLQMLFDHLAYLEKGIDDLERRIQEVLSSDTLNKTPKENDALPFDQAVTLLSTIPGVDACTAASILAETGTDMKQFPSPAHLASWAGVCPGNNESAGKRKSGKTTHGNRWLKRALSQAAWAASHTKNTYLNAQYHRIAHRRGRKRAVVSLSHTLLTIIYQLLYQQIEYCELGPDFLNTIDPKNRLRYHKKQIEKLGFKVTLEIPEMVA

SEQ ID NO: 238873 - protein, 387 aa, unidentified
MARKRTLSTLDTSIAYEAVGLDLAKTDVALAAFDSDHKEPYLIDRIPYDKLYELLADMAPTLVAMEPCSGAHQIAEQIQELGHEVMMISGRHVQAWVKDHCNGQKTDLNDAFAILNLAYDRWLTPIRGKTREECRLLALQASYRQLKVQRTKTMVHVKATLHAWGFPIRAGSFNQKALHELIDANREAFGDEVVETLHLMIDRVRDLDHDIATVLKLLTEATKRDPRASLLRSIPGFGVLTTSRWCAVVGDVARFDSPKQTMAFIGLVPNNRITGHHTETSSGREARGQGKMSKRGDKMLRSLCILGAGALCLMVRNDRLPDCPFVASIKERLASPRPWFKVLVYVAAKLVRIATALLKYGETFSYEKAGISKAVLKQWELEQAKAA

SEQ ID NO: 238874 - protein, 360 aa, unidentified
MQRQITTLDFKGQNIFVGIDVHLKSWTVTILTEELTHKTFTQPACAVTLCNYLTRNFPGGDYNSVYEAGFSGFWAHYKLKGMGINNIVTNPADVPISQKEHLQKDDPTDSRKLARSLRNNELKAIFVPSPAILEDRSLVRMRATLVKDMTRFKQRIKSFLYFYGISYPPQFEKSGTHWSKRFMKWLEEEISLQHESGIQALKILVQEAEQQRKLMLEVLKKIRLLSRSEKYAKNIVLLRTIPGVGLITAITFLVEIENIERFANTDNFAGFVGLVPNRHSSGPKTSDGEMTFRGQKMLKSLLVESSWTAARTDPALIMSYHSYVKRMEPNKAVVRIAKKVLNRMYFVLKNKMEYVPGVVK

SEQ ID NO: 238875 - protein, 317 aa, unidentified
MTQYTPKFAGIDVSKAHLDVYLHPDGSSHRFNNTKSGWCALRKWLLICDLQGVVYEATGSYHKGIERYLGEHGFPIARLDARRARRFAEALGVNAKTDPVDARVLAEFGAFLKPATRALPDPALELLKELVAARRGLVQQGTRIANKSKTAMSPLLKRQLRHSAKQVKTQITQIDAECLDIAGTSPVLTQRLKILLSISGVGTVTAMTLLADMPELGNLNDKQAASLMGVAPVARDSGAFQGKRHIRGGRAQVRQAVYMAALVASRYNADMKQKYNALVDKGKPPKVALTAVMRKLIILANALIRDNRTWSEIRPCS

SEQ ID NO: 238876 - protein, 361 aa, unidentified
MHYYTSTTEYNCGIDLHAHQMYVCVMDRQGKKLVHCNVKDNDFEYFLKLIQPYRHNLTICAECMFGWYWLADACQAEGLTFVLAHALYLRLIHGGKNKNDRIDSEKLAHLLRSNLIPPSYVYPSAKRPLRALLRQRIFYVWRRSQLLARIHSHQLAYNRTPVKQTRRVRDFWEEQLLKTENHPLRQLALKNDLAMIRHFDQQIFQLEEELQRQTKRIACREYTLLKTIPGIGESLSLTILYEIGDIERFPTIKDFLSYCRLVKGTVASAGKIKGLRGAKLGNPYLRWAFGEAAVIAKRDHYRLKPLAQQLETRMNGNKFKANTVIAIKLARAAYFMLKNKTVLGPERLTAALAKAALPFWP

SEQ ID NO: 238877 - protein, 436 aa, unidentified
MTKLRKIIENAAGIDIGSQKVFVAIEEAQVKSFETFTSSYNELVKYLREHHITHVAMEATGVYWITLYDILEQSGFDVYLVNPADSKNLPGRKTDVQDCQWIKELFSMGLLRKSFVPKDFIRELRCYTRLREDKIQTAAMHINHMQKAMTLMNIRLPEVLSQIHGSSGMAMIEAILKGERDENKLLLLCHTSLKKSKSEKIIEALKGNYKQEYLFELQIAYDGYMFYQNQIATCDKKIEILLKQVAQDKEYDKQKIKEHRIKPIRHNKPMVLDLHENLLKLNNVNATSLPGITDYTFLRLTAELGTDLSQWPSEKNFTSWLGLSPGKHQSGKINKRSKKKSVTRAGQIFKQAAQTILLSKNIALGDFARRLRAKRGPAIAIKATARKLAELYYKLFMKGLAYVEHGLKFYQDKQRAKLMHFLKKKAQELNLQLVEN

SEQ ID NO: 238878 - protein, 417 aa, unidentified
MEHVAIDLGGRESQICIRTQENVIRLEKRVPTRKLKEFFGSIEASRIVLETCAEAFAVAGLAKDAGHDVRVVPATIVRSLGVAQRGIKTDQRDARALSEASVRIELASVHVPKKESREIKTACGMRESAVHARTQLINSVRGWLRGELERVRSGAPETFATRVRESRTSEKIPAHVERQLAIIEAITEQIKGADRDLLEMAKRDERCRLLMSVPGVGPITSLRFVAAVDEFERFSDAHQLESYFGLTPGENSSSDARRRTSLTKAGSKKVRWVMVQAAWSASICRRSDPMVLWMRQIAARRGKQVAIAALARKMLGIMFAILRDRVPYNPSRASKIRVEPTDSQTFNDGIGVPPARKYALRKPVDQSDTILPTTPKEASNEQRAAVKADPSTPDYTVAKKPRRSPVRRPLKDTLGRE

SEQ ID NO: 238879 - protein, 353 aa, unidentified
MSKNITLTVDYHDRVCVIRWLDHDTGCDQVFTEVPTTKEAINRMVEQARRTAGRDGQVTWLQESTTGWARVQALVADRVKFLLANVLQMPLPPKGRRRKTDKIDTARMQREYVNGTLPLAYQPPAEWRQLRRLVAYREGLVNRRTALRNWINRYLAHETWFDRTGLWSPGGQKRLRTFLKQLPRTDALVIGQKLDELTRLEEQLGVALTELVSAYGDHPEAKRLDAIAGISVVSAVSMVARIGPVERFRNADHLIGFAGLAPGIQESDQTRRNGRIGGGGTDSHLRFYLIEATMWARKIPRYRKAYDRVTKRRGAKVGRLVVARMLVRSIYKMLKKGVAFDAGAPTPATATVG

SEQ ID NO: 238880 - protein, 362 aa, unidentified
MRIIGCDLHARQQTVAMLDTTTGEVLSMTLKHEGNNVREFYSSLPRPVRVGIEATGSMQWFVNLMEELGIECQVGHPAQIRAAEPRKQKHDRRDADLILKLLVENRFPAIWLPSQELQDLRALLRHRHQWVRMRTRIQNALQSIALANGLRRGTALWSQDGQHTIAALPLAPHTAYRRSELQAMYAKFEAEIEKLNQRVQEQACGRVGARLLMTHPGVGPVTALATEVFLGDPARFADSKAVASYVGMIPREYSSGARQRLGGLSKQGNPLLRFLWGEAGAHAVRRDPELGRFYRRKLNQKGFGKASVAVARKLGIRLWIMLRDQIEYNEFCRRGQKQQNGSEACAGMPETRHGAKCHRPVD

SEQ ID NO: 238881 - protein, 360 aa, unidentified
MSNSIARVEPAAKVIVGVDTHKHVHVAVAINGLGARLATCKAPADRAGYAHLVAWARALGTVEVFGIEGTGSYGVGLASFVRRHAMRVVEVSHCDRRKRRNTGKNDTLDAETAARSVLAGIAVAVPKTADGTSEMVRQIKIARDTAVKARSAAIITLKTLVVNAPGELREVLEPLADRKLIGRCATLEPGDLIDPTASVKHALRALATRWLTLTTEISTHDTALDTITLAAAPTLREAFGIGPDSAAEMMIVAGDNPARVRSEAAFAKLCGACPIPASSGVTNRHRLFRGGHRQANAALYRIVIVRLRWHQPTIDYVTRRTAQGLSKKDIIRCLKRFVAREVYHALIDDHRSRAALTEAA

SEQ ID NO: 238882 - protein, 379 aa, unidentified
MKAITLYLGLDVHKDSITLALAEPTPKGEIRLFGTITNDLHALEKALTRIRKAHPGAHLEVAYEAGPCGFGIARRLKQLGVPCLVAAPSLIPKQPGAPFKTDKRDARTLARLLRAGELTAVYVPEPTDEAIRDLCRARTDAVDDLRRCRLRLKAFLLRHGYRYQGKANWSQPHMRYLRELVLPHPAMKAVLEEYLQGIDAAQARVERLEASMLNLLESWRLKPAVQALMAMRGFQLVAAMVTVSELGDIHRFAHPRQLMTYLGLVSREDSSGPRQRLGKISRCGNGPQRWMLTECAESYLLPPKVSKELSRRQEGQPAEVRALSWKAQHRLHLRFTRLLARRLPRNKAKVAVARELCGFVWALLRTQPCYRLSTGGAAS

SEQ ID NO: 238883 - protein, 444 aa, unidentified
MKTIYKRVAGLDVHKKTVVATRMRVTGEDRIEWETKTFGTTTPELLELLDWLCGWELTHVAMESTGDYWKPVFNILEDSVEVWLVNAQHVKHVSGRKTDVKDSEWLAELMLHGLLKPSFIPPKPQRALRELTRYRSRLIEERTRVVNRVQKLLEGANIKLASVASDITGVSARAMLAEIVAGQTDAEWMANLARGRMRSKIPELEKALTGIVQPHHRFVLAQQLEHIDFLDDKVEALSLKIGEQLESMSWADQPSEPEGGEGREEETPVAEESELPLTWDAAVALLDTIPGVNRRAAEVMLAEMGLDMSQFPTANHLASWAGLAPGNHQSGGKRYSGRTTKGNKPLASMMVQAAWSAVRTKGTFLKARYHRIAARRGKKRAIVAIAHSMLVSAWHMLTYQQPYQELGDDYFDHRKKETKVSYLVRRLEKLTGGAVSIEIQPAAA

SEQ ID NO: 238884 - protein, 407 aa, unidentified
MPEQVVTTHVVGIDIGMESCTISCLTMDKRQVIKATPFANTLEGFDWLFERLKGLGVAPKEMLVGLEATSRYGENLLQALLKHGYQVCLLHPAQMHAFAQQRGLRAKTDQLDAVTIARALLSGEARFGYVPSEQVATYRELMRLQHQLSDDVVRYKNEIHALLVVLFPEFTQVFVDPTRPTALAVLKRYPSAQVIAQTEVETLSKFLHELAPRHYGRPTAQELVRLAKASVSSGVAVAARSSSLRILCDQLEHTQANLDHLQGEIDQLLDQDPKAKGMLSVPEFGPTTVAVLRAEVGDLNRFARIDQVVAYVGLDLQVKQSGKWKGQTKLSKRGSGRVRRILYLAALRSIHLEASPFGAYYHRLVARGMKKGMALVAVMRKMLIVAAHLIQTEESYEPEKVAVQAGS

SEQ ID NO: 238885 - protein, 347 aa, unidentified
MSHTKKGDRIMQVERIGLDIAKSSFQVHGVDAHGKVVVRKQLSRSKVLLYFAQLPPCLIGLEACGGAHYWARELQKLGHEVRLMAVAMIQPYRTGQKNDQNDAAAICEAVSRPRTRFVPVKSEAQQAVLTVHRARELLVTERTALANQIRGLLMEYGVVIAQGIQRLRRELPGVLAATETLPELVRDVVEELRERMQELDRRITDYDHRIEQLAKQNEATRRLMQVEGVGSITATAIVATIGNGHAFQHGRQFAAWVGLVPKQHSTGGKTVLGRITKHGNVYLRTLLIHGARAVLQFSAKRSDQKSRWVEQVRQRRGNNIAAVALAAKHARILWALLAHGQEYQLAA

SEQ ID NO: 238886 - protein, 352 aa, unidentified
MAKPTQISPVVGGVDTHKDLHVAAVVDQSDRVLGTQSFATTRQGYKLMLIWMRSFGELKRIGVECTGSYGAGLLRYMQTAGVVVLEVTAPDKQDRRRRGKNDDFDAESAAHAAFAERRTVTPRSRDGMVESLRVLKVCRKTAVQARRIALQIIQTTIVCAPDQLRDTLRKMTRMQLIRTLAAWRPDLTAYRDVEEAYRIALKSLARRYLELHDEVADLDTMIQAIVTDLAPELIARNSIGLNSAAQLLLTAGDNPERLRSEASFAALCGVSPVPASSGKTIRHRLNRGGDRAANSALHIIAIGRLRLDPKTQEYVARRVAQGHSKLEAIRCLKRYVKRGAILGHRSGCVLQL

SEQ ID NO: 238887 - protein, 378 aa, unidentified
MKQNSTRRQSPKQALKQSPKQSPRQSKKSCQGPMAIGMDLGDRASRYCVLNDCGEVVKEAAVATTKKGMAQVFAALKRSRIAIEVGTHSPWVSRLLKSLGHEVFVANPRQLKLISQSSRKDDRVDAQTLARLVRVDPELLRPIQHRSEEMQLDLMVIRVRAALVEARTQLVNSARGLAKSVGERLPKCDAKCIGSGHLCSLPKPLQDTLEALLLQVEALTVRIEKCDRQVEQIARTKYPETELLRQVQGVGPLIALTFVLTVADKERFQKSRDVGCYLGLRPKRSQSGQSEPELRITKEGDVYLRKLLVQGAQYILGRKGPDTDLKRWGARLAVGGKRMKKRAVVAVARKLAILLHALWSGGEVYEPLRNNAARQVAA

SEQ ID NO: 238888 - protein, 411 aa, unidentified
MDKIYDKCCGIDVHKKLIVACFRCGKKQEIREFGATTRELLELADWLKEGGCEMVAMESTASYWKPLYNILESSDLNAIVVNARHMKAVPGRKTDVKDAEWIADLLQHGLLQPSYIPDKDQRELRELVRYRKSLVGERTRELNRLQKMLEGANIKLSGTVSDINGKSARSILEYLLTGKSIDGAKYDEMYEQKIIAHNLKATKEQIVDDLNGVMAPLQRRMMKELLVHLDELNIHIKNLDDEIDNFMKPEEKQASQAIQDVTGIGNTSAQAIISVIGSDMSRFPTDRHISSWAGLCPGDNESAKKRKSGKTRKGNVLLRTTLITCAHAAVKNKKSYFYAQYMRISAHRGSKRAYVAIAHSMLISIYHILKDGVVFKDLGADYYNQFNKERKINAYLKKLKALGWEAPIVDA

SEQ ID NO: 238889 - protein, 374 aa, unidentified
MSKIARIGIDTSKGSFQLHGVNEKDEVVLRRTVRRRQFLEFMAKLEPTVIGLEACGASHHWARELGRLGHRVMLIPPQAVKPYVAPGRKNDKNDAEAICEAMSRPRVRARLVPIKSVEQSASQMLMGVRDSLLKRRTQLCNTIRGHAAEFGLVAAKGLDKIEPLLARIAGDDGLPALAREMFGDLGQEHAELSQRIVQIDRKLAAFHRSNELSRRLMAIPIVGPVGAGLLITKIINPHGFRCGRLCAAWVGLTPKDHSTAGKQKLGGITRAGDESLRAVLVSGATAYIQQVRRGRIVPSPWLAALLERKPPKLAAVALANKTVRIAWKLMTSGERYDPTHRVDREGLAASQYGGLRAEPLAPAPTGGDSHAVAA

SEQ ID NO: 238890 - protein, 455 aa, unidentified
MRTEQRGSKLSLECIEPNAAGIDVGSRSIYVAVGAEREAEPVRCFATFTEDLRAMASWLKQCGITTIAMESTGVYWIPVYEVLEDAGFKVCLVNSHHVKNVPGRKSDVRDCQWLQYLHTVGLLQASFRPERDICALRALSRHRAGLVEVAAIHVQHMQKALTQMNLQIHHVLSDITGLSGLAVVDAILAGQRDPRYLAGLVQSRVHADRETVIKSLVGNYRAEHLFTLGQSLAAYRQYQKMLADCDREMEQYMRRLPDNGQGGSGLAQSGKEGKAKRRKNQFHFDMGKELHRVLGTDLTLVPGLNALTVHTLVAEVGSDLSRFENAAAFTSWLALCPGSKKSGGKVLSSKTRKTSSRLNRALRLGAQTLHRSHSYLGAFYRRMRSRLGAPQAITATAHKLARIIYHLVTTRTAYDESVFRNEEQKQTLRLQHRLQSNARALGFQLVPISPQEVVH

SEQ ID NO: 238891 - protein, 337 aa, unidentified
MNYCGIDLSSKSSDISIIDETGNQLRRQAVATEAGDITEALAGYGQLLVIIEAHPLAETAARIVEEAGHRAVIIDARAAKNLMSAMKKTDRRDAQTLAEIGRCGWYVEVHRKSAAARQMRSILQARQALLKSSKALASSIRGLLRAHGIRLGKVSKGQFAAQVKKAAEQEVPGLLPALSGMLDAWVVAEERAEQIKQALAKACRQDEISTRLESVPGVGPLISTAYRATIDDPHRFKCGDEVSDYLGLVPRIYQSGEVEYRGSITKEGDGLLRSLLVEGAHVLLTRGQDCALKRWGLSLEKRKGSAKAKVAVARKLAVLLWRLWKEEKMFEAFPQAV

SEQ ID NO: 238892 - protein, 400 aa, unidentified
MRLRLRLTGGASAASEEPKAMSESAARDEMDSSYDENGIEVPASRGALALLRKEESVEKHMTVAVDVAKNVFEIAVSRDPGRVCLRRRLSRNQLIPFFRGQPPSTVLLEACGSAHHWGRLLEGLGHRVLLLPPHHTRRYVLRDKTDRADATALLEAHRNEQISPVPLKTLHQQTLASLHRLRSRWVATRTARLNTLRGLLRELGISIPLGPRHVLPAIQAALSDPSAPVPEPLHPALLRAAQEIHQIENSIRDTELELQALAKNLPATLTLQTIPGIGLLTSTALVAFVGNPSRFRSGRRLASFLGLVPREHSSGSSRHLGSITKRGDPYLRTLLTHGARSVLLAAKRHHHPNPLQLWALSIQTRRGHNKATVALANKLARIAWAVWSRNQPFQPHRLAA

SEQ ID NO: 238893 - protein, 317 aa, unidentified
MQQHNTIFVGIDIAKFKFDVAFSHLSKGTTYNYTPEETKKFIQILRDIQPQLICLEATGGLERKLVACLHKHQFAVAVVNPRQIRDFARAKNQLAKTDQIDARTIMQFAQLMQPRITPALTQAQQKMREFSSRRQQVSKMIIQETNRLASTADRDVSKLIQQSIRAYKKQIKVIEKKLKQLIAADKQAQERANILQSVPGVGGITAALLIAELPELGSLNRKQIARLVGVAPTNRDRGIMRGKRTIGGGRVGIRNGLYMPTVVAQKHNPKICAFYKRLVESGKPKMVALVAAMRKLLTILNVMIREGRKWDEKIIKA

SEQ ID NO: 238894 - protein, 407 aa, unidentified
MEVVNPRCAGLDVHSRRISACARIVTDRGVSREVCSFGTSTHELRAMADWLESKGCTHVAMESTGVYWKPVWHVLEGRFELVLANASQVRNMPGRKSDVSDATWIGELLAHGLIRPSFVPPAPVQEMRDLTRTRKQLVREISRHTLRIQKTLEDANIKLAEVVSSVLGMSGRAILAGLVGGETDPERLADLAATGRLKASRDQIVEALRGTVTDHHRFMLKLHLDQIDQLERAVREVEERARAGPFRAAIELLSTIPGVSETTATVIVAEIGDDMRRFPTAGHLLSWAGLCPRMDESAGKRLSNRTRRGAPWLKTVLVQAAWSASKKRDSYFRARFLRLKSRRGPKKAVVAIAASILTAAYQMLKTGAEYQDLGPKHYDHIDRVRAADRLRRRLQALGYRVTMEPAA

SEQ ID NO: 238895 - protein, 360 aa, unidentified
MRHLSAKLLSDRNSSEWEPSMGEVTTIGLDLAKHVFQVHGVDAEGATVLRKQLRRAQVLAFFGRLPPCLVGLEACATAHYWARELRALGHGVRLMPAQYVKAYIKRNKHDAADAEAICEAVGRPTMRFVPIKTADQQAAVLLHRGRERLVRQRTGLVNALRGHLAEFGVIAPQGLRNVGKLIAIVRDEGDARLPDLARQVLQVLAVQIEQLEAAVAAIEKQLMAWHKSNPVSQRLASVPGIGPIIATAIAATVVEPSGFRSGREFAAWLGLVPRQNSTGGKHRLGGISKRGNPYLRRLLINGASANLLRSKATNADPWVIGLRRRRPPLVVAVALANKTARIAWAVMHRHENYQRVAAAA

SEQ ID NO: 238896 - protein, 469 aa, unidentified
MKRKSRRAKCQKVSPFSGDLQLIEPDAAAVDVGSRSHWVAVNPQRDPNPVREFGTFTADLISLADWLAQCEAKSVVMEATGVYWVSLYELLERRGFKVYVVDAHTVRHLPGRSKSDVKDCQWLRRLHSYGLLRGSFRPPAQIRQLRNYLRSRTKIVEAAAQQQLRMQKALTLMNIHLHHVISDLSGLTGLSIVRAIVGGERDPNRLARLRDPRIRVSKETIQKSLEGNWQEELLFDLKIALESYDHFQDQIAAYDEQIRQELKEVQSKVDLAHEALPAARLKACRKRPGMSQQDQLDLREELYRISGVDLTRIDGISLQTAQKVFFEIGTDVSAWSDEKKFSSWLGLSPNHRISGGKVLKRSSRKVVNPLSVALRLAARTLRNSHSALGANFRRLIAKIGMPKAITAMARKLAVLLYRMLKYGTQYVDKGMQHYESKYQETKLQYLRAQAAKFGMILLPKQAAATGVAS

SEQ ID NO: 238897 - protein, 355 aa, unidentified
MTMLAEVYDFVIGGDPDRDTIDLAVLDTGAGRVHAHLADTADGAGYRRMIAWASEHAPGRRIWALEGTGSFAAGLVMVLVDAGETVVEVGALKRARGAKNDRIDAIRAARQALARDEQGAPRSGGLREALRMVFACREGVLVSRTKSINELKSLIVVAPEQLRAELRGRSLAVQLARIEQLQTVPSAPVEQRLSVFSLQSITARVRFLSAQLAELDPQLLELIKQHPAGPALLAEAGVGPVVAAQLLISWSHHGRVRSEAAFASLAGVSPLETTSGQHSRHRLNRGGDRALNRALHTVAITRMRCHPETCAYETRRSSEGKTHRDIRRSVKRALARRLYRTIEAAVRKHHPTATT

SEQ ID NO: 238898 - protein, 416 aa, unidentified
MASQPTKVIAGIDTHADTHHVAVINEHGKPLADKEFLAVGSGYRKIIDFITSYGTVTAVGVEGTGSYGAELARTLRSEGLAVLEVNRPNRAARRLNGKSDPLDAYQAAKSVLEGRTKAIPKAKDGPVECLRIVRSGRASAIKARTAAINQIKALLVSAPEKIRAKYRAMPTSALIPALQRLRPSGHLADPEYVTLMTLKALAARCQALGTEIEAADAALKEILDSYAPMLCDLPGVGTEVASQLLITFGDNPDRMGNEAQFASLVGVAPVPASSGKTTRHRLSRGGDRNANNALHQVVLVRMGSCQRTKDYVLKRTTEGKSKREIMRCLKRYAAREIYRQITNPRPAPDNSDLRRTRTELGLTIATVAGELGQWVSILSRLERGHIRNDALAATYRQWLTNQPQVHPLAPPVFRTN

SEQ ID NO: 238899 - protein, 340 aa, unidentified
MVHVGVDLHKRVSQIAVLTAEGVLAQHRIANTPDRVHRFFAQLPSPARVAIEASGTWWWLADLLEGLGHQPILSHPKHTKAIAAARLKNDRVDAARLVHLLRGDLLPQVWIPPPAVREARELLRHRVALVRVRTGIKNHLFALLARRNLHPTSATRWCTARGLRECQDLPLGPLPTMVKEGCLALLRVLDEQIRDLDHELTRRWGADPRVRRLMSIPGIGPFVAIALVLELGDIHRFPTAKHVASYVGLVPRVRDSGERVRRGHIVKEGNRLLRWALVLAATQATRRPGPLRTWFRTMQQRKGKMIARVALARRLAEIAYRVWKEDCDYLALLRHGAVQG

SEQ ID NO: 238900 - protein, 444 aa, unidentified
MHYQKVLKMLESIPYLSVGLDVGADFTWMSILLPNGTLVGKPFKIVHCDPASRELAVSKIKEAQEAYSLKSRCFLESTGIYHIPLLCFLRDKGFDCSVINPIITKNSTNMNVRKLHNDKFDSKKAAKVGQDASLKTSIVPADAVIDLRNLVRDYYYFKDLQSAVVLKLNAELKVSFPAYLDVFSKVTAQTSLKLLEAYPLAADMLAAPRDELVETIRNTARFGEKYALSKYDAICAAAKDAAVFGRALPSNALRIRLYIKTYREYQAHLDSILEELHKAVDNLQGGPVYDRICLLQSLRGVGFLSAVVLIAEMGSFDLFSSPKKLYAYFGMDPGVNDSGKFHGDRVHMSKRGSSLARRILHMIAINNLKVDKAAKAPVNPVIYDYYIRKCANKKKIVAVGAVMHKICNIIFAMLRDNKPFELITPKEHCERYAAEHPGSVNIAA

SEQ ID NO: 238901 - protein, 381 aa, unidentified
MRTTATPNEHDTTTERVLFLAFELSEKTWKLGFTTGPGQKPRERAVAARHQARLLQEIAQAKRRFGLPDTAPVVSCYEAGREGFWLHRFLQTQGITNQVVDSSAIEVNRRKRRAKSDGLDVRKLVSMLMRYEQGEREVWRVVHVPSGEAEDQRHLHRDLETLKQERASTTTRIKGLLSSQGIRLRSLSKFPEQLDALRLWDGSEIPSGLRRRLLRVWAHHQFLSAQIAALEAERRALLQSSQEAPIDKVRQLMQLKGIGINGAWLLVMEFFAWRALKNRREVGGLAGLTPTPYQSGASAREQGITKSGNRHVRWMTTELAWSWLRYQPESALSCWFRERFGSGGKRLRRIGIVAVARKLLIALWRFLNTGVLPEGAELKAA

SEQ ID NO: 238902 - protein, 336 aa, unidentified
MKFYLGMDVSKLWVDITLMPVIDHEKQPTITERFENDHAGMKVLIKWLKKHLVTFDENSLLVIENTGVYHRLVWEYCSKEGLPLYIGNAAHIKWGLGITRGKNDVVDSKRLCSYAFRNADELKATPILNPVFLKLKDLMTARSRLLTQKNSIQVYLSELKLSNLKETQLILEQAHKAAIDGIDKSMKLVEKNIKEIIRKDAAIKNNYDLLLSVPGLGHHTAVYLICCTNNFICKITGKQLASYAGVAPFGNSSGTSIKGRDKVHKMANKDLKKLFHMGAVSAITHYDEFRDYYERKVKEGKHEQSVINAIRSKIALRAVAVINNQAKYVNNYKKVA

SEQ ID NO: 238903 - protein, 344 aa, unidentified
MTITVIGLDLAKNVFQVHGIDEDGRAVLRRKLRRSDVLPFFSKLTPACVGLEACHTSHYWAREIAKFGHEVRMMPAQFVKPYVKSQKNDAADAEAICEAVQRPTMRFVAVKSEKQQAALMLHRIRDLLVRQRSSLISSIRAHFAEFGIVVGQGIRNVERLLALLGAEGDNRLPALAAEMLGILAEQLREIAARVREVEIKLLAWHRANPASRRLESIPGIGPITASAIIITVGDPRQFKSGRQFAAWLGLVPQQRSSGGKERLGGISKRGDGYIRRLLVHGARAIVGWQKRSRTHATPWIARLLERRPINVATVAYANKLARIAWALMIREERYNPARAFAAVA

SEQ ID NO: 238904 - protein, 415 aa, unidentified
MEIVYPRVAAIDVGKKEIAVTVRVPGQRPGTRTSQTRKFRTFYQVLRQMVGWLVEQEVTHVAMEATGVYWKPVFHALCEADTLDVVLVNARHVKNVPGRKTDVKDSEWLAQLLECGLLRGSFIPPPQIAAIRELTRYRKKTIQARTRELQRLSKVLEDAGVKIDSVASSITTLSARDMVEALIAGQRDPRVLAELARGTMRSKIPDLTLACAGRFGEHHALLARMHLDHIDHLTSMIDGLDQRIEQVLSPFAQHLSLLRTIPGIGERAAQVLISELGVDMSRFPTAAHLASWAGLCPGNNESAGKHKSGRTRKGNAEVRDILTECAWSAGKTRSYLGAQFHRFHRRFGKNGGGKAAIAAAHTLIVIVWHVLHSQSPYRELGHDYFTRHNNPDAAKQRLIHNLEALGYQVQLTATA

SEQ ID NO: 238905 - protein, 402 aa, unidentified
MNAVGIDVSKGKSMVAIMRPFGEIVSTPFEIKHTSSDINSLVKLIKSIEGESRIVMEHTGRYYEVLAHQLSEANLFVSAINPKLIKDFDNDSLRKVKTDKADSVKIARYALDKWQNLKQYSVMDELRNQLKTMNRQFGFYMKHKTAMKNNLIGILDQTYPGVNTYFDSPARSDGSQKWVDFASTYWHVDCVRKMSINAFIDHYENWCKRKKYNFSKSKAEEIYGKAKELVPVLPKDDITKLIIKQAVDQLNSASITVESLRTLMNETASKLPEYPVVMAMKGVGTSLGPQLMAEIGDVSRFTHKGAITALAGVDPGVNESGSYEQKSVPTSKRGSSDLRKTLFQVMDVLIKTHPQDDPVYQFLDKKRAQKKPYYVYMTAGANKFLRIYYGRVKEYLASLPES

SEQ ID NO: 238906 - protein, 313 aa, unidentified
MSKIVEEVTLGIDVGQLSLDIFGANLNDVLSIENNETAIRAFLGSFSGPVAIAVEATGVFHEMLVDIAQEFGFTVYLIDGYRVNKYREAVGVRAKTDPNDARLIHRYLVAERALLRPIVQQNQEVRLLWRLLKRRAKVVKLRAQLQLSLQGLMINDADKEVAITGLDGLIKQLTDQAKRLAKTLNWGESLARLETIPGVGELIALGLRAMYARGEFTNADRFIAFLGLDIRVRDSGKHRGRRKLSKKGDSEIRRLLFNGARSAATHRKYWGSLKAQYMARGMSEIQVSVALSRKLARIAYAILRDETVYETPV

SEQ ID NO: 238907 - protein, 413 aa, unidentified
MRLFVGDDWAEDHHDVELMDSAGRRLAKARLPEGVAGIARLHAMIGEQLGEDADEDDAGQVAIGIETDRGPWVAALIAAGYTVFAINPLQASRYRERHGVSGAKSDTADAHVLADMVRTDSHQLRPVAGDSAQAAAIKVVTRTHKTLIWERTRCTQRLRHALRDYFPAALEAFEDLDAADTLELLARAPDPASAARLTTAQISAALKRARRRDIAAKAERIQAVLRAAHLGQPDIVAAAYAASVRALIAVLATLNEQVKTLQGQVEAYFGQHPDAEILLSQPGLGPVLGARVLAESGDDPGRYISAKARKNYAGTSPITRASGKKKTVMALHVQNDRLIDALISHAFTALRTSPGARAHYNHQRARGAGHNPALRQLANRLTGILHGCLKTRTLYDEATAWPQYTATSEKTAA

SEQ ID NO: 238908 - protein, 411 aa, unidentified
MENIFVRCAGLDVHKESVEACVRRIEPNGCVHSETRHWGTMTRDLLEMADWLAAKGVTNVAMESTGVFWKPIFNILEIRFTVLLVKARHLKQVPGRKSDIRDCQWIAQLLQCGLLKGSFIPPRAQRELRDLTRHRTQLVEEKTRTINRIQKVLEDANIKLASVASDVMGVSGRAMIQRLIEGETNPFKLADLAQRQLRGKIPELQKALEGKLTDHHRFLLKLLWKELSQQEERIVDLDSKIEEHTRPFAAEIEHLDTIPGVDHRVAEVLLAEVGPDMKPFPSDEHLSSWAGMCPGNEESAGKRRRRRITPGNRWLKQTLAQAAWAASHAKNTYLAAQYRRLASHRGKKRALIAVGHSILVIFYHMIRSGASYADLGADFFDRLEPERLTHYYVKRLERLGYTVTLESSAAA

SEQ ID NO: 238909 - protein, 447 aa, unidentified
MHRRTVGIDLAISATQVAQIFDDGVAVGKPLRFRLAAEELQRTIDTITEHVPPGTPIQALMEPTGMAWFPVACWLERAGVEVIRVKGQRVKALRRYLSEHAKTDLADAHLLAALPGFGGRRLEPVHIPSPAHHALQRLTKQRHRYQELRCASKRRLLDLIRWACPALEGVLPDVSSQLALGVLGEYLDPRRVLGARRNTLRRFLCEHAAGNHPKGGVFIDTLVESLKDAARRTLALHRDRVDFASLQFEIRQEVELIRQLDDNITQLERRAEQLYQTLHPSNALRTIPGIGPTLAPLLVGVLADPQRFRNERHLRGFCGLFPTTSASGGVEAPNQQITKSGSDRLKRALYLAADVARKIDPDLAAVYWRLMVRKGHHHKQALCAVATRLISRIHRVLKTGERYILRDLDGREISVEEAKRLVRASFTVPEDIRKARRRQIINMPMEA

SEQ ID NO: 238910 - protein, 386 aa, unidentified
MQTLNNLSRSLIDLEPASTLIAIIEMSLSSWLVAGIVPGIERQPLKKLAVDESALLRLLHRWREEAEKAGCRIKRIVVAFEAGRDGFWLARWLKARSIEAHVIHAASVAVSREHRRAKTDRLDAELLKRAFLGWLRGERNHCKVVAIPTLKDEDAKRPSRERESLVGEQSRIVNRMKAALIRLGIRGFNPKLKRAAGRLDSLRTPEGEPIPPNTLAELRRDMERRRLISNQIRQIEEARLKHFEQAPNDGPHAMVRLLARVIGVGIETADMLVHEVLSRNMHDRRAIARFAGLTGSPDESGRKRREKGLARSGNGRVRRGMVQLAWRFLTYQKESALAQWYRARTENARGARKPMIVALARKLLIALWRFVWQGVVPDGVVLRPAQ

SEQ ID NO: 238911 - protein, 339 aa, unidentified
MKVTTFGLDLAKRVFQLHWVDMETGEICRRQLKRSEVAEFFANRAPAVVAMEACGSAHYWARKLKAMGHEVKLIAAQFVRPFVKSNKTDAADAQAIWEAAQRPGMKFVAVKSEGQQSVLTLHRVRELLVKMRTMQINQLRGLLYEFGADLPAGRQRGMARMPDELAKLEQTLPAMVIETLRSQRQHIEGLDKAIAEIEKKLFVWKKDDAASQKLLAIPGVGLLTATAAVATIGDAKAFQSGREFAAFLGLVPRQSGTGGRVKLLGISKRGDVYLRTLLCHGARSVITHQKEHGPWLDKLLARRPFNAATVALANKMARTIWALLAHDRTYAKGYVAKAA

SEQ ID NO: 238912 - protein, 362 aa, unidentified
MEYIAFDAHKHYTLASVERQAGGMVREERIPHERGALRQFLRRCDLGSPVAVETTGNWYWIVDEIEAAGDVPKLVHARKAKLMLGMVNKTDKLDARGLNRLQRTGTLPTVWIPPGALRDERDLPRTRMVLVRQRTQLKNRIHATLAKYALTVPEVSDLFGRQGRELLRQRLAELPPQTTFATGRLLEQVEGLDDQVHRFERRMQEVFKPTREIELLMTLPGVGFILAIVIHLEVGDVTRFASNEKFAAYAGTTPRVHASGGRTRFGPLRPDVNHYLKWAFVEAATVICRHRRRHPKRHGSQLYERVARRKGHAKAIGAVARHLAEATYWMLTKREPYQEPRLLQGGARKPGLVHGGVSASSH

SEQ ID NO: 238913 - protein, 387 aa, unidentified
MYFVGIDISKFKHDCAIVDELGDVITPSWSFQNDCEGFSLLRELLDVLDGEKKIGLEATGHYGQNLKLFLENSGFSFMEFNPLLVNRFVRSKSLRKTKTDSIDALMIAQYLMTVEYKPYPPSFYTLEKLKSLTRFRDSLIRQRSKQLVELTNILDKVFPEFKPFFKGRFSATALYILSHYASPEKISNMNSKSYESLRRLSRGKFSMVDFVELKTLARNTVGSTSDYLLQEMEITIDIYNQLQSKVEEIEQQINDCVLGLDPPMLTIPGIGVSSAAVILSEFGDFSKFKSPSKLLSFAGMEPGYFQSGTSESTGKMVKHGSSHLRYAMMNCAQTVINNEPTFAAYYAKKRAEGKEHRVALTHVAKKLLRVIYTLQTKELSYNPDLVR

SEQ ID NO: 238914 - protein, 338 aa, unidentified
MKTYAGIDLHSSNNYIGVIDAKDKRLYSKRHDNRIEDVLKVLGKFKASLQGVVIESTYNWYWLVDGLMDQGYTVHLANPNAIKTYDGLKHTDDKWDSFWLAHLLRLGILAEGYIYPKHQRSVRDLLRRRLMFVRQRTSQILSLQSMITRNRGLNFSGAQIKRFRDEFIEKLFSDRHLVFTAKRNIETIRFLDRIVSEIEIEVKSQIKLKKQFVSLLTTPGIGNILGLTIMLEVGDIHRFAKVGNYSSYCRCVESKRISNGKKKGENNQKNGNRYLAWAYVEAANHAMRNCAKAQKFFQRKMAKSMRVLATKALANKLSKATYYIMRDQVAFDSQKLFG

SEQ ID NO: 238915 - protein, 322 aa, unidentified
MSKYIGLDVHKNKCHAIIMSEDGEIQKQEEFKNDTLGLELFFDGIDDAQIAMEATYSWQPTYQWLEEKGYDVKLAHPKKTRIIGEAKIKTDCRDSEALAHLLPESYVPPEEIRKLRQKLYHRTYLVRERTKFKNKIHAELAKQGIEFDESPWTKKGKQKLNELKIDEINDYLAMIKALNERINRLSRELKQEARESEEANLLITIPGVGYFSALSILAEIGNIDRFSNPEKLCSYAGIIPSTRQSGHITRRGSITKEGRRCLRWVLVECIWSHLTHTSGTRLTRFFRRIAKRRGKKVAVVATARKLLVAVYWMLKRGEEYHP

SEQ ID NO: 238916 - protein, 452 aa, unidentified
MGKGSGMTRGDVRRNARRERLRALLPRDGAVVGIDLGEDKQALAVADHDGRVVARKTVRVKAFRLGEALDWAAGQARAAGFAAVTVACEPTGARWLQVQRLCAERGLDLVCIQPLVSHIAREQQDLTGHKTDEADCVLIARLAAELHCYVPEELDQAWADLRHLGRRRAQLITAATASVQRVADFLSVAWPVVTEACAHPLESKTWLAAVQVVTSRCGGDPARLAGLGDQEFTGLVRAAVAGWGGQRPAAAICRRVLAATADAEGVVISCRRGLLRRVAAELGDLARTRAQLRAVEADMVAVLGELGLSRLAGIPGLSAVGAAAILAETGDPRRYASSSSMVKHAGLAPAGNASGAFEGQAHISRRGRPSLRLAAWRAIWPLLRHNPVMAAKYAALTGAAAAAGTGTRQAAAARARVACAASLLRWIYYITVHDATWDAAAASGAARQPEAA

SEQ ID NO: 238917 - protein, 406 aa, unidentified
MEGPIITVDVSKGSCHYQPFIENGHPMRKPKQLSATIDGFQKLGQTIKDLEAKTEREDIPVIFEATGVYHRPLQKYLEDHKIRYYIISPLLSATYRKTDLHSNKTDALDCAHIAKAYYCEKELRQYQAQPQEYKRLYQLSRIYESELVHLRKRKVSLRSMLDIIYPRIDKTFKGNQNLYDPIPMEILKRYPHPSLLLSHREDTIVKAVGHRTGHLKGYTERIVHKIYEKAKECYSGCEINDIEVINLPRLIENVQEQKKKCDSLLKEMIEIARTCPYFASVVSIVGIGENLAARIIAELGDVNRFDNRAAIVAYAGLNPKIQQSGDIDGLHLKISKKGNKHLRCLLYLGAQCNYRLRKEDTLYEFTKKKRQQTQCPLSSKAVYTASAYKLLVIIYSLCKNGTLYHS

SEQ ID NO: 238918 - protein, 423 aa, unidentified
MDILYERVAGLDVHKDTVVACVRIMADGKATRECRTFATATEQLVELRAWLEESRCTHVAMEATGVYWMPVFRILGEGKFELIVANAAHIKNVPGRKTDMNDAMWIANLLACGLIKASFVPPEEIQELRALTRTRKQLVREQTRHVQRIDKTLAEANIKLGSVISDIMGASGRRIIEAMIAGVRQPRKLADLASKQIKATPKELYDALHGRLTDHHRFLLDLHLRQWDGLDETIRKIDREIDQRIDQIDTKARSDSVPFRTLIELMYTVPGVSTVAAPAILSEIGCDMSRFATDGHLVAWSGLCTGQNESAGKRKSSRLRKGAPWLKTMLIQCAWAAKRKKDSYYRAQFYRLQAKRGPQKAICAVAASILTAIYHILKDGTEHHDLGAGYFDRRPVKVKASQLVARLNKLGFTVQLKPTAEAA

SEQ ID NO: 238919 - protein, 423 aa, unidentified
MEAIHPRCAGLDVHKETVVGCVRLASGGKITREVKTFETTTSGLLLLLKWLTEMGCTHVAMEATGVYWKPVWNILSDGDFELVLANAAHIKNVPGRKTDVSDAAWIADLLAHGLIRSSFVPEQEIQELRELLRTRKQLGRQQSSHIKRLQKTLEGANIKLDSVVTDIVGKSGRAMIQALIAGESDPVKLAALADRRIRASPEQLREALRGRVTEHHRFLLHVHLQYIDFADAAIKDIDRKVAALIARMDQEVEAGQATFQSLIELLVAIPGIDVLAAWTILSEIGPDMTRFPTAGHLLSWAGLCPRNDESAGRRRSTRLRKGDPWLKTLLVQCAWAARRKKGSYFHAQFLRLRGRRGPKKAACAVAASLLTTIYHMLKDGTQFKDLGADHFDRRSKEVRAKRLVAQLANLGFEAKLAPLAQAA

SEQ ID NO: 238920 - protein, 320 aa, unidentified
MAHNASLVGIDVSKAKLDWCIRGVACGTAMNSVRDCTALAKELVGRSIRLAVLEASGGYERTLVAALRKLNVGVMVVSPKRVRDFAKAAGRRAKNDPIDADTIAWFGEIFVREGGAMPDPAREQLAALVAERQDFIGLRTECLNRNEHKAPALCQRLRKATLKILERAIAELDAAIAALIAKTPHLAACGRLLASVPCLGRQAVAALLAWLPELGEISDARIAALVGVAPFDDDSGIHKGVRRIAGGRRQLRNILYMAVLGGATQYNATLKTFYQRLLAKGKLKKVALVACLRKLLTIINVMVARGQPWDPPSRVSGAAA

SEQ ID NO: 238921 - protein, 347 aa, unidentified
MRFYNRPHTYYCGIDLHVKTMYVCILDSAGQVLVHRNMPSTPAAFIEVVAPYRDGLVVAVECMFTWYWLADVCAAEGIAFVLGHALAMKAIHGGKAKNDRIDSHKIAVLLRGGMLPQAYVYPSAMRSTRDLLRRRLHLVRKRGELLAHIQNTRAQYNLPGFEKRLAYPGNRDGVVEHFPDPSVRKSIEVDVVLIDQYDALVNDLELTIVREAKRHDGDAFHRLRSVPGIGKVLALTILYEIHDIARFDRVQEFASYARLIKCRKESAGKQLGTSGAKMGNVHLKWAFSEAAVLFLRHTTDGKKLLARLEKQHGKGKALSILAHKIGRAVYYMLSRGTVFSMEKFLAA

SEQ ID NO: 238922 - protein, 443 aa, unidentified
MSKKRTAHLRGARGQAFADLTRGIASERILCVSLDVSKYFHVVMIHNGLGEIVTPTFEIDIFQSGYDQLCQAIDQAKSRTNAQLVLIGMEPTSHYFENLARRLLQRTQPVTLINSFAVKQNREQQLMRREKTDEIDVAAIGDLLRRGEGTPFRPPTGIYLQLQQLDRVRLGKVKIQAMLKNQILGHLDRIFPGLVILGDEAKERYTPLFEADFWTCQTLQHLIRVCPNPHQLARMLSAQLVQVFHAHQYRLGPAVAAKLIAYAQKVLLPDPQLAAIRCELLQHDLTLLDEVQAHIAALERRLADLVAQTPYQIWTKVKGLSTVQVASLAAAIGDPDHYTHAGQVFRRSGLVSGRNDSGRRQRKGKGNRVLKTGDVYLRRALMNAVATLILHQPTLGRYNQLLQKNKPAGVARVATARRSIGILWATLRDQYPTTLISCKGAEM

SEQ ID NO: 238923 - protein, 316 aa, unidentified
MAQAVNRLIVGIDVAKDTLDIHEWCSGVHCTIANTPAAITAWLKDYSVGLEIALEPTNHYHQCVAEMAHAAGHAVYCVDPYRLSHYRESVGQRAKVDRTDARLLARYLHQEVKHTRRWQPLDVRATRLWQLLKRRATLVKTRTQLRQSLCGIDVAGEEIAALVAQCSVTVRALERHLELTARQLGWTEAVRCCQALPGVGPLTAVALVAAYHRGVFRNVDAFIAYLGMDVRVRDSGTFRGQRKLSKRGEGELRRLLYNAAMAARRNPLWEPYYAALTQRGLSTTAALVALGRKLARVCFALLRHNATFDPKYCPGA

SEQ ID NO: 238924 - protein, 372 aa, unidentified
MTNHEAFVGFDVHKETIAVAIAKGGAGGDVCGFGTIKNSKQAVALLARKLARTHGKLSFCYEAGPCGYAIYRQLADLGHDCQVVAPSLIPTKPGDHIKTDHRDAVTLARLLRAGELTAVWVPDQAHEAMRDLVRGRIAVMQSVRKARQQLQGFLLRQDLRYPGKSSWTKLHRDWLRSLTFAYPAHHVLVHELLHVIEEGQRRQQRIEQQIQALLPTWSMAPIVRAIQAMRGVSVIAALTLAAEIGDFRRFDNPRQLMAYLGLVPSEFSSGKRVTRGSITKAGSAHARRVLIEGAWAYQQRAGISKLHMQRLTNLPTQIREIAWDAQLRLCARYRRLAAKGKCKNVVTTAIAREMAAFVWAIAREVEPVRIAA

SEQ ID NO: 238925 - protein, 349 aa, unidentified
MDIVGGFDVHRKQITFDYIEMETGELHRGKIRPATRENLRNWLSQFSERFAGKQAAIAVEATTGWRYVIEELRRAGVEPHLAEPAETKSLQGRKKRAKTDRLDAGHLRDLMVIDRLPESWIPPHHIQEIRTLMRLRHSLIEERTTHKQRIHAQLFHNGYPQQKNLDSTEGRTHLEEMELPAAARQVVDLSLAMIDHINEELEPIDAQLRAYARCQAGCQALMKHYGVGELTSVALLSELGDTRRFSSSRKAVRYAGLDITVHSSDDKRAAGKLSRQGPPTLRWAAFEVAKRAWRKSSPDHDYYLKNKERIGANRAALSIARKLIRRAHHTLRELGEEAISEPVLTSSCV

SEQ ID NO: 238926 - protein, 338 aa, unidentified
MYYTGIDLHKKTSFITTVNGSGKVVFRRNFPNNPEKILDYFFNLGEPTKIVIESMCSWHWLYDLLKANSFDVVISNPLKTKAIASAKIKNDKVDSHMLAQLLRADLIATVYVCSLKTRKLKELLRHRRRLVNDATRMKNRIHMLLMKNNISVAVSDLFGVKGMKYLKEIDLPIYHRQQLKCYLTLYGQLTKQIEPLTKRIKNLADKDPMAKLLMTIPGIGSLTAMFIIAEIEDISRFPSYRNLASYAGLVPCLDASADKSRTGRITKQGSPYLRTALVEAAQVIPRMKKSRLNIFYRKRIVRAGYQKAIVATAHKILRYAYYVLKNQTPYREEYPTGA

SEQ ID NO: 238927 - protein, 391 aa, unidentified
MYVVGIDCSKYKHDCFIATEAGEVIRDTFTFDNSGTGFAQFFSILETLNCPKNQIKVGFESTSHYMVPLMKHLSVKGYEFILLNPVIVSRFRRSTTLRRIKTDKIDAKTIAQVLASSDYESYHMQVYHFPELKSLTRLRDRLVKQRSYYLVMLTNVLDEVFPEFKEFFDDSLKSKTVFYLLDTYKIPSRIANMNSNSFDNLRKISKGKFSYAKFIKIKELAKNTIGSSSEADELEISSLLNIYKSINDEICRIESKIEEIMNIIDSPTVSIPGVGLMSAASIIAEFGDLSRFANADKMLAYAGLDCGRSQSGTADYKGKMVKHGSSYLRQALMNVVETMMIHAPVFYDFYHKKRDEGKAHRVALSHLARKLVRLIYKLETSHTRFDLTNSK

SEQ ID NO: 238928 - protein, 325 aa, unidentified
MIFFLGCDVAKNKIDVALINEQGVEQWADKVPNDVAALAAFLLTLTGHYAGDIVTCVVEATGRYHYPLLEAAVAIGVPIKVYNPLLTKQGIKASVRGKKTDRTDALLIARLGLRGEGRLYAGEPYMTTKLHARSYQKLGVVSTILTRHTEHLNAMHTNGLDDSVQATFDAIQTSITAARKALYQELASSANGTTFTRLQTIPGIGPYVAASLIGEIQTMERFSSAHTLVAYAGLDPRIRQSGKVLSSTGRLTKRGSSYLRRSIFIAANVARRYDPNLQILYDKKRAEGKSYTVATVVVARKLLAIVRAVWLSGNAYDVAFFTKEK

SEQ ID NO: 238929 - protein, 369 aa, unidentified
MKKIIKYIGLDVHKNSIAIAIAEDGRQRDVNFYGVINNDMDQLQKFLRKQISQGAEPKCVYEAGPCGYNIYRSLLNKGIDCVVVAPSLIPKKSGDRIKTDRRDSESLARLHRSGDLTAVYVPTLEDEALRDLVRAREDLVNILKRAKQQLGAFLLRHHIDSPVKSKWCKSYFNWLASIAMPHPAQQITLQEYIDIVHDGKKRVERISEQMRQLSGQTQLNNLNKALQSLRGVSEIVSAVVVSEIGDLTRFDSPVKFMAYLGLVPSVHNSGEKIKTGRITKTGNGHVRRALIEAAQAYRLPARKSRAIAKRNEGLPQEICKIAWNAQVRLCGRYKRLVFRGKNSNLVKTAIARELAGFMWAIAQKVPKVA

SEQ ID NO: 238930 - protein, 415 aa, unidentified
MSFWKAREIMNEFAVAIDVSNGSSHFRCFRSSSEPLGPSLKFRHDQDGLAFLEERVMKLQEKLAAEPVFVYEATGVYTRPVERYLLSHGYRICQISPLESAAQRRTDIHGKKTDKTDPAYIAQAYFSKKKKAPKKKEDPYWHALRLMNREYEEAMNHLRTYKVSFQSTLAIVFPGYQTLGKDPYTSISLMALRRFPHPEMILHKKRETVIRRVMKDTTMSENRVAKWVDKMIRLAQTTYPGCEKDDPEVELLIRKIDDILACDRRCKEILQQLIARAADNEYFECLCSIKGVGANLAARILAEVGDISRFRNVKALIAYAGLDPRKNQSGEKKGEHLGITKKGNRRLRTILYLAVTCNLRQGDPYDPISEYYKKKRQQNHPLAHTAAVIAASGKLLRTVYGMCNTKTMYLRQSPL

SEQ ID NO: 238931 - protein, 312 aa, unidentified
MYYIGIDVLKKDLSVFDGKKDLKFTNKEGLKSFKKYLKKKYNLSEIAIIFEPTGVYSLYLKEFCAENSIKAYIINPKKSHNFTRALGKRSKTDKIDARILYQFHKNIDLKDIKVPKIDQQAKTLASYLVSYEFVLKQRISLSNHLESLRNKSLISLMKKDLKRAKMLEDKLFHDIKEYVSKNQNLREDYQRLLTISGVGEKTAIALLTLFKTYQGTNRAQITALAGLDPVKRESGTSVKDKAKISKNGKGIYRKIFYLPTICATVHNQKIRVFYQRLLTHHKTKKLAVIASMRKILLIAHAMYRDKTEYIAI

SEQ ID NO: 238932 - protein, 457 aa, unidentified
MRIVYQRCCGMDVHKDSVTTCVLLIDEYGEWRSEKRKFRTMTRDLREMATWLASLRVEAIAMEATGVYWKPVWNILEAENKFRLLLVNAHHIKQVPGRKTDQKDSEWIADLLQHGLLKASFVPPQTIRRLRDLTRMRVKIRQMLATFANRIQKVLEDANIKLGSVASDVLGVSGRHILHAVVEGQQNPEQLAALALGRLREKRAELQLALEGHITDHHRFQLKFLLESVQFGEKQLSQLEAEIRCLLAQVEPASVPPEDTVTAELEAPGAGAEAVATAVKSPLQTVVEFWDTIPGIDELTATTLVAEMGANMDQFPSAGHAAKWAGLCPGNKESAGKRLSGKTPKGSVWLRRSLCQAAWAASRTKNTYLAAQYHHLIVRKGKKRTIVAVAHTMLVMAYYMAKRQCTYQELGGDYFDRRNADTMQHRLVKKLKNLGYEVTLTPITTPPTAQEPTAQCC

SEQ ID NO: 238933 - protein, 408 aa, unidentified
MRVLHERCAGADVHRDTVVVCVLKTEGSGVGKETRTFGTKTRELLTLRDWLEAEGVTALAIESTGVYWKPVCNVLEGALDVWLCNAQEVRHLPGRKTDVMDAEWLADLLKHGLVKRSFVPERPERELRDLTRYRSQIIAERTSEVNRLHKTLESANLKIGSVLSDITGVSGRAILEAIVSGETDREKLADMAVKRVRDRKRAELVDALDGFIGDHQRFMLRMLLEHIDHLDQHIEQLSQKLEELLRPFEDTLQRLDAIPGIARRAAQIIVAEVGTDMSRFPSAEHLASWSGLCPGNNQSGGRRRSGKTRKGSPWLRAIMVEAAWGSVHAKKSYHRSRYFRIRARRGPKKAAVAVAHALIKAVFHVLKGAEYRDLGPTYFDAINRDRLISRMRKRLDSLGYAIVPKETA

SEQ ID NO: 238934 - protein, 418 aa, unidentified
MSEERNARPFRRYVALDIHKHYCVVAAVNREGQVVLQPVRVEHADLEVWMKKNLCPSDYVVIESTTNAWHVYDLLEPLVERVLVANPIKVKQIACARVKTDIRDTLILARLLAANLVPVVWVPPLHVRQLRQLLSQRRQMVETHTQIVNRMHSVAHRHHLSHPAGKRFNEKNTAWQKNKILSQLEQFQLGLEMENRAYIEKQINKIGKEITKMSHQKPWAESMTYIMQLPGFGVITAMTVLAAIGEIQRFETPRHLASYSGLTPGLEQSGTKNRGKGMTKEGRKELRWAMVEVAQRAVKSDPLWKHRFQELQRRMHRNQAIVAVAHRLLELVWYVLTRRQPYRHFSHERIAYKYLTWAWQMDEEARDGLTRQQFARYYLMRLGIGHDLTRVALNPKYPRKLASEAELLALRPELNHIE

SEQ ID NO: 238935 - protein, 351 aa, unidentified
MEEYIAFDSHKRYTWVEHQEANTGKTRAYRLEHGTGAIRQALAGCARGTAVAVEATANWYWIIDEIEQASCVPKLVHPRKAKLMMGLINKTDKLDAHGFNTLQRNGTLPTVWIPPGVLRELRELTRTRLVLVAQRTRWKNRITATLAKWGMPPSAYSDPYGKKARVELEQQLERLPEQTRWATQQMLAQLDSLSEQAQQFEKRLEELVEVTPMMQWLMTLPGVGVILGATIALEIGEIERFANAERLASYSGTTPRVHSSGDRTRHGRTRPDVNRYLKWAFAEAANSVAVNHRRNPERHVSRLYARLRASKGHARAVGAVARHLAEAAFHVLQRKEVYRDPSLNPRPEKGV

SEQ ID NO: 238936 - protein, 450 aa, unidentified
MSLDCCCEHVGLYPGRGTSERPLARSSGRAEGRMVRELIGMEVVFDRVAGLDVGKASVTVCVRTPGARRGRQAETRTFKTTTRSLEVMRDWLLEQGVTIAAMESTWTYWKPPFYCLEEVMEVWLLNAAHMKAVPGRKTDVRDAEWIAQLLEHGLLTPSFVPPPAIRRLRMLTRYRVQLYGDRTRETVRLELMLEDASIKLSTVASSLTTVSARAMLAAMIDGETNARVLAEMAKGRMRSKIPDLAQALEGHFDAHHAQLARSILDRLDRVEQALAELDEAIAAACEPWAHQIELLQTIPGVGLRVAQVIVAETGADMSRFPTAAHLASWAGLAPAMYESAGKRSPAGRRRGNKWLTAMLVESAGSVGRMKGKNYLAVQHTRITRRRGMSRAQIAVAHSILVAAYYMLKRDEPYRDLGPEWLTKRNEEAHTRRLVAQLEKLGHTVVIDPAA

SEQ ID NO: 238937 - protein, 388 aa, unidentified
MQTVADRSEAPTAIRTDLGAIFVSLELSRSTWLITSLSPGGGEKMSKQVVRGGDVAGLLERFARLREKARARTGKVFPFVVIQEAGLDGFWIDRALQNEGIESHVVDPASIATSRRRRRAKTDGIDGEALVRALLAYKRGEPRVCAMVKAPTPEEEDRRRLCRERKVLIGERVQHVNRVKGLLFSQGISGYEPLRRDRRERLDTLQTGDGRLLPDHLKAQVCRELDRLELLLEQIKAVEAERDVLLAAQQVAAPAPAAMLLDIKGIGPEFAAILWSEGLFRHFDNRRQVASYAGLAPTPWQSGSVDREQGVSKTGNPRLRTTLIQLAWLWLRHQPQSALALWFEERVRRNGGRLKKTTIVALARKLLVALWKYVTAGVVIEGAVMKRT

SEQ ID NO: 238938 - protein, 414 aa, unidentified
MAKASPKRTRLDDLLCVHPNAAGLDIGSAEIVVAVPSDRDAQPVRGFPTFTPDLHALVAWLIACGIDTVVMESTGVFWIPIYDLLEEAGLTPYLVNARHVKTVPGRKSDWNDAQWLQKLHLLGLLQGSFRPDAEIRALRTLVRHRADLIQHRAPHILHMQQALKQMNIQLSIVIEASMGTTGQAILRAIVDGERDPVVLARLRHPNCHSSEETIAKALTGSWRNSRSRNRPSFAGQAEFVRIVGVDLVAVTGLASPSVQTILSEIGTDMERFPSSKHFCSWLGLAPHNDISGGKVLRSRTGKVVSRANQAFRQAAQAVARSDSVFGAYYRSMRARLGPQQAIVATAHKIARVFYHMLKYREAFRPEQMEVYEQRRRERELKHLQRRANRLGYTLTMVPEQAPDPTTTPSEASVA

SEQ ID NO: 238939 - protein, 407 aa, unidentified
MNQLFVGIDVGSRENAVYIMLPDGSKHSSFSVQNNLGGAQTISKRALAVLTENNLPAVTIGIEATSVYGDSLMCFLREDGSLGRFERKLFVLNPKQVNKFKGSYSDLPKNDPVDAYVVADSLRFGRIGSPVYMDDYRYKALQTLTRTRFYAVHNLAKEKQRFMNHLFMKCSGLAQEKVFSNNYGAAALALFEEFGTPDDIVNTDIEELTAFIAERGKNRSPRPGEIAKAVQAAARGSYRLPKTVSDSVNQVLSISISSMRAIQAQIKTLEKEIARQFENIPNTLISINGIGPVFSAGIIAEIGDINRFEGQAQLAKYAGLAWKQYQSGLFEAQNTRLIKSGNRFLKYYLIEAANSIVRCDTEYKRFYDLKYKEVNKYQHKRALALTARKLVRLVLRLLKDNRLYRPA

SEQ ID NO: 238940 - protein, 353 aa, unidentified
MRIVCALDVHRRQITYAIVDVRSGEMSRGRITPATRESVREWLARFDSLRDVHFALEGTTGWRFVAEEVARVGHRAHLADPAETAVKRGRKRRAKTDRADCDLLLRLLSARELPESWIPPVQILELRTRVRLRKTLVDERTAWQQRLQAQLFHQGVPRGLRPRTRAGREALAKVELSPAGRELVSLALRMIDRIERELAPLDRALSLYARRQPGCRELIARLYGVGPVTATAIVAELGDARRFGCSDDAVRHCGLDVTVHQSDRKRASGHLSHEGPQLLRWALFEAAQQACRSASPDYQYYRQVARRIDHNRACLSVARKLCRRAYHILRELGDEALAPIETPDREEVIAAAA

SEQ ID NO: 238941 - protein, 477 aa, unidentified
MVATGLHGLNRKQRKEVARRMRAQDPGLDIVHPHAAGIDIGNSSHYVAVRPDQDPDSVRRFECFTGDLHRLADWLQQCGVTTVAMQSTGVYWIPLYEILDARGLEVYLVNARHTKNLPGRKTDVQESQWLLKLHTYGLLRNSFPPSADIRIVRTYWRQRGGHVQAVSTCIQRMQKVLTQMNVQLANVISDLSGWTGQRIVRAILAGERDPQTLAALSHPGIHATRDQIARSLEGTWQSDLLFVLQQEVTMYDAYLQRIAECDHALEHHLKTFANKAIPDAPSNAGPSSPVAPRQTRVKHRRKAGSHTPQFNLGHELHRISGVDLTRIDGIDVGVAQTVISEVGVDMTRWKTEAHFASWLGLCPDNRITGGKVIRKGTRHVINRAATALRLAATTLLRSQSYLGAQYRRLRARLGAPKAITAMAHKLARLVYRMLKWGHEYVDKGLQYYEERHRDQQVQLLKKRAAKLGLQIVDPDAA

SEQ ID NO: 238942 - protein, 370 aa, unidentified
MLDTTTFVGLDVHARSIKAVSLDVMTGEVRCATFGYDAGAVAEWVRSVDPGARCVYESGVTGFDLQKRLSGLGVDCAVGAVSKMIKPSADRRRKNDRNDAEFLARMLSVGNVVEVWVPDDECEAARDLTRALEDARDDLSRSKQRLSKFLLRHGLVFDERTPTGRRKGNWTRAHWSWIESIRFAEGADNDVLAYYVDAVRRAAEEKARLEGLVEAEARKPRWRRRVDSLRCLKGVDTATAADLVFEAGEFSRFRNARSFAAWVGLTPSEHSSGESDRRGAITKAGNKHLRKALVEAAWHYLTCSGRPKDLAKGQAPDRVARRHAAKGVRRLVERREALLARGVHNNKANVATARELACWVWAVGLMAEEA

SEQ ID NO: 238943 - protein, 415 aa, unidentified
MQVVYERCAGVDVHKRTVVVTILLTPPQDAPEKLVQKQTRTFGTMTADLLALAEWLEALGVTHVAMESTGVYWWPVYNLLEEGHTILLVNPRHIKAVPGRKTDVKDSEWLADLLRHGLLRPSFIPPQPIRALRELTRYRKTLVRERTAQINRLQKVLEAANIKLAAVATDVLGKSPREMLEALIGGEEDVTVLAEQARGRLRAKIPELKRALKGRLQPQHRFLLRTILAHIDFLDAAIAQVHAEIERHLAPYHDAVRLLQTIPGIHETAASAILAEIGLDMSCFPSAKHLASWAGLCPGNKQSGGKRLNAGITGGNPWLRGILGEVVWAITHTRDNYLVAQYRRLAKRRGLHKAVVAVAHSVLVIIYHMLRDQRPYADLGADYFDQLDTARLERHHVRRLEQLGYTVTLTPPQVA

SEQ ID NO: 238944 - protein, 284 aa, unidentified
MSVYVGIDVHRKRSQVAVVAEDGKVQLNKNTVNGTEPILRLIGDLPAGTPVAFEAAFGWSWLAELLEDYGFEAHLVHPLRCKAIASARLKNDKVDAATLAQLLRADLLPEAWIAPHSVRQLRALLRHRAGLVRLRTMLQNRIHAVVADFGYDRSGSYLTGPGRGWLAGLELPAISRELVTDYLAVIDGLAPVIERIDGELRQHAKADPRVKTLTTLPGVGQFTALVMLAEIGDITRFPSARKLASWAGLTPTVRGSDLHVRHGHISKMACASGTGPPAVVGGVR

SEQ ID NO: 238945 - protein, 354 aa, unidentified
MSNKSTATVATMGIDIGKNSFHVVGLDERGAIVLRQKWSRGQIETRLANMPPCLIGMEACVGAHHLSRKLQALGHDARLMPAKYVRAYSKGQKNDFRDAEAIAEAVQRPTMRFVATKTADQLDLQALHRVRERLVSQRTGIINQIRAFLLERGVVVRQGVRFLRTELPIILTTRSNVLSPRMMRMIEDLAGDWRRLDERIQGLSDEIEAVAHQDPACERLMTVPGIGPIISSAMVAAIGNGAVFTKGRDFGAWLGLVPKQISTGDRTILGAISRRGNRYLRALFVQAAWVVLIRIKDWERYGLKAWIDAAKKRLHHNVLAIALANKLARIAWAVLRKEREFECIGMRAMASQPA

SEQ ID NO: 238946 - protein, 371 aa, unidentified
MIRSWTDSRRDWKPVAASVVGPRMSLVLRSFLPHPNSCLGTSPYQQGRDTKMAQRSFCGIDVAKDRLDVMVLPEELCWSVVNDAAGWAELVARLRGLRIAASGIEASGGYERGVVRALLAAGMSVRQINPFKLRQFAKACGVLAKNDRLDARMIALFVATLPTRSTQRYAAVERLAELVTARRQLSDDKVAAENASRQFEDAALRRLYGGRIARLAADIALLDKRLAQIVASDAMLARRYALLVSMPGVGPVLAVTLLALLPELGQMNRKQVAALVGVAPYDFDSGKLKGMRCIWGGRAPVRRVLYMAALIGCRCNPQLRAFHDRLATAGKKAKVVLVAVMRKIITILNAMLRENAPWVERSIGRHILPAA

SEQ ID NO: 238947 - protein, 278 aa, unidentified
MFPVGIDVSKNTLDLCMLYDGIKGRIKTRNIQNNRHSVENILRWLRLQHCSAKDVHVVMEATGVYHEQLATELHDAGFRVSLANPHRSREFARGMGIMTKTDKVDAYMLACYAFLKKPHRWEPPAPEIRYLGALLRRRDVLLGDALREENRLEKYLSTDTPADIISSCRRMAQLLREEISNIERQIKAHIKASPALRRDYTLLTSIKSVGPQLGMHMLIVLRSHNFVSAEQAAAFLGVVPIEKRSGTSVRRRPRMSKIGPPSVESEALHVRPVRKNLQ

SEQ ID NO: 238948 - protein, 318 aa, unidentified
MPPAAPAFVGVDVAKAELVMAMRPSGARWTVANDDGGIRTLLKHLRQHAAALVVLEATGGYERAVVAALAAARLPVVVANPRQVRDFARATGQLAKTDRIDADTLALFGERVRPAPRVLPDEAATAFDALLTRRRQILGMIVAERNRLEHALPTVRRGITQHIHWLERQLQDVDRELDTTIKASPVWRAKDDLLRSAPGVGPVLRRTLIGELPELGTLPRKQIAALVGVAPLARDSGTLKGKRLVWGGRSPVRAALFMAALVGTRCNPVIRAFYARLRAAGKPKKVALTACMRKLLTILNAMVRTNTTWRHLAPPETT

SEQ ID NO: 238949 - protein, 434 aa, unidentified
MGRVIVGVDPHKKSVTIEAVDEGGTVLARGRFGTDAAGYRLLVKHVREQWPHHRWAVEGAQGVGRPLAQRLLAQGETVLDVPAKLAARVRVFDTGNARKTDATDAHAIAMVALRTPRLRQLRYDEELIALRLLTDRRDELSHRRVQTVNRLQRLLAELIPGGAKRDLSALQARRLLATVRPRTLVGKTMRRMAAEEITDLVAVDAKLKAIKKELRAAVTERGSQLMDLFGVGPAGAARILCDVGDVARFPDRNHFASWTGTAPLDASSGEQIRHRLSRAGNRRMNHVIHIAAIVQIRHDTAGRAYYRRKVAAGKTPMEALRCLKRRLSDAVYRQLVADAHAIDEAGPGGHSGASSQSSAADLFTPVIDSSDQPLPGPAATTLPAVGAPAKTPAVPAPRSSRRRAGAVKVERPTGRTTLTATSADACSRSPKPRS

SEQ ID NO: 238950 - protein, 311 aa, unidentified
MEPTTVFVGIDVGKRFVDLAFDGSDEVIRYENDDGGIEKILKALAGRSVGLVVLEATGGYERQVLASLLGANIPAVAVNPRQVRDFAKALGKLEKTDKIDARVLGRFAAVVRPKVRPRVPAELDEVLQWLGRRRQLVEMLVAEKNRAQQAQGGVLANIRQHIEWLKKCVRDTEKDLKQLLKDAPEWDAKVQLLDDQKGIARVSALTLAAGIPELGTLNRKKIAKLIGIAPLCRDSGTLRGKRTCWGGRPTIRACLYMATLSAVRHHPSIKAFYKRLRAAGKLPKVAIVACMRKYLTILNALIRDQRVASEA

SEQ ID NO: 238951 - protein, 341 aa, unidentified
MSIITVGIDLAKNIFAVHGVDENGKAVLIKPKVARDQLAAMIAQLPPCLIGLEACSGAHHWARLFRGYGHSVKLMDPKRVTPFRLTGKRGKNDAADAAAICEAVARPNMRFVPVKEEHQQVILTLHRTRQGFVEERTATYNRMRGLMSEFGIVLPQKVACLRRNIGEHLEDLPGYANQCIGDLLSHADQLDGRIAEYDKLIAQAARDDARSKRLMQRPGIGPVTASALLASIGNGNDFKNGRQVAAWIGLVPGQYSSGGKARLGRITKAGDGYLRSLLVMGARAILSGLGDKQDGFSRWARSLVERRGYWKAVVAIAAKNATLAWAVLKYGEDFRLNASAV

SEQ ID NO: 238952 - protein, 422 aa, unidentified
MTDAIITQTEPVLVAIDIAKTRHEVLIAVAGKKRRRRLTVLNQLDDFNRLSATLAEYARPVRVAFEATGNYHRALAYQLGVAGFDVKLVSSVALARTREALNNSWDKNDPKDAQVLLHMMQIGNVQFYHDPLQCGTNDLQELSKTHDIVSRSKTELWHRVLTHYLPLYWPEAERFHRSSRSDWFFAFLERYPSPHFISAMEQGVFIADAWEVVGRKVSKERLLSDIYQTAKSSVGLPIALDSDAARMFRLVLAEGRSLIAQRNEIEGRAVELLKTNDDYQLLTSIPGIGPINALTILAEAGDLRRFRPHRQFLKFCGMDLATIQSGTFRGQTKLSKYGNARLRRTLWMAGQVAIMQKTNSFRDKFERYIAKDRQNTHLRRKAYTAIAAKMARTVHGIIKRGEPYPLAGRRFSKKICREASLL

SEQ ID NO: 238953 - protein, 353 aa, unidentified
MAQSTPLFVGLDVHKDSIAVAHAAGGSPEPPVFVGAIGPRQADLDQLLRRLQGKTRALTFAYEAGPSGYGLYRYLTGKGLPCQVVAPSLIPKKPGDRVKTDRRDAVELARLLRSGDLTAVYVPSVEDEAIRDLCRARDAARGTGKDAKLRLKAFLLRLGRHYVGRATWNDAHRRYLAKVVCPTPAQQIVFQESVRAVDEQVDRLQRLEAELLERAPAWRLYPVVQALQALRGVQFLVAITVVAELGDLTRFDSPRQLAAFVGLTPSEYSSGGTRRQGGDHQGGQWPRAARVDRSRVGVSSSREGVAAYSATHRSLAEGVARPGVEGAGAPVQALPPTRRTRQASERRGDGRRA

SEQ ID NO: 238954 - protein, 350 aa, unidentified
MADRNLPRPAAVYGIDIGKNLFHVVGLSCDGTPVQKVRFRRDTLLQFFARAQPSIVGMESCAGSQWLARKIQALGHKVRLIPAQFVKPYVKSNKNDIIDAEAIAEAATRPTMRFVAVKEEDHVDLQALHRIRDQMVGSRTRLINQMRAFCLEYGVPLRQGAGIFKLELPRALKDEGNDLSPVMRRLVGDLFADLRRLEERIREVTQEIEAVADREDVTRRLMTIPGIGALGATAVLAAIGDGLQFRKARDLAAWLGLVPRQYSTGGKQTLLGISKRGNRYLRKLLVHGARSCFRHLDRTRDRLGSWLDGLQARMHPNKAVVALAAKMARIVWVVLNKPGALYERRDPAFT

SEQ ID NO: 238955 - protein, 402 aa, unidentified
MNCVGIDVSKGKSMIAVMRPFGEVVVSPFEVRHTANELSELAGLLKSLDGETRVVMESTGNYHAPVAWLLHDAGLYVSVVNAMLVHDYGNNSLRRAKTDKKDAVKLANYGLDHWLTLPRYIPEEDTRLMLKICYRQYQQYSKVQTMLKNNLISLLDTTFPDANRLFASPPRADGSEKWVDFVDAFWHCECVCGLSEKTFITRYQKWCRKHGYNFNENKALDIYASACGHFGVMPKTDTTKLLVEQAISQLRATSAALAALKQEMQSLAASLPEYPVVMGMFGVGPSLGPQLMAEIGDVRRFHSKKALVAFAGIDAPPYQSGQMDVRSRSISKRGSASLRRTLFLVMSVILQRAPMDEPVYQFMSKKHSEGKPYRVYMMASANKFLRIYYASVKSYLDSMEYD

SEQ ID NO: 238956 - protein, 341 aa, unidentified
MTTYYIGMDIHKKTIAYCIKRIDGKLIEQGEVAASRKALLGWVSSLPGPWTGAMEATIFTGWVYDFLKPHAMELKVAHPEMLKAITAAKKKNDRDDAERICDLLRVNLLPECYMLPAEIRELRRVLRYRNMVMSNATQMKNKISGLLMEVGEPYDKRRLHGRRYFYDLLDRVEDVPESVKELLLLTRGGLEMFSAVQKKLIRALQENDLLRERIQRLRTIRGVGEVLALTWVLETGVPGRFHSSREAISYCGLCSAQQQSAGKERRGPLSKKRNKYLQTMLIEAAKIAPNWNEQLAALHTRELARGNKNRATLAVARKLVEYMLAVERRGKDFVPLMAKAA

SEQ ID NO: 238957 - protein, 342 aa, unidentified
MYYVGIDYHLEIAVVCITDEHGKEWKLVELPATPEGMDVLINIMKGKKYRVLGEAFTFSIDLHNYLIGRGITSDLVRPTDLVAITKCNKKTDKHDSRTIAWYLRLMDKGEIDLTPSLILRDEQRVFRDLCRLREDVADNLSVISQRMRSHMRINSEYLPVEIFGDRPDLGTKRVQQFIITEFGDDFTLQELLRQQAFYVERGKAIEKELEKCQYDTKAVELLMTIPGIGKLSAMELMSMIVDIKRFPDADSMRSYFGMAPRVRDSGETIHHGRITKQGDPMMRKILERAVSSHMRWCKESKISKMYNSVKTRSAGGVAMMAAANKLLDIIHSVLVNQRPFYS

SEQ ID NO: 238958 - protein, 459 aa, unidentified
MNRKKSKPKIDRKMPMVHPNAAAIDVGATMHMAAVRPDRTPEPVRSFGTFTTDLHRLVEWFKECGVETVVMESTSVYWIPIFELLDAHGFTVLLVNARDAKHVPGRKTDVSDAQWLQRLHSYGLLRGSFRPKGQISELRAYMRQRERLLEYAASHIQHMQKALIEMNLQLHHVVADITGATGLRIIRTILAGERDPKVLALLRDYRCHSSAETIEKALTGSYRAEHLFALEQALALYDAYHEKASACDARIEAVLKELSIGRGRCSGTELPSPRRSRTDQGNALAFDVRAALFALLGKDITKIDGLGPYLSLKLIAECGDDLSAWPSPKHFTSWLCLAPSNKISGGKVLSSRTRRSGSRAAALLRLAAVTVGRTDTALGAFYRRLSARIGKAKAVTATARKIAVLFYNAVRYGMEYVDPGASFYETRYRTRVVDNLHRRAKAFGFVLMPLEAPPSVVVS

SEQ ID NO: 238959 - protein, 438 aa, unidentified
MSRKAYRATCVNDVSWEQIARGKEGLGATLGVDVGKFELLVVCRWADGRFERPWRVKNPWEMPTLVALVGQIKAERELVVALESSGTYGDALRQALGDKAIAVQRVGGKAAHDYAEVFDGVPSQHDGKDAAVIADLAALGKAKPWAYQAADSWQEELTYWVEEMVVQRQMFTLWQGRLEGLLGRHWPEASQVLKLSSGRLLRILKRYGSPQALALDAEAAKQLTRWSGSLLSRAKIEKLLSGARWSVGVRVGQWQQRQIQEYAERALEARRQSNRAQRELRRLAEGHAVLQAQGKVVGVPTACVFWVSTGDPGNFDSAGAYRKAMGMNLVERSSGRYQGELHISKRGSARTRQWLYFAALRQVRKSGVRPWYEAKKAREGDAMRVVVAVMRKLAVALYHVGVGNEEFQPRRLFGRIGKRRGRSAVRDIAGKEPSKVEL

SEQ ID NO: 238960 - protein, 391 aa, unidentified
MIYVGIDVSKDKHDCYIVNSDGVVLADVFSVENNLDGFDLLLQRLKSVAPDLLNVKVGLEATGHYSYNILGFLLDKGLATFVLNPLHTNLFRKSTSLRRTKTDRVDARTIAAMMMSGVVLKSYTAISYHNEELKSLSRYRFDKVCQRAKLKQSVSRLVTILFPELENLVPTLHIASVYALLAELPGAKQVASCQLTHLTNLLSTASKGHYGRSKAVELRNAARRSIGSAMPAKSLELQHTIRLIRELDAEINEIEAAIKQFMDQIASPILTIPGISYRMGAMILAEIGDFARFDSPDKILAYAGLSPSTYQSGKLDNAYAHMEKRGSRYLRYALYNAAKYVCHWDASFCAYLAKKRAEGKHYNVALSHAAKKLVRLIFALQRSGQPYCPTA

SEQ ID NO: 238961 - protein, 397 aa, unidentified
MIAVGIDISKAKSTVAVIDSDGTVLASPFTMAHTQPEMEAFVSYLKGLGEPTTILMEYTGHYHYPVLKKLQDEGFPVCIVNPYQMKKYGDVEIHKAKTDKKDALRIAAYALEKSYKLVPYSSMEQKYEDLKFLSRQYNQRISYVAKLKVQLIALLDQTMPGITRILPLNSRNPEKCALLLFIKRFKSFDEIQRIGKARFLASYDVLAKKASERSASSKGLSIYELAVDSITTRGEDPYIWLSQNQCVDLLSATQNAADEIISQMRNIAETIPEYKVLRAMRGVGDRLGPIILAEIGDIRRFHSGKALNSYAGNDAPPYQSGQFESRNRHISKRGSSTLRKACYEVMQALKLTKPQDDPVYLFMLKKEQEGKPFNVAKMAGVNKFLRIYYARAMELYK

SEQ ID NO: 238962 - protein, 326 aa, unidentified
MSKWYVGIDVSKDELVAAVAGRKPKGFANTVAGSKALYRWAKALAMGKPLHVCLEATGVYGYRAAMTLVACPETEVSVVNPAQIAAFAKAQLRRSKTDAIDAQVILAFVQSQQPRPWQPDTDVRRQLYALVAEWDALAETKRRLANRDHSHEYIPDLPRDVIRAQKNIARCLDREITRLEEAVIRLCDGAPELKAQVTLLCTIPGVKTTTAVHLLAYGKDTLTTYSRKELTAHAGLAPRHHQSGSSIHGKSRLAKQGDKRLRKALYMPVLCGIKNNPVITARYQHLCRNGKAKMVAIVACMRKLLLIIQAMLKHHTPFNPELKPLT

SEQ ID NO: 238963 - protein, 343 aa, unidentified
MKNTIIGVDLAKDVIQVCVYTNKNVHSNNEMTPSDLIDFLANSKSLTIVFEACGTSNFWKQKAISLGHDARLISAKLVAAVRQNQKTDRNDALAIIQAALLPDVTFISGKSIEQQQLQSIMRLRELCVKQKTASGNQLTALLLEFNIKVSSRNGGLKGAIESTLENAENGLSFEFREALDMAWKQYLLVTQSIKTYDDCLEKAMETHPDCKKLLKLEGVGTLNAINLYIALGCAELGVFEKGKDASACIGLTPVQYSSGGKTRLGSIGKYVKNSILRSQLITGAMSAVNHATNREARTTKDQWIKAMVERRGKKCTAVALANKTVRTAYAMLTQNTEYKAELI

SEQ ID NO: 238964 - protein, 418 aa, unidentified
MHTYAQTLFVGADVGLDTVDICFLDFMGNKLNPKRLVFPNNLPGSQELIESVSKIMLQHGLVSIMFGIEATSFLGWHLEVAILNSPALWKFKPSVFCFNPAQVKAHKKTLGIIPKSDPIDAFAVADRLRCGKLPKPAAFNFPYIALQRLTRLRFHLADYMSREKNIFLSVLFLKFSSLRQSEIFSNTFGAASLAVINDFLTVDEIAARPLDSLIDFLMEKGKSHFEEPDKTAKLLKEAATKAYRLHPDLHKPVNFALKTTAENIRFYSKQMNIVDEQIKRQIAAFDNPLISVKGIGPVFSAGLIAEIGDISRFKDDNALAKYAGLTWHFSKSGRNQKGEDTAICRSGDAYLRYYLTESANLVRQLVPEYIDFYQQKHNESKTHKHRRALVFTARKLVRLVFALLRDNKNYSQRHRRCI

SEQ ID NO: 238965 - protein, 355 aa, unidentified
MNDAKYIGLDVHQATISVAVLDSAGKLVMEAILETKAETILQFLRGLRGSLHVTLEEGTWAAWLHDLLQPHVTRVLVCDPRKNALLKAGNKSDRIDARKLAELLYLNKLNPVYHGEQGIRTLKELARSYLTITRDLTRVMSRLKAIYRSWAIPCAGQQVYAPRYRAEWLAKISEAGVRRRAELYYQQFDSLAALRQDARRELLAEGRKHLNTRLLQQIPSIGPLRAVLLLALMQTPNRFRTKRQLWAYSGLALRTYTSGEYRIVGGQLKRSKKVLAIRGLNINHNHDLKNIFKGAATRAASTAGPFQDFYEACVARGMKPHLARLTLARKIAAITLLVWKKGVRFDAEHLKQQAA

SEQ ID NO: 238966 - protein, 428 aa, unidentified
MSIQPRCWYAAVDWASEKHDVVVTDYEGKRLGRLQVEHSGEGLARMADWLVATTNGAPDAILIAIEVPHGPVVDTLIERGFSVHSINPKQVDRFRNRFTVAGAKDDSRDCDVMASALRTDRHCFRRLATRDPTLVELREWSRMHEEHGGDRRRYVSRLREQLIRYFPAFLQLEGDLDADWRLELLECAPTPRSATALTKLRVSEILERHRARRRDAGQILAVLQQQAVTTSPGTTEAAAAHVTALLASIRLAKQLEKEAKDNIERITDQLLEPNSDEFESPCDAGRPTSEQPAPLRDAAILLSFLGIGPLNLATLLTEATDGVRDRDYQALRCQGGVAPVTKQSGKSRYVVQRWACNKRLAHALLHWARVAVQHDPASRAKYRALRARGKSWGRALRGVADRLLYVACAALRSGTLYNPELANKKSAC

SEQ ID NO: 238967 - protein, 343 aa, unidentified
MAIIGGLDLHRGQLTYDYLDVVTGQVDRGRVVPADRGHLRSFLARFDGQGEVAFAVEGCTGWRYVVEELERVGIGAHLAEPAETAAKRGRKRRAKTDRSDARHLRELLVKGDLPCSWIPPAQVLEARARVRLYKDLEEERTAWLQRVQATLYHQGVPVIAALTSVAGQARLAAAELSPAGRQAVEVGLRQLDRLTGELDPLRAELARFSRRQPGCRALRTTHFGIGPITSVAIWAEMGDTRRFSSSDDAVRHSGLDITVYASDTKRARGHLARQGPATLRWALYEAAVCATRPNSPDHAYFLAVKRRADGHLGVISVARKLARRVHHTLRALGDQAWEPVAAV

SEQ ID NO: 238968 - protein, 346 aa, unidentified
MEVTYYTGIDVSLRSVSNCIVDDKGEVCLEAKVAAEIDAIVDRLRQFSSDVKTVGFEAGALTQYLTYGLQAAGFEVICLEARQVSVTLAAMRNKTDRNDARGLAQILRTGWYSRVHVKSLHSHQVRALLASRKAILKKCVDLENELRGLLKVFGIRLPSRVGHGAFDAELRDRVSSDEMLACALVPMLDARTVLYKTYLKLDNAVRGLVRIDPVCRRLMSIPGVGPVTALTFKAAVDDPSRFKSSRTVAAHFGLTPRRFQSGELDNPGHISRAGDADVRSALYVAAHSLLTRNAQWSTLKAWGVGLAKTRGHRRAVVAVARKLAVILHRMWIDGSEFRWGPVVASA

SEQ ID NO: 238969 - protein, 413 aa, unidentified
MRDIVHRRCCGLDVHKDQIAACVRWAEDGGNIQQETRVFGTTTQQLRDLASWIRGHGVSLVAMESTGVYWRPVWNVLEGEFQLRLANSQHIRNIPGKKTDKKDGAWIAKLLQHDLVPASFVPSAGIQELRELTRSRATLVQEKTAVANRIQGILEHANIKLASVASDVLGRSGRTMLEAIIAGEADPGRLADLARAQLRGKIPQLRLALEGRVRDHHRFCLRQLMDHLEFLEGKIFVIEEELRKRSKPYEEAIQLWITIPGVRWLIAVTLAAEIGIDMQQFPSAAQLASWAGVCPGNNESGGKRKSGKTRKGSVWLRRALCEAAWAASRTKKTYLSAQYRRLAARRGQKRASLAVAHSILVIAYQLLKHNTPYQEPGGDYFDRIRADGLKRYYIKRLEQLGVSIFATSATDPA

SEQ ID NO: 238970 - protein, 355 aa, unidentified
MNSVKHVGLDVHQSTISAAVLDAEGKLVMQSVLATDPAAILGFMDGLRGTVHVTFEEGTHSAWLHGLLARRVERLVVCNPRKNALLKGGSKSDTIDARKLAELLRAGLLSPVYHGETGTATVKQLGQSYATLTEDTTRVMSRLKALYRGQAIPSTGQKAYGRRHRDEWLAQLQGAGLHRRAEILYQQLDALQALRREVRRELILECRKHAAAKVLRTIPFLGPIRAALLIGRVQTPHRFRSKRQFWAYCGLALETRSSSEYQFVNGQLERKKKPVWIRGLNLNHNHDLKNLFKSAAATASARPGPFRTFYEGLLAKGMVPAMARLTLARKIAAITLSVWKKGGTFDAEQLKPQAA

SEQ ID NO: 238971 - protein, 462 aa, unidentified
MTIPRNKGHRTPEIPSATPLPAIRPRVAGLDVGSSAHWVCGPGRADRTPNVRVFGTTTDQLQALADWLAEHGVESLAMESTSVYWIPIYELLESRGIEVVLVNARQLHNVPGRKTDVSDCQWLQLLHSCGLLRGSFRPGEVITRLRALQRQLANLVAERTRCVQWMQKALDHMNVQVHRAVTDLTGVTGLAIVRAIVGGERDPARLALHRDRRCGKSAAEIARYLTGTWRDEHLFNLASALRLFDALETEIAAYEAQLLTEVAALHPPERQADPVPPHPNPAKEKAIKARGEQAARTTLWRFAGVDLTRVDGISAGAAQVVLTEVGPNLTAFPSEDHFVSWLRLCPRTPISGGKPLKKRRNALGANRIAGVLRMAATSLQRSKTALGASFRRIARHKGGAVAVFATARQLARLIYRMLRYGHDYVDIGEQAYDHRFQTRRLAALTETARTLGYTLVPKLAAG

SEQ ID NO: 238972 - protein, 349 aa, unidentified
MGEVITIGVDIAKSVFQIHGVDADGTVVIRKRIGRARVLEFFADLPPCLVGMEACATAHQWARELTKLGHDTRLMPPTYVKAYVKRGKNDAADAAAICEAVTRPSMRFVPIKSVEQQSMLMLHRARDLLIRQRTQLTNALRAHLAELGLVAAKGREGLHQLATVVTECGVERLPSNARFACQAIVTQLHAVQIEISGLDKRITQTHRASADSKRLETIPGFGVILSTAVVATMTDPKAFRTGREFAAWIGLVPRQNSTGGKERLGSITKQGDRYLRRLLVVGATSVINSARARPYRYPWVIELLGRRPTKVVAVALANKMARIAWAVLAKGETYRTPTRPWNAAVPVAA

SEQ ID NO: 238973 - protein, 335 aa, unidentified
MSIMNMHQQGGVANGSVKLNAGIDVSKLHLDVCVGATRQRVPNDANGWNELTAMLQAAQMDLVVVEATGGYERGLVCALQSAGVCVARVNPRQARDFAKSMGVLAKTDQVDARVLRDFADVLARHADRRKFITPMIDRARELLAELMTRRRQLVDMRVAEHNRLEHAGQRAARSIASVLKLLDKQIEAIDAHIDDHMDQHFKAQRQLLDSVKGVGPVTILTLTAALPELGQLGRRQIAKLVGVAPLADDSGGRSGKRRTWGGRSEVRSVVYMAAIVAMRHNPVIREFYERLLKAGKPKKVAIVACMRKLLTILNAMLRDQALWNATRHLKPTESS

SEQ ID NO: 238974 - protein, 338 aa, unidentified
MRTYAGIDLHSSNCYLAVIDEEQRRLFSKRLPNSLDHILSALQPFKEELSGVAVESTYNWYWLVDGLQEKGYRMHLANPSAIRQYEGLKHTDDQWDAFWLAQLLQLGILPQGYIYPKAERPTRDLLRRRLLFVRHRTAHILSLQSMLDRCGGRRLSANKIQQLSPSDAEALFLDTQLGFTARCQVEAIGFLTQQIRSIEKAILPKVKLRPEFVILLTIPGIGKILALTIMLEVGDIGRFAKAGNYASYCRCVKSQKISNAKKKGEGNRKNGNRYLSWAYVEAANFAVRYSPRAKAFHQRKCAKTKKVVAIKALANKLARASFYILRDQCAFDEKRLYG

SEQ ID NO: 238975 - protein, 452 aa, unidentified
MKKENSIAMPVINEHVAGIDVGSKSHYVAVGQSEEDVRKFNVYSKDNDALVAHLKEKGIKTVAMESTGSYWQTLYSCLQAAGFEVVLSNNYIKDPQRKTDTKDARWLQRLHSLGLLKGAFIPSLDIERIRTYHRQRENIVALAASCQLKMQKALRLMNIRLDIALSDITGLSGMRMLEAIVQGERSGQKLASLAHGTVKKSREEIADALQGQWKDEQLFILVDELEAYKIYQTRIAAYDKKIEELLKDAVSQLPIAAEKSSKKPSKRKPRKNMPAYNVEKLSMQYFGVDLLKVEGVGQSTVMTFISEVGTDINKFPTKKHFTSWLRLAPNNKKTGDKTFSTRTPKGKSIMANAFRLAANTISQRRRGVLKNTFVRIAIKKGRAAAITALARKLAEIFWIMTVKKVSYIPPDEHEYALKIKENTIRNICSKMKRLNIGTEDLVFNGIATPSLS

SEQ ID NO: 238976 - protein, 359 aa, unidentified
MQTQSNKIDFNGQNIYVGFDVHLKSWTVTVMTEKLIHKTFSQSPKPEALYHYLIKNFPGGTFHSAYEAGFCGYWIHNKLTKFGINSIVVNPADIPTTGKEIVMKDDTRDSIKIARSLRNGDLKPIYVPSLPTLEDRGLVRTRSTLVKDLTRYKNRIKSFLYFHGIELPEAFNKPKTYWSNRFNKWLEDVQMTEPSGKASLNVLLDQSRHLRASILQVTRQIRELAKTERYKMQQELLGSIPGVGLLTAMVILTEIETINRFDSIDQLCGFIGLVPSTNSSGDHEIIGDITPRGHSVLRTAIIESAWMAARLDPALNKCYHDYCKRMEPNKAIIRIAKKLISRIRFVLKNNQPYVCSVVK

SEQ ID NO: 238977 - protein, 350 aa, unidentified
MTTLTEAPPVVTGGVDTHLDVHVAAALDSVGGVLGTASFPTTVTGYRQLLTWLRSHGQLQRVGVEGTGSYGAALARHLTAQGVSVIEVLRPNRQVRRRQGKTDVLDAIAAARAVMSGEATSTPKTHDGAVEALRTLKVLQRSANKARTQAINQLRNLIVTAPDDLRARLRNLSIKELLEVCSGFRIPADDDSLNAITRLSLRDLAHRILFLDASREQTRRRLDRITNKVAPDLLAINGVGPDVAATLLMTAGDNPERLRNEASFAALCGTNPIPASSGKTTRHRLNRGGDRDANSALWRITIVRLSSDKRSKDYLARRISEGKSKPEAIRCLKRYIAREVFRALPVKVAV

SEQ ID NO: 238978 - protein, 389 aa, unidentified
MDIGKTHHSCVVIDEEGRHLLSRRVANDESELLALIADVLDLGQETTWAVDVTHGGAVLLLGLLANHGQPVLYLPGLAVNRATAGYRGQGKTDARDAAVIADQTRMRRDLEPVRPDAEAIAELKILTARRADLAADRTRTVNRLREQLLGIFPALERALDMTNRGPLVLLTGYQTPAALCRIGAKRLETWLRNRKVRSAADLAAAAVEAAERQHTSLTGEKMAAQMVHSLAKEVMALNEKIDEIDKLIEGRFRSHDQAEVIASLPGIGPLPGAEFLAATSGDTTRFGTPDRLAGFAGLAPAPRDSGRISGNLHRPARYHRGLQRVFYTSALISIRCCEESRRFYDRKRAEGKRHVQAVLALARRRVNVLWALLRDGRCCQSTPPVTLAA

SEQ ID NO: 238979 - protein, 328 aa, unidentified
MAKPITICAGIDTGKRKLDVALDGSKEQLQVENTAEGHKVLLRWLHQHRVKRVGIEASGGYEQPVVSELRRMRIVVVVFQPAQVRAYAKFQLQRAKNDKIDAALIAACTAAVRKIHAAPDPRLQPFAEQLTMIDQIGEDIARLKNRSESCRDAQINKLWKADIARLEKREKVALKALVTSIRKHPDLARRLDLINSVEGIGLPTAVAILVRLPEIGRITREQAAALAGLAPYDDDSGEHVGVRHIEGGRKRLRRALYTASLAASFRWNPQLIALYQRLTAAGKQHKRALVACARKLLIFANTVVARGTPWCGQPPAAKASPTTASSVS

SEQ ID NO: 238980 - protein, 343 aa, unidentified
MQAVTTIGLDIAKSVFQVHGVDAGGQVVLRRQLKRRYVLAFFQKLPSCLVGIEACASSHHWSRELQTLGHTVRLMPPVYVKPYVKRHKNDAIDAEAICEAVTRPNMRFVATKTCEQQSCLTLHRTRHLFIRHQTSVINAIRAHLAEFGIVAPVGRNGVEELLTVVADGSDKRLPDVARACIVALGAQLRTLKAQILQFDRLIMAWHRSNQASRRLDDIPGIGPALATALVATVADPRAFRSGRNFSAWIGIVPKQHSSGGKDRLGGISKRGDRYLRGLFVAGALAVIRYAKIHGTKRRPWLTALLARRPTKVAAIALANKIARMAWAMMAKGEHYKEPAALAA

SEQ ID NO: 238981 - protein, 406 aa, unidentified
MLFVGDDWAEDHHDVEVQDQNGKRLGTARLEEGMAGIARLHALLGAHTGPDGDPDEVIIGIETERGPWVQALLAAGYRVHAINPLQAARARELHSVSGAKSDAGDAHVLADMVRTDGHQLRTIAGDSDTAAAIKVVARAHKTLIWERTRHMLRLRHALRDYFPAALAAFDDLTAPDVLDLLAKAPDPAAAARLTTAQIAAALRRAHRRNVAAKATTIRTALRSPHLGQPAPVTAAYAAVIRSQAAILGALHTEIATLQAQVEELFTHQPAAGIYLSQPGLGPIMGARVLAEFGDDPTRYDGARARKNYAGTSPITRASGRSRAVHARHVHNDRLLDALGRQAYAALSGSPGARAYYDQLRARGTSHHSALRQLANRLVGILHGSLKSGTTYNEATAWQHHTPAVVA

SEQ ID NO: 238982 - protein, 401 aa, unidentified
MQEPLQHNSIDVFVGVDVGKGQHHAVALDRSGKRLYNKALPNDEAKLRALINELKAYGQLLFVVDQPATIGALPMAVARDEGVLVAYLPGLAMRRIADLHAGEAKADARDAAIIAEAARSMPHTLRSLRLADEPLAELTMLCGFDDDLAAQVTQTSNRIRGLLTQIHPALERVLGPRLDHPAVLDLLERYPSPAALAATTEKTLANRLTKLAPRMGKRLAAEIVQALGEQTVVVPGTQAATVVMPRLAKQLAALLQQRDEVASEVERLVHAHPLYSVLTSMPGVGVRTAARLLTEVAHKTFASAAHLAAYAGLAPVTRRSGSSIRGEHPSRRGNKVLKRTLFLSAFAALRDPLSRAYYSRKIQQGKRHNQALIALARRRCDVMFAMLRDGTFYQPQTAPNA

SEQ ID NO: 238983 - protein, 382 aa, unidentified
MSATLNAEVSKNPTIWLALELAMSIWKVAFMAAGLKSPSVHDVEANDFDRLAALIELMRRRLGLPDGQVVIGYEAGRHGHYIARELTRRGYEVVELDSSSIERPRRKYAKSDKLDARALVLLLRDWREGRRQISRVHIPSLADEVDRDLHREREYWKKLKLQSSNRFESVLVRHGCSTKIKPKRSLKVAAICDFRGEALPAPVQAELQRLSDGVAHARAQIKAIEAEQERLLSTTGREAADAPRVKKLEMIEQLMALVAVGHHTAWILVQEIFGWRVYANHRQLSASVGLCPTPYNSGQTNREQGISKAGNAKVRALLIQLAWRWLRKQPESEPSKWFKERFDHGTRSRKIGIVAVARRLTILLWRYLKNGELPANVQLKVA

SEQ ID NO: 238984 - protein, 421 aa, unidentified
MGKLIERCAGIDIGKRFLVCCVTTGAAHEEPRSETRRFDTTVPGLKRLRNWLNEERVTDVVMESTGSYWIPVFNLLEGHVRVVLANPEEVKNRKGHKTDRKDAGHLADLLRHHHVKSSYIPAEPVRQLRDLTRRRVQLTQDATRERNRVQKLLEQVNVKIGSVLTDVFGVSGLHMLLALLDGRAAPEEIAGLARGSAKRKTPQLIEAIEGNRMSDHVRFLIRGCLRHLACLEEEVEELDAEILRRMQLSTFQKAFTLLQTIPGVGQLSAATILAETGPDLDSFPTIEQMASWAGLCPGNRESAGIQKGPQTTHGNPYLCTALVQCAWAATRKRDSVFRSRFQRLAPRRGEKRAIIAVAHHMLIILYCMLKRGVPFLGAEHAPKQRRRERRAHHHLRCLRRLGFSVEIRLISESAPPDTISR

SEQ ID NO: 238985 - protein, 404 aa, unidentified
MMEPTNNKHTMKKKLLFTGLDVHAKNITIALAEGGGGTPGEARLYGTIPNDLHALERVFAKLRKAHPGAELRVCYEAGPTGFVLARRLAQLKIHCTVVAPSLIPSRSGDRIKTDRRDALKLARLHRAGELTAVNVPDANDEAMRDLCRARTDAVADLRSGRAQLKAFLLRNGYRYTGKSAWTEAHRRYLRELVLPHPAQRVVLEDAIRAIGSAEERIGRLEEQMQALLESWHMKPVVAAMMALRGFALVGAMVLVSELGGAWRFDHPRQLMAYLGLVPTENTSCDTRRQGRITKTGNSHARWLMIEAAHHYRLSPKVSKELSARQQGQSEEIKACAWKAQTRLHKRMMQLCARGKERNKVTVAVARELCGFVWHIFRLMEPRMRQAAAAAAPPQMTGRTKKEAV

SEQ ID NO: 238986 - protein, 323 aa, unidentified
MQGKVSLERSAATRVYVGIDVCKAWLDIHVHPTGQSFRVPNTPHGLKQLKRRLAKVDVALITMEATGKFHRQAHRNLHASGFAVAVVNPLRSRLFAEAIGMLAKTDAVDARMLALLAATIEPKAKAPPPETLENLQEIVRGREACVAQRTALLNQLGTAKTTCLRQQIRHQLKTVERAVERLQAEIKRIIEADPALARRFAILTSIPGIGNIAAVTLLANFPELGTGTGKQAAMIAGLAPIACDSGDVRGERHIRGGRAGLRTGIYMAALAAARFNADLKAFYVRLLGNGKQPKVALTAVMRKLVALANTLIREDRLWQPVHP

SEQ ID NO: 238987 - protein, 330 aa, unidentified
MIYAGLDLHKSFCQTKVCTKEGELVKEGRIKTETEDIEEFFSGLEDLTIAFEASGNYEYFYDLLEGLGHKVVLAHPLKTKMISEAKIKTDKIDAKTLAELLRGDLLPTSYVPAKEIRELRHLVRHRIFLGRYRRIIKNQIKTELRRKNIKYPDGAEIFMGKGKKWLRSLENPFIDSYLAIYETVEKELKDAEREIEKAGEAYEEVRLLTGIVGIGKYSALIVYSEIENCSRFPTEEKVFSYAGLVPRVHQSGNTSYYGRITKEGSKYLRWILVEAVRVHVRWCPNSKITKHYNKIKKKKGANIAATAAARKLLQVIYHMLKNKEEFRIEG

SEQ ID NO: 238988 - protein, 431 aa, unidentified
MKNRMNEKLEAITPKTLVVGVDVAKSLQWARFVDYRGMEQGKALSFQNNRQGFEAIVARIEGICNNKILREPFDRVVIGMEPTGHYWKPLANYLMKSGYRVVGVNPYHTKKSKELDDNSQTKSDKKDALTIARLVKDGRYFDPYLPQEVYGELRGLANARVSVLKRNSAVKNTITAILDEYFPEIWTVFKKPMKGKASRQILRSCPFPALILELGEAGVLAEVKKAVKKTVGLKKVRQLISAAETSIGVRYGLEAAKMRLGWLLEELELIEKQLAQVELAMEKMLQATGHAEQLLGIKGIGVVTAASFLGEVGDPLRFQNARQISNYAGYNLVEDSSGKSKSGTCISKRGRKQLRSVLYQMAFTMVGTNAEMKALYRFLTARKHNPLKKKQALVVVSKKIITVIYSLLKKQVPYKPELVLGTVRRELMAAA

SEQ ID NO: 238989 - protein, 367 aa, unidentified
MKKVSTAATKQSRNISQQQLTIGLDLGDRNSWYCVLDETGRIQLEQRVRTTVKGLQEVFGAMPRSRIALEIGTHSPWISRLLSELGHEVIVANARKVRLIGESRKKDDRLDAQTLARLARIDPQLLYPVKHRSVQAQADLMTIRARAGLVRARTALVKTARGLAKSYGERLRSCNVRNLNPEKAESLSPELQAALEPLLNAIESLSERIVEYNERIENLAQQSYPQVALLKQIKGVGTLIALTFLLTLEDPHRFRKSRDVGCYLGLQPGRRNSGQSEPQLHISKEGDPYLRTLLVQGAHHILGPFGVDCDLRRWGLKLAERGGGNGKKRAIVATARKLAVLLHHLWVSGEAYEPLHNSSRTTVAAAA

SEQ ID NO: 238990 - protein, 371 aa, unidentified
MEHTRFVGLDIHKERISIAVAESRRSCAVEYLGEISNDPVAIGKLCDRLERPSKTLAFCYEAGPCGYGVHRQLISLGHRCDVVAPSLIPTRPGDRVKTNRRDATMLARLHRAGELTPVWVPDADHEAMRDLIRLRSVVRQIVSRARQHLQGFLLRHGRKHGRGTAWRMAYRRWLSTLAFEHPAQQIAFQDYVDAVMDAERRLQRVEEQISGLLPEWNLRPVVDALQAMRGIALITAVVLVAEVGDFTRFANPRQLMAYFGLIPGEQSSGETIRRGGITKTGNAHARRALVEGAWAYRMKARIGRHKVDRIEALPKVVRDIAWRAQLRLCTRYRRLSARGKTANVVNVAIAREMVGFIWSIACTVQSAPKTA

SEQ ID NO: 238991 - protein, 378 aa, unidentified
MQTTAADREYIEEQVLFLALELSNSHWKLGSTVGVGQKPRERTICAGDLGSLHQEVSRAKRRFGLSSSARVVSCYEAGRDGFWLHRHLRQTGIGNIVVDPSSMEVKRRRRRAKTDRLDVGMLLRQLMRWWGGESKVWSVVHVPSLEAEDQRQLHRELEALKRERTRHTNRITSLLITHGVRLKVSKAFLAQLSAVRLWDNAPLPLDLSRRLEREYMRWVLVQEQIAELERQRRCALRTARDRGAQTARRLFRLRGIGENYAWLASMEAFAWRQFDNRRQVGAMAGLTPTPFSSGQIHRDQGIGKDGNRRLRAMTIEVAWGWLRYQPESELSKWFQERYGPGSRRSRRVGIVALGRKLLIALWRYLETGVVPAGAVLKT

SEQ ID NO: 238992 - protein, 358 aa, unidentified
MPTKIKTINFQGQNIYIGIDAHLKSWKVTLMLDHMEYKTFSQDASVDVLSGYLSRNFPGGDYYSAYEAGFCGFSIHRELEQSGIKNIVVNPADIPTTDKDRKQKEDKRDSRKIARCLRNGELEGIYVPSCEMEELRCLVRYRKTLVRDIARNKRRVKSFLYYYGIQIPNEMNSSSIHWSGRFTSWLETIRTSTIYGELVLSEIINTTQHMRSRLLLVERQLRELAKNGRLGKLVGLLRSIPGIGLVVSMTFLTELCDINRFKTLDRLCSYVGLVPTTNSSGDKEKTGKITPRSNKQLRNCLIEAAWRAAKQDPALALKYNELRKRMEPNEAIVRIAKKLLNRIRYVLKNEAEYVCAIV

SEQ ID NO: 238993 - protein, 342 aa, unidentified
MTIVMGLDQHRAQITTEWIDTVTGEIGRARVAPAHREGVRRFLGRFAGQELEVALEATTGWRFVVEELRKVEAAVHLAEPAQTSALRGNKKRPKSDRADAMHLRELLMIGRLPESWIPPDYLLDLRSKVRLRHTLVDQRGEWQQRIRAVLYHHGLPHRCELDLLTSEGRGWLDEVEVPDAAREQITVALTMIEALETQIAPLDKQLRSYARRQPGCRALMAHYGIGELTSVVILAELGDCRRFSSSRQAVRYAGLDITVYPSDQHRSPGKLSHQGPPVLRWALYEAAQAARRPSSPDRPYYEQLAERIGANRACDAIARKLPKRSYHVLRGLGDQALEPVTF

SEQ ID NO: 238994 - protein, 358 aa, unidentified
MGKSIEKLKTVTRVGVDLAKNVIQVHAIDAKGDVIAARPLRRGAVLAFFEKLPACEVVMETCSSAHHWGRALQAQGHRVKLIPAAHVKPFVRRNKNDAADAAAICEAATRPDQRFVVVRSVENQAGLMRHRTRELLTGQRTALINALRGHLAEIGVVAAQGARNAYDLKRLLKDGGADEHGEVVVPACVCAALRPLGAQIDALDATIAAIDKEIEAAVKGDEQGRRLMTIPGIGPLTAAAILSTVPDMSAFSSGREFAAFLGLTPSQHSTGGKERLGRITKMGDRYLRKLLVVGACAVIRHREGHNDALRRWVKSLLERKPLAYKVKLTAVALANKLARIVFAILTRGGKYDDRPVAA

SEQ ID NO: 238995 - protein, 391 aa, unidentified
MRKPKQRKPLNDLSRSLTTLDVNHTLIAVIELSQKSWLVAGIIPGVERQPLKKLETDENALRKLFDRWRKEAEKAGHKINRVAVAFEAGRDGFWLARWLRAQGIAAHVIHAASVAVPREHRRAKTDRLDTELLKRAFLGWLRGERDHCKTAAIPTFAEEDAKRPSREHESLVGEQGRIVNRMKATFTRLGIRGFNPKLKRAADRLETLRTPEGERIPPNTWAELYRDMERRQLVMKQIRQVEATRLERLKRAPKAGPNAMVWLLARVIGVGIETADMLVQEVLSRNLRDRRAAARYSGLTGSPDESGSKRREKGLARSGNARVRRGMIQLAWRFLAYQKDSALARWYRARTENARGSRKKMIVALARKLLIALWHFARDGVVPEGVVLRPA

SEQ ID NO: 238996 - protein, 415 aa, unidentified
MFKIIRSKCCGLDVHKTWIYACIGIADSSSRVDYKQARFSSFSKGLKQLSEWLAKYDCTEVCMESSGKYWIPVFNVLETTCDVTLAHPKYTKPQKGNKTDRKDAMWICDLFMCGMIKRSFIPPADIRELRELIRYRTKLTNMITGEKNRALNCLTVSNLKLDDVFSDVFGKSSSSIIQFMLDNPGVYFNVKPFIDPRCKTPIEEIQAAVDGAMSPAHAVKLRECMSHIDQLESHKHMVEQDIIRLSAPYEQELELIRTVPGFDKNPMTAITILSEIGADMSVFPTAKHLVSWAGCCPRNDQSAKKIKSTRISKAGSCLKPLLVQVANALIKSKNHPEFKERYRRLKARRGHKKAIIAICRMLLTAIWNVLSKAEPYSPAGYLSDHQVSEVRRLTQKQALNLLKSRGYVITDEVPA

SEQ ID NO: 238997 - protein, 478 aa, unidentified
MLGLRRAVGTEVVYWLGANKPAHKLDPGFLEHPRLSPRAVIGPGARFLDFLFTGAPRRRRSPEEEEMELLHRRCCGLDVHKETVVACLRLVSDGKVTTEVRTFQTTTADLLRLSEWLAANECTHVAMEATGVYWKPVWHILDDGDFKLVLANAAHVKNVPGRKTDVNDAMWLAELLAHGLIRASFVPDAQTQEMRNLLRTRKQLVREQSSHVLRVQKTLEDANIKLDSVLTDLMGKSGRAMIEALIAGETNPAKLASLADRRVKASPEEFREALRGRVTKHHRFLLRLHLNQIDALDAAMATLDAQVEAKLGPFRTAVELIMSIPGIKNLGAHVIVSEIGIDMSRFPSDAHLISWACICPRNDESAGKRRSNRVRKGGTWLKTTLVQCAWAAVRKKDSYLQAQFYRIKARRGPKKAIMAVVASILTAIYHMLKDGTMYKDLGSNHFNRRSTDQQKTHLIKRLADLGYTVEIKPTMAMA

SEQ ID NO: 238998 - protein, 457 aa, unidentified
MRKSAKKQPAERKQSSFPLLNPDAAGIDVGAREHYVAVPLDREAQPVRRFGAFTEELHSLAQWLKQCGIKTVAMESTGVYWIPLYQILESYGFKVKLVNARHVKHVPGRKTDVQDCQWLQQLESFGLLTSSFRPEAKICILRSYMRQREMLIRQASCYIQQMQKALTQMNLKLHQVISDLSGRTGLRIVRAIVAGEREPLKLAALKDRRIKSDAATIAKALAGDYRAEHLFALKQALELYDYYQQKIAECDAEIRKEMQTLESRGTTGPVLKRKPRCRHNPVSFDSQAELYRIMGVDLTRIDGLHESTAQLILSELGLDICQKWPTEAQFTSWLGLCPNNEISGGKLLKRGTRKVVNRVANALRMCAQSLLNSKSALGAYARRMRARKDTPVAITATAHKLARLIYRTLKYGQEYVDAGCDNYEAKYKAKLVKSLQRKAQLLGYLLVSSQTSDAVVP

SEQ ID NO: 238999 - protein, 411 aa, unidentified
MDKVYDKCCGIDVHKKLIVACFRKGSKQELRNFGATTRELLELANWLQNGGCEMVAMESTASYWKPLYNILESSELKAMVVNASHMKAVPGRKTDTKDAEWIAALLQHGLLKASYIPDKQQRELRELVRYRKSLVSERTRELNRLQKMLEGANIKLSGTVSDINCMSARNILEYLLTGEFFDEAKYDEMYKQKIIAHNLKASKEQLIDDLNGVMTPLQRRMMKELLSHLDELNVHINNLEDEIDNFMKPEEKQATQAIQDVTGIGKNSSQAIISVIGTDMSRFPTAGHLAAWAGLCPGNNESAQKRKTGKMRKGNALLRSTLVVCAHSATRNKNSYFYAQFMRISSHRGKKRAYVAVAHSMLIAIYHILKDGVVFKDLGADYYNQFNKERKINAYLKKLKALGWEVPVVAA

SEQ ID NO: 239000 - protein, 373 aa, unidentified
MQTKLYVGLDLHSNNTYVGALDEDEHRVLKGKFPNRLEVILSVLEPYKDRIVGVVVESTYNWYWLVDGLMDQGYKVHLAHPVAFQPYTGLKYTDDEHDAFFLARMLKLGILPEGHIMPNEDRQLRDLLRKRMKLVHQRSSHILSFQSLVSRNLGVSVPGDEIKKLEEEEINDLFDNEHLALSARVNIAMVNQLKWLIYEIRTSLLKAARLKPQFEKLLTVPGIGDILAMTIALETGDISRFAGVGEYASYCRCVPACRVSNAKTKGRGNRKNGNKYLAWAFIEAAHSAQRYCPPAKTFFVRKSNKTNKILAAKALAHKLARACFYIMRDQVDFDSTRIFGKPFKVDKGCVSKPARGLDLHPSEPIGLTDAAAR

SEQ ID NO: 239001 - protein, 356 aa, unidentified
MPIYVGIDVHKKFCQAALMDENGSVLRELRFDNTLEGASSLVSLAKSIDPHVRAVVEPSANYWIRVYDKLEDEGVEIKLSNPLRTKVIAETRIKTDRLDAKTLAYLLRGDLVAESYVPTRKNRERRALIRHRASLMRMRVEIKNRIHALLDKYELSYTYTDLFGKQGLEWLRSLQLQTVDQQILQSNLQLLDTLNDQVQNADLQIAKDAVNEEQVKLLMSMPGVDYYAAMVLLSEIGDVKRFPTPEKLASWEGLAPQVHQSGETQWTGHISRKGSKRARWILTQCAQSARQHDLRMREFYGRIERKHGSSKAIVAVSRKMLTIMHVMLTRNELYHGENPELTEQKHKRLDTLANSA

SEQ ID NO: 239002 - protein, 343 aa, unidentified
MEYGAIDLHTKESQIRIVASDGRVVLDQRIATRRDRFTWLFGERPAMRILLETGTESEWVAQHLESLGHEVVVADPNYSPMYGERTRRIKTDKRDVAALAEANRREIYRPAHRVSAAQRDVRRRLRIRTHLVGMRRQVISVMRAHLRAEGLRLRSGAADSMLARYRKMDVPAALQEIFAPLLEMLETLEPLIRQADQWAKQQAARDPVTARLTTAPGVGPIVALSFRATLDDVTRFSDAGHVTSYLGLVPRESSSGDRRCRGGITKAGPGHMRTLLLQAAWTVWRTPSGSAALHAWVRRLGERRGRKVAVVGLARRLARILFAMWRDGHLFQPTRLTRITVAA

SEQ ID NO: 239003 - protein, 411 aa, unidentified
MRLFAGDDWAEDHHDIEVMDAAGKVLAKRRLPEGAAGMSQLHELIGRFLPEDADEVEVVIGIETDRGPWVAALVAAGYTVFPVNPLQASRYRERHGVSGAKSDQGDSHMLADMVRTDSHQLRPAAGDSPEAAGVKVVARTHKTLIWDRTRQVQRLRHQLREYFPAAIEAFEDLDAPDVLELLGKAPDPARAARLTRAQISAALKRARRRNIADKTDAILAALRGEHLTQPAALTVAYAATVRSLVAVITTLNEQAKLLEEQVKEHFGRHPDAEIYQSQPGIGAILGARVLGEFGDDPRRYVSAKSRKNHGGTSPITRASGKKKVVAARFIRNDRLIGALMSWAFASLNASPGARAFYDQQRAKGLEHNDALRRLANRLVGILHGCLKTRTLYDEATAWGHRENLPQSSVAA

SEQ ID NO: 239004 - protein, 362 aa, unidentified
MSLDPSRPWESKSAAPFPTDKPEQLTGPRARMPQGRVSFDNPRHAMNTEQLFVGIDIAKDRLDLDTCPQAEPWHTTNDAQGINQVIKHLRERQPALIVLEATGGYERVLAAALASDGLPVAVVNPRQVRDFARATGQLAKTDAIDAQVLALFAERIRPEVRPVPDAQQQALAALVVRRRQLLEMLQAEKNRLHLAHKAVQAEVRSHIRFLEKRLDKADRALQTAIEASPIWRANENLLRSTPGVGPVVSATLLAELPELGRLSGREISALVGLAPFNRDSGKFRGQRCIWGGRVSVRCALYMATLVAVRHNPVLRRHYVQLLGRGKAKKVALVACMRKLLVMLNAMMKTQTHWNADFGCESP

SEQ ID NO: 239005 - protein, 355 aa, unidentified
MNRTESDYVRVHCLDLAKEKFQVHEFGRSDERLMVRTLSRAKFDAAFSGSAASGSLVVMEACASSHYWGRELTRRGYQVKLVPAQFVAKQRIGSKTDGNDADAIFAVHRDARVRPVPVKTLAQQDLCAEHRFRELLVGHRTACFNQLRSQLAERGVVAPRGCGNLRRLLAEIEAPPGGEITPAFIVLIGHLIEQIDGLDAQIAQIELRLANVARSNATVRNVDSIHGVGLITATAVVAHFGSDLRRFNSARQFAASLGIAPCEYSSGQTRWLGAITKRGDPYLRKLLVQCAQSVVRACHRRDDPISELAQRLLQRRPRNTVVVAVANRLARIIYAVIKHGEPYRPITTRVTAATV

SEQ ID NO: 239006 - protein, 415 aa, unidentified
MALKIVYKICCGIDVHKTFVVACIASTNDKGVTSYESHRFSTYTSGLKTLLQWLIDRNCKDVCMESTGKYWIPVYNILEKGCSIVLAHPKYVKAIRGKKTDKKDAKWIADLFKHDLVAGSFMPPADIRQLRDLMRYRFKLTCFKSSEKNRLQNCLTVSNIQLGNVVSDTFGKSAQAILDKILEDPADTSFDLEPLVFKSLKKKLPELRDAIDGYITPEQAGKLKVIKAHYENLEARKAELEELILALATPYQQELAILQTAPGISSDFTAIGIISEIGTNMEAFPSAKHLCSWAGLTPTNNESAGKKKSVRVSKAGCYIKPLLVQCANAVIKSTKHPEMRNRYLRLKKRRGHKKAIIAIARMLLTALYHILKNGENYNAELYRKSDLPPVDREITVEQALMIARNQGYKIKSATA

SEQ ID NO: 239007 - protein, 342 aa, unidentified
MEWTVAVGIDTHKDGHVAVALDRFGGQLDSFELPATSAGYLAVCRWAHELGDPAFVVEGVGSYGAGLARFLVSAGCVVYECERPRRDERRRGKNDLIDALLAARRLLSGERLARPRGHGGRREDLRLLLLERRSAVRARTATLNQLQAIVVTAPDRLRARLGRGNGEQLSRKVARLRPTDGDEAVVRSVLRRLGRRVLNLDAELEQLDRELEAIMSALAPELLAECGVGPVCAAQLVVSSGDPRRMVSEASFAALAGTSPVDASSGRQRRHRLNRGGDRQLNRALHMIALSRIRGHDETAAYYQRLLAAGKTSREARRCVKRMLARYFHRKLKALPALALTT

SEQ ID NO: 239008 - protein, 420 aa, unidentified
MEVAQDDQEIIARVAALDIGKAEVVCCVRVPGQGPRARRMQEVRTYTTMTRSLLAMADWLTELGVTRVVMEATSDYWKPPFYLLENTFETWLVNARDVKHLPGRPKTDRLDAVWLCKVAERQMLRPSFVPPPAFRELRDLTRYRVDLITTRTSEKQRVEKLLEDSMIKLSVVASDIFGVSGRDMMAALVAGERDPKVLADMARGSMRGKTARLEEAFTGRFTDHHAFLLRTMLARIDGITADIDIVQDRIDEQIAPFAAAVTRLDEIPGVGVTTAQAIIAEIGLDMTRFPTPAHLASWARFAPGISESAGRKKGNSGTGKGNRYLARALGEAAVGVRRTDTFLGERYRRIAHRRGKKKAIVAVGRSILMIVWQLLSDNDARFVDLGSDYYESRVNLNRRTRNHVRELQALGYKVTLEPAA

SEQ ID NO: 239009 - protein, 344 aa, unidentified
MVTIGVDPHKSSHTAVAVDETGRVLGERRVPADKATLRRLRRWAERWPERTWAIEGANGLGHLLAQQLVTAGEVVVDVPATLAARARQLDRGHGRKTDGIDAHSVASVAQHHPDLRRMVREDHSGVLRLLSDRRDELAAERRRVVNRLHRLLRDLHPGGAPTELSAETACRLLGRTRPRGPADAERKRVARQLLADLRRLDWALADNRSRCAAAVAASGTTLTTIFGISDVLAAKILGHTADVSRFSSADRFASYSGTAPIEVSSGAVTRHRLSRGGNRSLNNALHLAARVQIMHPGPGRDHYGRKLAERKSSSEALRSLKRQRAKVVYRHMVADHGTRLANLS

SEQ ID NO: 239010 - protein, 383 aa, unidentified
MTEEFCPENATATALATPMFAAVELSGVCWLVAIHAPHLDKISRHQLRSGASKELIDLLSSVRSRAEKALGRSVDIVSCYEAGFDGFWLHRLLSRAGIRSHVIDPASIQVNRRVRRAKTDGIDVEALLRALMAWQRGEKRVCSMVRIPSPEQEDARRVSREREALIKERIRHVNRIKGLLATQGIRGFEPLRARRHERLNELRTADGCLLPPKLKAELGRSLKRLDLVLEMIKEIEAVRDQEAEASAQAGGVVGHLVRLRGIGPEVATILHGEAFNRTFGNRREVASYAGLTPSPWSSGTLQREQGISKAGNPRLRRTMVELAWLWLRYQPDSRLSCWFRDRVRDGKGRIKRIAIVALARKLIVALWRYVDVGLVPEGSLLKP

SEQ ID NO: 239011 - protein, 387 aa, unidentified
MQKPHDNSKVCRAAFVQDSTLVVVIEMALTSWLVAGMIPGVDREPLKKIAPDPEELLQLLYRWRDEAIKAGKEITRIAVAYETGRDSFWLARWLRARGIDAHVIHATSVAISREHRRAKTDRIDTAMLRRGFLGWLRGEPGHCSLAIVPTVAEEDAKRPHRERESLVQERTSTVNRMKSILIQFGVRNFNPVLRKASEKLDAVRTPEGIPLPPNAVAALRRHMERLRVIKEQIKTIERTRLQRLQRDPADKMNAMVFLLVRIIGFGVETAEQLVHEILFRDLRDRKAVARYAGLTGSPDESGSKRREKGLSRSGNGRVRTILIQLSWRLLKLQPGSELVLWYQKRTADAKGSRKPMIVAFARKLIIALWRYVNTGLLPEGFELKPAA

SEQ ID NO: 239012 - protein, 355 aa, unidentified
MKNQQVSKKLDFQGQEIYVGIDVHKKQWHVFIMSRYKEHKGFSQPPRAAVLGNYLRSNFPGATYKSAYEAGFSGFWPHQELLKEGIDNIVVNPSDVPSMDKEKKRKSDKVDCRKLCRGLRNGDLEAIHVPDRVQLEERELVRLRMTLTRDIRRCKCRIKGMLNLYGIDCPSSGWSKVFMNWLKGLKLSTTSGTFALQTHIQELEQVSELRKSVARQLGDLIKDQKYAGPIKLLHSIPGVGLITALTVLTEVGTTSRFKNIDQLCSYIGLVPSLHASGETQHVGNLSPRKSTHIMGVLIESAWSAVGKDPALMQAYHKLCTRMKGQEAIIRIARRLVARMRYVLLNQVQYELRMAA

SEQ ID NO: 239013 - protein, 373 aa, unidentified
MERDINITHAVAGIDPHKHSATVAVVNLVGVIVARLSFTVTQAGIGELLALLRDTGLVLDRIGVEGSGGLGRPVMLALAAAGYDVREVPASRTAERRKRRRRAKTDIEDAEAIARETLSDPGLPPAGQHAAPSSAREALAVIRDWRESLVLQRVRLLAEAEPVLVSLPLSVREQLPATSRVRAALRRLAVLAPVMPEVTCADRIKLARLAVIQTAISAIDGQITDLGKQVPALLAELGCTLTEIHGVGVVTAMTLITEIGDPHRFRTESQLARWCGAAPIALSSGEGDGQPHRHRLDLGGNRVVNSALRIVHVTQARCHPPARAFLAQRAPDKTKREIRRSHKRQLANVIIRHMWRDTDRLAHRAPDPLTAAA

SEQ ID NO: 239014 - protein, 441 aa, unidentified
MSYRIAGIDVHKKMLAVVVSDVEIESEYQFERRMFSSNPEQLRSLAAWLVEQKTEEIVMESTAQYWKPVWETLERHWKPLCEKREGARRRSGTLHLAQALSNRGRRGRKRDFIDAERLVKRLVARELTLSFVPDPEQRLWRTVTRKKYQLRRDVVRLHNQLEALLEEAHIKLSSLVSDLLGVSARRMLKALADGETNPAALAALAHERLRATPEQLCDALGACRELKPVYRRLLKMALEQLQLLEQQIGQLDQELATLLHPHQDAVQRLAEVPGFAVDSAQQIVAEVGPTAATFPSEKCLSSWVGACPGEEESAGVNYSHRSPKGNRHMRRLLNQAANAAIKVKGSIFEVVYRRCVPRLGHNQTIGVIAHRQCRLIWLILHQGTRYEERGPAVTMRSRYQRTWRMIRQLRQLAIGSNHQVLNPARHMRSYFRLWETSKPVT

SEQ ID NO: 239015 - protein, 424 aa, unidentified
MKRTQNEKILQMKSETLVVGIDVGKDTHYSRAIDNRGVELGKLLRFSNTKQGYEALDSWMQKIMQEHGKTEAIVGFEPTGHYWFTLGDHLQKEGHRLGIVNPFHVKCARELDDNSPTKNDRKDPKTIAMLVKDGRYRDVYIPEDLFQELREAVIERERLLEQEIALSNQVIRWLDIRFPEFNEVFKDWSGTAAWLTLKSYPTPAKVMAAGVKGIVDTWRKGMKKPSHKKAERLIKAASESIGRMAGSEAAEASLQNLMTQYELIKQQKREIESLMQELMLRIPNASKLAAIKGIGMVTAAVIVSEIGDIHRFQDPRQIQKMAGLSLRENSSGRHKGKTTISKRGRKRLREGLFRGIITMLETNQEFRVMHQKNLTREKNPLTKMESIIALCGKLIRVMYVILTKGHDYDANKMMNDMNRSMKAS

SEQ ID NO: 239016 - protein, 466 aa, unidentified
MQPNRRRSLGKPRVSPTVFDRLNPHVAGIDCGSGEHFVAVPPDRDPHPVQSFPTFTSDLLRLADWLAACRVTSVAMEATGVYWIPIYEILDARGFEVLLVNARHFKNVPGRKSDVSDCEWIRELHSVGLLRGSFRPTDAIVALRAYMRHRQTLVESAGTDTQRMQKALVQMHLQLPLVVSDITGVTGLRILRDIVAGQRDPQHLAAHRDARVRASTADIVAALTGHDRPEHLFVLQQNLELFDACQAQLAACDRAIDAHVQTLTAQRPPPVTPLPDPRVTKKPHDHQPRFEIRTPLFQLTGGVDLTQIDGVAPYTALKLISEIGLDMTRWPTEKHFTSWLSLAPKNKISGGRLLSSRTPPSANRAAVVLRMAAMSLGRTQTALGAFYRRLAARIGKPQAITATARKLAALVYRALKGELVYRDPGADAYDIQQRARVLRRLRQRAATLGFSLVNRDTGEILAPAIP

SEQ ID NO: 239017 - protein, 425 aa, unidentified
MFKSQNDKLALIKDGLMILGVDVAKNVHCAQPMFHNGMSIGKPFRIYNTREGFESLLAKIELLKKEHSFKTVIVGLEPTGHYWKPLAHFLLSNGITVVFVNPYHVKKAKELDDNTQTKSDPKDCGVIGRLVRDGRFTEVYIPEGHYGQLRVLSNTRNQIRVKLNATLNIITAIMDEYFPEFTDVFKQFTGKTAMHILYHCPFPNDLKGLGLEGILAEFRKAVKKSVGLKKTQMLLGAAQRSIGLPSNTAIKQKLQFHLKELELLTGQIELVEIDMKYELETTGISQYLLNVKGIGVVSLASILGEIGDPSRFHSWKQIRKLAGFNLVENSSGNHQGQRSISKRGRPNLRRILYQLAVVMVSTNPEFKQLYRYLITRRENPLKKKQALVAISVKLIRIIFTLATKKEHYDPDKVLGRYRVDQIKAA

SEQ ID NO: 239018 - protein, 338 aa, unidentified
MEWTVAIGVDTHKDVHVAVAVDRFGAQLDSHEVETTETGYRSLLSWALELGLPAFAVEGCGSYGAGLVRCLELTGVAVWECERPRRRERRRGKSDLIDAALAARRLLAGEGLSLPRGGGRREALRVLLLERRSAVQARTAALNQLSSLLVTAPNRVRDRLRALSGERLAAAAARLRPGTDLSCAAMRRLGRRVACLSEEIVETEQELAGLLAELAPDLLEECGVGPVSAAQLLVSSGNRERMTSEASFAALAGTSPIDASSGKQRRHRLKRGGDRQLNSALHVIALARIRHHGETAAYYQRLLARGRTAREARRCVKRALARHFYRRLREISTIALTT

SEQ ID NO: 239019 - protein, 310 aa, unidentified
MDVFVGIDVSKDRLDVCVRPSGETFAVTRDDQGLERLVERLRALSPALVTLEATGGYETVVASALAAAHLPLAVVNPRQIRDFARSTGKLAKTDRLDAAAIAHFAEAIRPPARRVADGEAQALGELVARRRQVIEMIVAEKNRRRLAGQPRVLKAIDRHVDLLQAELSELDRDIDGAIRKSAAWQADADLLASVPGVGKATLRTLIAELPELGRLDRRKIAALVGVAPINRDSGAHRGRKTIAGGRAPVRTSLYMAALVASRSNPVIAAHYQKLRANGKAAKQALTACIRKLIVILNAILRDRKPWSLPA

SEQ ID NO: 239020 - protein, 454 aa, unidentified
MATRRKKTNKKVQVQLPTLHPNAAGIDIGAREIWVAVPPGSASNPVRQFETFTDALLQLRDWLKATGVTSVAMESTGVYWIPLFQILEAAGLEVFLVNARHCKNLPGRKTDVQDCQWLQYLHSVGRLRGSFRPPETICAIRSVLRHRHRLLRCAADQVRLLHKALTQMNIQLHHVISDLAGVTGQAMLQAILAGERNPLALAALKDPRIKASRDVIARSLHGNWLPEHLFTLRQSHDTWLHYQAQITACDQHIQAQLAELDSRVDLQTQPLSPPKTTHRTPQRNEPRFDARAECYRVLGVDLTAVPSFQTPTVLLLVAELGPGFAEKFPSAKHFASWLGVCPDNRISGGKILSVATRSVKSRVAEALRLAAQSLVHAKNYFGDLYRRWKAKLGAPKAVTAMAHKLARIIWHLVKFKQPFDPEIFRQEEAHQQKKKLKRLHQTAANLGFTLVPIQ

SEQ ID NO: 239021 - protein, 335 aa, unidentified
MERQYVGIDLHRRRSVIVRRTPQGETLETVRITNDPVALALELAKAGPDPEVVLEATYGWYWASDVLQANGATVHLAHPLGNNWGHRRVKNDERDATDLVDLLRMGRLAEAWIAPPELRELRELVRYRAKLVAIRSGLKAQVHAVLAKEGVAVPMSDLFGVAGQGLLDDCPLGRAYAVRVESLRDLIEIFDREVGMLERLINRELASNPGYRAIQAIGGVGPVLGAIFVAEIGDVHRFPGAPQLCSWAGLTPTHRESDTTVRRGHITKQGSRLVRWAAVEAVQRQRGPTFLQTHHHRVAERRGRGIAKVAVARKLLTLVYYGLRDGEIRCLATTG

SEQ ID NO: 239022 - protein, 334 aa, unidentified
MKSGTVHIGVDVSKEKLDIYVPAKKEGSRPLTKEVDNNINGFRELRNLARKAKATVCVEPTGGYELELIAFMHKFDVPVAYTDALRVRQFARAEGNLSKNDAIDAALISRFADKIGVRVLEAQEVEAVELKRKAKFRQTMVDSRTAMINRLETEIDPEMKALLKEQVRLAGRIIDKAERLCLDTVKKNDRMNSLKERFTAIGGVGDITAISILSSLPEIGTLSDGKLNRLVGIAPEEKQSGTKEWQRRIWGGRKDVRNALYMAAVASIKWNAILGGYYRKKRAEGHPHKWAIVPTMRKLLSLLNRIARDPGFIPMPEPESTKQNANVGRRKKAA

SEQ ID NO: 239023 - protein, 420 aa, unidentified
MTVDLERGYKHRELCGPKQYLNLLLRSFLMIYVGIDVAKDKHDCFITNSDGEILFQVFTIQNNRDGFDDLFSKIQSTSSDVSNIKVGLEATGHYSYNLLGYLLDKGLHTFVINPLHTNLYRKSLSLRKTKTDKVDARTIAMMLMSDVNLKSYSDTSYHNEELKSLTRYRFDKVQERAQLKQSVSRLVTILFPELEKLVPSLHMTSVYALLSELPSAGKIASCHLTHLTKLLESASKGRYRWDKAGEIRDAAKVSIGSEMPAKSLELKHTLRLIGELNSEISEIESEIKRIMDQISSPILTIPGIGYRMGAMILAEIGDFSRFDSPDKILAYAGASPSTYQSGQFESSYSHMEKRGSRYLRFALINAAKYVCHWDETFGAYLQKKISEGKHYNVAITHATKKLVRLIYAMEKSGKPYIKTA

SEQ ID NO: 239024 - protein, 335 aa, unidentified
MQIYGIDLAKEKFDVSFFDLTSKKVSNKPSHKVVKNNFKSIGRFLETLPSDAVLVAEHTGVYGDTLLKCCMDSNVKIAFVGGYVIHRYRATPDRAKTDVLDCALLREFGERYPDKLKYRKFPEEALYELRQLARHREMLVEQRKQLMTADKSEDCRPIRSLAVKRSMDRIKEMLDTEIAETEKEMLKVINGHDSIHHNYEIVKSVNGVGLVTAVELLVKTDNFTKITTARQYAAYAGTAPYEKSSGKMDKGAHISKIGNRRSKTLLYICAESARLHNKEIKLYYERRTLIDKKPRHYVLNAIANKLLRIIFTLVEKGEYYDANFIRQDPRVVKYN

SEQ ID NO: 239025 - protein, 408 aa, unidentified
MEVLYPRCAGLDVHKDSVFARVRCVSEPRHDEVRNFGTTTTALFELNEWLSMHGVTHVAMEATGVYWKPVWHMLEGSFELVLANAQHIRNVPGRKTDVNDATWIADLLVHGLIRSSFVPPVAIQELRDLTRSRKQLVRETAQHNQRIQKTLEDANLKVGSVLADILGKSGRAILQAIVDGQSDPEKLADLAQGSAKRKRAELVEALRGRIRPHHQALLRLHPKVIEALKEAIADIDARVGKTLTPILECARLLTTMPGVSDVTAQVMVAEIGVDMQRFPSAGHLISWAGLCPKNDESAGKRRSTRIRQGAPWLKTTLVTSAWGAVRAKDSYLQAQFHRLRARRGAKKAIVAVAASMLTAAYHMLKNGVEYKDLGAEHFTRRDQSKAIQRLLRRLNDLGCEVQINPQAA

SEQ ID NO: 239026 - protein, 380 aa, unidentified
MSADPISQLAAIRVDLGAIFVSLELSKSTWLVTSLSPSTEKMSRHSVPGGDMPALLACLDALRDKAEAREGQRYPVIAIQEAGLDGFWIHRALASEDWVTSHVVDAASIAVSRRHRRAKTDRIDGETLVRTLMAWMRGEPRVCSMVRVPTVEEEDRRRIGRERKTLVKERTLHTNRIKGLLFSVGIRGYEPNRRDRRERLEELRTVDGKPLPLHLKAQLNRELDRLELLCEQIKCVEAERDDMAETSPQAMLAMLKGIGPEFANVLASEGLFRHFDNRRQIAAYAGLAPSPWRSGSIDREQGVSKSGNPRLRTTMVQAAWLWLRYQPDSALSRWFQERVSRNGGRGKKVAIIALARKLLVAFWKYAMSGVVIEGAVMTKA

SEQ ID NO: 239027 - protein, 399 aa, unidentified
MFVGWDWASTAHDVTVIDSAGELVHRMAIPHTEDGIARAVAKLADYGDPGELPVAIEATRGLVVDRLLGVGHPVIAVHPNAFHAVRPRWGAARAKNDPGDSFKLADYARTDIHRLPMLVPTLPETLELQALTRQRDCQLALRIAAVSQLAALLDQYWPGGKTIFAQLHSPIALDFLHRYPTPRAAASLTPARIEAFCRRRGYSGRRSGAELLDRLRSAPISASRLGEPVVAQMIRGQVAVVRALQAGIDALDIVIAEKVTAHPYAGLLAVLPRIGTLNLAQIIGEVGPILERATSFDQLAAETGLAPVTRSSGKTHTVAFRYATNRRARQALHTWLDNSRRSSDWAAQRYAAARARGQRHPHALRTIGRAWLRIIWACWRTQTAYDPARDERAKQPTAA

SEQ ID NO: 239028 - protein, 405 aa, unidentified
MNAVGIDISKGKSMIAILRPMGEVVRTPFEVKHDSASLENLAFSLKGLDGETRAIMEYTGRYYEPVARALHEVGIYVSVVNPTLIHNYGANSLRRVKTDKKDSLKIARYGLDNWADLREYTPTESVRLELKTANRQYQLYTKMKVGLKNNLIALLDQTWPGVNTFFDSPVRADGRQKWVDFAYDFWHADCVCYLSQETFVEKYRKWCKRRGYHFSRCKAEDLYIESWGHSTMLPKNTSTKKLIREAITALNAVSKTAEIFRAEMERLARLLPEYEVVMAMYGAGKTTGMQLMAEIGDVRRFSHRGALIAYAGVDPQPSQSGKQSRSSDPISRKGSSFLRKALFQVVDCHIKKMPANEPVFQFIDRKRSEGKPYFVYMTAGANKFLRIYYARVKAHLNALDESIEA

SEQ ID NO: 239029 - protein, 377 aa, unidentified
MHSENIAAYIGLDVHKETLAVAIAAPERLGEVRYYGTINNEAQAVRRLFQKLQGLYGNILSCYEAGPCGFGLYHQLTAMNIKCQVIAPSRIPKSPTDRIKNDHRDAISLARLLRAGELTPVWIPDLTHEAMRDLIRARAAAKRDSRVARQRILSMLLRTDKRYAGKHWTGKHRTWLANQSFSQPSQQIAFQHYCQSLEQIEDRILQLDQEISRLLPEWSLCNLVCQLQALKGVGQLTAITLVAELGDFSRFSSPKQLMAFLGLVPGEYSSGNSIRPRGITKVGNSELRRLLYEAAWSYRTPAKVGAWLIYYRPDSVTQYSKDIAWKAQQRLCSRYRSLTAKGKKSQVAITAVARELTGFMWDIALAAQSPFSQQKQN

SEQ ID NO: 239030 - protein, 330 aa, unidentified
MGTAATCFAGIDVSKDTLDCCLLVPGGKAKEHTFANDPRGRVALLAWADRHAAGRPVHFCLEATGPYSEAPATALADAGRLVSVVNPTRVKYAGLARGRGNKTDKADARLIADYAQRERPPAWQPPSPEVRELQGLVRRIDDLTEAAAREKGRLASPALTAAVRKSVARTVRFLEREAARLRAAAAALVAATPALRADRDLLESIPGVGRQTATTILAELPAVDRLPTAQSAAAYCGLSPREFTSGTSVRKKTRLSKAGNPRLRKALFLPTQTAVRFNPLLRGFFARLVAAGKPKMQAIGACMRKLVMICYGVLKNRAPFDPAWASRKAP

SEQ ID NO: 239031 - protein, 359 aa, unidentified
MQSNKKSFKGQKIFIGIDVHKKTWTVAILTESGLLKRHPQEASAKVLFEFLRKHYPDGEYHAVYETGFSGFSTYYALEEYGIKCQVVHAADVPATQYESIMKTDRVDAERLVRALKKGEIERPVYIRERDNIDDRAVIRIRRTIQRQLSGYKARVKHLLHSNGVELPERFSTPSSHWSRAFITWLKLDVKLLSSTRTSLDLLIRQVEVIRGTLLEATRELRKLSQTDRYKHAFDLLVTIPGIGPNVAMCILTEVWDVKRFSNENKFAHYLGLIPTCHDSGEHKTDGVKTFRGNKHLGPMIIEACWIAIYKEMGLGACYADYKKVMKPQKAIVKVARKMSNIIFSVLKNDKAYVPYQWDK

SEQ ID NO: 239032 - protein, 349 aa, unidentified
MTTYYAGLDVSMKTTSVAIADVKGKICFETICETDPAILAQQLKEAGYACEKIGIEAGCISHWLVGELKNLGLPAICIESRQMSAIISLKINKTDRNDARAIANVMRCGMYKEVFQRSRESIDLGLQMGARRILLDTRTKLKNAMRGLLKTYGIRLGDVSHAKFPEKVRTKLEAFDASIRQAMEGLLKAFEETCKSIEKAEEALKSLCKKDPVIALFESIPGVGTITALTYKAVIDNPNRFADPRNVGAYLGLTPKQYSSGEVTQQGKISKRGSNELRALLIECGVVVLTRTKVWTKLKAWGLKIMKRSGIKKAAAAVARKLAIIMLRMWQKGESFIWGNPKEQKCAAA

SEQ ID NO: 239033 - protein, 334 aa, unidentified
MATTANETLLAFDIGARTHEFIHDTQGRCEAGELPNEPLAMRAFLERLLRNGRRLRVIMEATGIYFLDLALLAHDLGAEVVVINPKTAHNFAKALGQRSKTDALDVRMLLEFLRRMPLTPWEPPARECLQLRQIGRYLGQLTDETTAAKNRLHALQSTEETPRFLRDDLRRSIRSLEGRIARIRAQAIDLIGRSASLTAAFRALNTMVGMADKAAVAVLGELCVLPRSLSARACTSHAGLDVRQHQSGTSVNKPGRISKHGNKYLRRALYMPALCAGVHDPHAAAFKARLKARGKKPMQINTAIMRKMLTAAWYIVRDPQSYDGAKLYASTPSA

SEQ ID NO: 239034 - protein, 277 aa, unidentified
MLTRNKGIGIDVSKAELVLWDSISEQLIKIANTGKGMKQLRKYLLKINPDIVTLEATGKYHRLAARTCQECSVPFIVAQPYRVRQFALGLGIIAKTDPVDARVVCQFGLKSDLNVSTLESKEHEALRDLVVHRMQLAEDKAKFQARHTEASSKDIKVFCAQSLAFIEKQLKIVQKKIVQEIKKFADLLPRFELLQSIKGIGEITAAVLVLLLPELGKLSKSQIASLVGVAPFDDQSGKSDKQKSIFGGRTRVRSALHMAVMSAVRYDPFLSHFYKKT

SEQ ID NO: 239035 - protein, 428 aa, unidentified
MNCNTQNAKIASITEKTLIVGIDVGSETHFARAFDWRNYEYTKKPLEFSNTEAGFMMFKAWVEDIAEKQGKTAVISGMEPTGHYWFALGKFLQDSGMKPVHVNPHHVKKSKELDDNNPNKNDRKDPKTIAALVNEGRFSYPYIPTGIYAEIRSLSNLRFQTQEELTRIKNRIARWFAIYFPEYKDVYGDLMAVSGRMILKEAPLPEDIRILGVNGVNQIWRNAKLRGAGMKRAKILVSAAEHSVGSKEAPEAARIELKNLLNDMDVYVSRMEELLQTIEEKLKTIPYVDKLMEIKGIGLITVSGFIAEVGDIGRFDNPKQLQKLAGYAIVANDSGKHNGESRISYRGRKRLRYVLYEAAISLVGKNAEFKEIHEYYRTRKENPLKKMQSVVAVACKIIRVFYTILTKGVDYDPMKLMSDIRRPQLQAA

SEQ ID NO: 239036 - protein, 361 aa, unidentified
MNATTVAVDLAKSVFQLAVADDRWRVVETHRLSRTQFERWFANRDVRLVIMEACGSAHHWARWLIGLGIEVKLLPAQYVRAYVKRNKTDAADAAALLEAARASDIRPVRVKSVEQQALQGLHRIRSLWMGTRTSRINALRGFCREFGIPIPVGARTGLEAIGRVLADPHTAVPELIRGTASLLMEEIRLLEARIAQLERELTHMARLSPACKTLLSVPGIGLLTATAMVAATSGDVSHFKDARHFASWFGLTPKEYSSGSTRHLGRISKRGDRYLRMLLTHGARSVLRAAKVASGAGREVCGVRRWALDVQGRSNHNKAACALANKLARICYATLRDKEPFAEGTVPLAKKINRQAFVMPA

SEQ ID NO: 239037 - protein, 344 aa, unidentified
MLYVGLDLSRKRLDFDARLGGGELVERGAVAPDADGLAGLVQRLGDAEVLAVIESMNGARFVHDRLERLGWDVRIADAVKAKGLAPLACKTDKIDAWVLAELARRDLVPEIWLPDPASRAERERARFRLHLVKHRTALKNRVHSILVAHGIPNANSDLFGNGGRRMLERLQLPEPWRSTTTATLALIDVLDEQIDACERELKQLGADHRYVPLLITCPGISWVLAFTIAAEIGDINRFPSPRKLIGYTGLTPRVDQSGETDRRGPLRKNGPTYLRWALIQAAHTASRDRRYQPLVERSRTRHGQKRGSKIAALTIARKLSEAIWHMLTTNQPFAPAGASSPLAA

SEQ ID NO: 239038 - protein, 297 aa, unidentified
MEQYIGLDVSLKETAISVRQGGQRIWRGKCASDPKVLAAIIRDRAPEAKRVVFETGPLSVWFYHALIAEGVPAICIDARHAKAALDMAPNKTETNDADGLAQLAEVGFYREVRVKQYDSMLSRTRVGARNKVIKITIELSNPIRGVLKTFGLIVGKGSGRVFEGHVRALLAGNAELARVVLPLLEAWRDLRARAAELDRQLVAAARESAACRLLMSIPGVGSVIAASFAAAIERPENFRTSRSVGAWLGLTPRRYQSGEVDFDGHISRRGDNHLRGLLYQAATVILTRSLADSTLRS

SEQ ID NO: 239039 - protein, 371 aa, unidentified
MITVGMDVHVRNSFVHAKDAEGEVIRKGRCKNTLLDLSEYLAPVERQAVQHGERVRVVLESTTNSRAIQRILTQYGASAGMDLTAEVLDARKIRIIAESVCKCDRLDSAVLCELASSNLKLPVCYMPDDEEFALREHLRARHDLVRMRTMLKNRIHAVLHRRGILPPEQLFTSAGRAFLASLDVDESGRDILDRYLDMLDQIDRTIGQSTASLRTLARRERWSKQAALLQTMPGIGLLTSLTILAELGHLERFRSRAAVANYAGLVPVVRDSNTSHYSGGITHRGSKHLRGVLVEAAWISVSRVPVYRHLFDRIADKKNKPTAIVAVARRMLEDAFTLLIRDQAFRYVEVPALPDASAPRRHCEVASSVAG

SEQ ID NO: 239040 - protein, 350 aa, unidentified
MSTVTIAVDLAKNVFEIAVAGRAGTIRERKRLSRPQFEQFWGARPPCRVVMEACASSHFWARWLMARGFDVTLLPPHYVKPYRRRNKTDRADCEAILEADRCAGIHPVSVKSEDQQALVALHRVRSQWLHSRTARINAMRGLLHEFGVAGAPGSQRFINELHTLLASKQHLLSARVRHTMVMLWEEVRDLEQRIETIETELEGVAREQPVIQALLKIPGIGLLTATALFATVADIHAFKSGRQLACWLGLTPRESSTGGRRRLGRISKQGDPYVRMLLVHGARAALNAASRLEAADKPLTQLQAWSLKRARESHRNKATVALANKIVRIAWAVWYHERQFNGNHVIRVAA

SEQ ID NO: 239041 - protein, 345 aa, unidentified
MDQISRVGMDTSKHIFQLHGVNVAEAPVLRKKLRRKDMVAFFAKLPPTVIAIEACGASHHCARLLQAFGHSVKLIAPQLVKPYVKRNKNDAADAEALCEAMSRPTMRFVPVKTAEQQAALMLVGVRDRMIRNRTQLSNAVRGHAAEFGLTAAKGMAHLVPLLERIEADESLPALARELFAVQAEEFAQLQARIGEIDARLTSWHKADECSQRLGKIPGVGPIGAVLLRMKTPEPELFKSGRQFAAWIGLTPKDHSTAGKVRLGVITRAGDEGLRSVLVAGATAVIRHAQHSGKASPWLAGLLRRKSPKSAAVALANKTARIAWKMMMTGETYIAKLVPAALAGTV

SEQ ID NO: 239042 - protein, 343 aa, unidentified
MSNDTRIAVDVAKAVFEIAISDRPGHVTRRERLPRGQFLAFMAQQPQATVVMEACGSAHHWGRKLQALGHRIVLLPPHHVRPYVRRNKTDRTDAKGILEASRNEDIRPVPVKSVDQQVLTSFHRLRSGWMTERTARLNALRGLLRELGMFIPMGAREVVPFVWSLIEDADSDLPEALRPIFAEACREIREIEARVKQAERQLESTAEQLPAVEHLRTIPGIGLLIATALVAFIGDIRRFPSGRHLASYLGLTPREYSSGLKRNLGRISKRGDGYLRTLLIHGARSVLVHARKQQPDRLREWANNLAKTHVHNKAAVAVANKLARIVWAVWYHQRPFALIAKAA

SEQ ID NO: 239043 - protein, 373 aa, unidentified
MVWTPPPETGSVCQSGSVIKPLETEGASNMNITTIGIDLAKNVFQIHGVDQRGKTVLKRRLRRDQMASLFANLPACVIGMEACASSHHWARKLQGLGHTVRLMAPQFVKPYVKTNKNDMADAEAICEAVARPNMRFVPVKSVEQQAVLSLHRVRQGFVKARTAQANQIRGLLGEFGLVMPRGIANVAKRVPDLLEKASEQLPARLRELIARLLCHMKELDRQVGELEAQIKAWHRDSPASQKVAKIPGIGPLGASALVASIADARSFANGRQTSAWLGLVPRQNSSGGKSKLLGLSKRGDSYLRTLLIHGARSAILAAQRKTKVDPWLAGLLQRRHPNIAAVALANKNVRTVWALLAHDREFRPDYISTPSAA

SEQ ID NO: 239044 - protein, 344 aa, unidentified
MYPFYLGLDLHLKKTYAVLLDAQGNTLDERQIANKELPTYLHKVVPPKTFAVLEATRNWPFLYDLLAEHVERVELAHPKELKAISSAAVKTDRIDARVLAQLARLNYLPIAYAAPATTRDLRLLMRHRSQLVWARTRAKNRIHALLARNNLVAPVTDLFGAQGREILEQELCLQLRPSARKVLSNHLGLIDYLNEQIEATEAAIDLTPEQKQAVRLLITIPGVGQTIAHTIVAEIGDIRRFHSPKALCNWAGLTPRVRQSAAVIHHGSISKQGSPYLRAAMTQAATISSRFSRRWYVVHERLARRIGKQAAKVAVARRLLTVVYYMLKRNEPYQEDYQANRRRA

SEQ ID NO: 239045 - protein, 308 aa, unidentified
MATSSYVGIDVSKDRLDVAERGGSVWQVDNTCQGIDELVQQMVELQPELIVVEATGGYQRNVVDALFHAGVCVAVVNPARVRQFARACGLLAKTDKLDAQVLAEFGRRVQPRQYEGKSEAEKQLSALLVRRKQLEEMLKAEQNRLRTISPSLRGSVERIIALLKEEKQRLEEQIRELMNEQKAWHEQTEILRSAPGVGPVTTATLLAELPELGKMDRKKIAALVGVAPMNYDSGRKRGYRKTKGGRTDVRSVLYMSTLVATRYNPLIQTQYQHLLKRGKLKKVALTACMRKFLTILNAMVRDQQPFRV

SEQ ID NO: 239046 - protein, 367 aa, unidentified
MKKISTAATKQIRNFSQPKLTIGLDLGDRSSWYCVLDESGTVLLEQKLSTTPKAMREVFGSMPRCRIALETGMHSPWVSRLLSELGHEVIVAHARNVRLIGESRKKDDRLDARTLARLARIDPQLLCPVKHRSAKAQADLTVIRARAGLVRSRTALINTARGLAKSYGERLRGCNPRNVNAEKAQGLSPELQAALEPLLAATEALSERIQEYNQQIAKIAQESYPQVARLEQVKGVGTLIALTFLLTLEDPHRFRNSCDVGCYVGLQPGRRNSGQSEPQMHISKEGDPYLRTLLVQGAHHILGPFGADSDLRRWGLKLAERGGKNGKKRAVIATARKLAVLLHRLWVSGEAYEPLRNSHPIPMPAAA

SEQ ID NO: 239047 - protein, 481 aa, unidentified
MLHNLRMSMEESPMGHNRSRSRQPGGKKFKHPSLLKRINRNAAGIDCGSEAHYVAVPLERDPEPVRSFKTFTADLHRLADWLGACKIKTVAMESTGVYWIPIFEILEERGFEVVLVNAQHIKNVPGRKSDVLDCQWIQELHSVGLLRGSFRPAAEIVSLRAYLRHREKLVQSAASHIQRMQKALVQMNLQLHNVISDITGVTGMHILRDIVAGVTDPMALAAHRDPRCRASQDEIAASLTGNYRAEHLFVLRQHLELFDTFQQQIQACDTEIECLLHKLAARQRKSKTPIPSPRCKLRFYDNEPRFEIRDPLYRLAGADLTQIDSIGPFTALKLIAEIGTDMSRWPTYKHFTSWLTLAPKNKITGGRLISSRTQPSANRAATVLRMCAMVVGRTSTALGAYYRRIAYRIGKPKAITATARKLAILVYRTLKGELDYADPGASAYEEQHRERTLRNVRNRAKRLGFGLVDLETGELLQGAVS

SEQ ID NO: 239048 - protein, 408 aa, unidentified
MAGKVAGIDVHKKVLMVVVIDADALAAKPERRRFTTMPSELCRLSTWLKEHGVEEAVMESTAQYWRPVWLELEPHIRLHLAQAFSNRAPRGRKHDFKDAERLVRRLIAQELILSFVPDGEQRIWRNLTRMKLQLVRDRVRLHSQIECLLEEMRIKLSVVVTDLLGLSGLRILHALANGETDAKNLALLGDHRLKCSGEQLIEALTGSSHPMHRQMLALQLERLRLIDEQIAKLNSLIAQAMNPYQEAVIRLAEVPGLGIDSAQQIIAEVGVTASTFPSAAEFTSWVGTCPGKQESAEENSSSRSAKGNKYMRRVLNQAANAAARSKGTHFQAVFRRLLPRLGYQSAVWAIAHRLCRLVWKILHEGIRYIEQGIESEPKLLINRARSLAKQLHKFGYNVQITPVDGAPA

SEQ ID NO: 239049 - protein, 431 aa, unidentified
MQVIYPIVCGVDVHKTFIVAVICDSTSIEPKYIRKRFSTFKNSLIDFRDWLLQHDCQNVCMESTGKYYIPVYNALEGHISNVVVANPKWVRAVKGEKDDNKDAKWIADLFKLGMARSSFIPGKDIRILRELTRYLYKVVGIASSEKNRFQNALVVGNLRADMVFSDVFGKSASSVVDLILSNDDVTDKEILSKVHPICKASNEEILEAMTHVELTSIQKSRIKLIRDHYDYLQTLKENLSELIQVMIEPYESFVTLLCTIPGVSRKSAITILSEIGPDMSQFSNHYRLSKWAGLVPGQNASAGKKKSTRISRAGVYLKPCLVEVAHAAVKDKKEPYFSIKFNKISKRRGKKRAYIAIARKILVCAYHMLMSGEAFKPSDLADVETPKEQRAKYIANNLRQSIKELNAIGVSLEEIITMMKQTKGLKEQIAS

SEQ ID NO: 239050 - protein, 347 aa, unidentified
MVTLGTDSHKQSHTLVAVDENGRQLGELRVAATSAGHREALGWARQWRERGWAMENCRQLSRGLERDLLVAGEQVLQVSPKLMGTSRRSGRQLGKSDPIDAMAVARVALREPNLPVARLEGKSRELKLLVDHREDLVGERTRIQNRLLWHLHELEPGLQIAGGGLTRRVVLKEVGRRLEAHQGVVSEIAGDLVERLAELTMSVNRLQRRIEVLAGELAPSLVSLPGCAGLTAAKLMAETADVRRFHSSAAFAMHNGTAPIPVWSGNQQRHRLNRGGNRQLNVALHRIAITQIRLGGEAGAYVARRMSLGNSKTEAIRSLRRQLSDEVYRRLRLDRLERFAVPTTAAA

SEQ ID NO: 239051 - protein, 340 aa, unidentified
MNEITTIGLDLAKHVFQVHGVDASGVTVVRKRLRRSEVLAFFTRLPRCLVGLEACATAHYWARELQTIGHEVRLMPAQYVKAYVKRNKNDAADAEAICEAVQRPTMRFVPVKTAEQQAALLLHRGRERLVRQRTALVNALRAHLAEYGVIAPLGLRNVARLIAIVRDEIDTRLPAPARQVLEVLATQVEQLEAAVAALEKQLIAWHKANPVSQRLATIPGIGPIIATAVAATVVEASGFRSGREFAAWLGLVPRQHSTGGKARLGGISKRGNRYLRRLLINGASANLLCSKATNADPWVIGLRRRRPSLVVAVALANKTARIAWAVMHRQENYQRMAAAA

SEQ ID NO: 239052 - protein, 355 aa, unidentified
MKYYTSTTQFNCGIDLHARQMYVCLMDRDGKKLVHTTIKNHDFEYFLKLVGPYRHDLTVCAECMFGWYWLADACQAAGLPFVLAHALYLKAIHGGKNKNDRIDSEKIAHLLRSNLIPPAYVYPAAQRPLRALLRQRLYFVWRRSELLSRIHSHQLAHNRIPPKQTRRVRDSWEQQVLAAEPEPLRQLALKNDLAMIKHFDTQIFALEEELQRQAKKSAAREYALLQTVPGIGENLGMTILCEIGQITRFPTVKDFLSYCRLVKGTVASAGKIKGLRGAKLGNPYLRWSFGEAAVIAKRDHAVIGPLAQRLEARMNGNKFKANTVVAIKLARAVYFMLKSKTVFDPDRLVAALSKN

SEQ ID NO: 239053 - protein, 370 aa, unidentified
MNDTIYVGLDVHKATVAVAVAEGVRGGEVRQLGSIRHTPEQIAKLAEKLAKGGRRLSFCYEAGPCGYGLHRQLTDLGHDCIVVAPSLIPMKVGDRVKTDRRDAVMLAKLHRSGDLTAVWVPDSAHEAVRDLIRARATAVRVLGKARQHLQGFLLRHGRVYAGKRGWTLAYRRWLATVRFDHPAQQVVLQDYIHAVTDAEARVERLTRQIEDLLPHWSMAPVVEAVQAMRGVAFIVAVTVVAEVGDFARFDNPRQLMAYLGLVPSEHSSGATVRRGGITKAGNALARRALIEGAWTYRMQARVSRKLHDRLEDLPQAIRDIAWKAQVRLCARFRRLAATGKARVVVTTAIAREMVGFLWAIARQVQVAPAA

SEQ ID NO: 239054 - protein, 410 aa, unidentified
MRRIYDRVGGLDVHRDTVVACVELFDGHRVETDKATFTTTAVGVRALGEWLAEREVALVVMEASGVYWRPVYYGLEDQFGELWLVNAHHVKNVPGRKTDMADAEWLADVAAHGMVRPSFVPPPEIRGLRELTRYRKTQIRARGQEIQRLEKLYQDAGVKLTSVASTTWSKSARAMVEMLIAGERDPAVLAELAKGRMRPKIPALMEALESRWTGHHSTVARQILAHIDFLDETIETLNTEIVERLVPFDAAAELLKTIPGVSDLTAQVMIAEMGVDMSRFPTAGHLAAWAGVAPASHESAGKRRPAGTRHGSRHLREALIEAARAAARTKGTFLSARYGRIVRRRGPNRAAVAVAHSILVAAHHMLTTGEVYHDLGSDYFNRRDDTAHETRRLVTKLETLGHTVHLEPAA

SEQ ID NO: 239055 - protein, 378 aa, unidentified
MDVIYPRCAGLDVHAETIVACALWEEDGHIQKDIQTFSTFSKGLGDLLEWLEEHGVTHVAMESTGVYWKPVFAFLEGYVDLTLANPQRIKNVPGRKTDVSDAEWIAKLLRHGLIEKSFVPPAPIRELRDFTRLRKKWVGQLSSEKNRIQKVLESSNVKLGSVLSDLFGVSGRNILARLLEKGYVDKDELDECLRGRLKTKKQAVYDSLLGTLTEHELYLLRLLWKHVEELERLIEEVDQHIDRLLEPYREEVDLLMTMPGIKKQTAAVIIAEMGTDMSVFETPERAASWTGLSPGNHESAGKRKSTRTTKGNPHLRSALCEAAWSAARSKTHPLSRKFWSLAARCGKKKALIATARRMLVIIFCMISRKEPFRQPQLI

SEQ ID NO: 239056 - protein, 340 aa, unidentified
MKLYGAIDLHSSNNVTVVIDEQDRVVYQKRLPNDLAMIVEQLSVYRGSLQGIVVESTYNWYWLVDGLMEQGYKVHLANTAAIQQYEGLKYTDDHSDARWLAHLLRLEVLPQGYIYPKGERPVRDLLRKRSQLVRQRTANLLSIQNLVTRNNGESLSANRVKGLDVQQVDELLPDGDLALAVKANLSVMCSADEQTEILERTVTERVKLRPQFSFLKTVPGIGQILALTIMLETGDIRRFPSVGNFASYCRCVGSQKVSNSKKKGKGNTKNGNKYLAWAFVEAANFAIRFNSKIKSFYQRKKAKSKGVVAIKAVAHKLCRACYYIMRDRVPFNITKAFGQK

SEQ ID NO: 239057 - protein, 385 aa, unidentified
MDHAHYSLGLDVDKASFKACLKVKEDSNKSLVKATKTFSNTIQGFKELDQWIKKHKKLQDDQLKIIMEATGVYHEHLAWYFHQLNYLVHIILPLRAKRYMQSLGLKSKTDKIDAQGLADMGMQQELEQWKPCSKNLLLLRSLTRQVEMLQESRTAFRNQLESATHLANCDKMVIQNLKSLITKIEKDIKKLKARIEQFIKEDPALQSKYKLVEPIKGLGILTFATIAAETGGFELFENQKQLVSYAGYDVVENQSGKRVGKTRISKKGNTHIRRIMHMASFNMVTYKVNPFHQLYDRVYDRTKIKMKGYVAIQRKLLCMIYALWKSDTVFDPGYVTKTTSGNHDPKTLFSVGPSGPEIKVATDIAMATLDELPCNQSPEALFSVS

SEQ ID NO: 239058 - protein, 412 aa, unidentified
MDVLVERCAGLDVHRDSVMATVRVPAERRRQREQHTRGFRTTIAELEALGDWLAGFGVTRLGMEATGVYWRPVFQVLEGRFDCWLLNAQHLHNVPGRKTDVIDSAWICRLVEHGLVRPSFVPPPEIRRLRDLTRLRTAQVEERTRAIARLEKVLQDAGIKLSSVASKSYSVSARRMLEALLAGTTDAEALAELARGRLRAKIPQLREALRNRFRLEHHGVLVTSLLAHLDALDRALSDLDERIAQETEPMAELIELLSTIPGVRRRTAEVLIAECGIDTSVFPSVHHFVSWAGICPGNNQSGGKRRPSKTRHGSRWLRKALTESAKAAARSKGTYLASHHAQIRGRRGEAKAIGATRHDILVAYYHIVRDRVPFRELGPDWLARRHSPEHRARRLTRQLEALGLKVTVEAPA

SEQ ID NO: 239059 - protein, 273 aa, unidentified
MKKVRFLGLDVHAETIAVAVAEPDGEVRSLGIIPNREESVRKLVKKLGPAEQLQACYEAGPTGYILYWQLTALGVKCEVVAPSLVPVKAGDRVKTDRRDAMKLARSYRAGDLTAVWVPNQEHEALRDLVRAREAAKQDQLRARHRLSKFLLRHGRRAPAGIKVWTQKHEEWIKKQVHFEQPAQEYTLWDYLHEVEHMDDRILRLERAIAEAVKLAPPRMQEVIQSLQALRGIAQISAVTVVAELGEISRFEGARQLMGYSGAVSSEHTSGKRM

SEQ ID NO: 239060 - protein, 349 aa, unidentified
MSPKLNSGITVIGIDIGKNSFHVVGLDRRGAIVLRQKWSRGQVETRFANLSPCLIGMEACVGAHHLSRKLTLLGHNARLMPAKYVRPYSRGQKNDFRDAEAIAEAVQRPTMKFVATKTAEQLDLQALHRVRERLVSQRTGIINQIRAFLLERGVAVRQGLRFLRAELPRILATPCDRLSPRMVRVLEELACDWRRLDERIEGLSSEIEVLARRDAGCERLMSVPGIGPIISSAMVAAIGTGDAFTKGRDFAAWLGLVPKQISTGDRTILGKISKRGNRYLRALFVQAAWVVLIKPKSWDRHGLKPWLEAAKKRLHHNVLAIALANKLARIAWSVLARGRAFEASKIQVA

SEQ ID NO: 239061 - protein, 298 aa, unidentified
MADYREAFVGIDVAKLRNAIAVADAGREGEVRFFGEVDASEESMRRVIRRIATKFDRVYFCYEAGPTGYGLYRLIRSLGHECTVVAPSLIPRKPGDRVKTNRRDAFALARLLRAGELTAVWVPDEGHEAMRDLVRARAAAVETLRVHRQHVSAFMLKHGRIYPRKKGWTMRYLRWLQEQPFDHPAHQIALQEMVEAVCVSKERVDRLEGVIEEFVPAWSLAPIVRALQTLRGVDLIVAVTFATEVGDVQRFESPRQLMGYLGLVPGERSTGETVRRGGITKAGNGRVRHMPGRERMDL

SEQ ID NO: 239062 - protein, 427 aa, unidentified
MEEITEEAAELVARVAALDIGKASLVACVRVPHETSAGRRRQEVRTFATTTRSLLELQDWLVCQGVSLCVMEATSTYWKPPFYLLEDVTQCWVVNARDVKNVPGRPKTDRLDAVWLAKLAERGMLRASFVPPPWQRQLRDLCRYRRTLIQERTREKQRVEKLLEDTQIKLSVVISDIFGKSGRDMLEALIAGQRDPHVLARMARGTMRKKISVLQEALAGHFRDHHGYLLRMMLDRVDGLTAQIEALTGRIEEVIAPFARQVAQLDEITGVGPTGAQELIAEIGVDMTRFPTAGHLVSWAKYAPKARQSAGRSKPGTTGKGNPWLGATLGEAAISAARTKTFLGSRYHRLARRRGKQRALVAVGNSILTIAWHLLSNPDAHFTDLGPDWHDRLAPQRRKRQLIAELERLSGKRCYSNRRPPPDNPTH

SEQ ID NO: 239063 - protein, 375 aa, unidentified
MTSIADSAQLGQRRARTGPDLVVYGGVDTHKELHVAAVVDAGETVLGARAFSTTRAGYRALVAWMGEYGLVARIGVEGTGSYGAGLTRHLARAGLTVLEVDRPDRSDRRRKGKDDDLDAINAARAALHNRRTSIPKSKDGAVEALRVLRTARAQAVRERRNALQLLRMTIVAAPDEVRDQVRNLTRMQLIRVVAAWRPDVSNVADPVSAYRVGLKSMARRYLELSDEITGLDDLINPLVEALAPQLLARLGIGIEIAGQMLVTAGDNPARMKSEAGFAMLCGVAPLPASSGMTQRHRLNRGGDRQANRALHLAVVSRIRMDAKTQAYVERKTAEGHSKLEIIRCLKRYLAREIYYLLNPGQQHIARRPYHRRPAA

SEQ ID NO: 239064 - protein, 422 aa, unidentified
MNQEPEKVDYAAWIGVDWATDQHAVCLQAADSSRVEHCSLEQKPEALRAWFMNLLGRFGGRKVAVAIEQSKGALINFLLGLDFVHVFRIHPKSLKNYREALYPSGAKDDPTDAQLILQFARLHQGKIHHWVPDDVESRLLLRLVEGRRKTVNKRVRVTNELTQLLKEYFPQALDWAGERDSVMACDFLVKWPTLQRLQKSKPEAVRQFYRDHGCRSRERIDSRIEEIRSACPLTTDKAVVESSVLMVKTIVPQLRALIEAIARFDEAIEEAYRKQPDSEIFSSFPGAGPALGPRLQAAMGTDRSRFDDAEEVAEYSGIAPVTERSGKTEFVHRRLACSRFIKQSFQEFAGQSIVWCVWARAFYDSKKAAGMGHHAAVRALAYKWIRIVFRCWKDHVRYDETIYMQSLKRRQPSWLTFLPDAA

SEQ ID NO: 239065 - protein, 342 aa, unidentified
MKFYCGIDLHATNSFLCVIDDKDKILLKEKLKNDLGTILYALESFSPRPSVVVEATINWYWLVDGLQEAGFDVKLAHSMALYMITGAKVKTDRRDAFSLAKLLRLDAIPEAYIYPKAKRPIRDLLRKRKQVVILRANAYGALRRVLLQYGIYGYSQSAIKSLTEAQLDQHLEHFATQAGCHLEVQRIRFYSDQIKTLENIILSSVSDDQRFELLQTIPGVGKILALTILYESGDIDRFQSAKHFCSYARVVPGVAQSSGVSKRGRGSKQGNPHLKWAFCQAAALSVRYNTGIRKFRQRHLARRRSKAKKLVTLCIVAHKLAIASYNVLKNRVPFKQELMFGS

SEQ ID NO: 239066 - protein, 368 aa, unidentified
MSKTITSFVGLDVHKDSTAIGEAEAGRETPRFIGTVGPDLGQLLKALKSLGKPETMLVVYEAGPCGYGLARQLRSRGYACEVVAAGKIARRPRERIKTDRRDALTLARLARSGDLVQVMVPDERDEAMRDLSRGREDAVKARLKARQQLKALLLRHGHRYGGKSSWTLAHERYLAEVSFAHPAQDIAFVEYRQAVREGHERVERLTEALRTQTEHWRMQPLVAALSSLRGIDFVAAVTLAAEIGDFSRFAHPSELMGFLGLVPSEYSTGDHRRQGDITKTGNSHARRVLVEAAWNYRFPARISRGLQIRQEGQPKAVREIAWRAQLRLAHRYRRLSSRKLHPNKICVAIARELAGFLWDIARQAHMPA

SEQ ID NO: 239067 - protein, 357 aa, unidentified
MTQRVVGGVDTHGLTHHAAVIDAVLGRQLGDREFPATAAGYRALAAWLAGFGEVAAVGMEGTGAYGAGLARHLAEVGFAVVEVDRPDRRLRRAKGKTDPGDAYAAAAAVASGRATGSPKSRTGAVEAIRMLRVARSSAVKARTQAMNQIRMLLVTVPAPLREQVDGLPKAALIRTLARLRPAADLQMPLNAAKFSLRGLARRYQLLDVEIDGLDAQIAPLVAATAPVLLELFGVGPEVAGQLLITAGDNPERMRSQAAFARLAGAAPLPASSGRTQRHRLSRGGDRQANHALHRIALVRMRYHEPTRAYVARRTSEGLSKMEILRCLKRFIAREVFRALMTLPLGQTPHTEPQTDAA

SEQ ID NO: 239068 - protein, 355 aa, unidentified
MSRDIKYIGIDVHKEATVIAVLNANGNLVMESIVETKAGSLLQFIHGLRGELHVTWEEGTWAAWLYDLLKPQVQVLVCDPRRNALLKEGNKSDKVDARKLADLLRTGMLRPVYHGENGLRTLRELGRSYQTISQDLNRVMNRLKALYRGWGIACAGTQVYAPRYREEWLQKIEHAGVRRRAELLYQQLDGLQALRRTLRPELLAESRKHKATKLLRQIPCIGPIRAARLLALMQTPHRFRSKRQLWTYCGLGIETRDSAQYRFVRGQLQRAKKPQQIRGLNRNHNPEMKEIFKGAATRASCGVGPLRDFYVALLDKGMKAEMARLTLARKIAAIALTLWKKEERFDAEQLKTQAA

SEQ ID NO: 239069 - protein, 316 aa, unidentified
MDYFAGLDNSMDETHVCVLDRDGAVVYEGTSASMAEAIAGELAKAPSCRRIVFETGRMAPILFHGLSQLGLPVVCVESRQAYQALKSLATHKTDRNDARGLAHLARTGFFRPVHVKSLRAHAVRSLIIRARSWWGQRVTLENQIRGLAVVFGIRLPRALTAAFVNQALKASEGIAGLSAAMRGLIAARTAVRTAVAAIDADMRRVTRASAACRRLMTIPGVGQLTALAFVAAIDDPSCIRRSRDIGAYLGLVPRRYQSGEVDYVGGISKCRDRRVRTLLYEAANVMLTRYKGQLKLKDWAFAIAKRSTMRKARIAP

SEQ ID NO: 239070 - protein, 339 aa, unidentified
MVQATTIGLDIAKQVFQVHGADRAGKAVLRRKLKRSEAARFFSEQPPCLVGIEASGSAHYWSRVISGFGHTVRLMAPQFVKPYVKSQKNDANDAEAIAEAVTRPNMRYVPQKTVEQQDLQCLHRVRSRLVACRTQLINQIRGLLAEYGIVLPQHTAQVRRGLPSVLEDAENQLTGAGRELSQSLYEELTELDEKISAADERIQIAFQNTPNCQRIAAVEGVGPLIATAVVAAISNGHAFEKGRQFCAWLGLVPRQHSSGGKSRLLGISKRGDPYPRTLLIHGARSVVYRAKARTDKRSLWIADKQQRLGATKACVAVANKNARVIWTLIAREQEYRRAA

SEQ ID NO: 239071 - protein, 370 aa, unidentified
MSKVMKVKLVAEYQSLGIDVAKDKIDCCFSEMLSDRTIKVKCRKVLTNNQNGFSEIIRLLNKWFSRDMPVSLVMEATGVYYEKLAYYFANYNRVKVSVVLPNKVKSYANSLGARTKTDKVDAQILAQMGLERNLEVWEAPQAIYRQLRNLGRERLGLVEEKTMVNNQLHAEQHSAEKVERSIKRYGVRIDLLETQIKEVEADMKELVASSDELKEEVNRLTSIKGVGFLTAAVVIGETGGFHLIKSRAQLTAYAGLDVVEFQSGSSVKKAARISKKGNRYLRKAVYFPAVCQIRQKNEFYNIYERVRNKSGQKKKGLVAASRKILCLMYTLHKNKTNYNPKYQEEKSAALNLSAKIKVGSTDVSETAYTA

SEQ ID NO: 239072 - protein, 449 aa, unidentified
MPKKRTKVVSLPMIEPKAAGIDVGATEIFVAVPADRDPEPVRCFPTFTVDLERLADWLQQCRIRTVAMESTGVYWIPLFQILEKRKIDVRLVNAHHVKNVPGRKTDVEDCQWIQHLHSVGLLRGSFRPDEEICAIRSLWRHRDNLIQLATLHLQHMQKALDQMNLQIHHVISDLAGTTGLAIVDAILAGERDPHKLAQLRNRHIRASTETIMKSLVGDYREEHLFTLRQSLKSYRHYQELIQEVDLQVKQMVQRLPSKIAAGEKPPKGDKIRRTPWRNEPPQLRNDLYRAFGVDLTEVPGINSLTAQMLLTEIGPNLSRFPTAAAFCSWLRLCPDPKISGGQVLSSRTRPTKNRAALALRMATQGLHRSNTFLGDYFRRMKARMGAHKAMTATAHKLARIVYHMVTTQQEYDTTVFQQQEQRRRLHKSARLHAQARELGFQLVPINVVP

SEQ ID NO: 239073 - protein, 480 aa, unidentified
MLLSLNIFMSGRACPVFFKKKNMGKVIKNKKKRASAHPANTGKKLEHFGLINARSAGIDIGSMLMVVSYTDLQGIIHLQEFDSFTQSLYQLAELLQQSGVEKVAMEATGDYWKSLYCILEGYGMEITLVNPSHYRNVAAQKTDINDAQWLHQLLAHGLLRNSHIAPELNRELRGYLHERDIYKKQKGDTLNRIQKTLTLMNIKTQHLISDIEGIAGMKLLRSVALGINDPEQLLAIIYSRQLKASPEDLLSSLQGDYHQQYINILCQTLKTYDFLTDQMLTYEKYIEGTLKKMLACNPTPIARKTGLVRKNQYRINLKAYLQAIFGTDLTAVEGLDEIGLLTILAVTGTNMRKWPTAGHFISWLNLSPRPKISGGKIIGYEKRITNNPATQAFRLAANSLWQSKGPLGQQYRRLAATKGSAKAIKAVARKIAVIFYNLVLNKIVYDPSKIQPDIEKQKANKIARLQKEAYKLGFTIQKAA

SEQ ID NO: 239074 - protein, 391 aa, unidentified
MKSVAVVPLDIHKKFTVAAPMTREGKVIAKFKVAHKKKESMEEFFRQFEEGTDIVMEATFNWPWIADLAKECGMSPHLAHPPRLRELAKGMAKSDRKDAIFHGRLWLAGGDVFPESYLAPREVREKRLLFRTRLLLVSMRTKVKNNIHGQLFRLGILFEGENAVSDLFSVKGRQKLSALELPDRERYVLEKKLAVIDNLNQSIQEIETQIRKDLEQDARGEILDSIPGIGEILAYTILGEIGDIKRFVNGRALAAYAGLLPLSNESAEKDFGKKTSKRSNQFLRLAAIEAVTGAIQTSGRMKSLHARVKAKNKKKAGKARVAVARETIELVHLLLTKNEKYREERPTRPGSKINRKEEVVKKFIARVAVDPNRASPVWLYADARKGSQADG

SEQ ID NO: 239075 - protein, 347 aa, unidentified
MLALEPDPDVVIGVDTHKHTHTAAAVSSTGAVLEHLTVTADPKGYRRLIAFGQRHEAHLWAIEGTGSFGAGLTTALLACRERVVEVDRPQRPARRGGVKSDDIDAVRAARQAIAGVGLGEPRCRGEREAIRVLLTTRAQAIEFRTRAISALHALVTSAPDSLRSRLRGLPLGELLRTCAALRGSSRQTAEEFATVTAMRSTARRALACEQEAAELEAQLDTLVRRVAPELLDQMGIGPVVAGQVIVSWSHRGRVRSEAAFAKLGGVAPIEASSGLVVRHRLNRSGDRQLNRALHTIVMVRMRQDPDTKMYVQRRLGEGKSTREIKRCLKRYVARQLFRQLEAMSSTT

SEQ ID NO: 239076 - protein, 343 aa, unidentified
MYYIGLDVHKKTISYCVKDAAGQVHREGKIGATRLDLDSWIKTLPQPRMIAMEATIFTGWIYDFLLPHAEKVKVAHPLMLRAIAAAKKKNDRIDARKISDLLRCDLLPECHMASTEIRDRRRTLRYRGLLLRQTVQMKNRVSGLLMESGVTYDKQRLHKMGYFTELFSTNDEISDSIRPLLRLGREHILRGQRLDRALISSLERDPLLSERLRRLRTIPGVGPITALTWALEIGDYTRFRSVKEAISYCGLCSAEKKSADKVMRMPISKQRNKHIQHVLVEAAKMAPRYSHELALVRDKEMQRGNKNRATLAVARKLVAYLLAVDRRKQDFVPAEALAGEAVA

SEQ ID NO: 239077 - protein, 391 aa, unidentified
MIFVGIDVAKDKHDCFITNSDGEVLFQSFTIANNLFGFDDLYQKVVCVMENVSKVKVGLEATGHYSYNLLGYLFDKGFPTYIINPLHTNLYRKSLSLRQTKTDKVDARTIASMLMSDGNLKSYSDTSYHNEELKSLTRYRFDKGKERSALKVSISRLVCILFPELEKLVPVLHCSSVYSMLYEFPGAKQVAAAHLTRLSNLLDKASKGHYKKDTAITFREAARNSIGSNMPVKSLELKHTIRLIRELDSEIDEIENEIKVIMDRISSPILSIPGISYRMGAMIIAEIGDFTRFDSPDKILAYAGLSPSTYQSGQMDNSHARMEKRGSKYLRYALFNATIYVCTWDPTFKTYLAKKRSEGKHYYVAVSHAAKKLVRVIYQLEKSRQPYQKQF

SEQ ID NO: 239078 - protein, 344 aa, unidentified
MTHYVALDVSLRSVAICIIDAEGTIKRETSVVSDVEDIVHVLGRFDGEITSVGLEAGVLTQHLTYGLQAAGYDVVCMESRQVHAALSAMRNKTDKNDARGIAQILRSGWYSRVHVKSLESHYVRALLSSRRAVLQKCVDLENEVRGLLKIFGFKLPPRVPHGQFDGVIRERIVQETELQHALIPLLDARAVLYTTYRELDRRVKRRALNDEICQRLMTVPGVGPITALTYKAAVDDPRRFKRSRTVAAHFGLTPRRFQSGEVDNLGHISKAGDVEVRCALYIAANVLMTRSAGFSTLKAWGMHLMKTKGRRVAVIAVARKLAVILHRMWIDGEQFHWGTEGANT

SEQ ID NO: 239079 - protein, 375 aa, unidentified
MKKRITMVDAKKHRDTKKAKKRKKNKQPGITTGIDLGDHTSAYHQLDGDCNFVESGSVRTTAEGFKKQFAGEPRMRIVMEAGTHSAWVAELLTQFGHEVIVANPRAIPLISNSTRKNDDADAELLARLGRVDPKLLKPIKHRGAEAREHMLLIRARAAIVEARTKLVNAVRGLVKNMGERIPSFDADQMTIEKLAALPESMRHPLTALAACCESLTEQIKECDKHIEQIAAQHYPEVRYLTQISGVGTLIALTFILTIDDPNRFAKSRDVGCYIGLRPKQRESGESQPQLGISKEGDAYLRKMLVQAAHCVMSRRAPETDLKRWGAKLASRGGGNGKKRALVAVARKLGILMHRLWVDQAVYEPNRHNQPIAKAA

SEQ ID NO: 239080 - protein, 342 aa, unidentified
MNKVTTVAVDLGKKTFQIGFADQYGREAGKQERLTSREAFSEFVANADPRWTVLMEVGWGAQAWARAFKARGMRVRLLPAQLVMAHRAGAKNDRNDVLAILRAGQDQQIHEVPVKSAEEAAIQSEHRVRRGWVRRRTAVANQARGLLADQGMVFAKGDAAFVDGVERTIEDAGLPIPDGLRQMLQELLIEWRQQGARIHSADLRLERLVREHPVARMLDELPGVGPIGATALACKMVDLERFANARHFAASFGIVPEQHSSSDRVRLGHMSKRGDSYIRATLISGARAVFRHLPARKDNSKETQRLRRWYAKHGCTGASIRLANRNLRIAFIKVRNSMRDSA

SEQ ID NO: 239081 - protein, 349 aa, unidentified
MTHVGIDLHKLGSQICVIDEAGEVLAETRVMTRRDALEQALAPWPGSQVLVEACNESEWVARHLEGCGYAVVVADPNYTPMYGHRHTGYKTDRRDARALASASAQGLYRRAHRTSEARRVVRAELVTRDALVRTRSRYISVIRSRLRAEGWRLRSGDAASFVARVGELALEPQLLAHLQPLLQVMALVNQAIATADRALERRAQADPVVQRLRSLPQVGPITALAFVAALDDVRRFRNAHQVESYLGLVPRERSSGEHQVRGRITKTGDKRVRWLLVECAWGILRSHQVSLETLQQWTARVGTRRGRTVAAVALARRLAGILYAMWRDDVPYDPKKLQHPHGLAQGARA

SEQ ID NO: 239082 - protein, 448 aa, unidentified
MSKSKTKPGKAKRISQLPVINPMVAGIDVSDTEMMVAFPINSEQLEVRPFGCFTRDLYSIATCLKEYGITSVAMESTGVYWVPLFLLLQEKGFEVYLVNAKHTKNVTGRKDDESDAEWIQKLHSCGLLRASFQPDNITRTLRDMVRHRTNLVRTSATYLNRMQKALELMNIKLHTVISDIDGKTGTLIIEAILAGERNPEILADMRDTRIKASREDIIKSLEGYWTREHLFVLRQCYDLYRYHAQKIKQVDVEIEQVLKEQIASGNEGVIPDIPPVKRKVSNKNKVSFNLTSYQKAILGVDVTEVCGISELSALTIMSEAGTDMSKWKTAHHFTSWLGLAPNTKISGGQVISSKIAKKKHHAGQAFRVAANGLYNSKSPLGDYYRRIRAKAGAPKAVVATARKLAIIYYMMVANQEAFNPTALLDFQQKYKEKKINQLRKKIAKLEAA

SEQ ID NO: 239083 - protein, 395 aa, unidentified
MHVTQEGPDILSRYCPVQAFGWQNRPHQRRTREVAMTLGQEVVARSVVGGVDTHKDLHVAAVVDEQDRVVGSQCFAATRHGYKQMLAWMRSFGQLRRIGVEATGTYGAGLLRYMQSAGVEVLEVTTPDKHDRRKRGKNDDLDAQNAAHAAFTGRRAVTPKSRDGMIESLRVLKACRKTAVAARRVALQMIQNTIVSAPDELRETLRKMTRMQLVRTLAAWRPDLSDYRNLVSAYRITLKSLGRRYLELHDEIADLDTMIIGIIDELAPALVARNSIGHGCAGQLLLTAGDNSERLRSEASFAALCGVSPVPASSGKIIRHRLNRGGDRAANSALHIIAIGRLRTDPRTQAYMAKRIAEGHSKLEVIRCLKRYIAREVFALISHRRREINQIRLSA

SEQ ID NO: 239084 - protein, 369 aa, unidentified
MDYQSVAYIGFDTSKTKHAVAVAEGGREGEVRYLGEIEAAPAAVERLLRKLARQYKSLHVCYEAGPTGYGLYRHIRALGQVCDVIAPSLVPIRPGDRVKTNRRDAVTLARLLRAGELTAVWVPDEVHEAVRDLVRAREAAARDLRHKRQQVLSFLLRHGRIFTGHRHWSRAHLRWLAGQAFRHPAQQVVFQDQVDAVADAQARLERLDRHLAELVPTWSMVPVVAACQAMRGVSFLVAVTFVAEIGDVRRFESPRQLMAFLGLVPSERSTGDTVRRGGLTLAGNRRVRRALVEGAWSYRHPARVTETIRVRLEGLPKAVREIAWKAQVRLSARYRRLVAAGKRAPVAVAAIAREMAAFLWAIGRVVEPA

SEQ ID NO: 239085 - protein, 414 aa, unidentified
MEVVYPRCTGLDVHKKTVVAAIIVTEPNGELRKETQTFGTMTADLLALSDWLTTHGVTQVAMESTGEYWKPVFNILETSFEVWLVNAQHIKAVPGRKTDVNDAEWIAELLRHGLLRASFVPPLGQRELRDLTRHRSNFVRERSNLINRVHKALESANIKLASVATDVMGVSGRAMLAALIEGHATPSEMAELSKGRMRDKRDQLAKALEGRVKPHHRFVLTELLCQIDSLDESITRFDKQIEDYCAPFEEAVALLDTIPGVARQTAEIIVSEIGTDMSRFPSADHLAAWAGVAPGNNESAGKRRSGKTRKGNRPLCAALNQAANAASHTKATYLSAQYHRLAGRRGKKKAIVAVEHSILVIAYHVINRQEPYRELGGDYFDRRRPEATARHLVKRLEQLGYEVTIQQPSASVAA

SEQ ID NO: 239086 - protein, 342 aa, unidentified
MSEVYAGKQIVGMDLHRRRSVLVRMTETGERLETVRISNDPEYLRAVMARAGEAPEVVLEAAYGWYWAADALAELGATVHLAHPLGVKMFSYRRVKNDERDAADLADLLRMGRGPEAWIAPPATRELRELVRHRAKLVALRSNLKCQVHAVLAACGVPVVMSDLFGAGGQQLLTRVVLPPAFRARVNSARRLIEALDFEIELFTNLVGSRLRGHGGYTAIQAISGVGPILAAVFVAEIGDVHRFRRAAQLASWAGLTPKHHESDTTVHRGRITKQGCRLVRWAAVEAIQRTDKHSHLGRVRDQVGTRRGTNIGKVAAARELIELVFYGLRDGHIRCLNRRSA

SEQ ID NO: 239087 - protein, 401 aa, unidentified
MSTMRDNATRVKRFRELKATLRTNRQRLLVGLDVAQAEHVVQMRLAHTRIVGPPLTIPNSTRGVTQLWTRIQQAQRATGCREVVCGLEPTGTYHEAVATFLEGQGADVVLISSSVAYWNRRTQDGTWDKHDRKDAANCAELVEQGKILFYSRPDGPLAELRRLVKCLRRARAELAACKARWRTTLRPALGPMGEPLPNRLRAELSAVLQAWEPAALGRPARAKGRLPLGLATACADLGAQVTAVQARIAALEAACMPVAERLPAYPLLRTIPGVGPTVGAILLAEIGDIAWFTQFSQLRKLAGLDIVRVQSGQFAGQARISKCGRGLLRWALYHAAMGLARTATGRARLAALKAKRQGDRYAGFKAIVELAAKVLRIVWGVWRSGTPYDPTRTGGVCRQPR

SEQ ID NO: 239088 - protein, 401 aa, unidentified
MKRLSGGIDVGSDNHHIIIMDDEEQILYDQKIAHKFSEFYKAVREFREIEKREGGIISFAIEGKNGYGAPFDRILIESGFTLYNVDNLKLKQFRNVFGAEWRNDKRDAKMLAKMLKLRDYLDAENEKAFIAVEKATKINEKLKILSRHQQTLIDEKIRLQNRLRKRLLEVCPEILEIGDTDSKKMLRLLVRYPDFSRYKGLTMGALLKIKMIGKKQASLMLESLRNTKYVEELADIYKTIISSHSRRILELKEEIEMLDKKLEKLGEKSSEVKRLKSISGVGTKLSSRLVGEIGDINRFKNERQLAIYCGVACIDDESGKHKRTRVVYKANKICKATMIEIAGCTIRYVSESATYYAKKRTEGKEHNHALRCLARQLIKVIFKMLKEDRDYILKEEMEKAA

SEQ ID NO: 239089 - protein, 355 aa, unidentified
MRYLGIDVHSKASVWCLLDAQGEPIEQGSTETTMPALRALVARLGKADELLVGQEAGTMAYLVHDALAGAGVRLLTFNPVHLRMIAASRKKTDRRDAYWIARALQTGMMPHPVYIPVGEVRELRGLLHRREVIQRDYLRWRNRAKAQMRASGVLVGPGIRCLKVAMDTHLEQCNEGVDGLLLDGIGLCERNMELLREELDHMDAVLKRRTEGIDAIRRLTTIPGVGDVVAMAIYAHVGDVTRFPNAKSLAAYAGLVPSVRQSGSSNVHGRITKEGSPMLRRILVQAAHVVAQRCQGDEAKPFKDTFDRIRGTRGRKKIATVALARHILRIAYYVLRDGTVYDAARLGVERLVAAA

SEQ ID NO: 239090 - protein, 345 aa, unidentified
MVGSSRPVTGGVDTHLELNVAAVLDRIGGLLGTESFPTTTEGNRQLLGWMAGFGRVVRVGVEGTGSYGAPLARFLAEAGIEVLEVSRPNRQERRRQGKSDVIDAVEAARAAQGQRQLGAAKTKDGNVEAIRALMVAKRSARDTKIATLNQIRHLGFTAPEEIRQALQGVSRRLLAKRAAALRPNPQADPVSYATKIALRALGRRVLELDAERQEIDQLLAKLLAQTAPGLLAIYGVGKDSAARLLVAAGDNPDRLKSEAAWARLCGVSPLEASSGKITRHRLNPGGNRQANAALWHIVITRMSGDPRTQAYVERRTKEGRTAKEIIRVLKRYVARELYPYIVAVV

SEQ ID NO: 239091 - protein, 368 aa, unidentified
MFCPPFRLVVLPNYRKAIIIMAPDRQVVIGVDTHADTHTAAAIDELGRILDVIEIATTAAGYRRLLTWARRLGEFERAGIEGTGSYGAGLARFLYAHAIEVIEVNRPNRQHRRRHGKSDPADAEAAARAVLSGDATAVAKRTDGGVEAVRVLHLARRSAVKAKTQASNQIRDLVLTAPEPVRRELRSLSTIRRVRHAARWRPSPPNDPTSATRAAIRSLAQRWLALHDEAHRLELQLRQLLDELVPTLLSELGVGTDVAAKLVIAAGENPERLRTEGSFAALCGTSPVDASSGKQQRHRLNQGGNRQANNALHVVVLIRASRCPETRAYIARRRAQGKTNREIWRCLKRSLARRFHHHLTHDLAPALT

SEQ ID NO: 239092 - protein, 344 aa, unidentified
MQSMYYIGLDVHKRTISYCVKDGSGTIHDEGTIPATRFDLDRWMKTLPQPWTAAMEATVFTGWIYDHLQPHAAALKVAHPLMLRAIAAAKKKNDRIDANKICDCLRCDFLPECYMASTAIRERRRTLRYRNLLVRQMVQMKNKISGLLMEAGVSYNKQKLHKAGYFRELLATNPDIDEGLCSLLRLCRETVVRLGKTESALVRSLERDSLLIDRVERLMSIPAVGPITALTWALEIGDLQRFPSIKKAISYCGLCGAEKSSANTVQRTPLSKQRNKHLQTTLIEAAKMAPRNSPELAMLYDKEKQKGNANRATLAVARKLVAYLMAVDRGQRNFQVVQTNCIAA

SEQ ID NO: 239093 - protein, 399 aa, unidentified
MSASRRVVIGADTHLDTNHLAVLIDTGKPLADAEFPTSPAGYDDAVRWAQSFGTICIAGVEGTSSYGAGLTRVMQAAGIEVAEVSRPDRAARRRRGKSDPLDAYAAARAALAGDRLAVPKDEHTTALRALLSARRSAVKAHTAATNQLHALLVTAPAELRERYRRHHITALVAALAQCRPATQGDPTTAAVLTAAKALAQRVKFLEQQRQDLTAQLDGLVGQINPALRAAYGVGPHTAAQLLVTAGTNPHRLRSEASFAALCGAAPVPASSGTITRHRLSRGGDRAANNALYRIALVRMSSHSQTRDYVERQVTKGRTKKEILRLLKRAIAREVFRLLTRPGPVDDYRDLRAARQAKNLTLAAVAQHFGVPIITISRLERGHQRNDTLANHYRQWLTAA

SEQ ID NO: 239094 - protein, 348 aa, unidentified
MRCYTNPHRFYAGVDLHARSLFTHVLDHQGKTVFEKDLPAQPEVFLDAVNPFRDGLVVGCECMFAWYWLADLCEDHQIPFVLGHALYMRMIHGGKAKTDRIDAAKLASMLRGGLFPMAYVYPRAKRPTRDLLRRRSFFVRQRAQLITHIQNSNTQCNLPPLSKKLTYAANRSPAIAERFAHPSTRLSITADLGLIDSYDQQIAELERHLVKNAKVDDPVTFGLLRSVPGIGPILGLILLYEIDQVGRFPEAGNFLSYSRLVRCAHVSAGKVKGSGGKKIGNAHLKWAFSEAACLMLRALPAAKAWMQRQEKKRGKRKALSILEAKLGRAVYHLWRKQVPFDVKRFLAP

SEQ ID NO: 239095 - protein, 337 aa, unidentified
MKVSLIGIDLAKNIFQVCGVNQAGKAQVNRAVRRKDLSRFIAQYPDAEIAMEACAGSNHWGRTFMDAGHAVKLIPPNHVKPFVKGNKTDRNDAFAITEAARRPHLQTLLPRSLEQTDMAMLHRIRDRRISARNALSNQLRGLLSEYGIVLPVGYSALRQGLNDVLEEAENALTLMARQLIADVQAEWQRLDDDIRRLDRQLSSHVAQHQDAQRLLSIKGIGEKTASAIVAYAGKGEAYRNGRHFAANLGLVPKEHSSGGKQQLGGITKRGNAPLRRMLVQGAWSVLRHAEQNTDRLSRWACSVCERRGKHKAVVAIANKLARIAWSVLYHQSTYQPE

SEQ ID NO: 239096 - protein, 332 aa, unidentified
MYYIGMDLHKQDLVMAVEDEHGPVGRVRRIACRDTGAIRAAVGRWRPFRAVVEASASYRWLWELLVPMGEVVLAHPLRLRAITAARAKTDKLDAALLARLLRANLIPTAYVPPAPYQRLRDLTRTRARLSCNATLAKNQMHALLARANVHPPLRTLFGPRGRRWLAGLDLGLSGNLVRDELLRRLEHYGREIATLDAHLEAVASEFPQAEALEVLHGIGRYSALLVVAEIGEPERFRNARQVGAYAGLTARVHQSGKTEHRGSVSKQGSRWLRWILVQAAIKLVRRDERLANFYQRVRRRAGRNVARVAVARKLAGICWVRLRRWQREQAAA

SEQ ID NO: 239097 - protein, 402 aa, unidentified
MNEISVWIGLDVGKSEHHATVVDQAGAVLFDEPVRNDERMLGRLLERAGDGAALVIDQPGSIGSLAVTVAHQTGVPVAYVPGLVMRRASELYPGEAKTDRRDSFVIADTARLHQARVHWLTESDELLEELRILAGHDDDLAHDRTRTANRLRDLLLQASPAAERVLGPRLDHQAVRVLLERYPTPTALRAAGRKRVLRLIQPRAPRMAGRLVDDLFAALETQTVTVPAERTIGRVIADLARDLTRIQTSRDQLAREIEETFRRHPLAPVLLSIPGIGARTGARILTEIGDIQRFPTPGHLAAYAGLAPVTRRSGSSINGEHRSRRGNHRLKNALWLSAFCALHHPPARAYYARKRAHGKKHNAAVLCLARRRCDLIHKMLTTGEAYRPPTAGKTGTPAPTAP

SEQ ID NO: 239098 - protein, 389 aa, unidentified
MVPATAQSYKRGGQLDEGYQKFIGLDVSKEKIAVGIADSGRQPARYWGVIENSPEALRKLMGRLGDSGELLVCYEAGPTGYVIRRQLERMGVNCVVVAPGLIPTAPGDQVKTDRRDALRLAQLLRAGELTPVWVPAEDDEALRDLVRAREDAKEDQLRARHRLSKFLLRHGCVPPAGIRNWSSGFRAWLDKLRFERGAADAVFREYLHALDEIVGRIRRLDAVIHEQAEASTRAPVIKALQALRGVAEVTAVTLVAEVGEFSRFQSPRQLMAYAGLVPREYSSGSRRWPGGITKTGNAHLRRVVVEAAWSYRYPPAVKGAIRRRVEGQDPSVQAVAWKAQERLHRKLRRLVARGKRRSIAVTAVGRELLGFAWAIACLAEGSLRQAQAA

SEQ ID NO: 239099 - protein, 392 aa, unidentified
MVVSVGIDVSKDKHDCFILSSEGEVLVNVFTIPNTMDGFNCLLQRIQDCTTPQDKMKVGLEATGHYSYNLLGFLLDNGLPTYVLNPLRTNLYRKSLSLRKTKTDRVDARTIASMLLSDAGLKPYTDTAYHNEELKSLTRYRFDKVKERAKLKSSVSRLVCILFPELEKLVPSLHIASVYALLAEFPGAKQIAAAHLTRLKTLLKTASKGHYKRDMALEIRDAARNSIGARIPAKSLELQHTIRLIRELDAEIHEIETEIENIMDEIHSPITTIPGIGYRMGAMILAEAGDLSRFDSPDKLLAYAGMSPSTYQSGQLKNCYPHMEKRGSRYLRYALYNATKYVCLWDPTFAAYLAKKRAEGKHYNVALSHAAKKLVRLIFAMEKSKQPYCSAA

SEQ ID NO: 239100 - protein, 360 aa, unidentified
MKAKETRYVGIDLGKRTYEVAIVEKGGVKMSNGKTCVVGRQLLYKKLRANDKVTLEAGNLAFIVAKEIEASVGCRVYVLNPSHLPLIYGSMKKTDKEDSLKLAHIVEDFPEERLPLVPVPSDREMERRKLLACYRRAQQSRNREINRLHGLFLAQGITTMTKEDLSTGDSRKEAVLVLTGIEKEEAEYLVECMELHERQIESLKSRIKKESAGDEVIQRLQSVPGVGPMVAFAFVSHVAAERFENASQVSNYLGLVPRVYISGETVRYGRITKRGNGYLRALLVQAAWALTRTKQGGKLKERFEYMTGEKSISKKKAIVAIARRMAELLYTLMRDGSRYEARPFIKESKGKEIAWLAMSA

SEQ ID NO: 239101 - protein, 355 aa, unidentified
MSSEKYIGLDVHQATISVAIVDSQGKTVMESILETKGSTLLEFFAGLRGSLFVTFEEGTWAAWLYDLLKPHVTDVLVCNPRKIPLLKHGNKSDKIDARKLAERLRLHDLEPVYHGENGIRMLRELARSYLTVVKDLSRVMNRLKALYRSWAIPCAGRDVYYTRHRSQWLDKIREAGTRRRAEQLYQQLDVLQHLRQQARRELLLESRKHAITAKLRQIPSMGPIRAALAVALIQTPHRFRSKRQLWTYSGLGLETRDSGEYQMVKGQPRRRKKQATIRGLNKDYNRDLKGLFKGAATQASLKPGPFQEFYQRSLAKGIKPTMVRLTLARKIAAITLTLWKKGENFDVKKLNSQTA

SEQ ID NO: 239102 - protein, 369 aa, unidentified
MKTNQSVSSSSSNQASLANYVNRVLKLGLDVHYRQVTVAMQEDGGRIKAAGKMSHGVFWTWVDKKLKEGWQIYSCYEAGASGYWLHRQLVEQGVKNLVVAPKAMGQGGKKQKTDKRDGAELCDSLDRYLRGQEKALSVVAVPSVEEEQKRALIRYHRQIMADRGRYEGRKKGLLCAQGIEVHGRWWQGKAWQELKTEPRLADWMKEQLDGWRSKVLSAQEHQEGLRERIEALAPAILPKGVGAYSAAVLQYEMKGFGRFKNRRQVASYTGLCPGIHLSDGRGKEGSINRCGNGAVRWILVEMVWRLMFWQPQYPPVRRLAAGLVKGKRAKKRLVVQAARRLAIDLWRLATGQTTPEKLGLVMQCNPQSK

SEQ ID NO: 239103 - protein, 415 aa, unidentified
MLNTFYVGIDVSKSNNSIFVMDSCGDKVFRKTIANSSLATSSFLNDLCKLDDASSSFFHFGLEATGKYGEHLAMFIRQSDAIDSKRKSVHVLNAKQVKRFKDSYPEIPKTDSIDAFVIADCLRFGRIGQKGTFMDDVFYALKHLTRLRFQYSHDLTREKNRYLNTLFMKFSTMAQLQASSDKLFSDTYGNTAMNLVNDFYSVDEIAYADIETLAEYLQKHSKNHFADPIALSNEIQKAARSSYQLPRTVQDSVNQVLAIQTNMIRLFEKQLKDIDKLIEKQIEVLPQKNILLSIPGIGPVYAAGIISEIGDISRFDNDAALAKYAGLSWNANQSGSFIADNTPGIQSGNRYFRYYLLEATNKIRLHEPEIGDFYSKKYAETQKTPHKRALVLTARKVVRLLYSLLKNNRLYARTI

SEQ ID NO: 239104 - protein, 341 aa, unidentified
MSDYSYFCGIDLAKNHFSLHAVDQNGKVILHKSVTRSKLLTTIANMPLMRIGVEACGGAHYWARTLNKLGHDARIMAVKYVVPYRTKGKNDLNDAVAICEAVQRPSTRFVPVKSPEQQAILSVHRMREHWVRERTALMNRMRALLSEFGLIIPVGRSSLMKQVPLMLEDAENELPHLARTVIGDAYHHLDELNQLITDTEQVFDSFAKVSANVQRVMTVRGIGPQTATAILASIGNGSQFDKSRDFSAWLGLVPKQYSTGGKPRLGRITKHGDKYLRTLLVHGARTVIANLGDKQDKLSQWCRGVLERRGMNRAIVALTAKNARIIWSLLHNQTEYENYAA

SEQ ID NO: 239105 - protein, 375 aa, unidentified
MPTNLRYLGLDVHAETIAAAIAEPDGEVRALGILPNRPEAITKLIRKLEPRHGLHACYEAGPCGYVLYWQLTQLGVHCDVVAPTLVPTKPGDRIKTDRRDAARLARCYRAGDLTPVWVPDAAHEALRDLVRAREAAKQDQLRARHRIGKLLLRRGIRPPPAAKPWTQRHRRWLDTLQLDPPALQATLDDYLHEVDHAAARVERLEGALDNAIAAAPAPLRAVITALQTLRGVRQVTAATIVSEVGTLSRFTHPRQLMGYSGTVPSEHSSGASVHRGAITKTGNAHLRRVLVEAAWAYRFPPRCGKALRTRQRGQPDTITAIAWKAQHRLNTRYRRLLGRGKPTAQVVTAVARELVGFIWAIGVATERASTAAAAA

SEQ ID NO: 239106 - protein, 412 aa, unidentified
MELQHKRCAGIDIGKKFAMVTIRVAGAGRRRTSYSTRKYLATTPAILALRDDLVAAKVSCVVMESTGQYWKPFYYGMEGAGFEQILANAHAVKAIPNEKSDVSDSRRLAELGAHGLVRPSFVPPPPIRQLRDLTRDRTAIMRQRAKLLTRVQEVLEDAGIKLGNVASDVNGVSSRKILEAMIAGERDPFTLTELARGRLRAKRGALADALTGRFTEHHAFRLTQLLEQTDRLQVTADAYTERIDQALGPYRTFRDLICTIPGVGALTADVITAETGADMSVFASPKRLASWAGVSPGSNESAGVAHQASTGHGNKHLKAALGVVAMSISHTRNTYLGNRHHRLMARRGKLKALVATEHKVLEIIWHMATTSTAYRDLGADYLDRRDPAKTTRRAINQLRSLGYEVTITPAAS

SEQ ID NO: 239107 - protein, 375 aa, unidentified
MLIIGCDYHPSVQQMAWADTETGECGEKRLMHSDGEAERFYREMKQKGVQVRVGIEATGHSRWFERLLAELGFELWVGDAAEIRAARVRKQRNDRRDAKHILKLLMEDRFPKIWRPSPENRDVRQLLLHRHRLVGMRTRVMNQLQAIAMNEGLRRKSGLWSKKGRARLESLSLAPWTSRRGQGLLELFDRLNPMIDELSKAIEQEAARRPEALLLMTHPGVGPITALAFVLIIGTPERFHCGRQIASYLGLIPCEESSADHWRLGHITKQGNALMRFLLVEAAQTVARCEPEWRQHYFHLVLRRGGAIAKVALGRKLAVRLFWMWRKGQDYQQVKKFGSDTGQLEVPNGVKSITVKVIKRPAPSIAPVRFRLVPN

SEQ ID NO: 239108 - protein, 412 aa, unidentified
MGTITNLFWRLQMISVGIDVSKEKSTVCILKPYGEIVSKPFEVYHVEQELSELATMLLRLNDEVRIIMEATGIYHLPVLSYFKERGFFVAVINPFEMKEYRCQGLRRVKTDKQDAIAISHYGIDHWYRLKEYEAQENIYTELKLLGRQYCHYMRMRVESVLELTHLLDYTMPGIKTLLQGWNEKNGKDKLGDFAEEYWHYDNITKKSEKQFIDSYLKWAKKKGYHQNQDKAIKIYALAKEGIPTVSSNTPSTKMLVQEAVRVLREVDHTLMTILTQMRSLAKSLPEYPIVRAMGGVGDVLAPKLIAEIGDVRRFHSGKALIAYAGIDAPPYQSGRLVGTERKISKRGSSNLRKIGYEVMRSLKTHKAPEDAAVYEFILKKEREGKSKRAAKIAGLNKFLRIYYARVMEVYRK

SEQ ID NO: 239109 - protein, 353 aa, unidentified
MAKMTISSVGRFVEAFLGQRFFVGIDVHKRSFSIALLRPDGMIKDWTTPADVESVTQRLTSLQIHIAAVCYEAGPTGFGLARSLRSAGINVIVAAPSRIPRPVSATNKTDSLDCIKLAELAASGLIRSIAIPDEKEEAFRALSRRRHQLTDSLRRVKQRIRSLLLALGVAEPAGIDGWSKSAVLALGEIALPAGAAETLDSHLGELQYFIIAQKQVDLQLQKLTQEQDEAKRIAAMRSVPGVGKVVATTFAAEVFNPKRFKRSEEVTAYLGLAPVIRQSGGSKGKARLRPVGQRRLRSLLIEAAWIWKQKDEWAQNFYNRILGRHGVPQKAIAALARKLAALLWRLSLPRATA

SEQ ID NO: 239110 - protein, 342 aa, unidentified
MSVSYVGVDLGSSTFHQVAINHRGARTLNRELVTSEANLVKAFSDLHGEIHVHLEAGELAPWASEIIRPLVAGVVCSHPQTNAWIARDRDKSDRIDAYKLASLLRLNEFKEVHYPREPLRRDFKALVQHYDELTQQQARWKTKLKARLRMQGIIVRGEEVFSARGRKAVLEQVKSNVVRTAIKQLYAVLDQSIASQTEAQMLMLRAAQALPEIKILRTAPGMGPIGACRFSAYVHTPQRFSSTRKLWKYCRLSVSHRSSNGKPLRRPRLDRMGCGRLKDVSRKAFAAALRSRADNGFKRAYYRALETTHDATHARLTVQRKIVSTLRAMWINQTPYCDELMR

SEQ ID NO: 239111 - protein, 383 aa, unidentified
MPSENTVHVAIELSASTWLTAVRLPGAEKSRLHRIEGGDTTGLLALLADLGQQASIKLGRVVDVACCFEAGRDGFWLHRLLTAHGVAAYVLEPTSILVNRRARRAKTDRLDAEGMLRVLAAWLGGDRGVCSMVRVPTPEQEDAKRPHRERERLVQERLRIENRIEALLFTQGIRKRPSLRSWERDMAELRTGDGRAVPPLLRAELDRLQRRLVLALELIRELEAERAAALAAAAEAAAADHAMALKITALQRIRGIGENFSAVLVREVLYRSFANRRQLASYVGIAPMPYQSGGMDRDRSISRAGNPRARTTLIQLAWLWLRYQPGSALAAWFRERVGTLQGRTRRIAIVAMARKLLIALWRYVETGVVPEGIEFRAKAVTTA

SEQ ID NO: 239112 - protein, 347 aa, unidentified
MEQYVGLDVSQDETHICVVDRDGEKLWEGHCASTPEDIGKTVKEHAPDAKKIGLESGHLSTWHWHGLTDMGLPAICIDAYHAHGVLRLQMNKTDKNDAQGIAQIMRCNWYKEVTIKSFENHESRALFRTRSNLVSMRTDVVNQIRGMLKTFGIIIKGIAGVAFETRIQEIIDEGTALAPPLQIQLEMLRMLKLKIDELDELVLDHAYACQDCRILMSIPGVGPMTASNFVLAVYDADRFEKSKSVGAYFGLTPRRRQSGDMDYNGRISKRGDRVIRHQLYEAANSILTRVKKPSSLQAWGLRIAKRSGMKKARIAVARKLAVIMHQMLQTGELFCFNPATGERAVYA

SEQ ID NO: 239113 - protein, 339 aa, unidentified
MQKAKFILGCDISNQTITCCLLEKPGTLLLHPIDFANNIDGFEACMEWLKKNDVETIDIVACMEHTGVYSEGFCYFLYDCGIKVILESGAKIKSSFKLSTHKTDEIDSIAIAEYAYRYFDRVSGWQPRNSNVEKMKSLLSGRDLLVKKRTSIKNALVAVQKKIVKDDILIESYVELIEMLTEKIETIEMEMKLLIRTNIQWQSKVHIATTIPGIGDLISYNIFVLSNGFSAKLNFKKIAAYLRICPYQYQSGSSVYKKNRCPKYGPELLRGYLHLAARSVSVHNKKFRKYYQRKMEEGKPHKVILNNISNKLIKIICAVVNSGKAYIPSYCSVNPNFLK

SEQ ID NO: 239114 - protein, 330 aa, unidentified
MAKRVFQLHWVDRETGEVCRQQMKRAQLTEFFTNREPSLVAMEACGSAHYWARKLKAAGHEVRLIATQFVRPFVKSNKTDAADAQAIWEAAQRPGMKFVAVKSEAQQSVLMLHRMREQLVKMRTMQVNQLRGLLYEFGAELPQGRQRGMACIGDELERLAGVLPGLVIATIREQLTRIEALNQDIAGIEKKLALWKKEDPVARRLMAIPGVGLLTATAAVATIGDAKTFQSARELAAFLGLVPRQSGTGGRVKLLGISKRGDVYLRTLLIHGARSVITHAKERPPWLEKLLARRPLNVAVVALANKMARTIWALLAHDRTYQKDYVARAA

SEQ ID NO: 239115 - protein, 336 aa, unidentified
MKEIIKYAFGIEVSKETLLIRFGSIDLEQKINISEAKSYKNDLKGIEKFYMSTRQQIRTDKPVIYVMEATGIYFEKLAYYLKERCESVVVVLPNKSKHFRQSLDTKGKSDEIDSASLTQLGLERNLKQWEVPIELMRKLKELTREHEEINVMATQLKNKLHAKIYSQHSKSTTVRRIKRSIKMFDKQEKEIEAEIKKILHQDPEVYAKVMMIVDSVKGVGIMTVVKIISETDCFALVNNRNQLVSYAGLDVTENSSGQMKGKTKISSKGNKHLRNALYMPSMSVTKYLPEMKTLYIRICKRNQFKKVGLTAVMRKLLILIYTLWRKNEPYKIGFSG

SEQ ID NO: 239116 - protein, 366 aa, unidentified
MKKNITLVENTNEVFKSQQLTIGVDLGDRTSHYCVLDEAGNVILEQSVATTPKGIQQVFSKISRSRIALETGTHSPWLSRLLTELGHEVIVAHARNVQLITESTRKDDRLDARTLARLARIDPQLLGPVRHRSAKAQIHLTEIRARATLVSARTALVNAARGLTKSFGERLAKCGTEQMNREIAKGLSPELRDVLEPLLKEIESLKERIAEYDRRIEQIAKEVYPEVTLLKQVKGVGTLIGLTYILTLDDPHRFRRSRDAGCFLGLRPGRRNSGRSEPQMHISKEGDAYLRTLMVQGAHYILGPFGPDSDLRRWGLKLAERGGKNAKKRAVIAVARKLAVLLHKLWVSGEVYEPLRNNHEVVSAVA

SEQ ID NO: 239117 - protein, 372 aa, unidentified
MNHNTIYVGMDVHKENFSLCVYTIEAEKASYHQRTEADYKEVLKYLEFLRSIYGNDANFICGYEAGCLGYTLYHQLSANNVNCVILAPTTMLEQRSKKRIKTDKRDAEIIAKCLAQHNYSSVHIPTAKDEETKEFLRMRDDHKLALKKIKQQILAFCLRHSYRYDGKSHWTAAHLKWLRSLTPEDLYKEILDEYLLTYQNLSDKLERMDKRIEELASLEEYREAVKKLCCFIGVRTHTALSVLVEVGDFKRFASAKNFASYLGLVPGENSSGENQTRLGITKAGNRHIRLLLTEASQCYARGKIGFKSKELKSRQSGNTPEIIDYADKANERLRRRYYNMILGSCKKHNVAKTAIARELACFMWGMMTDCIA

SEQ ID NO: 239118 - protein, 433 aa, unidentified
MEEVTDEPLYRDRVCGIDIGKAELYATIRVPSDKDPARRMSETRCFPATRRGVLALADWMRCWQVPALVMEATSDYWKPVLYRLEAEGFECVLADARQVKNLPGRPKRDPSDSSWLAQCFERGSVRPCFVADPEFRIIRLHTRYRRDLTEDRTREKNRAEKLLESAAIKLSSVVTDLHGVTGRDIMDHLIAGERNPKVLAQLARGRARRKISDLEQALDGAEFFTPEHAALLQTMLARIDQINTKISELDAVIEQLLAPWEEQLQQAGSMPGWGRRSAQDVLAETGPDMTRFATGGHLASWGGRIPLDKQSGKRHGQARHKKGNKYIAAATGETAVAAGKTQTREGARYRKLARTRGKNKACVALGNTQLKVYHKLLSSPGMRYEDLGPDYYENRAATRRKIDYHVRQIEALGLEVTLCRKPGPTGPGEEQAA

SEQ ID NO: 239119 - protein, 262 aa, unidentified
MFPVGIDVSKNTLDLCMLYDGIKGRIKTRNIQNNRHSVENILRWLRLQHCGPEDVHVVMEATGVYHERLATELHDAGFRVSLANPHRTREFARGMGIMTKTDKVDAYMLACYAFLKKPHRWEPPAPEIRYLGALLRRRDVLLDDALREENRLEKYLSTDTPADIISSCRRMAQLLREEVSNIERQIKAHIKASPALRRDYTLLTSIKSVGPQLGMHMLVVLRSHNFASAEQAAAFLGVVPIEKRSGTSVRSRPRMSKIGPLS

SEQ ID NO: 239120 - protein, 366 aa, unidentified
MEKNSTVATKRKQIFKEKQLTIGMDLGDRFTYYCILDEAGEVMVEQKLATTKQAIKQVFGRIPRSRVALETGAHSPWVSRLLTGLGHEMIVAHARNVRLIGESSRKDDRLDARMLARLARLDPRLLSPVQHRSAEAQIHLTVIRARAALVGARTALVNSARGLAKSYGERLRKCGTQQVSKNLAAGLSVELQAALEPLLAEVASLAQRIAEYDRRIEQIATQVHPEVALLKQVKGVGTLIALTYVLTVGDPHRFRRSRDVGCYLGLRPGRRNSGSSQPQLHISKEGDRYLRTLMVQGAHYILGPFGQDSDLRRWGLKLSERGGSNAKKRAVVAVARKLSVLLHKLWVSGEVYEPLRTHSAAVGAVA

SEQ ID NO: 239121 - protein, 345 aa, unidentified
MVEYVGLDVSKEETAYCVKGSDGKILATGKVATDPDALFGVLKEHCLCPERIVLETGTQSSWLARELRERGLAVECLDARRAHAVLRLRHNKTDANDAEALAELARLGFFRAVAIKSEAAQADRVLVQARAQLMSARRGQENALRGLLASMGLRFAKGVDKFAREVRALVVDRPELACVVETMLSAREALMESIAALDSEVAHRAQRQPACQLLMSMPSVKSLTALAYCATIDDPHRFSSSRAVGAYLGLTSRRWQSGEVDYGGRISKMGDSLMRSLLYQAANGLLTRVRRAHPLKDWARKLKKRTSHKKACVALARKLAVILHKMLITGEPFRWPQQEEASATA

SEQ ID NO: 239122 - protein, 353 aa, unidentified
MLIIGCDFHPGFQQIAIFDNQTGAYEERRLSHRAEAEQFYRSLAGQEVRVGMEACGHYPWFEHLLAELGFELWLGDAAKIRASVVRQQKTDRRDAEHLQMLMREDRFPRIWVPSLEERDVRQLLVHRHKQVQARTRTKNQLHALAMSQGVQKKWKLWTAAGRAELESLELLPYAAQRRRQLLHRLDALEAEIAALNRQVEEEVKGRPAAVKLMTHPGVGPVTALAMVLTLGPAERFRDGRKVGSYFGLIPSEYSSGGRQRLGHISKQGSSFVRFLLVEAGQSAARKDAELGRFYRRLGARKHRALAKVAVARKLAVRLYLMLREDWTYAQLCRAVVQASPSHSVAASKSRPLE

SEQ ID NO: 239123 - protein, 413 aa, unidentified
MKQFPSHFVAHIGLDWSDRKHDICLIASDSDKFEYDVINHSPESIEEWALALQKRFNNQPIAICLELKAGPVVYALLKYNFIVLFPIPPKALAKYREAFTQSGAKDDPSDAFLQLDYLLKHKSALKPLMPDSEETRILQRLVEDRRVLVDDKVRLTNRITAALKSYYPQALQWFDDIDTKIFCDFIAQWPTLKQVKRARPLTLSKFFKAHRCVRPAVIEMRIKAIKSAMPLTEDDGVIMPFQRLVLALTLQLSQLLITIHEYDLDIAQRFRKHADYEIFESLPGAGPVFGPRLLVAFGTNRKRFDSADEVNRLSGVAPVLKRSGKSAWIHWRYSCPTFLRQTFVEWANQSIRYSFWAKEFYDEKRAMGKSHQATLRALAFKWIRIIFSCWKNKTPYDESAYLFALKRRKAMAN

SEQ ID NO: 239124 - protein, 348 aa, unidentified
MRQYIGIDLHKQTSYVTRMNERGKILEQINLSNDPDTLRGYLTRQRPDTRFAVEATGNWMYLYELIEERCPDLVLAHPQKTKAIASARIKTDKIDSTILAHLLRTNLLPQAYIPVRQVRDTREVLRYRAALVRLRTSVKNRISAILDKTGIKTPTRTAFGVKSRRFLAEVTVRSCYRLELDGYLRLLEHLEEEIQRVSEVIEAQVKVDPQAQLLLTMPGIGPYSALLILSEIGNIGRFPDSRHLCSYAGLVPSVYASGGKTRLGRLTKQGSKWLRWILVELSIHAINGAPQFRSLYYRISRRHGRNTARVAVARGMLKTIYAMLKNKESFRPIVKGNAGQRPGVMATA

SEQ ID NO: 239125 - protein, 390 aa, unidentified
MRMARGLTEMSGRAESEKGSDMQAIDCNQTLRSSHAAEAETIFVSIELSRARWLVTSLSPKTTKLSRHSVPGGDAAALLGLLRELRLKAERRSSASVRIVSIQEIGFDGFWIHRVLAANGIESHVVESASISVPRRHRRAKTDAIDGELLLRTLMAYKRGEPRVCAMVVVPTPEDEDRRRLSRERKTMVKERIEHINRIKGLMASQGIAGFEPMRAKAKERLDDLRTGDGRPIPERMKAEIRRELERLELLRKQILEIEAERDALLRPAETTTPSPGAQILKLRGIGPEFASVLWQEGLYRRFDNRRQLAAYAGLAPSPWQSGDMSKEQGIAKSGNARLRVTMIEAAWLWLRHQPKSALALWFKDRVRTDRGRRRRIAIVALARKLLIAL

SEQ ID NO: 239126 - protein, 415 aa, unidentified
MAKVMEAMFRCCAGLDVHSKTVAACVRRIDDQGKIHAEVRTFGTMTRDLMALLEWLKAEGVSHVAMESTGVFWKPVYNIVEEHLQVLLVNARHIKNVPGRKTDVKDCEWIAQLLQYGLLRGSFIPPRPQRELRDLTRMRTQLTREMSSVANRIHKLLEDTNIKLGVVATDILGVSGRKMIQALIDGETDTVKMADMARGRLRDKIPLLEQALVGKVTEHHQFMLSRLMEHLIYLESQIEQFNQRIEKAARPFEKAIATLIPTPGYERASAQSVIAEIGPDMNPFPTDSHLCSWAKLCPGNNESAGKRKSGATGHGNRWLRAILVQVAWAASHKKESYFQAQYRRLAGRRGKKRAIVAVAHSILTVTYYMLKFERSYKDLGGDHFDRIARDRIRRYHIKRLESLGYEVKLTEKKAA

SEQ ID NO: 239127 - protein, 344 aa, unidentified
MNVSKTVVGVDIGKRVFQLHWIDAHTGEIVSLQLKREKFLEHFANRAPCRIGMEGCGGSQHWARQLSSLGHEVKLMPAKAVRPFVGGGNKSDAHDARAIWTAVQQPNVKAVAVKTEEQQAMLALHRMRQQLVKFRTAQINGLRGLLTEYGEVMAQGKAGIRKGIAEALQHLSDRLPVMVIDTLREQRERIDELDNQISHIERRLKTWHKNDKACQRIADIPGIGLLSATAAVAMMGDAKAFKSGREFAAWLGLVPRQTGTGGRLRLLGISKRGDTYLRTLLIHGARSVLTHAKEPAAWITQLRQRRPLNVATVALANKMARTIWALLAHERTYRKGFVSQPVYC

SEQ ID NO: 239128 - protein, 383 aa, unidentified
MSENLGSLRLTIFIHPLNRLSMQVEYLRVSCGLDIGSKNFHACFRALKASGELVILRQKHFTNSLTGIKQFVGWVNKIRTKKNVASVDFFQIVMESTGVYHELLLEELHRQNLPVCIELANRVSAYLKTIGHVSKNDKQDALGISQLAVERLLKRWQPCSLEFLAIRSILRHCNNLTDSLVQYKNRLHAAVVSTSVDEQTTASIRRMTFLLEEEITLAEKRAVTLYRQDEVLVEKLSKIEESLHGVRILTLLKVVAETNGFAQITSRDQLASFAGYDIVENQSGDMERRARISKQGNVRLRAAMYMPAVTIIRDKVGPLYDLYAGIRLRNPKIYKIGNVAVQRKLLLLIYTLYKTGAAYDPQYESKRRRAAAEPLQQLELQLA

SEQ ID NO: 239129 - protein, 362 aa, unidentified
MDYRVGCDAHKHYSQFAVLDQDGQLRQQTRVDHLPGAIRAFLESLPQGTPVALETVGNWYWIADEIEAAGCLPLLTHAAKAKVMMGNVNKTDKLDAKGLAKLLHLDSLPTVWLPPGEIRDERELHRTRMALSKLRTALKNRIHATLAKYGITTTEHSDIFTGAGKVWLKTTLSRLPPETGRCVTQEIEALDGLQLQIAQLEQRIRERIALTPSIQLLKSLPGVGDILGIVIDREIGSIDRFYTSGRFTSYAGLVPTVHASGGKTRFGHMRKPSNQYLKWAFIEAANVVVRHRHHPAWKTKYVCQVYDQVCQRKGHSIAVGAVARHLAEAAFWILKRQQPYRPPANRQASPKQVQGRAQLVST

SEQ ID NO: 239130 - protein, 345 aa, unidentified
MKYIGIDYHTQYFVATTMDERGTVISKDKVSTDRDSIKHYFKKVGTGETKAVMEACYGWEYFYDEVDDLIDDLIMAHPLKTRLIAEARIKTDSIDSETLAHLLRADLIPEAYAPSAETRDKKNLLRYRLSLTAIKVRIKNIIHSVLARNHVEDSKFTSLSDKFGKAGRAYLRSVQLRGNDTVILNQYLDLLGETEIKITAAERQIRAVCRQDEICKLLGSVPGIGDILAVTIRYEIDEIGRFVSGGKLCSYAGLVPSTYSSGNRTYQGKITKQGNKWLRWAMIEAAQRAPLHDRWLREFYNRVSKKGRKIARVAVARKLLEIIYRIWIDRKPYYKKPVTAALQVV

SEQ ID NO: 239131 - protein, 341 aa, unidentified
MKKFIRVGVDLAKNYFQIHALASEGAPAVTRKLKRSKMHEFFSQIEPCLVGMEACGSAHYWARELKAMGHEVLLMPPAYTKPYVKRGKNDAVDADAICEAMSRPGMRFVPIKNAEQQATLMLHKTRELLIKQRTMSVNALRGHLSEFGIVAAKGIGRVDELLDLAESDATLPAAAKMAMRVLAQALEGLDKAIDDLEKEISSAQAQNEMSRLLDKVPGIGKLIASVIAACVPDPSVFKSGRDFAAWLGLTPRQNSSGGKPTLGAITKQGNRYIRKLLVLGATPLLNVVGKRKGALRDWIFGLLAKKPARLVTVALANKLARILWAMMKTGECFRTEMFAKA

SEQ ID NO: 239132 - protein, 410 aa, unidentified
MEPILKSCAGMDVHEKKVDVCIAHGPFDKPPKFEIRTFSTMTSDLEEITIWLKKYEVTTIGMESTGIYWKPIFNVMEGEFEIVLANAQRLKAIPRKKTDIIDCKRIANLLRYGLVPNSFIPPKEIRELRDLNRTRRKLVGMMTSEKNRLVKVLESANIKLSSVVSKIYGVSSLAMIRSLLEKDKLSREEISLMAKGKLKKKVDLLEKALNGKITDHHRFLLGMHLENIDHLAKQIKKMDEEIDRKMVPFQNESKLIQTIPGISDVNASAILAEIGVNMSQFPDEAHLSSWAGVCPGNNESAGKKKSGKTQKGNSFLKGALTESAWAASKTKASSYSAIYHNIVRRRGKKRALVALAHRMLIDIYYVLKTGEPYQEIGAKAVYERTSKRREQSMIRSLERAGYSVAKAATA

SEQ ID NO: 239133 - protein, 337 aa, unidentified
MMYSGIDLHSNNSVIAIIDDADRVVAQKRLPNDITKIVDFLARWQDELAGVVVESTYNWYWLVDGLQDAGFHLHLANTAAIKQYEGLKHSGDETDAQHLAHLLRLGILPTGTILPREQRAVRDLARKRMQLVHSCTTHVLAVENIMARQLGGRMTSNQIKRLTADAVDSLPLAADVGLAVKANVAVIATLQAQIEVLEKRLQERVKPRPQYGLLTSVPGIGRTLATVILLETGPIDRFADVGNFASYARCVGSVHTSNRKKKGEGNVKNGNKYLAWAFVEAANFAKRFCPEAKRFHERKKARTNNIVATKALAHKLARASYHILKEGKPFDVTRCFA

SEQ ID NO: 239134 - protein, 355 aa, unidentified
MDNKKYIGMDVHKESISIAVMNDAGKIVLECVVETKASIILQFINGLRGDLHVTFEEGTWAAWLYDLLKPHVTRIVVCDPRKNASMKEGNKSDKIDARRLAELLRLNHLNPVYHGEHGLRTLKELVRSYLTIIKDLGRVMTRVKALYRSWAIPCTGKQVYAPQHRAEWLVKLTEPGVHRRAEFYFQQLDALRSLRQQVRRELLQESKKHQAWKRLCQIPSIGPIRAAVLLGILQTPHRFRTKRQLWTLGGLGIETYSSADHRYVEGQLQRSKKPALIRGLNENCNHDLKNLFKGAAIIASTKPGPLQEFYAALLAKGMRAEMARLTLARKIATIVLVIWKRGVCFDAQHLKPQTA

SEQ ID NO: 239135 - protein, 343 aa, unidentified
MDLHQKTSTFSVKEREGRVIEAKTVPTTKESIEEFLSPYQGSLLTMEPVSQWYCYADYIEELGLSVKIANPMRVKAIASARIKTDSIDAGVLADLLRADLLPESYHAPAHVRAWKEEVRLRMSLVRLRVQVKNKIHALLWKQGIRSPYTLFTKKGLAWLDRQTLGKEAGIACTTYRETLALLDRQIAEAERRMIADNKHREEVKLLITIPGISYLSALTIMAEVGDIGRFPSAKKLMGYAGVVPSTYASGGKVRHGKIIKQGSSWLRYVLVEAAHHQLRCTKRKGLSDYYEGIKERKGGKAAAVATARKLCAVIFRVLTDKQPFVSPKEWDDRRTHHRGIAIN

SEQ ID NO: 239136 - protein, 404 aa, unidentified
MYYIGIDWSSDHHNVSLQNAHGAVISALEFPHTLEGFQRLEQEREKLAVPATQCWVAIETRHNLLVEFLLERGYVVYVLSPRATKSYRQRYTASGAHTDASDAALLARVLRTDHDQHQPVRPASPLTQRLRAQVRFVEQLRRSVQRHSNQLRALLLRIYPQAVGLFGTLTATINLEFLKAYPTPAAATALSRAAFTDFCQQQHYTCPRLIPQRYAHLLAPAPKALPATLHAYQGQIPVLAELLRQQVHYHKMAQAELTQLFPQHPDAPLFTSLPGAGDLLAPALLVKFGEDRDRFPTPGAVQALAGTCPATDSSGKRKRVYFRHSCDKEFRRIAQHFARASVRQSGWALAYLQAALPVSASPSHAYRRLANRWLAIIWKLWQTQQPYDEGYHLRQRAARQRPRT

SEQ ID NO: 239137 - protein, 401 aa, unidentified
MTKTTNTKRGKQVRRPLTAIHAGAAGLDVGATFHVVAVPPDRADDPVRTFQSFTGDLQRLADWLTEVGVTTVAMESTGVYWIPVFELLEARGFEVLLVNARDAKNVPGRKTDVNDAQWLQQLHEHGLLRGSFRPHDRVVPLRALLRHREGLVDQAAAYIQRMQKALMQMNVQLHHVVADITGVTGMKIVRAIVRGTHDPDALAQYRDNRCKESIATIRNALVGNYRPEHLFALRQALELYDFLQTKVAECDHEIEGILRDLNAERPTPAAALPAVRHASGRNEPGFAVRESLYTLLGADLSQIHGLGPYSILRLVAECGDDMRKWPTAKHFTSWLTLAPGNKISGGRVLSSKTRRSSNRAAALLRIAAVNIGRTQTAIGAFYPGLRNIGTRIGGKLAGWLR

SEQ ID NO: 239138 - protein, 345 aa, unidentified
MNATTVYAGLDIHATNTVIQSINEQGSLVGRQEVPTKADRLISWARSYPRGRLHIILEQGTHARWIANALAPWVGKLVICDPGENALIHAGGNKNDRTDAHKLARLLRLGEYKSIWWQPMESRHLFKSRIKMFLRQRQAKASGIQRLISWLRHIGVHIPTGQSRFSFKRADQWIRQIDSEAHQWLAQQKLGFIRYHHSQSLEIFSDIRRQGQQYWEIGEFQGIPGIGPVGAHLFSGFIEDPHRFRRRSQLYKFCQLAVTSYRSAGQAVGPKRLDKRGYGELKAVSHRAWLGALNTTEDNEVKQFWRASCRRSASKRNARLNTQRKIIGAMWALWKNGQPYNPNQF

SEQ ID NO: 239139 - protein, 347 aa, unidentified
MRFYTGQHQYYCGIDLHARTMYLCILKHEGGEVVLHRNLRCEPDAFLRAVAPFRDDLVVGIECIFCWYWLADLCTRENIPFVLGHALYMKAIHGGKAKNDKIDSHKIAVLLRAGAIPVAYVYPRGMRATRDLLRRRLFFVRKRSELFSHIRTTFHQLNLPAPTGQLRYACNRAGLVEAIPDSMVRTSIEADLAMAGRLDEVIRTLKRTILSQARIEDPLTLQLLQTIPGVGPILALTLLYELHDVARFARVQDFLSYARLVKSQKASAGKVLGTSGSKIGNAHLKWAFSEAAVLFLHKNPPGQKLLNRLRSKHGKGKALSILAARLGRASYYMLRRTTAFDMDRFMN

SEQ ID NO: 239140 - protein, 307 aa, unidentified
MAILVNGEKVHGYTILNDAFGFNRLLGDLKTVHNPEIIFEATGVYSRRLQAFLEEYGYAYIRLNPLEAKKQLDSLRVRKTDKIDAEKLAKSQLVHNRKPTYVQEEVYQHLRDLSRFYQNLTEDLVRAKNRLHKVLQITFPELENLLSTPTGEQYWNLVMAFPCKEFVLRLSQSDLCEIIRQSTSKRISEKRIAYLTDKLIKLAKQSFCAVKKNSPMLEEVRYYAQELLRLSERRQVVLNDMVTLAQPLPEYDILRSIPGIAETTATSIIGELGDIRRFQSSNQINAFIGIDLRHYESGKLSRQGTHH

SEQ ID NO: 239141 - protein, 342 aa, unidentified
MSISYVGLDLGSSNFLQVALNHRGTPTLNREFTTSAANLVKAFSDLHGEIHVHLEAGELAPWASEIIRPLVTRVVCSHPQTNAWIARDRDKCDRIDAYKLASLLRLNEFKEVHYPREQLRRDFKTLVQHYDELTQQQARLKTKLKARLRMQGVIVRGEEVFSARGRQAVLEQVKSPVVRTAIKQLYAVLDQSIASQTEAQMLMLRAAQALPEIRIMRTAPGVGPIGACRFSAYVHTPQRFSSTRKLWKYCRLSVSHRSSNGKPLRRPRLDRMGCGRLKDVSRKTFEAALRRRDNNGFKRAYQRALETTHDKTHARLTVQRKIVSTLRAMWINQTPYCDELMR

SEQ ID NO: 239142 - protein, 427 aa, unidentified
MNYTQNKKISQITPSTLIVGIDIAKDKHVARAQDDRGIEFGKRLFFENRIHGFENMLDWAKKHQQENNKTHVIFGVEPTGHFWLSLAYFLRARGYDFVLVNPMHVKKSKELDDNSPTKNDTKDARVIAQLVKDGRYSVPNLLEGIYAELREGVKLRDQLVKQLIIIEGRIQNNIQRYFPEFLDVFKEWDGKAAMGTLRLFPFPSDIKKMTPDEVLVKWKPFVKRGVGIKRATRLIEAANKSIGIKIGLRFAKKELHNLLDQFELYKQQLEDLDQELEDLVYEIPGAQEIIDIKGIGVTTVATFFAEVGDINKYSHPQQLVNMAGLSLREHSSGKYKGQTRIDKRGRKRLRKALYLAIRPMVRHNPTFKALHTYYTTRPNRPLKRQQSLIALCGKLLRVFFVIGQKQCEFDANKLLQGLPELKALQAA

SEQ ID NO: 239143 - protein, 456 aa, unidentified
MPKQAKTKKRRQAKWDEGLPTLNRNAAGIDVGNAEHFVAVPAGRDREPVRTFGSFTSDLHRMAQWLKACGIETVVMQATGVYWVALFQMLESYGFQVNVVNARHTKTLPGRKTDVLECQWLQKLHTFGLLNNSFRPVEEIQVLRTYLRQRENLVAAAGTCIQHMQKTLTLMNVQLANVISDISGVTGMAILRAIVAGERDPHRLSTLKHNRVRASREEIAQSLEGNWREELLFVLEQSLELYDLYVRKIAVCDQRIERHLKTMTSKRELGQRSDPDVTPAPKHEPRFNLKDHLCRITGVDLTKVAGLEVQTVQTIISEVGVDMSRWNTEKQFASWLGLCPDNRISGGKVLKRGTRQVVNRAATALRLAAWSLLRSQSALGANFRRLRSRLGAPKAITAMAHKLARLIYRMMRFGTEYVEKGMEAYESRYRIQQMKWLVKQAASLNMQLIPSSEVTN

SEQ ID NO: 239144 - protein, 369 aa, unidentified
MDNDSTVFVGLDVHKDTIAVARVGSATSDPVIDVATIGTQHYAIDRMVTKLSGHGPLQFVYEAGPCGFWLHRYLTGKGQRCMVAAPSLIPKRPGDRIKTDRRDARNLALGLRAGTLTAVHIPGPEQEAFRDVVRAWQQSKRDVAKGKQRLKALLLRNDLRYAGKASWSEAHRRWLATLVLPSAAQQVVFQELVDTITEREARRSRFEAQMAELAPSWSGYPAAQALLAFRGVQQAVAYGVVAEAGDFARFSHPRRFMAWLGLVPSEHSSGGTRRQGGITKTGNRWARTLLVEAAWAYRHNPKMSAIIETRAQQIDPAIRAIAWKAQPRLTHKYRRMRARGKQHNVIVTAVARELAGFLWDAARIVATTA

SEQ ID NO: 239145 - protein, 369 aa, unidentified
MLYDVGGFQTFVGVDLHKCTVTLKAVSAAGEAAGHLTISTKSVEKIEGWLRALPQPVWLAVEACPFVEWFIDRYRDCVARLDIADATELAHRRGKRRKNDPNDALDIARRLARGECPLGFIADPTLMQLRKLGRHWRQLSRLISRSKHALKSMLNAANLRGPKFDGAGAQRWLLAQGHLLKPVQHQAFSDYLDHVLLVERQREKLRRAMHWTARSETFAQTELLLETVPGIGDIWGLIIAAEIGPFDRFPNSDALEFWAGLTADLKESAGRTQSGNITKAGSATLRWALCQAAVTLCHCDARQEAIRQRLMKRIGKAKANVAMGRRLLRTLYAMVRDQKSYRCEQPIDRTTRLNKARAARKTKAADKAA

SEQ ID NO: 239146 - protein, 377 aa, unidentified
MNYSTSYSTVYIGIDAHKESFSLVSYTNEKEQAEYPQRVDAHYSKVINYIEAMRFHYGEDALFVCGYEAGCLGYTLYHELEAHNVKCVILAPSTMPVPKGKKRIKTDKRDAALIARCLAHNDYSAVHVPTEKDEQTKEYIRMRDDHKLELKKVKQQILAFCLRHGCIYDGTKSHWTQTHINWLRNLNLDSMLQEIMDEYLLTYDYLTGRLGLIEKRIEELANDKDYAENVHKAECFIGIKSQTALAVIAETGDFNRFPDAQHYASFLGLVPGEDSSGDDKNRLGITKAGNRHIRTLLIEAAQSYGRGKVGYKSAALKARQAGNSSAVIAYADKANERMRRKYYHMVLKQGKKTNVAKTAIARELACFLWGMMTGHIV

SEQ ID NO: 239147 - protein, 356 aa, unidentified
MTTQNLEPDFTGQHLFVGIDVSKNSWKVCILTQHLEHKTFTQPPKPEVLVGYLQRHFPGATCHCAYEAGYCGFWIHDHLKALGVDCIVVNPADVPTNHKERTFKTDRIDARKLARALRNGELTPIYVPNRAALEDRSLIRTRHNLVKKQTRCKNQIKGLLGFYGVPLPLEPGTKNWSRRFILWLDQLAMQSPSGTQALKALIQELKYLRQMIAETTKQIRTLAKELPYCSYTVPLLTIPGISTLAAMIFLTELVTLSRFRTLDQLSSYVGLVPGEYSSGEREITTGISQRRNPFLRGLIIECAWVAVRKDPALVLAFNKLCTRMPKHQAIIRIAHKLLNRIRFVLKHQTSYVHAVV

SEQ ID NO: 239148 - protein, 344 aa, unidentified
MEIRTVGIDLAKNVFQIHGMNERGKPLLRKQLKRDQVVVFFANLPPCLIGMEACGSAHYWARKLEALGHTVRLMAPQFVKPYVKSNKNDAADAEAICEAVTRPTMRFVPIKNIEQQSVLALHRARQGFVKARTAQANQIRGLLAEFGLIVPQGIAHITTRLPSVIEGAANELPVSFRQLIERLIEHFKVLDKEVEELEAQIKAWHRADEISRQLERVPGIGPLTASALVASIGDAKNFKNGRQLAAWLGLVPRQHSSGGKSTLLGMSKRGDAYLRTLMIHGSRSVIYRASQKNDPDSWLVKLIKRRNVNVAAVALANKTARIVWALLTHKSEYQPDYRQSLTTA

SEQ ID NO: 239149 - protein, 343 aa, unidentified
MELHAIGIDLGKTVFHLVGLDSSGNVIVRKRCSRTQLLKYTANLRVQRIGMEACSGSHFLARALREQGHDARLIPAQYVKPYVKTNKSDYIDAEAIAEAVQRPTMRFVPIKTEEQLDLQTVHRVRERWVMRRTAVVNQIRGLLLERGFTLPKGRSHVDRALPEILTDPALRLAGSFRVLLGQLQRELEQLSARIEQMDAVILETAKENEACQRLTTIPGIGPVTATALVAAIGNGAGFRRGKDLAAWVGMVPREYSTGGKQKLLGISKRGNSYLRRLFVQGARVVMQYRTKQAPALSSWLSQLMARTHQNVAVVALANKLLRMAWAVLCKNETYRIPALATAP

SEQ ID NO: 239150 - protein, 488 aa, unidentified
MSAAGQQEGKKDPTLNARAPKRKARGSRCPQGKGHRRRSKLTITNPDAAGIDVGSRVHYVAVPEDRAPVSVRSFGAYTGQLDELVQWLKDCGIKTVAMESTGVYWIPLYQKLEEAGFEVLLVDAHQAKHVPGRKSDVQDCQWLQQLLTYGLLRAAFRPEDSVCRLRTLQRHRKNLVESAAMWVQHMQKALNEMNLHLHHVLSDISGLSGLRILDGILAGERDPAKLASLAHHRVQKSQAQIEAALTGDYRPELLFVLGQSLQNYRQIQQQITQCDLSIEKQLVKMTDCPTPRQAAEPMPSSPELGGGKSGKRKPPVALETSLAGHLKRILGVDLTTIPGLNVLAILTLISEIGTNMTKWRNEKAFVSWLGLSPNNKISGQRVLSSRTRKVVNRAATILRLAAMIVGKTDTPLGSFYRRKRAQLGGPKAVTATARKLGCLVYRLIKNGQSYNAPDLETYELKYKDQILNSLRKRANTFGFDLVELPKAA

SEQ ID NO: 239151 - protein, 321 aa, unidentified
MNKSTIFNGIDISKDVFDVYSPDQGHRQFPNNVKGFNSLKKELSFNHWCVMEATGCYHQQLALYLFEEGIRVTVMNPLVIKRFIQMKLNQVKTDKSDAKMICHYGQEQKMQLWQPSPEYVEDCKQLQTITQLYFKQSTAIKNKLHTLQTRGYKRSKMISSLKRQLKSLQKEIQLLETEMELLIKTNQQELYTRLKTIPGIGKKTAILLIVTTNGFKDFESSRQISSYLGLAPNERSSGSSIRGKTRISKTGNPLVRNHLFLCSFTASIYNPQCKSLYDRIVAKGKSKKLALIAVCNKLIKQAYGVSKSGLPYDKNYVSKLA

SEQ ID NO: 239152 - protein, 391 aa, unidentified
MINIGIDVGKFKHCATVLDDSTGEVLIKPFFLTNDRKGFDILYSKTKQFIHRKHSVGMEDTGHYMINLTNYLLDKKFTVKYINPRATFLRRKELGISAKNDRKDALLIAEMLSEKRFWRSISVRSIENSKFRDITRLYHQLQEQQNQDMNRLQRALDIVFPEVNSLSWTRYSKAYMKFLSTYPSASSIALEDIRNLRKALKTEGKGRQSKVTAEEIRELAKCSVGEDNISIDLEVTSIIAIINTREEQIRMLEKKIEEFSHKLNSPIISIPGISHISGMTILAEIGDINQFQNTGNLISFAGMDPLVYQSGKYDAAHMPISKHGSRYMRKALYQAVFTVCKYSPTFHDYYTKKRNQGKSHRCAQGHCARKLLRVIYKLLSTNSPYDQNHIQ

SEQ ID NO: 239153 - protein, 429 aa, unidentified
MRTESTPGARGPVFCGVDTHADSHWLCVLDWRGRKVLSRQFPADAAGYEALAGAIAAAGEPACVAMEGTSSYGAGLTRHLASLGMPVREALSPARMQRRRPGQGKCDESDAERAARAAMSGSKLGTPKSQDGWVDGVRCMLAARSGAVKARTSAINTARSLLTTAPEGLRSRFRGMAGPRLMEELPSVRAEGALGAALGALADLWAAARDAALDMERAIEASLEENCPALLAMYGCGPVSAAKLAVAAGDNPGRLRSEASFAAICGACPIPASSGKTVRHRLNRGGDRQANSALHEIARQRVMRDPETAEYAERARARGKSDREVMRCLKRYVAREAYRALMRPHEIRRPEDASGLVAARRAARVSQVRAASILGTSEKYISMLERGQRELKPIRRAYEAWVEAGLPLDWDRQAFEAERKMDSKKHLAK

SEQ ID NO: 239154 - protein, 467 aa, unidentified
MKNNDYNLFVGIDVSKGKADAAVLAVPELRSVKPRFLRKKLSFKFIKSDVVEFLNSVRKYSSDQHCLHTYFALEVTGIYSTNVYGFIKENCNSDEEIHQLNTDFVNKWRESHNISKSDPLDAQTISTIIGTDDDVRYVSDSVFENKNGYQDLKALVHRHYQIKKLYSQETNRLIALCDCYFPELQYVFEPKSAAFLAVLSQYPTSHDIINASKNEVFSLVYEASKHRCNMDKIDKLFNYAQDTLVPHVSDHIRCVIFNTVESIFNIRAQLKLIEKDIRKLASTFNVYSLLMTITGCGPLTAAVIIAETGDIFRFKNADHYVSYSGSSPRNKRSGKSVEIMGKISKKGSKYLRHALYMIAEFARRHNPVLKHLFERVKNGNKKRHKLAVIAVANRIARYIYSIMKSESSFVIIHENIMRLPEETRNTFFNSISLDFPKNTRKQIYQYSDVNGEIHRFVYKNETTESIV

SEQ ID NO: 239155 - protein, 428 aa, unidentified
MDFMDISRIKEFRQFKKEIRGSEQYLIVGIDIGKVKHHAFLGTANGHTVQKGLIVKNNLSGFSYLMGRVQFHMDRDGFEDVVFGLEPTSVYHKPLAEFLIEQGHLVVFATNEAINKNRSLLDGRWDKNDAKCSANVADLLSQGKCQYYDLPDIKLRDLRNLLLLRKRLRKQLHSAKMRIRNNLVAQYFPEFDKLWKKCEEENLAIVRWCLAPAKIAAMKFEDFCCLVTTRNRGDRQKQRLFEIWDTASFSIGCFAGNGLELEAKVLVDTVKLIQTQIVEVNGAIEAICLQFEEYQYLLSIPGFGPYVSAVVLAAIGNAHRFENASQLLRLAGLDLNAKRSGKKSATAVPVISKKGKADLRYAVYQAALIASSLTTHFAGYYHSLLEGRQREKGIRTKMRVKLAAKLLVIAWTLMKKKEAFNPDYIISH

SEQ ID NO: 239156 - protein, 368 aa, unidentified
MDRKSSKLYVGMDVHKESIDLAVAEEGGEVRHHGQIGGDMNALWRAVRKLESLGRELVFVYEAGPCGFGIYRGLTARGHACWVVAPSNTPRRVRDRIKTDRRDSLKLAGLARAGELTPIYVPDVRDEAMRDLVRSREDAVVMQRQARQRLAALLLRNDVRYAGKTAWTAAHRRWIADLRLPQSAQRLAFEEYVQAVEEASARVQRLGQCIEQELAHWRWRSVVAALQACRGIQLIHAVRMVAELGDLSRFRHPRQLMAYLGLIPGEDSSGEHRHQGAITKAGNSSARRALVEAAWAYQYAAKVSALIARRQADVPKVVLDIAWKAQVRLCARFRRLAARGVNRNKIVVAIARELGGFVWAIAQQVKPV

SEQ ID NO: 239157 - protein, 457 aa, unidentified
MSKRRKRAQSKSFNLQSLPKQLQHINLNAAGIDIGSERHMVAVPEGRAEVAVREFGAFTGDLVSLADWLQQCGVTTVAMESTGVYWIPLFELLERRGFEVKLVDARHVKNVTGRKSDILDCQWIQQLHTYGLLAGAFRPADELCVLRSYLRQREMLTQTASMHIQHMQKALQQMNLLLHNVVSDITGVTGMKIIKAILAGERDPQVLASHRDNKCHHDSATIAKSLVGNYRAEHIFALRQAVDLYEIYQTKIGDCDEAIVTQVSTQPDVTDEPPPPEQKRTSARDRQRGGVNVRDLLFQKSGVDLFAIPGLAADTLLVLSSEVGFDLSPWKTVKHFSSWLSLCPGTKISGGKVLSRRVKRNPNRAAQAFRMAAATLSRSKSALGAFYRRIKARSGGKQAITATAHKIARIYYALLTQGTTYVELGQQAYEQKYEARRLKHLMAQAKSLGFQLVPSQT

SEQ ID NO: 239158 - protein, 323 aa, unidentified
MDKVIGIDVSKASFDVACFENNSWKHAIYTNDEAGFKKLATDFGGHCCYAMEASGPYYLKLAMYLHSCGNEVSVINPLMIKRYSQMRFIRAKTDKKDAQTIAEYAFNQNPELWHPADHSMLRMQQILTVLDGLQKQKTQSNNQLESIRSSGVINDSVLNSLESVINHIEKQIGALEKELDELVKDNCAETVNRIETIPGVGRKTAVLLTVVAHNFTRFSNYKQLIAYIGFSPRIFQSGTSVRGKNHICKMGNGHLRKLLYMCSWSAKRCNPTCNEMYNRLKAKGKPEKVIKVAIANKLIRQAFAIATNNREYQPNYINPKFAF

SEQ ID NO: 239159 - protein, 318 aa, unidentified
MLRAATVHAVTAIGIDMGKNTLHMIGLDPRGAIVLREKVSRGRITSRLANLPPCLIGIEAGMATHYVARELAVLGHDVKQVPPAYAKPFRQGHKNDFRDAHAVAEAVQRPTTRFVPAKTNEQLDLQALHRVRSRLVSERTAVINQIRGFLLERGIIVRQGLRFLRQALPDILAKRTDVLSPRMVRIVADLASDWRQLDERIENVTDEIEALAKSDDSCRRVMTVPGIGPIISSAMVAAIGSGPAFARGRDFSAWLGLVPKQMSTGDRLRESPSRFLPFGICSSLSTISDSALQQSRSIRTRLRAILQRPGFQYCLDGI

SEQ ID NO: 239160 - protein, 347 aa, unidentified
MKHSAGLDVSVKETAICIVDEVGKVVRETKVVTEPEAIIALLNSAGVEYERVGLEAGPLSQWLVNGLAEAGLPAICVETRHMKAVLKAQQVNKSDRNDARGIAQMMRVGLYKPVHVKTLASQQERMLLTTRKLLRDKLQDMENELRGTLRNFGLRVGAVSPGRFEARIRELVAGHLRLEMIVAPLLAVRRVLREQLAKLHKMVLDQVRRDPLCRRLMTVPGVGPVVALTFRATVDQAQRFARSKTVGAHFGLAPRRFQSGEMDYDGRVSKCGDAMMRTALYEAAQVLLTRTQKWSWLKAWAMQVARRRGAKKAIVALARRLAVVLHRMWVDGTEFRWRKETDAAAAV

SEQ ID NO: 239161 - protein, 347 aa, unidentified
MKRIAVDLAKSVYQIAESVRSGQVVQRKRLNREAFRRYIQEQAEPVEWVMEACGTAHYWGRVAQSLGHQVMLIHARYVRPYRRRNKTDRNDCDAMLEAARCKDIYPVPVKTHEQQLLQQLHGLRETWKKSRTQRINLLRGILREAGIEAPASTAAFIRAAHELVDRAELAPLSHQLHIVLAEINLYEQCMAECEQQLKRWHADDEVVRKLDEVSGIGLLTASALTAAVGKPERFANGRRLSAWLGMTPREFSSGDRRKLGHISRQGNVYVRTLFIHGSRAALLAAQRCQARTPEKLTQLQRWAVETAARIGHNKAAVALANKLVRICWAVWCHERRFSGDWQSIKPA

SEQ ID NO: 239162 - protein, 339 aa, unidentified
MLYVGIDVAKNKHDVTALNVRGKTVLKPLTFSNNKAGFELLDLSLRQLNQDCLIALENTGHYAFNLLNFLHEQGYKVYTYTPLLIKEFAKSLSLRKTKTNKKDAHGIALKLLSDPNREQFQHDNRQVELKILARHIHRLKKKQSDWKVQYTRCLDIIFPELDKIVEKHSEYTYQLLTCYPNPQKRLEAGFDKLIEIKRLTASKIQDILSVAPRSIGTTSPAREFEIIKHYKRLIDKAEKCVNDLMAEFNSVITTVTGIENRLGAVILAEIRNIHAFDNPAQLQAFAGLDSSIYQSGQIDLAERMVKRGSPHLRWALIQAAKACPRFSPAFKAYLKTKLE

SEQ ID NO: 239163 - protein, 422 aa, unidentified
MLTTTHDTEEIIERVAALDIGKAELMCFARVPDEDHPGRRLQEVQPYPTLTRSVLGLSDRLRCLGVTRVVMEATSDYWKPVFYLLEAAGFETWLVNAKDVKHLPGRPKTDKLDAVWLCKVAERQMLRPSFVPAPPIRQLRDLTRYRADLVAARTAEKQRVEKLLEDACIKVSSVVADIFGVSGRDMLAALAAGERNPKALAQLARRSMRAKITVLEEAFTGHFTGHHAFLLQTMLGRVDAISADIAALDDRIAAQAAPLADAIARLDEIPGISLASAYVILAEIGTDMTRFPTAGHLASWARVAPGITESAGKKKGKGSTGHGNAYLAAVLGNAAAGAAKTETYLGEKYRRIARRRGSKRAIVALGRSIPVIVWHLLSDPGARFHDLGPDYYATRLDSDRRKHTYIRQLQALGYKVSVEPTA

SEQ ID NO: 239164 - protein, 349 aa, unidentified
MNFYTNTHPYYCGIDLHTRLLYVCIIDNENNILVHEKIDDSPDKLLALLKPYLGNIVVGVECMHCWYWVSDFCEEHNTDFILGHALYMKAIHAGKTKNDKIDALKIAKLMRGGNFPLAHAYSKEHRSIRDALRRRTHIMRMSAQLKAHVSSTISQYNLPAPESRLNLQNSPDREKMHHFFPDEAVQKSMDLNLNIIETMVSELYKIEHYVKTQAQTHRATDLHILKSFPGIGKILALTILYEVGDIKRFSSVQKFASYSRLVKCKAESAGKTHGTQGNKIGNAHLKWAFSEAAVLYLKGNDNAKRYLAKLQKRMSKAKALSALAHKIGRCAYFMLKNQQVFDEERFLNE

SEQ ID NO: 239165 - protein, 340 aa, unidentified
MQWTVAIGIDTHKHTHVAVALDRLGGQRDVFEAPATSAGYLALYRWAQGLGEPAFALEGAGSYGAGLVRFLEAAGCPVYECERPKRSERRRGKNDLIDALLAARRLLSGERLGVPRGGSGPREDLRLLLLERRSAIRARTATLNQLQAVVVTAPARLRSRLGGDGSEQLARAAARLRPAQGEQAVVRAVLRRLGRRVLGLDAELGELELEAIVSALVPELLAECGVGPVCAAQLLVSSGDPSRMVSEASFAALAGTSPVDASSGQQQRHRLNRGGDRQLNRALHVIALTRVRYHDETAGYYQRLVASGKTTREARRCVKRTLARHFHRKLCSLPALPLTT

SEQ ID NO: 239166 - protein, 468 aa, unidentified
MTADKKLWRNRKERKEWARRLQSEDPGLEVVHPHAAGIDVGNSAHYVAVRPERDPQPVRRVECFTADLRRLADWLQSCGVKTVAMQSTGVYWIPLYEILEERGFEVYLVNARHTRNLPGRKSDVQESQWLLKLHTYGLLNNSFQPPAEIRALRTYWRQRGEHVAGAATCIQRIQKALTQMNLQLANVISDISGLTGQAIVRAIVAGERDPRKLAEFRDPRIQASEEEIAKSLEGNWRPELLFVLQQELEMYDTYQRRIAECDLQLQKHLASFANNVPPRPPEVEPDGKKRKRAKPAKNAPRFDLSCELQRITGVDLTRIDGIDVMIAQTLLSEVGVDMSRWKTEAHFASWLGLCPDNRVSGDKVLRRGTRHVVNRAANALRQAANALIRSRSYLGAQYRRLRTKLGAPKAITAMAHRLARLVYRMLKYGQRYVDKGTEYYEQRYRNQQIQLLRKNATKLGFQIAEARA

SEQ ID NO: 239167 - protein, 348 aa, unidentified
MNTLQTIGVDLAKNVIRVSVVSAANKEKMNKDFTRLQFSRFLAKQKPSLVAFEACASAHYWARQAVESGHQVKILPALAVAPYRQGHKTDKNDALAVAECAVRPNIKEAPMKSIEQQGMQSIQRSREFLVQERTALSNHIRGLLMEFGIVIRQGFSALHGNIPQILEDGENELPDMYRPTLQLMYERLCQLREDLKFLDDQIKALVKQNQACHELTAIEGVGPISAVLLFATLGSGEAFQSGREFSAYLGLTPKQYSSGGKTTMVGLSKKIANKRLRSVLIQGARAYIHRVKEPKTPKDKWLLDLVSRAGYGKASVALANKNVRTAWALLTKGGEYDRHYGNQELLVA

SEQ ID NO: 239168 - protein, 322 aa, unidentified
MDKPVTPDCYVGIDVGKDRIEVHIRPDAVAFGCATDAKGLEQLLTRLKPLTPKVIALEATGGYEAIIVATLSNAGLPVAIVNPRQTRQFAGALGRLAKTDKIDAGVIAHFAEMAKLEGKPPADAERSELRALLARRCQLVEMAKSERQRGARADSALTRRSCRTVVRQLEAEIARVERAIGKLVDGSPLFQAREALLKTIPGVGKVVARTFIAELPELGTVDRHEIAALVGVAPINQDSGKWRGRRMIKGGRPQVRSPLFVACLSVIQHNKPLRAFYQRLVDGGKVKKLAIVAVMRKLVVIANAMVKSGKPWSATATPAAAA

SEQ ID NO: 239169 - protein, 380 aa, unidentified
MGSIRVDHSPQGFAKLDNFLMQIIGSAPKEHMACIIETTHGLLILHLLEAGWPVYPVNPRTVDRRRSASGAKTDLIDAYLLAKTGRADFADLHRLTPDSEKVAELKQLTRDQDTLIRTQTRLVNQLTACLKAYYPVALELFSKLQQKSTLVFLQAYPTVETARAASLKDIQQQLKHTRHPHPADAAARVVELLHQPQLQADVVLTRTKSRLMLALVSQLLPLIEQLADYDKEISTLFLTHEDHAIFASLPRAGQHLAPRLLAEIGDDRERYQDAHSLQALGGTSPVLYQSGMYSKAHRRLGCIKPLRNALHQFAWQSTQSEAWAKDYYQRKRTEGKSHTVAIRALSNVWVRIIFAMWTHREGYQTATFELAQQQHARRAA

SEQ ID NO: 239170 - protein, 339 aa, unidentified
MALYTGFDLHSTNSYLGIIDEDGKRMWNKKLRNDPSLILGMLSPFKKDIAGVVVESTYNWYWLVDLLNEDGYDVHLANPSRIQQYSGLKHGDDKHDAFWLAEMLRLKILPEGYIYPKEQRPLRDLLRKRSHLVKLRTSLIVSLQNILARNIGKKMNTDHIKALRTDHVTPLFSGNDDLSLAGKVSKDAIDSLTIQIKAIEAVVEKKIDIRKPYDLLLSMPGVGRVLALTIMMETGPIERFPKVGNYVSYCRKVPAARYSNEKKKGIGNRKNGNKYLSWAYAEVAELARRFDPEARAYYERKRRHSNAPIAYNALANKLSRAAYYIMRDGVTFMPEKMFA

SEQ ID NO: 239171 - protein, 408 aa, unidentified
MNAVGIDVSKGKSMVAALRPMGEVALLPQEFLHTEVGLEQMAYAIVALGEDTRVIMEATGRYHEPIAAALHEYGIYVCVLNPLFIKQSGGGSIRKVKTDKADAMKIAKYGLDNWVELREYTPMDTVRQQLKLCSRQYNLYMKTVVSLQNNLISLTDKTFPGVNELFSSPERADGHQKWVDFVMTFWHCDCICRVSEKAFTDRYQKWCKRKGYHFSTEKALDLYAGSCGHFTTLPKNDNTKLLITTAAQQLLSGKMTLAALRAEMTRLAKQLPEYDTVRAMYGVGETTAVQLMAEIGDVRRFPRRSSIVGFAGVDPAVDQSGKHSAKSVPTTKRGSPHLRKTLYQIVCTYLKRSPADEPVYQFLDKKRAEGKPYFVYMTAAQNKFLRIYYARVKECIETFDAQQDTVQN

SEQ ID NO: 239172 - protein, 437 aa, unidentified
MLQEVNPHAGAVDVGSETFHAAVYAGAMKVFGTFTRDLQAVLEFFKANAVNTVAMEATGVYWMPLYDTLQKGGLKVCMVNGAHVKNVPGRKTDVADCQWLAELHAHGLLEPGFVPEAPILRLRDYQRLRQDHIEMGSQHILHMQKALERMNVKVHDVLTQLVGVSGLKIVQAILKGERDPEKLADLCDSTVLLKKRERLVEALRGQWQPEHVFALRQALAGWQFYQDQIADCDHQIAQVLAELSAPLPEIPADKLKPLGQRKPGRHNAPQIDGLYEMLMRLCGGNDATTLPTVTEYMVLQLIAEIGTDMSRWPTAKHFTSWLGLAPGSRQSGKRKRSQRRFRGRAGRIFCVAARSLARSKHLALGGFYRRIRATCGGQIANIAVARKIAQLYYNTLRFGMAYVEQGLKTYEEKYRTQSIRRLHNVARRFGLQLVETQ

SEQ ID NO: 239173 - protein, 370 aa, unidentified
MSKSTPLFVGLDVHKDSIAVAHAQGQSADPPVFLGAIGTRQADLDKLIRRLQAKTPTLVFAYEAGPCGYRLHRDLTGQGFDCQVVAPSLIPKKPGDKVKTDRRDAVELARLLRSGDLTRVYVPSVEDEAVRDLCRARDAARLTLKNAKLRLKAFLLRLGLHYVGRADWNEAHRRYLAKIVCPTPAQQIVFQESVRAVDEQVDRLTRLEAELRELAPSWRLYPVVQALQALRGVQWLVALTVVAELGDLTRFDSPRQLAAFVGLIPSEDSSGPRRRLGSITKTGNGRARRALVEGAWAYRYPAKVSAHIQTRIDGLPKPIQDIGWKAQVRLCKRFRRLVARGKHPNVAVTAIARELIAFMWAIAKEVPLTT

SEQ ID NO: 239174 - protein, 367 aa, unidentified
MGKIRLVEGVGQPGPHTPRRPDPGSQVWMAIDISRTKLVFCVRWDGAEQRRLSTPMGLEHVRTLVEQYRECAVHVAYEACGFGFEIAWWLQEHGVATTVIAPSRMERAPGLAVKTDRLDAGKMARKLEKGELKAIYVPGRTVHEQRTFGRTYAQCVKERKRAQVRIRALLQDHAKLGPLPAQGWTAYSEWLQGQHLAPPLAQSVKAHLELRRVADQQARSLHAQLEVLAASESYATIVKALRQQSGVGTMSAIRLVVELADIQRFPTAASLPHYLGLTPSQYTSGEIDRRGHIMKCGPGMLRALLLQCAWAAVRHGHDQDLVPVFQRLAPRVGRKRAIVAVARRLAIKLRRRWLQAISPPPTADATA

SEQ ID NO: 239175 - protein, 400 aa, unidentified
MKGFLHMKLIGIDIGKNKHFFCIMDQQTGEIISQPVSFSNDKEGFDFLVQKIKSYPKDSILIGMEDTGHYHFALLKYLLDLQYTVALINPKTTDFNRKMQGGITKNDKLDTINICDVLDTPERKKQYRITKVNSFDLYEQKQLTRHHHNLKEEENVYKNRLQKCIDIVFPEFNKLFNSKYGIVYMNILKMFGSAENIANTDIRTIRKCFEIEGRGNRISLTPERLKECARSSIGISSSAEVIQIKHLTAQIELIEEQLTEIDKKIEEFSIQNNSPILSIPGISHFSGTSILAELGDISNYSKPSQIIKFAGVAPLHYESSQFNAQHTAITKKGSKYLRKTLYQIILPVIRHNPVFNKYYQLKISQGKGHRCAQGHCVRKLLRIIYHLLKTNQQFDPQLLR

SEQ ID NO: 239176 - protein, 330 aa, unidentified
MRFIALDVHRDFCEVAIKDESGLRLTGKVKTAVAELQLFAQSLAPDDQLALEASEPALQIARILEPHVGGVAIANTRKLRAIAESKVKTDKLDASTLCELLAAGFLPAVWSPDEFTRALRRRLQRRAKLVRARTRAKNECHAVLARNLKGKPPMSDVFGRKGRRWLAALELPADESETVACCLREVDFLHSEIALIERELAAQALGSEEIRRLMTVPGVSLVSAATFVAVVGDAKRFSSPKKLASYVGLDPRVRQSGEAPARHGRISKRGSPEARHMLCEAAWVAIRTPGPLRAFYERVRSRRGAQIALVATARKLERGQPPAPLPAEDV

SEQ ID NO: 239177 - protein, 344 aa, unidentified
MNISMIGLDTAKSVFQVHAVDPSGKVAMKRKLQRGELIPFFEQHEACTVVLEACGAAHHWARVLTGLGHDVKLIAPEAVRPFVKKGRKNDAADAAAICEAASRPSVKFVSAKSLEQQSVLTLHSARCLLVKQQTMLANALRGLATEFGLTVPKGIGKLEELAALVNADEAFPETARHVLTGLFDHCRATAASIETVEAEIVVQARQDETARRLATIPGIGPITASLIAATVGDIGMFKSARHFAAWLGLVPRQYSTGGRNRLGRITKTGNREIRRLLVLGATSMVYRAPQWKSAAGLWTRAVLERRPVRLVTVALANKMARIAWALMTRKEVYHAKGRAAAAAA

SEQ ID NO: 239178 - protein, 371 aa, unidentified
MYIVGIDIGKNHHEASIVSPEGKQIGRSLRFATTHKGADSLMRFIFKNIGNSPCVFGMEATGHYWYPIYSFLKAKGYTIYVINPIQSDSLRKMYIRQTKNDSIDSFLIAEVIRFGQFGTTSMADENILAMRQLCRYRDSVISSRTEIKLRIGTIMEQIFPEYEKQFSSLWVSTSMGILEKYLTPENIENAPIDELFEIIKDKSHNRLTRAKAISIKEAAADTFGIKIAQDAFSFQLKQLIDRMNFLDKQIEALDCQILEYYEKFDCYLHTIPGIGIIGAATILAEIGDISRFKNSSSLIAFAGIDPTVRQSGEFNSTHNHMSKRGSPYLRHAIFLVATTCSFHNSPLNAYYKKKRDQGKHHLTATGAVARL

SEQ ID NO: 239179 - protein, 360 aa, unidentified
MQSFLGCDAHKHYSVFVAVDERGKATQPVRIEHNVAAYQRYLDTLPSGTEIAIESTGNWYWIVDLMEQAGHRPHLANPSEAKKRMGKTHKTDALDAKGLAILLRNGTLPESWIPPGELRDQRELLRTRMALRDLRTSLKHRIHSAIDRYGLHANGISDLFGVKGRAYIAETLPDLPPETARMVSLELDSIDQLNVKLMVLEQHIDRTLASSPEIQLLHTLPGVGKILAPVLWLEIGDIDRFPRAENLASYAGLVPRVISSGGHIRHGGTCRNVNRYLKWAFVEAATCATHLRAYREGHIGLLYRRLAPGKGHGRAIVAVARHLAEASYWMLRKREPYRQPQPPIISSKFGQARDTSDQAA

SEQ ID NO: 239180 - protein, 389 aa, unidentified
MPSVSDRPEAPTAIQTHLAASFVSLELSRSIWLITSLSPGSGEKMSKHSVRAGDVAALLARFSELKRKASERTGKSFPIVVIQEAGLDGFWLHRVLQSEGVESHVVDPSSIATSRRRRRAKTDRIDGEALLRALLAYKRGEPRVCAMVKAPTPEEEDRRRLCRERKVLIAERVKHVNRVKGLLFSQGISGYEPLRRDRRQRLDELTTGDGRPLPVHLKTQIRRELDRLELLLDQIKEAEAERDALLAAPQPAAPAPAGRMLLEFKGIGAELAAVLWLEALFRHFDNRRQLASYAGLAPTPWQSGSVDHEQGVSKAGNPRLRTSLIQLAWLWLRHQPQSALTLWFKERVSGNGGHFKKSTIVALARKLLVALWKYVTAGVVIDGAVMKDA

SEQ ID NO: 239181 - protein, 367 aa, unidentified
MKKVSTVVAKRSRNISQPTLTIGLDLGDRNSWYCVLDEGGQIQLEQRVRTNARALREVFSAVPRSRIALETGTHSPWISRLLSELGHEVIVANARKVRLIGESRKKDDRLDAQALARLARIDPGLLCPVKHRSAQAQADLTVIRARAGLVRARTSLVNTARSLAKSYGERLRGCNVRNMNPEKAEALSPELQSALEPLLAEIESLSERIAEYNDRIEALAQDSYPQVALLKQIKGVGTLIALTFLLTLEDPHRFRKSRDVGCYLGLQPGRRNSGQREPQMHISKEGDPYLRTLLVQGAQHILGPFGIDCDLRRWGLKLAERGGKSGKKRAIVATARKLAVLLHHLWVSGEVYEPLHNGNRLAVATAA

SEQ ID NO: 239182 - protein, 330 aa, unidentified
MTVFFGIDVAKEKLDCAVVVHDRQRPIGQKSFPNTPDGIERAAAWVMKVSKAEFLEVHAVLEPTAAYHELAARLLTAKGMTVSLVNPAQIRSFAKGMAVLSKTDRIDAVLLARYGCLARPKAWTPPAERLIDLQALLARLDDLEGDLRREQNRYEQACVRGCPGAIKHSFVTSIRALKAQCKRLQQAIAEHFAAHADLQADLQRLRTIPAVGPKTAMRMLVLLQSRPFETARQVAAFLGLAPIERQSGRSVRGRPRLSKAGSSRLRAALYIAAVVATKVNPDIKAQQQRMLERGKAKMSTLGAAMRKLVHICFGVLKSQDNYRFPAANQT

SEQ ID NO: 239183 - protein, 472 aa, unidentified
MECITIGIDVSKGRADIEIINQSGTRLGGSCGYDDTREGHARLSLVLRDLRQRYPDAKLIAGVEATGGYERNWVAFFRREQGDGRLVAIHRLNPLGLKRFLEADLHRKVDDQRAALGIARYLQERKRQAEPAAIPLDGRVVFYRNIRGLIHGRTALVQRFKTLLSSTNPELVQFCHDELPHWVLLVSLRYPTAAHLARSHGQALPDLPHVGPVRAEQIRAAAKTSVAALTDEGSAAAMRLLAEEIIHLNERIEALKKQLIAMTEDDPQVRLLDSIPGVAPWTAAALALEIGDITRFADVRQLVAWSGLDPREDISGDGTIKRGISHRGNAYLRALLVQMARTGKLHNPVIARFIGRKTAEGKKPLVAIVAGAAKLLRIAFAILASGKPFESDYEAKRAKPAADAQQQVRSTTATKATEAAPADRTAPVSATEVRKRRRAGNNATATKRPVCEVKPQEGSPATVATAVSTPTT

SEQ ID NO: 239184 - protein, 386 aa, unidentified
MIYVGIDISKYKHDCFICKDTGEVIVENLSFTNNKKGFQQFLDLLKPYDNSNVRIGLEATGHYGLNLKLFLEKNNYSFMEFNPLLVKEFYKSLSLRKTKTDKVDAVVITQKLMSVPYKPNSKLFYHKYSIKSLTRLRENLVKQRSKYKVQLTNILDIIFPEFKPFFNNSFGVTSLYILNKYKIPNKIANMRDFETLNKLSRGNFTYAKFVKLKDLAKNTIGESNDIFEIELSSILDLYKNIDDHINELDKQISTIIKDLNPPTLSIPGIGVISCASIISEFGDISKFSNPSKMLSFAGLEPGIIESGTMSSKGKMVKRGSGYLRYSLMNVALTVIRFNNIFYDYYYKKISEGKCHRVALSHVCKKLIRVIYILETKNIQFDPSLLK

SEQ ID NO: 239185 - protein, 323 aa, unidentified
MSNQPVFVGIDVGKDWLDVARHSSDEVQRFGNDERGIEALVGCLTDPRPRLVVLEAPGGFEFPAAAALAAVKIPVVIVNPRQTRDFAKSTGRLAKTDTIDARGLALFAARVQPEVRALPTDEARALEAIVARRRQIIEMITAEKNRLGFALKSVERGIQKHIRWLERQLHDVDQDLDSMIRDSPVWAAKNDLLRAVPGVGPNLSRTLIAELPELGCLSHKQIAALVGVAPLSRDSGKMRGKRTIWGGRASIRSALFLSVWSAAKWNPVIRPFYDRLRAKGKPPKVAQVACMRKLLTILNAMLRDDREWDPSLPLDQLRLQHSC

SEQ ID NO: 239186 - protein, 390 aa, unidentified
MIYVGIDVAKDKHDCCILGSDGEILFSPFTFQNNLIGFDELYEKIWSLTSDLTEIKVGLEATGHYHLNLLRSLLDNGLASFVINPLHTNLFRKGQSLRKTKTDKVDAASIAMMLLTDRTLKPYSDTSYHNEELKSLTRYRFDKVQERAQLKTSVSRLVSILFPELEQLVPTLHMASVYALLSEFPGASFLASAHLTHLKHLLHEASKGHYGRDMAVSIRRAATSSIGSVLPAKSLELKHTIHLIEVLSAEIDEIEAAINAIMATLNSPITTIPGLKNRMGAMILAEIGDFSRFDNPDQILAYAGLAPSTYQSGQLISSYARMEKRGSRYLRYALFNATIYVCIWDPTFKAYLAKKRAEGKHYYVAISHACKKLIRVIYRMQLTGEPYRAS

SEQ ID NO: 239187 - protein, 312 aa, unidentified
MEKLSYGGIDVSKDRLDVVVLPEERFFSVSNDTAGWADLVARMRPLAVSAIGIEPSGRYERGIIRALLAAGLSVRRINPNKLRQFARARGVLAKNNRLDARLIAEYVAIMPTRIVQRDVAAERLAEVVTMRRQLCDEHVTVENQAAHVEDVMLRRLNKRRLTRLEADISLLDKRLAEIVAADSTLVQRYELLTSMPGVGPVLAFTLIALLPELGQMSRKQIAALVGLAPYDFDSGKLRGHRSIYGGRMPVRNVLYMAALSGCRYNPALKAFHKRLAAADKKSKVVIVAVMRKMITTLNAMLRDNVEWQPKSA

SEQ ID NO: 239188 - protein, 340 aa, unidentified
MGEITTVGLDLAKHVFQVHGVDAEGATVVRKQLRRAQVLAFFSKLPRCLVGMEACATAHHWARELRALGHEVRLMPAQYVKAYVKRNKNDAADAEAICEAVMRPTMRFVPAKTADQQAAVLLHRGRERLVRQRTMLVNALRAHLAEFGIIAPQGLRNVGQLIAIIRDDKDARLPNLARQVLQVLAVQIEQLEAAIAALEKQLMAWHKSNPVSQRLATIPGIGPIIATAIAAMVAEPSGFRSGREFAAWLGLVPRQNSTGGKTRLGGISKRGNQYLRRLLINGASANLLRSKATNADPWVIGLRRRRPSMVVAVALANKTARIAWAVMHRQENYQRMATAA

SEQ ID NO: 239189 - protein, 536 aa, unidentified
MPSPPNRARPYSRSEVIHRAGDESLFPAFERERPRIVNNFAASAPSGYEFSSISEKMNCTRPSNLAAVLGSGNEYSDEDESSLETITSGYKEFASGSGRAKDHYPSLNMNESVSEQPLKVAAFVGIDWADQKHDVVLRSAGDPAKAEHQVIKSEINALNDWIAQMQERFGAKGKVLVCLEQSRGALIYQLMAYELFELYPINPSQLAYYRKTFFSSGAKDDRPDADLLSELVMCHRDRLKAWKPDDQLTRELASLNEGRRSAVDRRTELANEIKSQLKVYFPVALQILDHDITTVLAADLLVQWQTLAELQKVSPSKLRKFFYGHNSRQEKKILQRLALIKEATPLTMDVAIIRPNALRVKLLAQQLKSLLPFIAEYERRIAELFGSHPDRFLFDNLPGAGPALAPRLLTAFGTDRDRFEVAGDLLNLSGIGPVRIASGKKTGKKASVHCRRACPKFLRQSFHEFGECSIRYCPWAQACYQAQRGRGKGHHAAVRAVTFKWIRILFACWKQRTPYDPQRYFQALQTRGSDYAQTTA

SEQ ID NO: 239190 - protein, 345 aa, unidentified
MKVRRTKSKDMTQPAALYIGADVHERESQLAIFEPSGTLLTEKRLPTTNLPTFINSLPGEKHVAIESTGFIYPIYDKLSTLKSCHVSVANPNKVKLIAKSKLKHDRADAKILGELLRTNYLPASYMPPPATREKRLLINDRVRYGLRSGELKGSIRWLLKRRGIQIQHTFKPEGKRKLRELDLQEINIRLDELELIEGTIRKLNDQIAKIVQEDPNAKLLDTLPGVAPYTALFLSSEIGDVNRFPDSKHLCAYIGLAPSLHQSGNISFTGHITREGNKWLRRNLTECSRAAVRKDPHLRTFYLKLTHKRGEKKAILAIARKLATYAYWMLKRNQTYEELSPWDGS

SEQ ID NO: 239191 - protein, 407 aa, unidentified
MHHKQRQMYVGIDLHKHHHTAVIINCWHEKVGEIQFENKPAAFTDFLIWVRQHVPEMMTPVFGLEDVGGYGRALASFLVDHGQTVKEVNPALSYAERNSYPTVQKSDSWDAECIARVLVNKLDRLPHVQPKELYWTIKQLVTRRNALVKAQMTLKNQLHVQLSYHYPSYKKFFAKIDGKTALAFWDQYPSPLCLEGVTVEELTNFLQTVSRNACSSRKAAEILEWIKTDGRTDQPYQQTRDFLVQSIVRELNFKKQEIAQIERELKVFMASLNYQLETMPGIDTVTAAALVAEIGEIERFSHADKLARYAGIAPVHVGSGGKGKDYKSKQGNRTLHALLYQLAIQQIQVAKETKKPRNPVFYEYYQRKQKEGKTKGQARVCVMRRLVNVIYRMMKHKTAYEMPIRKE

SEQ ID NO: 239192 - protein, 330 aa, unidentified
MNYQTKFYIALDVHTKKTQYAVRTWEGDMLLDGYCASMYKDLKDILEPYFHSCVVGMEACSGFYPLREGFMHDGVEVKIANVLRIRQLIVKNDKLDARRLSDMLRLGTFPESFIPSKEIQEMRDLVTVRHSFLKQLNSAQSRIWATLTRKGLKIPERSIFSKKGLTHLNLIIKEGKCGSDLKFLFTHYQNVAMSLEQSTNELIEYAKSNFPEEWKKLQDINGIGPLVSSYTIANVHPISRFENKKKLRRYAGVIPCFQESAGKFHGSFLPKTSSRALLRWALTQAAHGAIRTKNSKLSLYYKSKKKDKKQKAIMAVARSVCDLVFMKLNE

SEQ ID NO: 239193 - protein, 339 aa, unidentified
MKYTPIGVDIAKHLIQVHFINEHTGEVVDKQLRSKDFLTFFSNREPCLIGMEACGGSQHWARELAKLGHKVRLLQARFVKAFVIGNKNDVMDARAIWMAVQQPGKEIAVKTEEQQSVLVLHRSRRQLVKFRTAQVNALHGTLLEFGETIHKGRAAMDRELPTALERMRVKLPPYLIALLEEQYNRLSELDSLIDGIEKQLISVAKQSETCKRLMEIPGVGPLIATAAVATMGEASAFKSGREFAAYVGLVPKQTGSGGKVRLLGISKRGDTYLRTLFIHGARAAALLAKEPGPWITELKKRRPTSVAIVAMANKLARTVWAIAAYDCKYDKNHVSIRPY

SEQ ID NO: 239194 - protein, 415 aa, unidentified
MDRLIERCAMLDIHKSQITACVRVPDGAGGRRQEVREFASTTSGLLTLADWLRSWAVTVVGMEATGVYWRAVFFLLEDEFDCRLYNARHLRHVPGRKSDVQDAEWGCQLVEHGLVRASFVPPRPMRELRDLVRYRKAKIQERTREVQRVEKTLQDAGIKLSSVASKVLGVSVRKMLDALISGIHDPEILAELAKGTLRTKIPALKEALQGRFTGHHALLVSQMLAQIDFLDETIATLSERIEELTRPFSREIELLDTIPGVDRRAAELILSEIGPDMSRFPTDAHLASWGGVCPGQRESAGKKHSSKTRPGSKWLRGTLTESAKAVVLAKGTYLSARYHRIKSRRGHAKATVATAHKILTAAYHVLQQGVPYDELGEQFFYRRDTDATERYRRRLIHQLERLGHKVTLQPLPDAA

SEQ ID NO: 239195 - protein, 432 aa, unidentified
MKLPKHLEHINRYAAGIDIGSKSHFVAVPEGTDEQPVREFSTFTADLERLAEWLISCGITTVAMESTGVYWIPVFEILESHGLEVKLVNARHVKNVPGRKSDVLDCQWLCQLHTYGLLHGAFRPADEVCTLRAYVRQRSTLINSCASYIQRMQKALAQMNIQLHNVVTDITGATGMRIIKAILNGERNPDTLAAMRDPRCKNSSYTIARSLKGNYRPEHLFSLQQAFELYEIYQTKIADCDRQILEQLKSFDDSTNNMPPTTVDDALVRMSGVDLTAIDGIDTTTALKIISEIGTDMSRFKSAKHFASWLGLSPGTKVSGGKVLSSATRQVANKAAAALRMAAFTLFNSKSSLGAYLRRQRARLGTPKAITATAHKLARLIYAMLTHGTAYVDAGQEYYEERYRVRVIQNLKKRAHEMGFELVNIQKEITAV

SEQ ID NO: 239196 - protein, 426 aa, unidentified
MHYTQNQKIEQVTSSTLVIGVDIGSKVQYARAFDWRGIEFTRKAFRFMNSHDGFNQFYEWMCRLMAETGLDNAIVGLEPTGHYWFPLAQFLESTQIKLVLVNPLHVKQSKELDDGSQTKNDSKDPKVIAKLVKDGRYTIPYLPKGVYADLRTAWKVRESISKSLTADKNKLKRWIATYFPEYVEIYGNLEAKSSLLLLHQACLPEDIVELGPEGINKIWRDAKLRAVGIKRATTLVAAAKNSIGQKAGAEGARVELKYLLEDYELKYRQFEEIEKQIEELCSQIPETKLLLEIKGIGMTTVAGFFAEVGDIRRFDSPKEIIKLAGFNLRENSSGKHKGQTTISRRGRARLRKVLFKGVIPLLASNDEFGQLHNYYTTRKQNPLKKKQSVVAIGCKLIRVFWGVSMSGQSYDGQKMLRDIRREPMAS

SEQ ID NO: 239197 - protein, 339 aa, unidentified
MKKRYLGVDLHRSCFTVFTRLKDGSGALQHWSIGSLKAFAKTVKRSDEVAVEATGNVRLFCEALKGSGCRMVVVNPHQFEVISRSVNKTDEHDAKVLAEFLSKGMLPEVRIRDEVHARVASLAQTRDKLVKLRTSLKNKVNNLLAARGILIAKESLSSEKGLAEVLASPVSELDRMELEILIGEIRHLTESIKKLEKLLHDHGSTLPGWKNLTSIKGIGDIGGSILLSTIGNIEDFADEGKLAAYFGIVPRVSNSNETERSGRITKRGCKLGRTTLVQCALIAARYSPYLQSHYRRIAAARGTGKAIIALARKFLGIIYKTLKNNWIFEDFPRFVLSNA

SEQ ID NO: 239198 - protein, 406 aa, unidentified
MQVVYQRCCGLDVHKKNVTACVITPNGKEIRTFGTMTDDLMQLADWIKRHRCTHVAMESTGVYWKPLYNLLELEELHVMIVNAQHIKAVPGRKTDVKDAEWIANLLRHGLLQGSFIPNREQRELRELVRYRRSLIDERSREVNRIQKVLEGANIKLSSVATDTLGVSGRAMIEAMIQGVEDPEALSDLAQKRLRSKKADLERALKGLIGPHQKMMLETQLQHIDFLDEQIAKLDEEVRNRMLPFEEDLERLDTIPGVGRRAAEQILAEIGADVKNQFPSAAHLCSWAGMAPGNNESAGKRKSGRTRKGNKKLRHALVEAARSAARTRNTYLSAQYHRIAARRGANRAAVAVGHTILTIIYYLLVRKQDYVELGSDFYDQRRKDIIIKQSIKRIESLGVRVSIEQSA

SEQ ID NO: 239199 - protein, 387 aa, unidentified
MQKPHDNSKASPAAFMQDNTLIAVIELSLSNWLVAGLIPGVSREPLKKLEPNPGDLLKLLHGWRDEAIKAGRPITRIAVAYETGRDSFWLARWLRERGIDAHVIHATSVTVSREHRRAKTDRLDTAMLKRGFLGWLRGERGHCTVAIVPTMEEEDAKRPHREREGLVHEQTRVVNRMKSALIQFGVRNFNPKLRKSSVKLETVRTPEGKSLPPNTIAALRRDMERLKIIKEQIKAIEQARLQQFEQKPEAVANRMIYLLVRIYGFGLETADLLVHELLSRTLRDRKAVARYAGLTGSPDESGSKRREKGLSRSGNARVRKIMIQLAWRMVKFQPDSALVQWFKQRTENAKRSRKPMIVALARKLTIALWRYANDGVIPEGFRLHSAA

SEQ ID NO: 239200 - protein, 386 aa, unidentified
MIFIGIDIAKSTHFASAVNSDGEVLVKPFKFTNDNVGFHLSIDTFKNYNLANCLVGLESTEIYGDNLTTFLFERGFKIGRINPIQTDSLRSSNIRKTKNDKIDTFLINQCLMLGYYTLITDKGIQFIKLKTLCRFKFDIKKSQSKAKTQLVTCLDIAFPELANFFNNHLHIKSSYALLSKYPSARIIANTRIDALTNLLYSASKGHFKMDKAIALKELAKNSIAMDNPAIGVQIKMLIEQIQMLEKQIDLLDIEITNIMESLNFPISSIPGIGNWLGAIIISEICDITRFSTSTKLLAFAWLDPSVRQSGNFNATSTKISKRGSKYLRYVINRVAQLIIWNDDTFYQYYTTKLAQGKSYLNAIGHVSHKLTRVIFKLLTTNTTFKK

SEQ ID NO: 239201 - protein, 395 aa, unidentified
MFIVGIDVAKRSHEVCMITSDGQTVQRPFSIRNNCTGYNLMLEKIRKHTNIKSQIVFAMESTAHYWLALFTRLRKDGYHVILLNPIQTSAMRDMFIRKIKTDVKDSFIIAELIRFGRYAESNVAQDRLLALKELCRNRFYLVDMAGDLKRKLIALIDRVFPEYEAQFDTIFCKSSVALLKKYPTPQKLSNAHLDKLTELLWNSSNGHFGEWKARELRELARNSFGVEDCDGAYSTLILLMLDQIQSLSGKADALEKEIFRLFQSFDTTVTTIPGVGPIIGAVILSEVGDISRFSSADKLAAYIGVDPSVNQSGEFQAAHAHMSKRGSPYLRRCIWMASQVAVQRDPMFRAYYEKKAAEGLKYMTIIGHVTRKMTAVVFAILRDHKVYEPVLPTAA

SEQ ID NO: 239202 - protein, 410 aa, unidentified
MEALLERCAGLDVHQASVVCCILIGVPGRRPQKLLRSFGTTTRELEAMRSWLAEHGVTHVGMESTGVYWKPVYAVLEGHFDLIVGNAHHIKNVPGRKTDVKDAECIAQLVRHGLVAKSFVPPPAIRDLRELVRHRRTLIEIRTATRNRVLKLLEGANIKLSGVASDVFGVSGLAMLEALAAGTANASEMAGFARGRMRRKHAALEAALEGRMREHQRFLLAMQLRTLKAIDHDIEALDTRIEAHLEPFRAQHQLLMQIPGVDWVTAASILAEIGPDMSVFTTARRLAAWAGVAPGNYESAGKPKGAAVRRGNVFLKAAPFAAASAAVRTKGSYYRDKYYRLRSRRGPVRALMAVAHKLLIAAFRMLTTGESFRDLGESYLDQVARKRSTTRLVQRLSNLGYDVMLVPKAA

SEQ ID NO: 239203 - protein, 520 aa, unidentified
MEAGCPDTTSDVVHDLVVRNVKMKHNEVVNNSAGGQAGNGRRQASARTRSGCPVATSNRVRSPVVPGAPGQTYERTSSQEDHRIRFTGCRGSLAQRGPNNMTAQQWTEQSYFAGLDWARSHHDLVIIDRHGEIKEALRFPHTAEGWQTVKTLSARYPKLPVAVETSQGTVVEHLFAAGLHVYPINPKAAERYRERHAPSGVKDDQRDAWSLADALRLDGHIWRALAPQDALATELQLLCRDEIALIEQRTALINQLQQCLHEYYPAALEAFDDWTCPAAWALVLTFPTPAELQAAGRRRWEKFLHTHKLWRPATTDERLAVFARATALSGAAPTVAAKSLLAVTLARLLHALEKQLTEYRERITTTFARHPDHNIFNSLPGAGPKLAPRLLGEIGAERARFDSADGLQCVAGTAPVTIQTGNGDPHQHLRHACNDTLRATVHLWANLSRKKCAWAEAYYKQHRKNGQSHACALRCLGQRWLKILWKMWQTHTPYDEAFHTRNQTKHGSWILSLNVPAKNA

SEQ ID NO: 239204 - protein, 322 aa, unidentified
MTRVICGVDVASSSLAARIGQDGAGANFSNTPEGIAALAAFCASHQVELVAMEATGGYEQRAFAQLSEHGLGVAVVNPRAVRQFAQSMGSLEKTDAIDAGMIAWYAEVKKSQPLCLAPQTQLELRARVTRLRQLTEVRTAQLNQQRLVINLAVQKGFRDMLAFLAEQIRELEQAIAALIEADPLWRELDQAFRTIKGVADRTVARIMAEMPEIGTLSNKTISKLAGVAPLANDSGKHQGKRTVRGGRSTVRDILFLVGSVVARHEPDFIVFQQRLRAAGKPPKVVRIAVAHKLLVRLNAKAREVRQRVTPTPNCTRAEALVA

SEQ ID NO: 239205 - protein, 391 aa, unidentified
MFIVGIDIGKRNHEATIIDQAGSIICKAFRFANSIIGFNRLMETVRRTTANDVVFGMEATGHYWLALYTHLRKQGFTIRVINSIQSDALRAMYIRQQKNDSRDSFIIADVIRFGRFCETSVAPPDLYALRELCRHRFYAVDSVSDIKRKVIALLDQIFPEYENLFTDTFGKTSLELLSEYTTPEEILNVDTDKLVQTISITSRGRFGFDKAAEIQNAARNSFGILLATDTISLLIRQYIEQIRFAEKQIDVLDEEIARLLSAFETQLTSITGVGPTLAAVILSEIGDVKRFDSAAKLAAFAGVDPTMKQSGDFTGSRTKMSKRGSPYLRRALWLAATVASFKDPSISIFYQRKRSEGKSHMTALGHVARKMVNIIFAVLRDNSTYSPAIVN

SEQ ID NO: 239206 - protein, 341 aa, unidentified
MGIMTIGIDLAKNVFAVHGVDETGKAVLVKPKIARDQLLPLMANTPACLIGMEACTGAHHWARLFRQHGHTVRLIAPKFVTPYRMSGKRGKNDAADAAAICEAVTRPHMRFVPIKEEHQQNILCIHRTRQGFVEERTATYNRLRGLIAEFGIILPQKVERLRSDIHSHLESMPGWLNRCVTDLLAHADHLDALIEEYDRAIKTIAKEDERSKRLMQLPGIGPTTASALLASLGVAHDFDNGRQVAAWMGLTPGQYSSGGKTRLGRITKAGDGYLRSLLVLGARAVLNSLGTKQDRFSRWARALQERRGYWKAAVAIAAKNARLAWAMLKYGEAFRLYPGAV

SEQ ID NO: 239207 - protein, 435 aa, unidentified
MANYYHIPVVGIDVAANFSVVSALKPNGDIYIKNVKIMHSHDGFTKLVTLIQKIEKEFNVKSKVFCESTGIYHLTLFHYLIDQKIDINVINPLITNSNKNSNIRKVKTDKFDSLSIARLSKYDDIKVSSYVSEEFLHLKFLVRDYYKMIDLRANLKKAFSNNLYIYYPGFHKAFSDTTGKTALLFIETYPTPESILEADKLEVINLLQNSSRKGSQWAKTKYNTIIEIATSAKQIGINTPCFANKVKRFIETYKFYSNQLDNLSAEIMDYIDSASFSSVFKSNLELLKSFKGIGDITAITLLTEMNAIENFAKSSQLVAFFGIDPGVNQSGNFKGDQNKMSKRGTAIGRRALYALALASIRKTKNKVPMNTVLYDYYHNTLKSKKKKVRLVAVMNKLLRYIFSVLKNQKPYEVRNPKIHKKMFLEANSRLITKTA

SEQ ID NO: 239208 - protein, 425 aa, unidentified
MRSVALDVHRDFCEVAIKDESGLRLAGRVKSSPAELERFAQSLAPDDQVALEATGSAGAIARILEPHVGRVLIANTRKCSAIAESKVKTDKLDATTLCELLAAGYLPAAWSPDEFTRALRRRLQRRAKLVRSKTRAKNECHAVLARNLSGRPPMTDVFGKAGRQWLAALELPADESETVAGCLREVDFLDSEIALIESELARQALSSEEIRRLMSVPGVSLVSAATFVAVVGDIHRFSSPKKLVSYVGLDPRVRQSGEAPARHGRISKQGSPEARHMLCEAAWVAIRTPGPLRAFYERLRARRGAQVALVASARKLAVLFWHLLTREEDYAFGRPSLTRRKLRGLELKAKDGRRSWPSGHALSTKQDREREAEFARQVETAYRRLVADWQPKPPRSGAGATRGRASSKPTSGKQRGRASVPNSAL

SEQ ID NO: 239209 - protein, 410 aa, unidentified
MDVFLERCAGLDVHQASVVCCVLIGAPGRKPQKLLRSFGTTTRDLETLQAWLAEHGVTHVGMESTGVYWKPVYAVLEGHVDLTVGNAHHIKNVPGRKTDVKDAEWIAQLVRHGLVAKSFVPPPAIRDLREMVRYRRTLIETRTAMRNRVLKLLEGANIKLSGVASDVFGVSGMAMLEALAAGTSSTTEMAGLARGRMRRKHAALEAALEGRMREHQRFLLGMQLRSLGTINQDLEALDARIGTQLEPYQAQHQLLTQIPGVDWVTAASIIAEIGTDMDVFASARRLAAWAGVAPGNYESAGKPKGAGTRRGNVFLKSALFAAASAAVRTKGSYYRDKYNRLRARRGPVRAIMAVAHKLLIAAFHMLSTGEAFRDLGEGYLDQVARKRSTTKLVQRLSNLGYDVMLVPKAA

SEQ ID NO: 239210 - protein, 343 aa, unidentified
MTHPPQLILGIDTHKDVHVAVVLDWLGRYLAAASFGTTDAANSELVAWTQSYGQVTTAGVEGTGSYGYRLAQHLTDQGINVVEVNRPDRARRRRKGKNDPVDAEAAARAVLAGDAHAVPKDRNGTVGELRALVVARRSAIKARTQATNQLRALLVDGDDELRSRLGPLRKAHLARACAQLVPSAGLRLALGSLGCRWLALNDEITNLDAAITGMVRRTAPRLLERHSVGVQTAAQLLITAGDNPDRLHSEAAFAAMCGASPVQASSGKTIRHRLNRGGDRAANSALWTIANNRLMHDPCSRSYAAKRTAMGNSRKEILRCVKRALARELYPLILDALARPPLP

SEQ ID NO: 239211 - protein, 349 aa, unidentified
MYYVGVDYHKRYSVATVLDSAGEMLARQRLDNRLEAFRDLLEPYDKDEIEAVVEATRSWGIPVDMLEQLAGRVILANPGEVKLIAKGRIKTDKVDSLALAKLLRVGWIPQAYLRPRTNREHQLILRVRCFFVQLRTRVKNRIHDLIDRQDEPIRETATSFSDLFGKKGMVWLKGLDLSHPCGTLLCRLLAAYDALDAQVRQSDRLVAELFAADDDCQLLAKTPGIGTFFSVLIKTEVGAIERFSSSARFCSYAGVVPSTESSGGKVWHGRIIKQSNRWLRWALVEAVIPATVADAGLRAHYEYYRRTKGSKVAKVVTARRIGCIVYRILKEKQPFYERPFPNRGYRQAG

SEQ ID NO: 239212 - protein, 405 aa, unidentified
MDIIIERGAGLDVHKENVVACIMGDGIKKEVRTYLSMTNDLFRLKAWLQENRITHVAMESTGVYWKPVFNVLEDSFEVILVNARHVKHVPGRKTDVQDSEWLCKLLRSGLLRGSFIPPKEVRELRDLTRYKRKLIHTITSEKQRVEKILEDANIKLSSIASDTFGVSGRGIIQELLKGDLHPEEMAELSKGRLRNRIQELKEALVGNMGEHHKQMIRTSLKHINAMEQMLTSVEQKIQKKINCHFKEAYELLKTIPPVKDNASVLIAEMGVDMEMFPTEMHLSSWAGISPGNNESAGKKKPGTTTHGNNYLKTILTEFAWIASKMKGTYLRAKYQSLVGRRGKKKALVAVGHKILISCYHILKYKVAYKELGANYLDQRKKDKITKSYIKRLNSLGYTVTLNEAA

SEQ ID NO: 239213 - protein, 419 aa, unidentified
MHEEDRRWFAGIDWGTETHHAFVSDDRGHKLGEKAFPHSGEGLVAMQDYILSLTGSTPDKVLVAIEVPHGPVVESFMERGFRLHSINPKQLDRFRDRFSPAGAKDDSRDAEVLSSGLRTDPHCFRPLAPLDPIVIELREWSRIAEDLTAERNRLSNRLRQQLWRYYPQITELTDDVAAGWLLELWALVPTPDKAKRVREETVARLLKRQRIRRLDAAEVLTTLRRPAMVVAAGTVEAATSHIKVLAKQLELVNRQIAEAEHQLDRLTDRLAGTEADEPGQRIEQRDVTILRSLPGVGRIVLATLLAEAWDLLQRRDYHGLRCLCGVAPVTKRSGKSKLVQRRLAIQWRLANALHHWSRAAVQHDPRSRAKYAALRQRGHGHARALRSVADRLLGVACAMLESQTIFDPQRAQQMATNVT

SEQ ID NO: 239214 - protein, 374 aa, unidentified
MTITANESPTTVSEVILGIDTHKDVHVAVALNQLGRRLGELTVPTTTKGYEKLFRWAEGFGPVCCAGVEGTGSYGAGLARWLKAAGISVMEIERPKRRHLRHKGKSDPIDAEAAARVVMADDTAGEPKSGDGQVEMIRTLRSVRQSAVKARTQAANQLQALLVTAPESLRHRLRELTTRDLVDTCGRFRPGSEPDEVHTATKFSLRSVARRYQLLSEEIAELDEQLDRLVAKAAPELTALPGIGTDHAATLLSVAGDNPQRLKSEASFASLCGVSPIEASSGKVVRHRLNRGGDRDANRSLHLICVVRMRHDQRTREYVARRTAEGKSKREIMRCLKRYIAREIYRLLAPRAAASPPTASVSQAAYPRKVAAQP

SEQ ID NO: 239215 - protein, 343 aa, unidentified
MPHYVGLDVSQKTTAICVVDEQGRRVWRGVCATDPEAISARISKHAGLDAKVGVETGSMTPWLVHGLRSAGLNVHCLDARRVKAALQMQLNKTDENDAEGLAQIMRTGWYRAVYVKSLEAHRARALLGARAQLVGMTTRLSNMIRGVLKTFGLLPGAGRGLRFDRKVEALLEGAPDIALVVRPLLATWRQLREQIAVFDKAVLQQVREDPVCRLLMTVPGIGALSSLMYVSTVEDPSRFSRSRAVGAHLGLTPRRYQSGETDRSGHISRCGDGLARTLMYEAAIVILHRVKRPLHLKDWAQAIERRSGLGKARVALARKLSIILHSVWRSGEPFRWAPPAIGA

SEQ ID NO: 239216 - protein, 352 aa, unidentified
MMVAGVDPHKQTHTAVIVDGLGRRQAHKTVAARRDGHLALLAWARSQAAGQDLAWAVEDVRHVAGNLIRDLLAAGQRVLFVPPKLMAGERRGGRERGKSDPIDALAIARLAVREDLDLPAARLDERTRPLRLLTDHRDALVTDRTKMVSRLRWHLHDLDPALAPAARALSRPRPRRQLAAALAGLPATTARRVATAQLARIEHLSAEIDAIAAELAPLVTAIAPALLAIPGVGVLTAAKILGETGDIRRFRSPAAYARHNGTAPIPAWSGSHTVFRLNRAGNRQLNAALHRIALVQARLHPGARALLDRRRKTTRDTTKASLRVLKRHLSDVIYHAMITDVSRQDSPLPRSA

SEQ ID NO: 239217 - protein, 339 aa, unidentified
MELYSGMDLHSSNTMIGIVDEKRKHLMDRKLRNDPELIRSFLKPYKPVLKGIVMESTYNWYWLADLLQEEGYRVHLSHPVANEQYKGLKHSDDKHEAFWLAELLSLGILKEGYIYPRQIRSLRDVLRKRAHLVRVRSALLVSLGHMVQRNCGMKVKTGDMKRLTQDLVSPLLNRDEALLLAGKTSKEVIDCLTRQIDKIERWALNRLRQEGVFLGLVTLPGVGDILGMTILLETGPVSRFRAVGNYASYCRKVSSQWTSNDKVKGRGNIKNGNKYLAWAFSEAAEYARRTNEACRRFYDRKLRQTNTKVAHNALAHKLARAAYYIMKDHVSYEEEKMFS

SEQ ID NO: 239218 - protein, 479 aa, unidentified
MKAAQVKKGGSQAGKNHPLRRNRKQRRELARKIQAGDMSLEVVHPDAAGIDVGNESHYVAVPPSRDDPSVRRFGCVTAELREMAAWLRKCGIRTVAMQSTGVYWIGVYDVLEEAGLEVYLVNARETKNLPGKKTDVQESQWLMKLHTYGLLRNSFRPAQEIRTLRTYWRQRKDLVSSAAQYIQRMQKALTQMNVQLANVISDLSGVTGQAIVQAILQGERDGRKLAALRDHRVKASEEEVARSLEGNWREDLLFVLRQEQEGYEFCRKQMAACDRCLEEYLRQVEDRSGGASLPVEKRPSRLQRKRGKAPRFDLREALFRMTGVDLTQIDGIDGVTAAVVVSEAGWDMSKWATENHFVSWLRLCPDNRISGEKVIGKGRLATTNRLTVALKIAAHSLRQSDTYLGAQFRRLRSRLGAPVAIKAMAARLARLVYRMLRYGMKYVDRGAEFYEQQHRQRQILFLKRKALSLGLQIVEPMVA

SEQ ID NO: 239219 - protein, 349 aa, unidentified
MDQITRIFIDTSKSVFQLHGVNAAEKVVLRRKLQRRQMVEFFTKLAPTVVGLEACGASHHWARVLGGLGHEVKLIAAQLVKPYVRRNKNDARDAEAGCEAMSRPTMGFVPVKTAEQQAALMLVGVRDRLVRNRTQLTNMIRGHAAEFGLTAAKGLDKIEPLIERVAGDESVPALAKGLFADLGREYVQLQVRIRRIDAELMAWHRGNPLSRSLAQIPSVGPIGACLLVMKTPDPRLFRSGRQFAAWIGLTPKDHSTAGKLRLGVITKAGDEALRSVLVVGATAVIQQARRGRPAWPWLTRLIGRKEPKLAAVALANKVARIAWKMMVTGQDFDPRRMMRAPETTAKAAA

SEQ ID NO: 239220 - protein, 438 aa, unidentified
MPSSTDPLGCARSFPKALLNDRQLGREPGLLFVGDDWAEAHHDIEIQDETGRRLVRRRLPEGVAGIAELHGLIADHLGDGDEPAAVVVGIETDRGPWVGALAAAGYQVYAINPLSAARYRERHVTSGAKSDAGDAKVLADLVRTDRANHRPIAGDSELAEAVKVLARTHQNLIWSRQRQANLLRSTLREFYPAALVAFGGELSGRDALAVLEIAPTPTRGRGLSTARIVSALRRAGRQRYLDRRAGQIRDALRTDQLAAAPLVADAYGHTVTALVAVLATLTTQIEQVESELAQCFDQHPDARILLSQPGLGAVLAARVLAEFGDDPDRYTDARARKNYAGTAPITRASGTRRIVLARVAVNKRLRDALYLQAFAALGVSPGARAYYDAHRARGATHHQALRALSNRLVGILHGCLRHHTPYDEATAWPSQTDQKIAA

SEQ ID NO: 239221 - protein, 331 aa, unidentified
MADAKRFVGIDVAKAQLDVAIGPNGESFSVANDETGISELLRRLEPADLVIIEATGGLEVPVASALATAGIAVAVVNPRQVRDFARATGQLAKTDALDAQVLARFGEAVKPQVRALRDAQAQALEALVNRRRQLVEMLTAEKNRRANSPKVIHKGIDEHIRWLEKRLSGLDDELAGLVRETPIWRERDELLRSVPGVGKVLSTTLLAHLPELGALNRKQIAALVGLAPFNRDSGSLRGSRCIWGGRAQVRRVLYMAVVAAVRSNPVIKNFYAQLRARGKYPKSALTACMRKLLVILNAMLRSKISWQTPALASSTATLSPLLGAVPEYGCC

SEQ ID NO: 239222 - protein, 333 aa, unidentified
MKRLSGGIDVGSGSHHITILDDEDNVLYNQKVSHKLSEFAESIKLFKQIEKQEGGKISFALEGKNGYSAPFDQILLNQGFTLYNVDNFKLKRFREAFAGEWRDDQRDALMLSKMLKLKEHINSPREKVFIKIEKPSPVTESLKLLSRHQQTLIDERVRFTNRLGKKLLEVCPEILKLAKLKNKKLIAILVKYPDFSKYKRITPKSLLKIKGIGKKGAFFLLKRLNNIAYMPGLTDIYQMIISSFAKRISELQKEIKDIDRKLDEIGEKDKAVIHLKTIPGVATKLASRFIGEIGNIHRFPSEKQLAVYCGIACVNNDSGQVTKAKAVYKANKI

SEQ ID NO: 239223 - protein, 310 aa, unidentified
MDMKAVGIDVSKDRLDVHLWPDGIAFAVARDGKGLAELIERLLPLTPDLVVVEATGGFETVVAAALAGAGLPLVVANPAQIRHFAQAAGTRAKTDPIDAAMIARFGHDMKPDVRPLPDEATQLLADLVARRRQIIEMIVAERNRERRATVRRIKKSIARLVRALEKELAEIDAEIDAGVRGSPAWRDKEDLLASVPGVGPVVARTLIAELPELGTLDKKKIASLAGLAPYTRQSGQWKGKSMIGGGLKSVRCALSLAALVASRHNPVLKAFRDRLRAAGKPKMVALIAVARKLLTILNAILRDQKPWQPA

SEQ ID NO: 239224 - protein, 320 aa, unidentified
MPMRVRGFFGVDASQKSLMIAEHGRSATQEIGNSTRAISAWLKALEGPCAIAVESTGRHHRLLATLAIAAGHTVYVVNPRDIKHYGKALGRRAKTDRVDALLIARYLAQEHDSLRAWVLPSKTQELLSSALARRGVLVGAREQIRASCEAHEAQLTQLGATLEQLARLIEEVDEQLEQLSAADPVIEAIKRRLLGIPGIGPVVSTALANLLSRYQFRNADALIAYVGLDPRANDSGQHRGRRKLSKRGPAELRRLVFNAAMSGARTAAWRGYYRCYRERGLSGTASFVILGRKMLRAVFSMVRHNTEFDPIRVQGACAKP

SEQ ID NO: 239225 - protein, 450 aa, unidentified
MGSASGISRGDRNRNARLARLRALVPTENAIVGIDLADKKQMVVVTDHDSKVLARRTFRCRAWDLGQALDWAADRARARGWAGVTVACEPTGHRWRVVGQLAADRGMPLVCVQPLQMSWARRSEDLTFDKTDDKDAVLIARLTAQLRCYIPEPVEETWGRLRHLGVRREQLITEAGSQIQQIRALLECVWPASLDTARQPFRSKTWAAAMTVVLDRDGGDLDRTRRLGLARFERAARREVVRRGGQKPSLRIVRRLFAALDDPTGVLAHRLGALERVAFLLADWRHTKRRLADTEARMTGVLDQLELTDLVTSIPGLSPVGAAAILAETGDPRRFLTARAMVKHAGLAPREKLSGTFIGRTKLTGQGRPLLRLAAWRAVWAALKANPVYAARYRHLTTREPNKLKPTQAQTVMGAAVLRQLHAVITTGRAWDPDVAVHGTRHRRQPPVAA

SEQ ID NO: 239226 - protein, 427 aa, unidentified
MAYRIAAVDVHKKMLAVVVADVEGKGEYQFERRKFGASPDQLHVLAQWLVQQEVEEVVMESTAQYWKPVWGALERYWKPARQKRDGATKMSGQLHLCQAKSNRGPRGRKNDFADGERMIKRLVAQELILSFVPDPEQRLWRTVTRRKHQLTRDKIRFQNQLESLLEQAHIKLSSFVSDLLGLSARRMLQAIAEGETDPAVVAALADCRLRATPEQLRDALGACTELNGVYRRLLLMALEELKLMEEQMEQLDREAWNLLQEHQDAVQRVAEVPGFGVDSATQMIAEVGAEAAAFESAKDLSSWVGVCPGDEETAGKSKSTRSPKGNSTMRRLLNQAAQSAVKVKGSIFEITFRKLEPRLGYQQAIWAIAHRLCRLLWMILHKGIHYEERGPAVSAKSQRARTARMIKALQKLGYRVEGGPLPAGSPV

SEQ ID NO: 239227 - protein, 353 aa, unidentified
MTTYYVGMDVHQASIVIAVTNAAGKVVMESIIETKAQTVRDFLQGLRGEVHLTFEEGTQSAWLYDLIRPLVAEVVVCNPRHNKLLEVGNKADRLDARKLAQLLRAGMLKAVYHGESGTRALKEMVRTYECLVEDTTRVMNRIKAIFRSRGIACTGHDVYRQDRREPWLEKLDERGVRARAESLYQQLAALKELRHAARARMLTESRQHKASKLLMRVPRLGQVRVAQIIATVDTPHRFRTKRQFWAYLGLAVVMRTSAEYRVEGLAVQKSKRAPATRGLNTNHNHRLKGVFKAAATNACASEPFKQQYEAIVAQGIDPTLARLTVARKLAAITLAIWKRGEVFDAERVMKQAA

SEQ ID NO: 239228 - protein, 329 aa, unidentified
MIIIGCDFHPGFQQIAFVDTETGDCGEQRLEHCEGAQKFYHDLATQGKKVRVGMEASGHARWFEQLLEGLNIELWVGDAAVIRAKRGRKPKTDRQDALHILNLLLTGDFPQIWVASWENRDLRQLLWHRHRMVQARTRVMNQLQAVALNEGLRCKKKLWREHGREQLEAFRLAPWASRRREDLLELLDRLNPTIAELTQAIEQEAEKCPQAQRLMTHPGVGALTALAFVLIIGKAERFQGGKQVGSYWGLVPLEDSSGDKRRLGHITKQGNSLLRFLLVEAAQVTSRTIPEWRSKYLHLTMRRGRKIAKVAMARKLAIRLFWRMRQGWN

SEQ ID NO: 239229 - protein, 367 aa, unidentified
MKKVSTVAAKPSKKISQPKLTVGLDLGDRNSWYCVLDEPGQIRLERSVRTNAKALREVFGEMPRCRIALEIGTHSPWISRLLSELGHAVMVANARKVRLIGESRKKDDRLDAQTLARLARIDPELLYPVKHRSAQAQADLSVIRARAGLVRARTALVNTARGLAKSYGERLRGCNVRNMNPEKAEGLSPELQSALEPLLIALQSLSEQIGEYNERIEKLAEQSYPQVALLKQIKGVGTLIALTFLLTLEDPHRFAKSRDVGCYLGLQPGRRNSGQSQPQMHISKEGDPYLRTLLVQGAQHILGPFGVDCDLRRWGLKLAARGGRNGKKRAIVATARKLAVLLHHLWVSGDVYEPLHNSRGTTVAAAA

SEQ ID NO: 239230 - protein, 401 aa, unidentified
MQLHLCVGIDVGCRAHRVGIARPDGSILEEFDISHSDAGFSEFFRRVEGHRCELSLPVAVAMEGYNGYARPLDRLVQDKGYRLFNVNNLKLARFKEVFPGAAKTDAIDARKILELFRLKDQLPLAKDAIQEVIPSSQVNEKLKRVSRRRRRLVIEKMRVLNRMQADLQAVCPELLAATNAADNLWFLRFITSREDLRQLARLRSATVMKIRGVGVKYAERIRTWQRKARFSNEVEYVGPMIIQDARRILELHQQIRALDDTLEELADQSEIACRLSTIPGFGKTSIAELAGEIGTMQRFESEASLALYLGMCPLTHQSGDMSRARIPRQVNTRCKAAMMTTVARHIGCVPESRVYYDRKREQGKTHNQAIRALGRHLVRVIWAMLRDGRDYEIREDLHPAT

SEQ ID NO: 239231 - protein, 338 aa, unidentified
MTIYAGLDISDKSTHICVMDGEGKIVWRGVCATDPEVLAFTLRKHARDVARVVLETGSLSAFLYHGLIERGVPVVCICARHAKKALSARTNKSDVHDAEGLAQLARTGWFKAVHIKDSATHLDRAQLKVREQLIKSHHAMVNQMRGLLKLFGLRMGKVTTPGKRAERLEALYAQKSELRVILAPLVATLTALEAQISSSSRSLKARAEADPVCQRLMSVPGVGPIVALSFKSTIEDPGRFDHGQDAGAYAGLTPRRFQSGEHDAKGHISRAGDPMLRSALYEAANNLLSRVKRPSPLQTWGKALATSKGAKRARVAVARKLAVLLHRLWQSDTSFRWA

SEQ ID NO: 239232 - protein, 327 aa, unidentified
MNAFTHVYGIDVSKDTLDYIKLDTNAQSKEKGQIKNRLKKIETWVRTLDGKCLCVVEPTGTYSSTLIYLLTKHHIKVALVSPYKSKSFMDALGVSNKTDDQAAYCLAMMGLRLDLKTYEMPSVNRIKHKQLQNAHHSMMKQSRMLKNQLHALDQLPIIDKAARKAYEQTLQVIDQQIKMLEEQMADLEEDEAFNQAKLLASSVVGIGEKTARAMMLAASCFENFESSEALCKYFGLTPNSHYSGSSVRKKGRITKMGAHYVRSLLYICTRSAIRYNQACKELYQRLRTKGKPHRVAAVAVMHKLVKQVFACVKKQVMFDNNYYLKYL

SEQ ID NO: 239233 - protein, 337 aa, unidentified
MSNDTRIGVDVAKAVFELAISDRPGHVTRRERLPRGQFLAFIAQQPQATVVMEACGSAHHWGRKIQGLGHRIVLLPPHHVRPYIRRNKTDRTDAKGILEASRNEDIRAVPVKTVGQQVLTSLHRLRSGWMRERTARLNALRGLLRELGVFIPMGAREVVPLVWSLIEDADSELPEALRSIFAEACREIREIEARVKQVERQLEATAEQLPAVEYLRTIPGIGLLIATALVAFIGDIRRFPSGRHFASYLGLTPREYSSGLKRNLGRISKRGDGYLRTLLIHGARSVLVHARKQQPDRLREWGTSSPRLTCTTRPRWLSPTSWPGSFGPSGTTNGHSP

SEQ ID NO: 239234 - protein, 381 aa, unidentified
MRIVGLDLGANHIEFCELKDAQAHRQSVRRFAELKRLLGPGTEPAQVAFEACREGWKVYDTLAEWGHEPIMLDTTRIKQIGVGHHRRKNDAIDAEVIARALESGRYPKAHVLSPARRELRGRLHVRAALVESRAKFIIMIRGIARAAEVTVARCAPERILQKLDEVELPRSLKEEISPLLEVLRTLQKQIDQKEAELIELAQRDPTLRLLATAPGVGLIVAATYASVIDDAHRFRNAQAVGSYLGLAPSEDTTGGPNKRRIGGISKHGNSMCRAMLVEAAWQILRLADKDDPLYSWAAHIKEKRSGKVAAVALARKLALVLYAMWRDDTVYDATKETLARVRGTRREAQSTLQRAVALERAVSKFERRRKKDTSKTTEATN

SEQ ID NO: 239235 - protein, 400 aa, unidentified
MATRTTAWAGIDIGKTHHWICAVDADGRPVLSVKVANVEADLVAVLAKVNALADQVRWAVDILGAPSALILALLSRAGSAVFYASGRVVNTMSTAFTGEGKTDPKDAYLIAQTVRLRRDLPVVDTVTDLTRELALLTAHRADLIADRVRMINRLRDVLTSVFPTLERAFDYSSHKGALVLLTEYASPQRLRRLGEARLSQWLRRRHVRDSAGVAARALAAAGGQDTELPGQQVAEMIIAELAGSILQLDQRVKGLDQQIAATFHQHHQAETIESMPGFGPILGAQLLVAAGDLRAYQTAGHLGAAAGLVPVPNDSGRRSGNLHKPRRYSRPLRHVFYLSAQTSMMRAGPNRDYYLKKRARGHTHTQAVISLSRRRIDVLWALLRDDRTFSIEPPSLAAAA

SEQ ID NO: 239236 - protein, 345 aa, unidentified
MIIGCDFHPSWQQIAWLDSETGETGEQKLVHGSGDAKTFYAQLPAPVLIGMEATGNSQWFIEVVEDLGHEIWIGDAAQIRASYVRKQKTDKRDAAHILKLVVEGRFPRLWTPDREQRDLRQLVLHRHKLVEIRSRVKNELQHLSLNKGMQRKAKLWSQGGQKLLRELPLQPWAACRREDLLGLLAMLHEQIGKLDQAVQQAAEEHPQAQLLMTQPGVGPNTALAYVLTIGDVSRFPRGKQVASYLGLIPREESSGGRQKLGAISKQGNRLVRSLLVEAAQIAVRFDPGFRQQYLHRCHQKPKGVAKVAAARRLAVRLYWMLRTQKPYPEIVRIESSPRVPLVGAS

SEQ ID NO: 239237 - protein, 476 aa, unidentified
MVVPHEEPKTPRKPKTSTRRSKPRDRSLPVPVPTSPAALTIINPDAAGIDVHSNMHMVCVPADRDANPVRQFGANTVDLQEIVAWLKKCRIKTIALESTGVYWIALFELLESEGFEVNLVEPGQLSRCGARPKTDVLDAQWIQRLHSYGLLRASFRPPDSVLALRAFWRLRQRQVRYAASHVEHMQKALEQMNVKLTEVVSDITGLTGMLIIGAILEGERDPNQLARLRHPQCHHSREQIALALDGTWRSEHLFELRQAYELYQFHHRQITECDQQIQVELAKFPNRAGEKPHTVKPRNRGRKSNDVRFEAAGPLLRALGVDLTLIEGIDVGTALVILAEIGVDVSRFPTEKHFASWLRLCPPQNESNKTNRRHRNRKGTSRVTIALRMAAQSVGRTMTPLGLFYRRIRSRIGGLGAVKATAHKLACLVYRMLKYGQEYVTQSMEEYEAKVKANTFRALERKAAAMGFQLSPLPNR

SEQ ID NO: 239238 - protein, 407 aa, unidentified
MISVGIDISKEKITVCALEQGNKIIWKPFDVSLKKTKVEELIEKLEKLKEEVKITMEATGKYHLPILYELKDRGYFVTVVNPLKMKQYCRALNFRKAKNDKIDAKQIAEYGLMYWKELEEYKVDEENYRVLKELNRSYQHYMELRINQINFIDQTIHQTFPGIKKLIPHASGDFSKDKLLDFLEKWWHKDLVLEKTEEEFIEEYKRWAKEKRYHPNANKAKAIYKLAEDSISTQPSHNSKIETNIREGINLIKQINQILNSILSQMIEISEPLEEYQEAKKFSGISEKLAVQIVAEFGDLSKFKNKKSLISFIGIDAPPYESGNFKADQRKISKRGNTILRKVGYQAMKCMMSAKDPENEIYKYMIKKEKEGKAKKVCKFAGLNKFLRIYYARVMESKAEKKELKAA

SEQ ID NO: 239239 - protein, 317 aa, unidentified
MERRQSSTKVAGIDVGKRKLDVAAHGLEDELQVENGPGGFSELIGWLKAREVGRVGLEATGGYERGVRAALEAAGFEVVVHQPLEVRRFAQLKRWRAKNDRLDARLIAAATAQVDAVKAAQDPRLVELAERLTAYEQITDQIVELKTFLECVTLKDLAAVLRTQIRSLERLKARLSLDLLRRIKAEADLLARFRLLTSLPGVGAIVAASLVVRMPELGAMKKGQAASLIGVAPFDRDSGQWKGQRFISGGRARPRRMLYLAAITAKRFDPCLKAFANSLLARGKPAKLVIVAVMRKLIEAANLVLGRGQPWLTQPAK

SEQ ID NO: 239240 - protein, 344 aa, unidentified
MTEVITIGVDIAKSVFQIHAVDAAGEPVIRRQLRRRQVLPFFKKQPPCLIGIEACATSHHWAREISKFGHEVRLMPPRYVKPYVKRNKNDAADAEAICEAVRRPNMRFVPVKTPEQQSVLMLHRTRELFVRQRTSLTNAIRAHMAEFGIVAGIGRNGVEVLLKLITEGEDDRMPAEARACLMALADQLELIKRQIVEADRRVLAWHRSSETSKRLEAIPGVGPLIASALVASIPDPAVFRSGRDLSAWIGLVPKQHSTGGKERLGSISKAGNRYLRKLLVVGALSVIRRAKQLGYTRHPWLVRLLERRSTKIAAVALANKIARIAWAMMARNESYQPSRLSPVS

SEQ ID NO: 239241 - protein, 398 aa, unidentified
MKGQDIMIYVGIDVASQKHDCFLLKDTGEVFSKTSFTIKNDFEGYKKLHNSILQFVESTKDSNVRIGLESTGHYSKNILLYLIKQGYQTTLINPILTNMDRKASTVRKTKTDKIDAEAICKFLDKNRFDFKPYTLLSYHIDALKSLTRQRFSLVKQMTQQKLIFQRLVNVIFPEFLSHFSNDYGESVLNILYSYPTPKKLAKAHKESITKLLHSRCKITSSEILELAKNSIGQSEEYLGFELKHTIDMIRFYQSQIEIYNKQIEIELNETEYGKIITSIPGVGIITGAMIISEIGDINNFTTPDQLLAYAGLDPSVYESGQFESSHNKPSKRGSKYLRWAIHQASSVIWQHDNTFKDYYLKKIKEGKHHYVAIGHIDKKLIRVIFSLLKNKSMFIPQK

SEQ ID NO: 239242 - protein, 379 aa, unidentified
MKAITLYIGLDVHKDSITIAIAQPGSQGEIRVFGTITNDLHAVQKALARIRKAHPGAHLVVTYEAGPCGFGIARRLRQLGIPCLVAAPSLIPKKPGSPFKTDKRDAANLARLLRAGDLTAVYIPEPTDEAIRDLCRARTDAVDDLRRCRQRLKGFLLRHGYRYQGKANWSQAHVRYLRELVLPHPAMKTILEEYLQGIDASNDRVLRIELAMETLLQTWRLKPAVQALMALRGFQLVAAMITVSELGDIHRFAHPRQLMTYLGLVSTEDSSGPRQRLGAISRCGNGHVRWLLTECAEHYVLPPKISKELSRRQEGQPRSVRDLSWKTQNRLHLRFTRLLARRLPRNKAKVAVARELSGFVWALLRTQDCYRQPAGGAAS

SEQ ID NO: 239243 - protein, 361 aa, unidentified
MNEGKDIILVADYHAENIEFRWFNEASGEERTGKYPTTRAGILRQLEQAAGELERGGRIVWIMESTTGWARVKELLGERVKFVLANVLQLPLPPKAKRRKTDKIDTGRMLREYLHGSLPRSFQPSAWWREVRRVVDCRQDLVERQTAIKNWIGSLLHHETWEDRANLWSAKGQARLRAMKLPPSDRALVELKIQQLEQLAKQLEQVEARMQTSYEGWPEAQWVDQVRGIGMVTAVSLLAHIGPIARFATAEDLISYAGLAPGMWQSDGTCHHGRIGGGGTDSHLRYLLIEATTWLCQIPRYRPTYERVLKQRGKKIARIVVARLLLRSIHKMLTAKVRFNPMPRLSPKTTTPATATAGCSR

SEQ ID NO: 239244 - protein, 429 aa, unidentified
MNYNTQNAKIASITEKTLIVGIDVGSETHYARAFDWRNYEYSKKPFAFNNDEAGFAAFKAWMEDMADKHGKEAVIPGMEPTGHYWLNLGVYLQEQGMKPVHVNPHHVKKSKELDDNNPNKNDRKDPKTIAGLVNEGRFSYPYIPTGIYAEIRNLSNLRIQTQEELTRIKNRIARWFSIYFPEIKDVYKNPDAVSGMMVIKKAPLPCDIKELGVDGVNQVWRDAKLKGAGLKRARTLVSAAEHSIGSTEAPGSARIEIRNLLNDYEVYKNRMNDLMREIEEKLSEIPYIDKLMEINGIGLKTVSCFIAEVGDIRRFDNPKQLQKLAGYAIVADSSGKHNGESRISHRGRKRLRYALYEAAISVIGKNKEFREIHDYYRTRKQNPLKKMQSVIAIACKLIRIFYTILTKGVDYDGQKMLSDIIRPETIMAA

SEQ ID NO: 239245 - protein, 403 aa, unidentified
MAAISGIDWASEHHDVHVAGEDGRVLERRRFPHTEEGICALVELLVDHRVALIAIERPDGLLVGRLLAAGLSVMAVHPNQLAAARERFRAAAGKSDRFDAMVLCELARTDAHRFRTLAPLGDETLALRELVRAREDLVGTRVSLANQLRGQLDASWPGAAKIFAAVDSAIALAFLARYPSPADAKGLGPGRLGSFLARHSYCGRRSSEELLARLRGAPVAALGEAEAEARRTAVAGLVAVLGKLVAEIRRLEAEIAGAVRSHPDGEIFLSFFRDPKSVLTAAGLLAEIGDDRSRYRDADSLAADGGVAPVAVESGKSRHASFRWACDKRLRAHLGVLADSTRHWHPWAGDVYQRARARGQDHPHANRTLGRAWTRVLWRCWQDRVPYDPALHGNLRRLETTGG

SEQ ID NO: 239246 - protein, 402 aa, unidentified
MTYDYVIGMDVGKYFHHACVLDIDGTQVLSKRINQNEQSLRALFSAFSVYDHKVLVVVDQPNNIGRLTVAVAQDIGIDVRYLPGLAMRQLSRIHAGNAKTDIRDAYIIAHAAKNLPESLRSVDRVEEAFLQLKVLNGIDEDLARSYTRLINQIRSALVGCYPQFEQALRGQIIHRKWVLHLLARYGGPTKIKRLGKAKAAAFARRYKARNPEPVLDAIFAAISEQTVTIAGAHYAEMSVAMSAKDALLKLEHRQQIEKEVIELINDIPHTQFLLSMPGIGPKTAAQILMTAGDMSDFPSAGHLASYAGLSPRTNQSGTSIMSNSLNRAGNKKLKNALWQSSFASIRSHERSRQFYERKRREGKRHNAAVVALARRRLNVLYAMMRNHEHYHDPAPSQEDLAA

SEQ ID NO: 239247 - protein, 431 aa, unidentified
MDIVHPRVAGIDVHKKVVWVAVRVPGQRPGERAVTVKRFKTFWRPLRQMAAWLSGLGVTDAALESTGVYWWPVYHALAGAGIEVCVCNAAHMRNVPGRKRDITDCQWIAELHEHGLLRASFIPTGAVAELRARTRYRKKLIEQRTSEGQRLSKVLEDAGIKIDSVASRLLGVSGRAMIEALIAGERNPGRLAGLAKGVLRRKIEDLQMACDGRFTAAHAQMCRLHLDAHDHLTGTIAELDALVAEAAAPFAALIARLVTIPGIGQRTAEVIVAETGGDMARFTTAARLAAWAGLAPGDNESAGKRKHAAARKGDRQLRAAMVEAAWATARTRTRPGARFRRLARRFGKGHEKKAAVAVAHTLICIAWAVLSRGEDYAEAGEDYYEQRDRRDREHLIRHHQQALARLGCQVTLIPPGDGSPPSAGPDQQPAA

SEQ ID NO: 239248 - protein, 313 aa, unidentified
MIITLRCIGIDVSKRHLDIFDEGIGVSERVANAPHAITELVARWRCDALVVFEATGVYDIELGEALRAAGIRFARINPARARDFARASGQLAKTDPIDARMLAAFARAMRPATEQVSTPARNALARLAKRRDQLVLMRAQEKNRRSEAGDRAMVERICRLIEVLDHEIAEIEADISALIKAEPEISHDAQLIRSLPGVGPVACMQLIAQMPEIGHVGPKQAAALAGLAPFNVDSGAYRGKRKIGGGRKRVRNALYMAALNAVRRADRFKAFYARLRQAGKPAKLALIAVARKLLTILNAMMRDRKAYIPTQQT

SEQ ID NO: 239249 - protein, 379 aa, unidentified
MRRVCGLDVHKDSIYMCILYENGSKIESVFGVLTPELDKLRDLLVSHHVCEVALESTSIYWIPIWNILSVDFSLKLVNPYFIKQLPGRKSDVKDAEWIATVLQKGLIRGSYVPDRMIQCLRQYERRNHELSKNIVHAEQRMDMILQRCNIRISNYVSCISCKGYQKVVNAIISGESNPKVLVTLIHKRTLNKHGRQVVEDSLNGFVSDTDRDILRQYRDERMQMEQHKSENKAKMQAICEAHYCEELELLQTLPGIKEESAANIIAEIGMDMKMFLTASAIVGWAGLKPRNDQSAGKIKSRKITHGNKYLRKILVEAAWSAARTKDSRFMKMYQRLLARGKSKQKALIAVARKLLVLIWNMLSKKEAFNPEYKRRIQAA

SEQ ID NO: 239250 - protein, 338 aa, unidentified
MTETQYFVGVDIASSTFTVSVGGTPWKVILKPKLFENTEDGFQTFLEWLASHQIFARQTVICMEATGVYSEGLAYFLFAKNYQVAVQSPLEVKRTFKPNGPKTDAVDSLQIAEYACRHLDKLSFWQPRNDILEQVKALLATREQFVSQNVAHKNALQAIQRKPVRTPFAEQAHSQMIEQFKKQILAMDHEIRRLIESDPTFKEMLLLLLSVPGVGLLLASHMILLTQISLDHKELASYLGIAPHEYSSGSSVFRHATSRHFGPSAIRKLLYLASCSVRAHQPQFKVYFARKTKAGKPARLVLNNIANRLIKIICAVLRTKTAFIKNYHSVQPLALTAS

SEQ ID NO: 239251 - protein, 383 aa, unidentified
MRRVCGLDVHKDSVFVCILNEKGEKFEAKYGVLTPELEELHQLLLTHEVKEVTMESTSIYWYPIWRILSDIECLKLVNPYFIKQLPGRKSDVRDAAWIAECTMKDLIRGSFVPDEIVQRMRQYNRRIFDLNKEKVYKLTKLDALLQRCNIRISNYVSSTDSKSYKDVVKLLSEGIVNAEKLTEAIHGRTVNRVGKEVITAALTGVVNEVDIDLIRQYREEILMDDKHLKECQEKLTEICRKEFPREFENLQTIPGVKERSATSILSELGVDMKMFITAAALVSWCGLKPRNEESAGKIKSRRITHGNKYIRKTMIECAWGASRTQNCFYSNFSYTQTVVRRKNAMKVKVAIARKMLVVIWHVLSDGVPYNDYKKPEAIAEGNS

SEQ ID NO: 239252 - protein, 355 aa, unidentified
MVIIGIDAHKGMHAAVAVDASGTILGEWKGRNTATGWHELWTWANSCSASASRQWGIEGAWNYGRGLAQYLVTSGEQVFEVNPRWTAQRRRRARKQGKSDRLDAHAVAQLVREEGSTLPQIAADDETAVLELLTTEREAALAETTRLRNHLHQLLLQALPDYRNHLPSLTSNAGLHAAETFQSTTQSPLQQQRAAAIRRIAQRLRLALNQVEALGEEIRQLAAVHFAPLTEVCGVQLLTAGALAGILGPGQRFRSEAQLAMYAGVAPVETSSAGVIRHRLNRGGNRRLNAILYRIALAQARGSDAARAYLARRRAEGKSWREAMRALKRHLIRVIWRLWQQCLAMKASLGREQVA

SEQ ID NO: 239253 - protein, 364 aa, unidentified
MKRKVYVGMDVHKETIRIAYLTSNSKEILKEQQIKHNEVQIKKFIKKLKTEWNEIHCCYEARVTGYPLYRYLKSLGVNCILVAPGKIPRQNTDKIKTDKRDAIKLARLMRSGELESIHVPSEEDEAVRDYLRSRDSLRLDLGRNRQRLMKFLLRKDIKYSTTKYWTVSHYKWLNNLHFNNEILQETFNDYYSRVRVQEENLKSMDKKIQEIAESEPYREKVGILRCFRGVDYLTAMFLLCEVNDFKRFKTAGSFMSFLGLVPGEYSSGSKRKQTGITKTGSPRLRRILTEAAWQHRFPGTGSKIITARRSGQPALVVALAEKASLRLHKKFRNLQLRGKTPQVMITAVSRELSGFLWAAMNLVA

SEQ ID NO: 239254 - protein, 320 aa, unidentified
MNNIITHQDEINVGVDTGKHQLDIFIRPLGIELSVANNHEGIHKALKTIKIYRPARVIIEATGRLETEFVIACSKAKLPIVVANPMHIKKFSGATGQLAKTDRLDAKQIAHYGEAIKPPLTCLKPEIMRQISDLLARRKQLLSMQTMEKNRLQVMPKTISASIKPILTVFKNQLDKLERKLLQLVENCDEYRCKNEILQSMPGVGKVLALTLLSNMPELGFISNKEAAALVGVAPINRDSGSCRGHRRIRGGRHQIRTVMYMAMLSAIQCNPLFKATFHRLVKKGKSKKTAIIACVRKMVVILNAMIRDGACWNAKQISI

SEQ ID NO: 239255 - protein, 367 aa, unidentified
MTKVRTWVGLDVHAAKVVACVVDAESGEMMMHRLPGETAKVVEFCGSRPGPMRVAYEAGPTGFGLARALDAAGIGCVVAAPGKIERPVQDRVKTDARDAERLVRLLMIDGLHPVRVPTDAEEALRDLVRAREDLRGDLMRARHRLSKLLLRHDVRYEDTTSRWGQRHRSWLSKVDLGERGAQLTLTDYLGVIDALTLRRETLEATIGELIPDSPWAEAIARLRCLRGIDTLSAVGLAAEVGDFARFEHPRLLMSYLGLVPSEKSSGETRRQGAITKSGSRHARRLLVEAAWHYRRPPRLGTTLERRQQDQPQAVIAIAWKAQQRLHQLWRRLDTKRGKRKTIVAVAVARHLAGFVWAIANADTNPKP

SEQ ID NO: 239256 - protein, 395 aa, unidentified
MKRQENKACGADIHKRFLMACILSRDGSKVLNRFDMTVEGVLCFASWLKDNNCKKVAVESTGNYWHLVYQVLDDEFEFILGNAFKTRRHSGAKTDKRDAEWLAELCLNNQIEPSMILPKEDRELRALTRARKGYVDFRSKLKARTIQELEACTIKLASELSDVFGKSGRHVLQGLVDGRSADVIVESIPSKKVKKNKEKIKQAIIAGLSPISIFLIKSHIQMIDEVDKKLVQLDAQISRLLKARKRDVEIAMSIPGIGFVSAAAILSEIGDYRNFASGKKLAAFSGLDPSVYESAGKRYNGKITKMGSKYLRRMIIECAHALSRTKAKTQLKRFFLRIMARRGKNIATVALARKMLVVLHHLLINQEMYKDDGLAKPKNVKVSFSEESKLDPSSL

SEQ ID NO: 239257 - protein, 338 aa, unidentified
MAIVGGFDLHRRQITFEYVDTASGEVSRGRVAPADREHLRAWLGRLEGQEAAFAVEACTGWRFVVEELERAGAQAHLAEPADTAALRGPKRRAKTDRADARHLRELLMAARLPESWIPPAHVSDARTEIRLYKALVDERTAWLQRVHAILFQLGAPAVPGLARASGRGRLDLAALPPAARSAAEVALRSVDRVNEELDTLRPELARLSRAQSGCRALQAHYGIGPLTSVAIWAELGDCGRFSSSSDAVRHSGLDVTVHSSDSRRARGHLARQGPGVLRWALFEAAVCASRPASPDHAYYLQVKARLGHQRAVLSVARKLTRWCHHTLRALGDQALAPA

SEQ ID NO: 239258 - protein, 315 aa, unidentified
MAMRVTLEKPIIGVDVAKNELVIYHDQYDRLEAIPNTKVAITQWLEALASSCAIAIEATNVYHVLFADAAHEAGCDVYMVDGYQLSHYRKGVNIRAKTDAQDARLLARYLKNELDELRPWIPASPLYRQLLSLFRRRAALVQARTGLVQSWTNEPFLRTAFANQVNSMKRFEALVEKKIRDVLQEAGLMRQVNRCMKVEGIGFLTAARLVTSFQRGEFSGANAFIAFLGLDLRVSKSGQSDGPRRLTKRGDPEARRLLHNAAMSGSRTPAWKPFYEEQRKRGFSTTQALVMLSRKLARVVFALLKNQSEYQTKVA

SEQ ID NO: 239259 - protein, 347 aa, unidentified
MNFYTQQHKHYCGIDLHARARYVCILDEQGTKLVHKNLPTTPEAFLRLIAPYREDLVVGVECMFTWYWLADLCSQEGIAFVLGHALYMKAIHGGKAKNDKIEAHKIAVLLRGGMFPQAYVYPSEMRATRDLLRRRCHLARKRAELLAHIHNTNSQYNLPEIGKRLANKSNREDVADHFPDPSVRKAIEVDVALIDQYDQLLGEVELYLTRSAKAPDVQPFARLQSVPGIGQILALVILSEIQDIARFPRVQDFVSYCRLVKCAKESNGKRFGTSGKKIGNVHLRWAFAEAAVLFIRQSQPGKEYFAKLEHKHGKAKALTVLAHKLGRAVYYMLSREQAFDLKRFVTA

SEQ ID NO: 239260 - protein, 359 aa, unidentified
MSQGNILAIDLAKSSFQAHLASGQGLALVKKKLSRSALTDFVVRTDARVVAMEACAGANYWGRRFEALGKQVRLLAPQYVKPFVKTNKTDANDAEAIAEAAARQSMRFVPLKSVAQQDISSLHCIRSRLVGQRTALTNQTRGLLAEYGVVVSQGHAKLRTCLLELQREGAFLGDLTAFMLRKLQELAAEFTGLDERIKACDLEVKELCDQDELSREMTKIVGIGPLTATALRALSGDMTQFKNGRQFAAFLGLVPRQQSTGGKTRLLGISKRGDAYVRTLLIHGARASLVSAHKRRDYRSKWATQLMATKGMNRAAVALANRNARTVFALLRRGRPFDATWSERAAAFGQALDTEAVMG

SEQ ID NO: 239261 - protein, 346 aa, unidentified
MMIIGCDFHPSWQQVSWLDTETGETGEKKLVTAAGDAERFYRQVPAPALIGMEATGNCHWLVDLLAELGHELWVGDAAQIRASYVRQQKTDRRDAEHILKLLVEGRFPRIWMPSSEVRDLRQLLLHRYKLVIIRARVKNELQHLCLNKGVQRQHKLWSKAGQQMLHELPLKMWAARRREDLLQLLAMLDQQIAPLDQAVKAEAQRDKMALLLETQPGVGAITALAYVLTMGDVSRFPRGKQVASYLGLIPREHSSGGRQKLGAITKQGNRMLRMLLVEAAQSAVRLDPRFRKEYLHRCHQKPKAVAKVAAARKLAVRLYWMLRTQTAYPEVVRIESSPRVPLVGAS

SEQ ID NO: 239262 - protein, 305 aa, unidentified
MISWVGIDISKSNLVVWVQPQKDGFEVPNTVEGFDVLVARLGQYTVGRVLLEATGGYERKVMAALQQASFSVLRINPRRARAFAVAMGKNAKTDPIDAAVLADFAEALHASREKPISPEREALRELIQLREHFVQQRDDNKRRLQQAQLPAVVEAIRDHIRYLQTQIKQLGKAIDQSMRELDAEKADRLISVKGIGTVATASLLVYLPELGELDRREIAALAGIAPYNDDSGNHSGKRQIYGGRARVRRALYMSCWVVIRCQADFKARYESLRERGKSAKVALIACMRILLIRLNAMLRDGTEWR

SEQ ID NO: 239263 - protein, 356 aa, unidentified
MAVYVGIDVHKKYCQAALMNDNGHIVKELRFDNTSQGASSLITLARAVDPQVEAVIEPSANFWIRIYDKLEQEGVDVKLTNPMRTKAIAEARIKTDRIDAKTLAYLLKGDLVAESYVPTRKNRERRALIRHRASLTRMRVEIKNRIHALLDKHELSYTYTDLFGKQGLEWLRSLQLPTTDQQILRTSLQVADTLTEQIREMDIQIAKDATSEEKAKLLMTMPGVDYYAAMVLLSEIGDVHRFSSDEKLVSWVGLAPQVHQSGETNWTGHITRKGSRRARWILGQCAQSARQHDPRMREFYERIERKHGSQKAVVAVARKMLAIMYVMMIRNEPYHGENHSLTERKHKRLDTLVNGA

SEQ ID NO: 239264 - protein, 423 aa, unidentified
MEVMHCRVAGLDVHKETVVACVRVMAGRRPTRECRTFTTPTQGLLELLGWLTASRVTHVAMEATGVYWTPVWKILSEGDFTLIVANAAHIKQVPGRKTDMNDAMWIADLLACGLLKASFVPPEEIQELRSLMRTRKQLVREQTRHVQRIEKTLEEANIKLGTVLSDLMGASGRRMIEAMIAGERDPHRLAALAERSVKASPKALHDALHGRLREQHRFLLQLHLRQWDALDAAIRQIDEQVAGHIARVDQEAADGQPPFRELLARLCAIPGVSFLSATAILAEIGRDMSRFPTAGHLIAWAGLCPGQNESAGKRKSSRLRKGAPWLKTMLVQCAWAAKRAKHSYYSAQFHRLCGRRGPQKAICAVAASILTAIYHMVRSGASHRDLGADYFDRRTPQARAKRLVAQLAKLGFAAQLQPLAEAA

SEQ ID NO: 239265 - protein, 349 aa, unidentified
MLYTGLDYHRSFSYITTMNGDGEIIGQKKLPSNGEIVDFLKEFGESMEVAIEATPSWYWLYDHLEEEGFDVKLSHPLKTKAIAYAKVKTDKVDSATLAHLLRSNLLPLSYVPEKPVRLNRELLRYRASLVKIQTRIKNKIHTILAKNNLSHDFTDLFGKAGTAFLHSLSLPENYKIALEGYLSILETLRHEIIGVSKRVRQLAEDDQDSRLLMTIPGVGYYSALLIKSEIGNVKRFPSAKQFCSYAGLVPSIHASGNVFYHGHITKQGSRWLRWILIEAAIHAVKRPGVLRRFYFKVERKKGGQIAKVATARKLLEWIYHMLRDGRTYQEIERIADLLGRDELGNCPGQ

SEQ ID NO: 239266 - protein, 315 aa, unidentified
MEQPPSAPIFVGIDVSKDRLDVHVRPSGEAFAVVRDGEGLERLVADLRGRDVALVVLEATGGFEMTVAAALAGAGLPLAVVNPRQIRDFARATGRLAKTDALDAEVIALFAERIRPEPRPIAGPDAQALAELVARRRQLVEMIGMEKNRARQARGKRVQRSLAAILKALEAQLASLDRDIDGVVRGSPVWRAAEELLTSVPGVGDVTARTLIAELPELGALDRRRIAALVGVAPVNRDSGQWRGHRAIAGGRVAVRNTLFMATLTAIRWNPAIRDHYARLVAAGRPKKLAIVACIRHLLTILNAILRTRTPWQNA

SEQ ID NO: 239267 - protein, 400 aa, unidentified
MISVGIDVSKEKSTVCILKPYGEIVSKPFNITHTHKDLSELSSMLFRLNDEVKIVMEATGIYHLPILTYLQEKGFFVSVINPYLMKSYRNESLRKAKTDKIDSRIIANYGIDHWFKMKEFQISGVIYEELKLLGQQYRHYMKLHLLSLAELTHLLDLTMPGIKNLLASWNETNRKDKRSDFVERFWHYDIITSMSEQEFTEKYILWAKEKKYVPSQEKAKVIYTLAQESIPTLPSETSSVKMLVTEAVRVLKEVDATLGLILSRMQEIAKTLPEYSVVREMGGVGNTLAPKLIAEIGDVRRFRNGKALVAFAGIDPPPYESGQFVGCNRKISKRGSASLRKVGYETMRSLKMRSRPEDPVYRYVVKKESEGKSKKSAKIAGLNKFLRIYYARVTELYKNI

SEQ ID NO: 239268 - protein, 347 aa, unidentified
MRKIAYLSMDVHARNIVMGDMDGNGKYRGKRPFAPSENNIISALKAVKAKIKYLIIEAGPLANWVAQTANPYVTQVYICDPRENALIHKSSTKHDKLDAQRLCRLLRLGEFKQVYRPENDERAIFKAAVQHYNDLRDQLAAVKKKIKAMYRQWGVIDVFGDSVYSTAGRDKFLKQVQQRTIYFQLQRLYELMDHTAAMKQNAKDTMMSLGRKYPEIKEFKKMPGIGSVGAITYDAYIQTPHRFARRNRMWKYCRTAVTDRSSDGKPLGYKRLDKAGIGELKALSHRAFMSAMKSDNEVKRFYLQSLQRTHNRKHARLNTQRKILTVMLGIWKKGQPYRPELFLGPSA

SEQ ID NO: 239269 - protein, 389 aa, unidentified
MSPQNDQSKKCFTAFEQASTMVAVVELSKKLWLVAGIVPGIDRHPLKKFEADENRLLALLHHWQQQAVKAGREIKRIVVAFEAGRDGFWLARWLRVRGIEAYVIHPTSVAVSREHRRAKTDRLDTEHLKRVVLGWLRGEPDHCRMVAIPTVEEEDAKRPNRERETLVGECTRIVNRVKACLARFGIRGFNPTLRKAADRLETLVTPEGARLPPLTLAEMLRDIARLRFLREQIKSIEKARVQRLRDAPATRTNAMVNLIARVFGIGIETADLLVHEILSRNLRDRRAVARYAGLTGSPDESGDRRREKGLARAGNARVRRGMVQLAWRFLGFHPDSALTQWYNKRAADGRGSTRKTMIVALARKLLIVLWRMVTTGEVPADLKLRRTTA

SEQ ID NO: 239270 - protein, 417 aa, unidentified
MQYAPSMSLPATPPGGVTAGLDWATDDHVVAIVDGAGQVVRRFTVAHTAAGLGELVRRLAKAGAAEVAIERSDGPVIDALLHAGVTVVVISPNQVKNLRSRYGSAGNKDDRFDAYVLADTLRTDRARLRPLTPDSPATLTLRATVRARRDLVAHRVALCNQLRAHLQRAFPGAVGLFAELDSPISLAFLTRFDCQDRADWLSPKRLAAWLASVGYSGRQDPTVLFEHLTSAPRGATDQGAALAHTTRALLTVLTSLVEQIKALSEQIAEQLDRHTDAQVFTSLPRSGTVRAARLLAEIGDCRTRFPDPDSLIGLAGVAPSTRRSGKHKTVSFRWAVNKQLRDAVCDFAADSRRAHPWAAQLYNQAIARGKDHPHATRILARAWLYVIWHCWHNGVPYDPAQHGALQRLLNQDQQAAA

SEQ ID NO: 239271 - protein, 361 aa, unidentified
MKRHLKDTENVFADQLFYIGIDVHKKQWTISIRSNQTAIGKVLSVEPSAEKLSHYLSRSYPGGRFRAVYEAGYSGFWPARDLSSCHIPCMVVNPADIPTKQKELANKTDKVDSRKLARSLENQELKGIYIPDRVAEECRMLNRYRSRLVREETRLKNRIKAVLSEFNYRPPVDLEGNRWSGVYLRWLADVRFKTSYAQTAYDEQLGQLAETRARQARIVRQMKVMAIEDPTISIQMKLLQSVPGIGFLTAMLLMNELIDINRFKNLEALASFIGLVPSIHESDERSYSRGLTNRRHNELRSRLIESAWIAVRKDPALSLKFGQLCQRMHRNKAIVRIAKGLLNRIRFVWKTQTAYAYGVIE

SEQ ID NO: 239272 - protein, 339 aa, unidentified
MNSVAVGVDIAKTVFQVHYIDRESGEIVNKPIRRAKFLEHFANRPACQIGMEACGGAHHWARQLTKMGHQVKLMPAEFVKAFNIRNKNDAADARAIWLAVQQPGKSVAVKTEMQQAMLALHRMREQLVKFRTMQINSLRGLLTEYGEVMGKGRAALDKAMPEVLGRVAERLPAVLIDTLREQWSGLTRLDEQVAEIERRMREWVKEDQAVIAISEIPGVGLLTATAAVAMMGDAKAFRSGRAFAAWAGLVPKQTGSGGKVDLHGISKRGDSYLRVLLIHGARSVLTHAKEPGPWVEQLRKRRPFNVAVVAQANKTARMIWAILAHDRPYRKDYVSVKPA

SEQ ID NO: 239273 - protein, 361 aa, unidentified
MGSNTAGIDPHQDTFTVGIVDQHGIELSNVTFDNRAEGYVAAIELFATHSVHQVGIEGSARWGAHVAIAVMAAGFDAREIPASRSAAQRRSRRLEKTDAVDAVCCARALQAEPTLGPVQTLEVYDATVAKIEAVLEHRRALVATRTLMLHHVGDQITKLPTAIRDQLTMTGKIESRLRRLETITNDLDATTAGDYRLGWLQSFIDQDRSARREIRRLERVIDALLDEHGTTLRDEAGFGPIAAATLLCEVGDPFRFSRESKFARWCGTGAIALSSGEGTGLPVRHRLDFRGNRTINSVLYIASVTQARDLPEAATYLARKTSEGKTRREARRAHKRHLANRVIRRMWRDEQHRKQQTPLAA

SEQ ID NO: 239274 - protein, 404 aa, unidentified
MNNVTENTKVIYVGIDVHKDTNSFCAYDSREDKLFAEHKSSSKFENTLHYLKNLQKSVGKDAVFLIGYEAGPTGYGLCRKLQKEGFACVIIAPSTIAKAPGQKVKTDRMDARLLAKTLAFKTYSPVCLPSEKLEAIKEYTRVRTAKITMLKKAKQNLLSFLLRMGLPYPQSGHYWTQAHMAWLRTVNFADKWLQESFEEYHAEVITLMDKVQRIEAKILELCKDDEVREKIDALVCISGISYVSAISIVAEIGDFSRFSKAKSFVSFIGLCPGEDSSGNRVRHTAITKAGNSRVRSLLVECAGSLRMHSVVTAKSVRVKERQKNASAAIVSYADKCTLRLRKRMLYLSQKGLPYNLVTTAGARELACFVWGMMNLVDNRKTALNKIDEGELSDIQKTVGEFIAQ

SEQ ID NO: 239275 - protein, 439 aa, unidentified
MSVGIDAAITAKHHVSVRETHADGSVSMHRFVVPPTLTGLSQLSRRLARYPGVVAVAEPTSMTWLPLALSLSSGGGRLALVGTRHSARLRGAISGKNKSDVIDADVLARADEVFDLPRLVLPSPAELALRRAVTRRASAVIDANRCWRRLVSLARWAFPDVWTAFAGSLATAKAVLGRWPHLDQLACARRASLTAVVAEHTRSVADVPDRVEQIRSAARDWAQFWAGRLDLDALAWEVSEHLTDLAAGNDRVDRAAEQATMYWERLYGDDALLVSLPGMGPVTAPAVRAFLGDGSRFDTAKAVANYVGITPSNWSSGTVNQPSRAITKEGPAALRLAFYLAGNAARRTDPQLAALYHRLMTRAGHCHSQATIAVARKLAERTWTVLTRGTPYRLQDPDGAPITSRAAKVLIAQQFTVPNEVRERARAHTAATHRSKLTR

SEQ ID NO: 239276 - protein, 342 aa, unidentified
MGERLYCGIDLHKNFSAICLMNKEGTVFEERKLQHGGDIFKKYFKEREPMECVVEPVENWGWVADYLAEAGHGVHLANTYKVRLIAESRVKTDRVDARVLADLLRTGYLPEGYVAPIDLRDRRQYLRYRLGLVRERSRLKNQVKRLLRVENVGEPACTDTFGKKGWEWLEKIQLRPVNDRIKRERLEAIKYYNVNIERLDSEIKLKSRDNETIRHLMTVPGIGHITAHMIMAEVGDMRRFASAKHFAGYTGLVSSQRSSADKTRSGHITKQGNKHMRWLLVEAAQKAKSLDANLKLFYDKIAYKKGKGAANVALARKLSEICWHIAVDNVPYDSSKVCRRVG

SEQ ID NO: 239277 - protein, 317 aa, unidentified
MAKRVEKITLGIDVAKDTGVVHVWETTQTRDVPNQSEAIVAYLKSLQGPVRIAIESTSNYHRLWVELALARGFEVYLINPRQLAHYREVVNQRNKTDPADAWLLARFLAHEAEQLRPCQPQDAHAQALWALLKRRAKVVEARKQLQLSFREIQLSAQALFTQFARLLARIDQRIQHAIQTLGWNDDYQRCLTIPGIGPLNAAALVAAYHRGVFASSDAFVAFIGIDVRMRESGGYKGKRKLTKRGEAEIRRLLYCATQPAACYPPFKAYYQRQIDKGLSKIAAKVILARKLARIAFALMRNQTLFIKTQEKTLACSP

SEQ ID NO: 239278 - protein, 400 aa, unidentified
MMTPDDIDVWVGLDVGKSAHHAHALDHDGNTLYDKPLKQDEKAIRTMLGKLSKHGRVLLVVDQPNTIGSLPLTVARNMGIAVAYLPGTAMRRTAQLLPGDAKTDRRDAHVIAWAALKLPETLRDVGPDDETLAALKLLAGHDEDLAHESTRHVNRLRSLLLQTHPAFERALKGERITRDATLALLERYGGPMGVKRAGIEDVKDWAKSNGLRAGRIIDDMFKAIGEQTVTVPGTLMAETIIPSIAHDIKTIRDRRREVGRQVEKLLEDHPLLTVLTSMPGIGVRTASNILLGIGGDIANFKSSAHLAAYAGISPVTGQSGTSIKGERPSRRGNKRLKNALWQTAFVASTKHPPSVAYYKRKREQGKHHNAAIICLARRRCDVIYSMLKNGTLYQEPALVA

SEQ ID NO: 239279 - protein, 334 aa, unidentified
MEQVTTVGIDLAKNVFSLHGVDGAGKTVLRRTVRRDRLLETVAGLSPCLIGMEACSGAHEWGRRFQQHGHTVRLMAPKFVAPYRKSDKNDGNDAEAVCEAVSRPSMRFVPVKSTEQQALLAMHRVRQGFVVERTALINRLRGLMSEFGVVLPLRSVTVRRQAAQAAEELPELARRAVNDLLEQLRELDDRIEGYDREIEAQARLSEPARRLMKIRGIGATTALAIVATVGDAREFKNGRQFAAWIGLVPGQYSTGGKSRLGHISKRGDAYLRNLLVQGARSVLQTASAHQDRMSRWALELQARRGYYRTLVAIANKNARIAWAVLAKDEPLQMN

SEQ ID NO: 239280 - protein, 461 aa, unidentified
MWLGIDIACRAAHQASLADERGQFVWSGRRFRTSAEDLERLWAMLPAGTDPSSVTVIMEPTRNAWVPLAAWFRRRGARVVMVPPEQSADLRAYYSKHTKSDRLDSRLLARVPLLHPEGLQTEQGLGPGDPMRRAVKLRSTLVKRRTSTMARLDALLEILGPAWVGALSSDMSKTALLFLANYADPHQVKRLGQARLGRFLHRHSRGTWGQAKAEQLLAAAAETLALWEEDLDFPDLADDIAIEARLALALTAEIKELDERIAVLLAHADPTGILLSAPGVGPILGAQILGRLGDPNRFASLAGIRSFSGLMPHLDSSGLSGRHGGPTKAGDACLREALFMAADQARRSDPSLAAKYHRLMTQAGKHHTSALCHVATTLLTRIAACWRRSEHYTLRDTDGRALTLSDARTIIAERYTISNELRAARRTTTTTRKGTGRRSKESQRAPSTGPSTTHATTPRTT

SEQ ID NO: 239281 - protein, 348 aa, unidentified
MTVTIVETRAITGGVDTHADVHVAAALDPIGGLLGVQEFPATAAGYASLLGWLGGFGPVCLVGIEGTGSYGAGLSRHVTAAGIRVVEVDRSDRQDRRRQGKSDPLDAVSAARAAQSGRARGAPKGRDGAVEAIRALMVAKRSAAAERTQTINRARALVLTGPEDLRARFTGHTVAALVAELASLRPRPGSTVGYATRIALRELGRRAEFLDAQIERLDELIGPLVAAHAPGLLALYGIGPNTAALLLIAAGDHPGRLRSEAAWAHLCAAAPVPASSGKTIRHRLNRGGDRQANHALWRIVFTRMGSHPATRAYVERRTAEGKSKKEIIRCLKRYVAREVYPHLRASAG

SEQ ID NO: 239282 - protein, 440 aa, unidentified
MKQFLECCAGIDIGKREMTVTILTGSVEVEPIPQMGTFGTTVQELNRCLEWLLGNHCSTVVVESTGTYWVPVWNVLHERVAVIVANPEHVKARRGEKTDPEDSRRLAERLRVGDVRGSFVPSAQIVELRDLTRRRKRLLSAANSERNRIQKLLEQANVKIGNVLTDVFGVSGQRILHALLQHPELPPAALADLAKGRLRHKRQALIETLQGHRLNDHVRWMIQHSLDHLVFLENQLTELSQRIVLKLQPFEREYELLQTIPGIAAETAAVILAETGGNMAQFPSPKHLTSWAGVCPGNNRSAGKQKSASIKRANKWLLAALVQSAWATVRQRGSIFQKRFYRQMQHRGRKRALIAAARSLLEVVWQVLQRMTPYNEPANEVLQQQERGKKIRHHLQRLRQLGIDISDLQLPPLTPLIPSNGTRLLTGTPHPLGVLGIHAR

SEQ ID NO: 239283 - protein, 400 aa, unidentified
MLLFFEVITMIFVGIDVAKDTHYAAVSDDSGAVLVKPFAFQNNAEGFCLLLKKLSEFDRSKLLIGLESTGIYSENLICFLYESGFRLAVINPIQTATLRKTAIRKTKTDKVDTMLIIKSLMVNSYRLYSQRDADSLKLKTLCRFRQNLKKSKARLKIQLAGYVNLVFPEFGKFFKSGIHIAASYALLKKHSSPKEIAALRTSTLCTLLSKASHGRFGKDTAEALKSLALSSVGVKNPYISIQIAQTIAQIELLEQQIKDLNSAIEEAMESINSVLMTVPGIGAVNAACILGEIGDIKRFSKPCKLLAYAGLDPTVRQSGQFTAKSTRMSKRGSALLRFALINSAWQLTLNDTTFKAYYDLKRSQGLNHYGALGHVAHKLTRVIFKLLTSDTPFNPAKLVA

SEQ ID NO: 239284 - protein, 347 aa, unidentified
MHFIGVDLHKQIISVCVLVRAGDQRQVMARRTLRCDQPEQIQAYFVGWAPFQVVVEATSSYEWFVQLLEPLAQRIVLAHPKKLRIIAESTKKTDKLDAQVLAEFLSLDMIPSAHRPSPRLREYRALVRQRQYVQRRITSLKNRLRHLLSHYNADVKHLFSQEGQTYLDQLAISAADRFVVEQLREAWRFFDGQLVAIDKQLRQFARSAPVAEREARQVLESIPCVGPVTIDVVLSELGDVRRFRSQKQVAAYAGLAPGIRESAGRGKQLSITKEGSGLLRWVLIETSWRLVMKTRRWGLLYEKLKQRIGSKKAIVAIARRLLCVMVALLRSGQAYRLSSEARVLNPT

SEQ ID NO: 239285 - protein, 447 aa, unidentified
MKHRKGAAGIEEIPDAEYELVIERVAAVDVAKASGVVCVRMPGPARRVSKVWEVAATTGAVAELAAKLAGWGIEKLTIESTSDYWRIWYYLAEAAGLDVQLVNACEVKNVPGRPKTDKLDAVWLAKLTEKGLLRPSFVPPAPIRQLRDYTRLRVDLTRERARYWQRLEKLLEDALIKVSAVASRLDTVSVRAMVEALIAGERDPRQLADLARGRMAAKRSELINALNGRFDDHHGELARMLLDQIDTLDAQIATLTERIEQRLALTGPDEHDQGRPGGGLVASTELSASQRLCEIPGIGPTTAQIILAEIGMDMTRFPTAGHLVSWAKLCPRTIQSGPVTRAGRTGTGNPYLKGALGEAAATVAKTDTFLGERYRRIVKRRGKLKALVAVARSILTIVWQLLADPTARFHDLGADYYTRRVNIERRMRNHIAQLTAMGYRVSVEPAA

SEQ ID NO: 239286 - protein, 420 aa, unidentified
MQEQPSEFAAFIGIDWADRKHDVCLQVAGAHTLEKSVIEHRPTVIDAWARDLRKRFDGRPIAVCLELSQGPIVSALLEHDFFVIFPVNPSTLAKYRRAFTPSGAKDDPTDAAVALEILRRHPDKLAPLRRESVDMRALRRLVESRRDLVQDRVRVTNRLIYALKAYFPQVVDWFRDKETEVFAAFLERWPSLTEAQRAKRDTMVDFFHAHNVRRANTIEKRINAIKSEKPLTSDVAVIEPALLLVETLLPQLRALSAGIVRFDEEIARHCKALPDFRLFSDLPGAGEVFAPRLLAAFGEQRDRFADAAAFQKLTGIAPVTERSGKSQWVHWRWACPKFLRQTFVEWVASSIPHSFWARAFYDSRRAKGASHNAAIRALAFKWIRVLFRCWVDRVPYDESRYLAALQKRHSPILKFAAQAS

SEQ ID NO: 239287 - protein, 318 aa, unidentified
MSQGYDKYVGIDVAKESLDVSGLTADSPSQFENTAAGRAKLLSLLPQAGACLLVAEATGGYERELVAEVVAAGHHIAVVNPRQVRDFAKAIGLLAKTDRIDAGAIARFGEATRPTPQGFSEQQEQLRELIVRRRQLVDHRTAEKNRCEQAHSTLVRNSVRKSIEGIDKDLKRIDRAIIQLVESNDDWRGRYERLKSVPGVGAQTAATLMAELPELGRLNRQQVAALVGVAPFNRDSGQFRGRRTIWGGRATVRSGLYMAALSAKKHNPVIRAFAARLLAKGKPPKVVLTACMRKLLVILNAMLRSDEMWGPRLATLAP

SEQ ID NO: 239288 - protein, 460 aa, unidentified
MNRKKTKSKVDRTMPMVHPNAAAIDVGATMHMAAVRADRALEPVRSFGTFTADLDQLVDWFTECGVETVVMESTSVYWIPIFELLDARGFAVLLVNARDAKHVPGRKTDVSDAQWLQRLHSFGLLRASFRPKGHIAELRAYVRQRERLLEYAASHIQHMQKALTEMNLQLHHVVADITGATGLCIIRAILAGERDPEALACLRHYSCHSSAETIAKALTGSYRAEHLFALDQALALYDAYHEKASACDVRIEAVLKELSIHRGRDHGSTPPASRRRNRTDQANALAFDVRAALFGLLGKDVTTIDGLGTYLSLKLIAECGDDLSSWPSAKHFTSWLGLAPSNKVSGGKTLSSRTRRSGGRAAALLRLAAVTVGRTDTALGAFYRRLSSRVGKAKAVTATARKIAVLFYNAVRHGMDYVDPGASSYETRYRTRVINNLHRRAKAFGFVLQPLEPKAGAAVS

SEQ ID NO: 239289 - protein, 394 aa, unidentified
MIYAGVDIAKTDHVIGAVDERGAEMCPPMPFKNTEAGLERAVAWLEGLAGSPSDVVVGMEATGHYWMACYSFLVARGYSVAVINPMQVKAVRKLKGLDKVKNDRVDAGLIAEALRIGQYDETRLATDEMASLRSLSRYLQSLRGMVAELKTQCVCLMDAHFPEYAGIFSDMFGAGSRAVLSKSPLPFELARRRADSLARDIAEASRRGGKSSGYAAKIKAAAKSSIGVRLGQEAASFQVKSLIRQIEFADSECAGVEARLRSLLDEVEPLVLTIPGVSYVTGAQIVSEIGDVSRFRNAPALVSYAGLNSSVSQSGQFDSGGGPITKHGSPYLRRALWLAANRARQYDPGLRAFYDRKRAEGKPHRVAVTAVARKLCHIVFAVMRDQVPYDPGRE

SEQ ID NO: 239290 - protein, 416 aa, unidentified
MGTKRNKACGADIHKNKIVATILSSSETKNQAEFGTTLPELFKFKSWLILNDCEAVAMESTGTYWIPVYSVLEGSMEVIVANPYMIKHIPGKKTDLIDSEWLAELCLKDLIVPSRIFPREDRVLRSLTRAREGLVKIRTQLKNKIHRDLSSSHIKLSSAVTDIFGKSGMHILRGLLDDRSIDEIINSIPSSRVKKNADMIRESIENNLDSSQIFLIESSLDLMGNLQDKIDTIDADLRRKMSTKQSDLKIAMSIPGIEFTSATTILAEIGNYRNFSSPEQLASYFGIVPFVSQSADKLHTGCITKHGSKHLRWIMVQVAHAASKKIGSKLRRFYLRVRARRGANVAIVALARKILCVLYHLLMNQEMYEEPGAAKRTRPNRLDQLPPQRDFTAQEMIDILKRSGYEVKKIDQGACS

SEQ ID NO: 239291 - protein, 365 aa, unidentified
MKASGEIYKPLINQNHSKMNDVNLVVGIDVSKSSLDFAEYKKTKSAITRQGAWSNTVKTIQEKLSKYDRETTLIVFEPTGSYSDKLLCCCEEMGFKFSLVNPNKSSNYAKYQGITTQTDAQAARMLAEMGSKEDLVLYQPCSHQNRERKSLMRHLCSLEVDRRRVLNRIHAEEQKKYPSKKLLSSQNRVLKTLDSEIETVSQTIKSIKEESYEAKKKKGKTVVGIGDKAADWLLTLTNGLTNFKSSGAVKKFLGIVPHTHNSGTSVRKSLGITKAGPGKVRAVLYMAALSAKKHNKACKSLYNRLRERGKCHYKAIVAVMGKLVTQFYAVVTSDVDFDNDYHLKRAEGKVVSDERVVQAKIELAA

SEQ ID NO: 239292 - protein, 361 aa, unidentified
MVYFVCPEQKHTQRRLAMAKGTKLDFTGQHIYIGMDIHKKSWSVSIYTEHFEHKTFTQPPEVKKLTNYLQRNFPGATYHCVYEAGFSGFWIHDRLTEEGIHCMVVNPADVPTKHKEKAGKADKVDCRKLARNLRSGDIKGIYVPFRVQAEDRHLIRTRQSMVRKQTRCKNQIKAILFFYGILIPEEGHWSRNFINWIETIRMERASGDLALKVHLEELNYLRQIIAGLNKAIRALSRTDTYRDKVLLLRTVPGISTLTAMTLLTELCDISRFSSLDKLASYAGLVPDIKSSGETEYTSGITHRRNPALRAVLIEASWVAARKDPALIIAFHKFSLRMKKTAAIVHIARKLLNRVRFVLINQ

SEQ ID NO: 239293 - protein, 389 aa, unidentified
MLLDDLSDRLTAIRTQFGAIFVSLELSRSNWLVTSLSPGTDEKMSKHGVTAGNVAGLMKLFADLRRKAEARTGESYPIITIQEAGLDGFWLHRVLQQNGIESHVVDPASIATPRRRRRAKTDRLDGETLLRALLAYKRGEPRVCAMVVAPSPEEEDRRRICRERRSLIAERITHVNRIKGLLFAQGISGYQPLRRDRRARFEALRTGDGRELPAHLKAQIGRELDRTELLLEQIEAVETEQDGLLAAARKPAGEGAAPDAVAMLLALKGLGANFAAVLWSEAFYRQFSNRRQVAAYAGLAATPWQSGGIRHEQGVSKAGNPRLRTTMIQLAWLWIRHQPQSTLTRWFKERSPQGRKRAIVALARKLLVALWKYVTQGVVIEGAVMKPAA

SEQ ID NO: 239294 - protein, 399 aa, unidentified
MAASRRVVIGADTHLDTNHLAVITDAGKPLADAEFPTSPAGYDDAARWAQSFGTIVIVGVEGTSSYGAGLTRVMQAAGIEVAEVSRPDRAARRRQGKSDPLDAYAAARAALAGDGLAVPKGEHTTALRALLSARRSAVKAHTAATNQIHALLVTAPAELRERFRRHSTTALVTALARCRPATHRDPTTAAVLTAAKALAQRVEFLERQKQDLTTQLDALVRQANPALRATYGVGPDTAAQLVVTAGANPHRLRTEASFAALCGAAPVPASSGKITRHRLSRGGDRAANNALYRIALVRMSAHPQTRDYVQRHDTNGRTKKEILRLLKRAIAREVFRLLTRPGPVDDYSDLRPARQAKNLTLATVAHHFGVSIITVSRLERGHQRNDTLAANYRQWLTAA

SEQ ID NO: 239295 - protein, 425 aa, unidentified
MEVGQVEVAQDDQEIIARVAALDIGKAEVVCCVRVPGQGPRARRMQEVRTYTTMTRSLLAMADWLTELGVTRVVMEATSDYWKPPFYLLENTFETWLVNARDVKHLPGRPKTDRLDAVWLCKVAERQMLRPSFVPPPAFRELRDLTRYRVDLITTRTSEKQRVEKLLEDSMIKLSVVASDIFGVSGRDMMAALVAGERDPKVLADMARGSMRGKTARLEEAFTGRFTDHHAFLLRTMLARIDGITADIDIVQDRIDEQIAPFAAAVTRLDEIPGVGVTTAQAIIAEIGLDMTRFPTPAHLASWARFAPGISESAGRKKGNSGTGKGNRYLARALGEAAVGVRRTDTFLGERYRRIAHRRGKKKAIVAVGRSILMIVWQLLSDNDARFVDLGSDYYESRVNLNRRTRNHVRELQALGYKVTLEPAA

SEQ ID NO: 239296 - protein, 413 aa, unidentified
MDVLHPRCCGLDVHKSSISACILLREAGRVQKHPRRFGAMTQDLQELAEWLRRFGVTQVAMESSGVYWKPVWNILEGQFTVVLANAQHIKNVPGRKTDQKDAEWIAQLLQYGLLRPSYVPCEIIRDLRDLTRMRASLSQEAARLSSRIQKVLEDANVKLASVATNVLGKSGRAMLEDIISGEDDPERLASLALGHLRVKIPQLRRALEGKIRSHHRFLLRRLLDQVQFVEQEIALLDQRLEDIGGQRPELAQAVERWDTIPGIDRVAAWALLAEISDNMAQFPTAEHLASWAALCPGNHESAGKRLRGTTRQGSPWLRRMACQCAWAAARTKNTYLSSQFRRLAARRGKKRAIIAVAHTIIVIGYHLQTNQSNYEDLGGNYFDRIHSDGLKRYLVKRLQQLGHKVTLEPMEAA

SEQ ID NO: 239297 - protein, 449 aa, unidentified
MSDIPTSSTQPEFGALIGIDWGDKKHAWALQAGDSTKIEKGDIEHTPEAIQQWAVGLRQRFPTGRLAVALEQSRGPLVFALSKYEHLTLFPIHPTSAAEYRKIFRPSGAKSDGPDAVLHLDMLARHRDKLRPLNPDTPETRALQLLTEDRRQLVNERTRYSNRLTANLKSYYPQVLQWFDDLYAPVTLDFLDQWPTLEELQKAKPGVWSEFFQEHNCRDAKTQQRLAAIPMAVTATTDFAVVTAGRAGVCAAVRLLRNLNQAIQEYDRQIDQLAKGHPDFAIFQSLPGAGKVMVPRLIAAFGTQRDRYQRAADIQQYSGIAPVTEASGQQLWVHWRWGCPKFLRQTFHEWAAQSIAQCDWAAAYYRVQREDKNKSHHAAVRSLAYKWIRIAFRCWKDRQLYDDSKYELALKTRAKATPEPKQPSAFPSPLRWISCAGFQKLAEKNEENT

SEQ ID NO: 239298 - protein, 310 aa, unidentified
MTVPTFVGIDVSKDQLDVAVEPQGLSFSLAYTDSDLSSLVVRLTELCPKIILFEATGGYEKRLYAALLQAGLSAHRINPRQVRDFARATGILAKTDRIDARVLVEYARKINPEVRPLPSIELDELTSLMTRRRQIVEMIVMEQNRLHTAAKRIKPNIEATIAWLKKQLASIDKDLDEFIEQNPILKRREEIIRSLPGVGPVVTRSLIAYLPELGTLPQKKIAALVGVAPLNRDSGKLRGKRIIWGGRGHLRSLLYMAALVGVRHNPILRSFYDKLLQAGKAKKVALTACMRKILVTLNAMIRKDTLWCTH

SEQ ID NO: 239299 - protein, 467 aa, unidentified
MKPKRSKKASREPQDWSLNLDIVHANAAGIDIGNESHYVAVPPGRDAKPVRQFACFTEDLRRMAEWLKSCGIDTVAMQSTGVYWLPVYEILTEAGLQVFLVNARHTKNLPGRKTDVQECQWLLQLHTFGLLNNSFRPAEEICVLRAYWRQRAQHVASASACIQRMQKVLTEMNVQLANVISDISGATGMAILQAILKGERDRYKLAALADVRIQATREEVARSLEGNWRQELLFILQQELDLYHIYQRQIAECDSALHAHLQTVEDKSEPTSKLPPAKANKKAGNNAPTTFDLRGELYRISGTDLTQIDGINVMNAQTIIAEVGVDMSRFPSEAHFASFLGLCPDNQITGGKVLRRGTKHVQNRAATALRMAATSLWRSKTYLGAKFRRLRARLGAPKAITAMAHMLARLIYRMLRYGKQYLDKGMNYYEEKYRQHQIYSIEKKAKELGFVVTLTPPPATLAAAPSF

SEQ ID NO: 239300 - protein, 453 aa, unidentified
MRYYRSYQEKRAQFTGKTIIGIDPGKDRHHAVIIDANGIPIGKTFSFSVSYQGFRKRLWEEINKQAADHSSSDLLFAVEASCNLWQKICNYLLSEGYEVVLVSPMYTKQSRVMLNNDFSKTDPKDALLVAINTQQGHYNKLRDYSKRSSNMRTLSIAYDKLRKDYSSYRGRLRAAIELVFPELLNVITLGTKTSYYLLEKYLFPSEYLNMNIQSESIKIEKISRSKYGIKQLRKLQELAKHTIGIPSHNNSYNRTIILIWLKGMEEIDSRLKTIFDQLIELASSMKEFSILTNIMGISDKTASLFLAEIGDISAFNNYKEIEKYAGYNLRLTQSGKHVGSRRISHLGNTRLRWILYQMTEETMKYIPEVRIKYLKRQLKKQIYRKNLVACVPQLLKLLFCLLKENKYYEFYEERVTEMEKLDKQYQIVKAERAAKHRKKHKNPQMGEELRKIA

SEQ ID NO: 239301 - protein, 391 aa, unidentified
MNAVGIDVSKGKSMVTILRPFGEIVSSPFEIKHTSSDIHSLIKLIHSIEGESRVVMEHTGRYYEALAHQLSAADLFVSASLRKIKSDKADSVKIARYALDKWQSLEPYSITDELRAQLKVMNRQFHFYVKQKTAMKNNLIGLIDQTYPNANTYFNSPTRSDGSQKWVDFVSTYWHVDCIRKMSLNAFVEHYQNWCKRKKYAFNKSKAEEIYTKTKELVPVFPKNEITKHIIRQAIDQLNSTSVTVETIRTLMNETASKLPEYSIVMQFKGIGPSLGPQLMAEIGDVTRFTHKGALTAFAGVDPGVNESGSYAQKSVPTSKRGSSNLRKTLFQVMDVLIKTMPQDDPVYQFMDRKRTQGKPYYVYMTAGANKFLRIYYGRVKEYLSVLPDPS

SEQ ID NO: 239302 - protein, 366 aa, unidentified
MRAKPVAPWSSELVGEPKVNAQRTPSSDRVTRTVEDVMNVNSQGREAVTVPTMNAGIDVSKDWLDVAFGSRSERFANDAAGMESLTGRLRREGIDLVVLEATGGYEAAAAAALQVAGMAVAVVNPRQARDFAKSMGVLAKTDKVDAKELRAFADVIARHEKRSQFVRQVPDEQRAHLAALVTRRRQLLEMRTAEAHRLAMAHKVARKSLAAIIKALDKQLAEIDRDLDQHVREHFRDLARQLGSVKGVGAITSSTLAAALPELGRLDRRSIASLVGVAPLACDSGKRRGTRRTWGGRSDVRAALYMATLSATRFNPAIRDFYKRLLGKGKPKKVALVACMRKLLTILNAMVRDHTTWNPTFHAKNA

SEQ ID NO: 239303 - protein, 358 aa, unidentified
MTQVKKLDFSGTTIYCGVDVHKKSWRVNIQDSEFELEDFTQNPDAVLLHKHLSRKYPGASYKIGYEAGFSGFSMQRSLSQSGCQCWVVNAADIPASDKDKKQKQDKADARKLCAWLQSKKLKGIHIPDAAWEHARTLVRTRERIVNNQTRCKNRIWQLLHFSGLPVPADQQEGKYWSKRFIDGLQKMDCGGSIHLQQSLQLHIKDYLQTRQLLLEATRAIRALCKEQKYTGDIKLLRSIPGIGEINAAVMLFELEDVTRFKRFDYLCSYVGLVPDTSDSGDTKRTKGITHRHNYYLRTALVESSWSVVRKDPALLMKYKGYCKRMDKNKAIIRVAKHLLSRINFVLKNKKEYVTGVVA

SEQ ID NO: 239304 - protein, 351 aa, unidentified
MGEYIAFDSHKRYTWVEREQVETRKVRQFRVEHAPGAIRRALAGCPPGTAVALEATANWYWIVDEIEQAGLEPRLVHPRKAKLMMGLINKTDKLDTHGMNRLQRNGTLPTVWIPPGPLREVRELTRTRIVLVQQRTRWKNRSTATLAKYGMPASEYSDPYGKGARAELQARLQPLPEQARWATQQMLAQLDGLSEQIEQFEERLEKLVEVTPEMQRLMSLPGVGVVLAATMGLEIGEIGRFASAEHLASYAGTTPRVHSSGDRTRYGRTRPDVNRYLKWAFAEAANSVAVNHLRRPERHVSQLYFRLRLRKGHSKAIGAVARHLAEAAFHVLSRQQAYQDPTARAGRTREV

SEQ ID NO: 239305 - protein, 433 aa, unidentified
MSNFFYSPVIGIDVSADFSYTAILAPNGDIYKKSFKIKHDLNGFNHLVNEIKKVEEEFNMKTAIFMESTGVYHLSLFHYLNKYFDNTFVINPLVTKSNKNGDIRKVKNDKKDVLSIATIGKFQNIKLSQQLSLDIFLLKNLVREYYKLTDTSSTFKKKLSADLRVIFPGYNTIFSDSTSKSSIELLSQYPTPQSILEAPKENIIKIFLNSSKKGIIWSENTYSKLFKVANEAKIIGLPLDGLAVKIASSITLIKTIQSEIDTLLQKINNFIQSETFPESIRANIELIDSIPGIGQLTAITIIAEIGDIDGFLKPKHLVAFFGIDSSVNQSGNFKGDDNKISKRGTRIGRRALYSVALASIRNNRNGVPINKVLLDYYQINLKGKKPKIALVAIMHKIINYIFAVLRNQTPFEQRDPKIHKQMFLENNSLNKVA

SEQ ID NO: 239306 - protein, 409 aa, unidentified
MCGLDVHKKSIPACVLWALPKGKKKQEKRRFATFTQDLLAMTDWLRECGVTHVAMESTGVYWKPVWNILEGQFEILLVNAQHIKAVPGRKTDQKDSEWIADLLQHGLLRGSFVPPTPVRELRDLTRYRVSLAQECNRIANCVQKVLEDANIKLASVATDSLGASGRAMLDAMIEGETDSGELAEMSKGLLRKKRAELRLALQGRVTKHHRFLLNQLMTHLGFTEDRMDDVEKEVGRRMQPYQEDVDRLCTIPGVERVTAWGLLAEIGFNMDQFPSAAHLASWAGLCPGNFESAGKRLSGKTRKGSASLRRCLSQAGWAVSTKSDNYLTAFYRRVAARRGAKRAILAVAHQFLVIAYYLLKRKEEYRELGANHFDNIHADRVRRSLVKRLERLGHVVTLRPPSSQHSVLP

SEQ ID NO: 239307 - protein, 377 aa, unidentified
MGEDTAFVGLDVHKETIAVAVAEDRRGGEVRYLGEIENTPEAMRKLVKKLGKAHGTLHFCYEAGPCGYGIHRQLTEMGHDCELVAPSKTPARPGDRVKTDRRDAVLLARLHRAGELTAVWVPDEGHEAMRDLVRARTAAMESLRRARQQLSGFLLRHDRVFRMGCNWTKKHRVWLSGLRFQHPAHQIVLQEYIHAVDDAAARLARIEDQIRTLLPIWSLAPVVEAIQAMRGVSFISAVTVMAETGDLGRFDNPRQLMSWLGLVPSEYSSGPRTARGGITKAGSKDARRMLIEGAWTYRCHAAVGKVHMARLEGLPQEIRDIAWKAQIRLCARYRRLSARGKPATLVVTAIARELAAFIWAIARKVTPNTRPASAAAC

SEQ ID NO: 239308 - protein, 344 aa, unidentified
MQHYVGLDLSVKETSVCIIDKAGKVIREVKVATKPVPILAVLTEEALAIERIGLEAGPLSQWLYSALAEAGLPVICVETRHMKAALSAQINKSDRNDARGIAQMMRVGLYRPVHVKTLASQKRRMLLTSRQLLQAKALDIENDLRGTLRNFGLKVGMVGTIKFEARIRELVADHPDLAAIVEPLLIARRVLREQLDVLHHQLLEIVRHDEVCRRLMTTPGVGPVVALTFRATVDVPSRFNNSKAVGAALGLTPRRQQSGEIDRMGGISKSGDAMMREMLFEAALVLMTHSRKWSWLKAWGMKIARHRGMKRAIVAVARRLAVIMHRMWVDGTEFRWTRKEAAAT

SEQ ID NO: 239309 - protein, 385 aa, unidentified
MNATVNPAPIQTDLGAIFVSLELSRSTWLVTSLSPASGEKMSKFSVIAGDAADLLSRMSVLRDKALHRTGRAYPIITIQEAGLDGFWLHRLLTREGIESNVVDPASITVSRRRRQAKTDRLDGETLLRTLMAHKRGEPRVCAMVHVPSPEEEDQRRVSRERKTLTGERVTHVNRIKGLLYSQGISGYEPLHKDRRKRLDELKTGDGRDLPVHLKRQVSRELDRLELLLEQIKSVEAERNALLGSQVKKANQPQVEMLLGIKGIGAEVATILWTEALYRHFDNRRQIASYAGLAPTPWQSGSIDREQGVSKAGNPRLRVTLVQTAWLWLRHQPNSALSKWFRERTQANHGRRKKSTIVALARKLLVALWKYVTSGVLMEGVITNKV

SEQ ID NO: 239310 - protein, 372 aa, unidentified
MGHRTEVFVGIDTSKSRNAIAIADGGRGGEVRYLGELPATEAAIRKLVAKLAAKYRHLTLCYEAGPTGYGLYRLLKSLGHECLVVAPSLVPKKAGDRVKTNRRDAVSLAKLLRAGELTAVWVPDERHEAMRDLSRARQAVKKDLQGKRQQISSLMLRLGRIYPGKTTWGPAHMKWLMAQKLEHREQRIAFEELLEGIRQESERIERLENAIREAVPEWSLAEVVVALQAVRGIDLIAAVGVLAEIGDLSRFQNPRELMGYLGLVPSENSTGDKVKRGGITKAGNGRARRILVEAAWSYRYPPRVSRDKQPKVAAAPRRVREIAWKAQTRLCGRFRSLERKGKRRTVIATAIARELSAFIWAINRELMTHRQA

SEQ ID NO: 239311 - protein, 433 aa, unidentified
MSLPGNLSLAEVHLAPLSNQQFKAFFGIDWADTKHDICLQQAGDDRREFDCIPHQVTRIDEWAKALHQRFGGPIAIALELARGPIVSVLQKHAFFTLFPINPLMLAKYREAFKPSRAKDDPTDAELALDLLLRHPERFSPLRPQSAGMRSLLSLIEQRRELVGDKTRFTNRLTNALKQYYPQALEWFDDIDTVLFCDFLTRWPTLPAVRRASRKTLETFFHAHNCRRAQLIEGRLESIRCAVSLTDDPGIVAPHRLLALMLVAQLRTALAAIDVFDKEIATVARTLPDFDLFDSLPGAGPHLTPRLLAAFGEQRDRFKGAEELQKYSGIAPVTERSGKKCWVHWRWQCPTFLRQTFVEWAGQTINKSFWAGAYYRQQRAKGSSYQAAVRALAFKWIRILYRCWQTGTRYDESIYLNALRKRGSPLLRNLGLPE

SEQ ID NO: 239312 - protein, 450 aa, unidentified
MSPLALDVVTKTGKTPVLGRMLSKYVGRKTSSIENDITKARNHLRQRGKIMRVVFGIDVSKASSEVAILVNGEKIHGYTIPNDAIGFNRLLEDLGTVYQPEIVFEATGVYSRRLQAFFEDNSYAYTRLNPLESKKQLDSLRVRKTDKIDAEKLATSQFILNRKPSYVQEALYQELRDLSRFYQNLTKDIVCAKNRLHKVLQVTFPELENILSAPTGEQYWNLVITFPCNSFVLELDDAALRAIIRQSTSKHISENRVTYLVDKLTKLANHSYCAVKKTSPMMEEVKYYAGELLRLSEHRQGVLEEMVTLAQSLPEYEILLSIPGIAETTATSIIGELGDIRRFHSANQINAFIGIDLRHYESGDFLAKEHITKRGNPYARKILFKCIHNIASASHTNPCHIADFYEKRKRQSQVTSTKPHTIASIHRLIRTMYYLITHNKLYDYTSIQNR

SEQ ID NO: 239313 - protein, 417 aa, unidentified
MEIVYSRCCGLDVHKKSISACIIIREAGKSEKLERRFGTFTSDLEEMAEWLEEQRVTNVAMEATGVYWKPVWNVLEGRFELLLVNPQHVKALCGKKFDRRDASHLGDLLQHGLLQGSFVPTPAIRQLRDLTRNRARTVQEATRIKNRIQKITEEANIKLGSVASDVVGVSSRLMLKQIIAGEQDATKLAGLAIGKLKKKHPQLVQALNGKVNDHHRRMLDRLLKALETREKEIEEDEKDIRREIQPFDKAIKAWMQLPGIEEVTAWSLVAEMGPDMAPFDTAEQAASWACICPGNHESAGKQRSGKTRKGNRWLRSAISEAAWGAARTKKSYFHAQYHRICARRGEQRALLAVAHSMIVVGFYLIKYDLQFNDLGADFFDRRNREHTARRAVKRLSSLGYKVTLEELQTEPSSSSQP

SEQ ID NO: 239314 - protein, 389 aa, unidentified
MSKGGLPPQVELYSPEEYCVGIQGIWPQGPRLVETAMTNDILLTVDYHDEKSVIRRLDQRTGTEQLLTVPTDPQRFVEVIAQAQAQLRRRRGGQVVWIQESTTGWARVGALLAEQPRVVFVLANVVQMPLPPKARRRKTDKIDTARIQREYQNGELPKAHQPSAWWRQVRRLVAMRESVVRRQTALRNWINRYLAHESWASRANLWSGKGQHRLRGLLTTLPPSDRQIIDWKLDELALLRQQRVAVEAALYQRHQNWPEAQRIDAIKGISVAAAVSITARIGPVERFADAEALIAYAGLAPGVHQSDQTRHNGRIGGGGTDKQLRHYLIEASIWARTLPRYQKTYERTAARRGKKIGRLVVARLMLRSIYKMLRDGVAFEAAALATTGV

SEQ ID NO: 239315 - protein, 343 aa, unidentified
MGEVITIGLDIAKLVFQVHGVDEIGAVVIRKRVSRAKMLEFFGSLKPCLIGIEACPAAHHWGRELQALGHTVKLMPPAYVKAYVKRSKNDANDAAAICEAVTRPSMRFVAIKTKDQQAALMLHRARQLLVRQRTMLSNAIRGHLAELGIVSAKGRQGTGALLEIIAAGDGRVPPVARGVLDVLARQYNALGTELGSIDRSILAWHRSCEASRRLEEIPGIGPVVATALVAEIGDWKAFGSGRSLAAWIGLVPRQQSTGGKDRLGGITKQGNRYLRWLLVVGAMAVIRYAQKHGTLKRPWLGRLMARRPTKVAAVALANKIARMAWAIIVHGERYREPASLLAA

SEQ ID NO: 239316 - protein, 316 aa, unidentified
MTQDGAVVGIDVSKDALDVAIFPGNGEALRFSNDADGLKGLIRLIRKIKPRLSAFEATGGYEKALLRALSKAGLAASRLNPTRVRKFAEACGLLAKSDRLDANIIARFAHTLPPRLTVFDRDADRLAQTVAARAQLVDQLTRTTNQLGMITDPTSREAMEAVRKTLMEQRDALERVIEDLIAANESFARQDEIMRSMPGVGPILASTILAMMPELGKIANDASASLAGVAPFTCQSGRYRGQEKISGGRKPVRDVLYMSALSAIQHNAVFKSFYNKLVAKGKEKKVALVAVMRKIISTLNTMLRRDAMWNPTPHTA

SEQ ID NO: 239317 - protein, 424 aa, unidentified
MKVTYQTCCGVDVHKSFLVATIVKTTGGIEPSYQKKRFSTFNNSILEFKQWLLDNHCHDVCMESTGKYWVPVFNLLEDEINVVIANPKWVKAVKGNKDDTKDSKWIGDLFRLGLVKGSYIPCKKVRILREYTRYRYKLVSCRSSEKNRYQNALTVCNVALDSIVSDIFGKSSTSIIDYLLEQSGTSINHEEIASKLLRSLKSKEDAVIESVEGYQMTDAQKYRMRLVRAHMDYITAEINDVDKMIENMISSNPDFENAVQFLCTIPGVKRDSAITIISETGTDMSQFSSSKRLCCWAGLTPGSNESAGKKKSVRITRAGVYLKPALVQCAHAAVKSDKSPYYKKKYESLVKRRGKKRAIIAIARMILTAIYQMLSTGEQWNPSDLYKIDMPVALVEKQKAKAIKQAKKLLQREGLLPPDEPLAS

SEQ ID NO: 239318 - protein, 343 aa, unidentified
MEQFIGCDAHKKYSVFVAVNERGETSQAVRIGHDREQYRQFLERLPAGSQIALEAGGHYYWMVDEMEAAGHHPRLAHPLEAKKRMGKTGKKTDKVDANGLGILLRNGTLPEVWIPPAELRDQREVLRLRMFLVQQRTRLKNRIQGVLARYNIEVGVRDVFGVEGRRRLGMRLGQLPEHTRQSVELELVTLDFVGIQIEEVEKQLEAIMQVTAEANLLKTLPYVGRILSMVMTLEIGRVERFASAAHLASYAGLVPYMAGFGGVRPHPPADRTGIPAALRYAPIVSRRMCAARSMRRSDHPRRPKAITCCLFSSFKTLLTSTEGIALASDSTSRVMAYRWPVFR

SEQ ID NO: 239319 - protein, 366 aa, unidentified
MIGKEYYIGMDVHKDTVQMAVFTETGEEPVYERRLRNDTDLLVKEVVVFCRKGKTEVAYEAGSLGYVIYRAMERAKIPCYVLPANKVAKKRTDRIKTDKRDARLIGRELRSKSIKPIAVPDEADEAARDLLRYREDVSEDLRRTKQRLLKFMIRHGHIYVGGGNNWTLTHWRWMDRLEFKHEHERMVYEEHRSQIRSLEERIVRLEEKIVATAESPRYQAAVSKLRVFKGIDYIIALSVICEIGDFRRFAGAKDFMSYVGLVPSEYSSGGKRNQGSITKAGNGHLRRLLIEGAWHYTKNARPGKRLEKRRQGYPANLIDIADRALHRLHKKYLKLVFNGKHKNVAVTAVARELAGFIWAVQVSNAA

SEQ ID NO: 239320 - protein, 407 aa, unidentified
MEAVIIGVDPHKASVTIEVRDRREVLRATGRFGMDKAGYRQLLGYVRQWPARTWAVEGAHGVGRPLAARLLADGEAVVDVPAKLSARVRVFDTGHGRKTDATDAHAVVMVALRTRGLRQLIVDEELAVLGLLADRRDELSRARNQTLNRLHRLLVDLVPGGGPRHLTALQAKALLASVRPRDLPGRTRRELAVELIGEVQTLDGKLKALTGRLRQAVTATGSGLMDVYGIGPAGAARILADVGDVARFADRNRFASWTGTAPLDASSGAQIRHRLSRAGNRRINHVLYIAAVCQIRHDTPGRAYYRRKLAEGKTTLEALRCLRRRLSNVVYRQLVADAATKNSDRAGPGGHSGATLISSAADLTPVVGSSDKPLPGPAPAHLPAATANANPPTPSAAAPSTGPIPAS

SEQ ID NO: 239321 - protein, 317 aa, unidentified
MSESPVFVGIDVAKAQLDIAVRPTGARWSAPNDEAGIATLVTQLQAVAPTLIVLEATGGFQRAVVAALTVVGLPVVVANPRQTRDFAKATGQLAKTDALDARALAHFADAVRPTPRPVPDAQTAAMRALLTRRRQLVAMRTAESNRLGSAPSPPVQADIKAHLAWLDQRLATLDDDLDTTLRASPVWRERETLYRSVPGIGPVCARTLLLDLPELGTLSRQRIAALAGVAPFNRDSGTLRGHRAIWGGRAPLRATLYMATLVAVRHNAVLQAYYERLLAAGKAKKVALVACMRKLLTILNAMAKHQTPWQPQEVAIA

SEQ ID NO: 239322 - protein, 406 aa, unidentified
MKHVVALDVSMGKSTMVIYNQYRQCEVEKEIEHNRPSFEQLHKTLQTLTYQDGQPPEIVFEATGVYSKALERFFQDYDYTYCRINPLEANLQMASMRRQKTDKGDAHELAKSHFRVEREQTYQEDEYYQQMRGLTRYYDELDSEITHLYSRLHAILQLSFPELEQLFTKRSALFLNIVQLYPHPDEVLAHSKTVIRNRLKANTRKNLSLKRAEEKGIALLEAAKTSYPAISRDDVRCEQVKDYARRIVDLKERKEQLVKQMVELSNERTEYHVLLSFPGIGETTAVRIIGELGDIRRFKNHKQLNAYVGIDIMRYQSGNTHYKDKINKRGNNKLRKILFFMIKTMITLRQKTKNHLVEYYDKLKTQPLRKPHKVASIACVNKFLKVAFHLIAHNITYDYEAASTCS

SEQ ID NO: 239323 - protein, 339 aa, unidentified
MLYVGIDIAKNKHDVTALNVPGKTVLKPLTFSNNKAGFELLDLSIRQINQDCLIALEDTGHYAFNLLNFLHEQGYKVYTYNPLLIKEFAKSLSLRKTKTDKKDAHGIALKLLSNPNREQFQHDNRQVELKILARHIHRLKKKQSDWKVQYTRCLDIIFPELDKIVGKHSEYTYQLLTRYPNPQKRIEAGFDKLIEIKRLTASKIQDILSVAPRSIGTTSPAREFEIIKHYKRLIDKAETCVNDLMAEFNSVITTVTGIGNRLGAVILAEIRNIHAFDNPAQLQAFAGLDSSIYQSGQIDLAGRMIKRGSPHLRWALIQAAKACPRFSPAFKAYLKTKLE

SEQ ID NO: 239324 - protein, 317 aa, unidentified
MADVRFPQLIQRACGIDVHLKVVVATIDGVGIPRETRSFATFTSSLTELKEWLLSKGVTHVAMESTGVYWKPVYKVLEDSIPHVWIVNARHIKNVPGHKTDKMDSEWICKLLLAGLLKPSYIPAKEQRQLRDLTRYRNKLIQQIASEKNRMMRILEDCHIKLSSVVSETSGVTATALIDMLCEGRKLTLEDIACVYHKKLAASPQELLEACTGFVEDHHVYLLQIIRKDISQTQLLANELSERIKSILSQYDNVLELLKEIPGFSTKVVEDLVAEIGLDMSHFPSEKHLASWAGMCPGNNESAGKKKAEESLTETNK

SEQ ID NO: 239325 - protein, 347 aa, unidentified
MDHISRIGMDTSKHVFQLHGVNAAEMPVLRKKLRRKEMVAFFANLAPTVIAVEACGASHHWARLLQLLGHKVRLIPPQLVKPYVKRGKNDAADAEALCEAMSRPTMRFVPVKTAEQQAALMLVGLRDRLIRNRTQLANAIRGYAAEFGLTAAKGMAHLAQLLERIQADEGVPALARELFAVQAKEYAQMQQQIDEVDAKLLAWHRANECSRRLAKIPGVGPIAAAMLLMKAPAPELFRSGRQFAAWIGLTPKDHSTAGKVRLGVITRAGDEGLRSVLTVGATAVIKQALRGGSGSASPWLIKLLARKPPKLAAVALANKTARIAWKLMVTGESYAIHTHPAAIVSAV

SEQ ID NO: 239326 - protein, 368 aa, unidentified
MKIIKYIGLDVHKNSISISTADEGRDAEVRCYGKIGNDVDQLMKVFRKFISKGFELNCVYEAGCCGYHLYRFLTGNGVKCVVVAPSKIPRKSGDHLKNDTRDSITLARLHRAGELTEVYVPAEEDEALRDLVRAREDAQNAHKKAKQQLAAFLLRYHIVFSGKSRWSKAYFNWLTTISMKHPGQQITLQDYIDTIHGCNDRVKMLTEQIRQLSEQSRLYPLIQALQAMRGISLVVAATLASELGDVSRFEHPEDLMGYLGLIPSENSSGDKQNRGSITKAGNGHVRKALIASAQAYRLPARKTREIQKRQEGVPKEIRDIAWKAQLRLCSRYRHLTGRGKNPNVAKTAVARELSGFVWAIAKELPLAA

SEQ ID NO: 239327 - protein, 323 aa, unidentified
MNTAPIVYVGVDVAKASLRFDAGDGYSKNVENQPAAIKRELARLRKRVPAGSALQVCFEATGCYTRKLKHACVEAGVAASTLNAYKVKQYARAMSISAKTDPIDARMIRLYSEHRKPGPDAPLTEGQEEMKELAGLRALYQKQEGMLRGALESAGSACAVKSVKASLASVERQISRLEARLEELRDADAKRAAVCAELAKIAGVGDLTALLVTSLVPELGTLSRRRSASLAGLAPHPEDSGTIHAPRHIKGGRFHVRRTLYMAALSASQFNAVLKVVYERKIKEGKPFKVAIVCIMRKLFVHMDRVAAKVLKDLAATPPLATA

SEQ ID NO: 239328 - protein, 357 aa, unidentified
MDTETVWVGLDLGLTRTHVCVVDHVGVPLHELDCETKLQELRSALSDYPADHIGMIAVEAAGFTGIIRKLRGAGLPVVMFESRKASKFLALRRSKTDASDARGLADLGRLGRNTVSQVYLKSPECERLRRLLSMRRRLVKMLIAGEGALRTLLNVRSFKQSRRPESLRRQVEPLLAQLRIEEDFDPSSDVEPLLEMCERLRVHLKKLNAELESQAKASEVCRLLMEVPGVGPLCSLHFYCAVEDPNRFRRASDIGAYLGLVPRRYQSGEVSRTLGITKTGNKYARTHLVTAATTFGRHAPDCALKDWYIALRARLGSKRARVAMARKLAVILISMWKNGARFRIEPSQQLPKTESVI

SEQ ID NO: 239329 - protein, 339 aa, unidentified
MQVTTIGLDLAKNVFQVHGIGEDETVVFNRPLRRAQVLPFFAKLEPCLIGMEACSTAHHWARELSALGHEVRLIPPMYVKPYVKRGKSDAIDAAAICEAVSRPTMRFVAIKTVEQQSLLSLHRARDLLVRQRTQLINSLRGLVAEFGIYLPRGLARVIGFAEDITLGEVLDLPDIVNEVIRNLSEQLMALHKRIRWYEERLKQVAKEDERVRLLRTIPGVGAVTASAIIASIGDGHQFKNGREFAAWLGLTPANKSSGGKEKLGRITKMGDQYLRQLLVVGMTSLVRQTRSHPERASKWLTSLLERKPARVATVAMANKTARIAWAVLTRNEPYTPHTT

SEQ ID NO: 239330 - protein, 311 aa, unidentified
MDADVVVGIDVSKERLDVHVLPCGEALVVANDAAGVEKLSGRLLELGPKIVALEATGGFETAAAAALSAAGLPVAVVNPAQVRSFANALGKRAKTDPVDAQVIARFAAKTEVKAKPLPDEQTRLFADLVARRRQITAMIVAEEARRERAANRQLKKSIARLLTALRRELKSIDGDLDGQIRASPAWRAKEDLLSSVPGVAKRISRVLIAELPELGSLDRRQIASLAGLAPFTRQSGKWRGKSFISGGRASVRAALFMGALVASQHNPVLKPFRDKLVALGKPKIVAIIATARKLLTILNAIIRDQRPWQSA

SEQ ID NO: 239331 - protein, 344 aa, unidentified
MDHFAGLDVSVKETSICIVDDTGKIVREVKVASEPEALLAVLKKPAYNFKRIGLEAGPLSQWLFGALAEAELPVVCVETRHMQAVLKAQINKTDRNDARGIAQMMRVGLYRPVHVKTIRSQKLRMLLTHRQLLQSKAIAIENDLRATLRNFGLKVGMVGKVRFEARIKELVEKLPDLAALVEPLLIVRRVLREQIVILHRRLLAVVRDDEVCRRLMTVPGVGPVVSLTYRATVDAPARFRKSKAVGAVFGLTCSKYQSGEIDRSGRISRCGDEMMRVMLYEAAQSMLRSKKWSWLKAWAMQIARRRGIKKAIVALARRLAVIMHRIWVDGTEFRWTREQSSAAA

SEQ ID NO: 239332 - protein, 421 aa, unidentified
MKAAQTILHVGLDVHKDSIAVALAAQDGSLRRYGEIPGHIEAVDKLLKRLDRADQQIRLCYEAGPFGFVLCRHLRRKGYVCEVVAPSLIPKRAGDRVKTDARDAEQLARLFRAGELTAVRVPDEADEALRDLIRGRLSAVFEQHRARHRLKGFLLRLGLRYPGKTSWTPAHMNYLSKLKMSHPAQQIVLEEYIQAVQSATERLDRLTTQVQAQLPGWKWEPVVRALMCLRGVSVINGMTLVAEIGDIDRFESPRQLMSFLGLTPSEHTSGDKRHQGAITKAGNGACRRALVEAAHHYRIPPRISPTLRQRQHGQPEQVRQIAWKAQQRLYSRQRTLSLRRKKSVVVVTAVARELCGFVWAICRALKHPHPKAPTHTSEGSARVYVLKPDLKFKSSAGRSRLASSAAAPPARARKGPTSLAS

SEQ ID NO: 239333 - protein, 364 aa, unidentified
MDVHLRSTTVCALDAETGETVTRRFRGNPWGEVAEWMSGFPGPSLAAYESGYLGFAPQRELSGLGVDCVVATVSKVPRSAADFSSKNDRNDAARMAKAILSHDISPVWVPSPEIEGLRDLAGAHDAATARLAAAKQRLLAFLARRGYAYGGTTPAGNPRKYWTYDFLRWLDKVRPADDGGIRALAALRSEVEAASETRDDLLAEYRAAVAAGPLSAEVEALQSIKGCGFALAAAFASEVGDFSRFRSGRQVTSYFGLAPKQRSSADSVRLGGISGAGNALVRRLAVEGSWSYVQASHQPKLMPKGSGVPLEVRMHGRKGSERLLRRREEMLARGMPQAKANAATAAELVRWLWALGAMCREATE

SEQ ID NO: 239334 - protein, 387 aa, unidentified
MIYVGIDVAKQKHQIAILDDRGEIYRDNLVIQNNYLGFQKIHEILSHIQTETAQECQVALEDTGHYSLPLLQFLGKNRYPTYCYNPILIKEFSKVHTLRKTKTDKIDALMIAKKLMVDLEKREKKQNQTSMELKELTRHRRRLGKHQSFLKTQYTRILEKGFPELATYGQVRHSAYMIKILKKYPSPKKIAAAHLKTLSSLLGVNNSQLSASKLQQLANESIGYHSEVAELELIQTIEQLYLYEKQIKKVDKRIQEIMDILDSPIVTIPGISYRLGSIILAEIGDIHNFKTSSQVLAFAGMEPSIYESGEGKGKGKMVKRGSPYLRWAMYHAARLVAIYSPTFKRYYKKKQSEGKHYNVVISHIAKKLIRVIFHLLRKEEPYKEAQQ

SEQ ID NO: 239335 - protein, 355 aa, unidentified
MNDEKYIGLDVHQATIVVAVMDSTGKLVMESILETKAATILQFFAGLRGTLSVTFEEGTWSAWLYDLLHSRVDKLVVCNPRKNALLKDGNKSDRIDARKLAELLRGNQLKPVYHGETGVRMLRELSRSYLTIVKDLSRVMNRLKAVYRSWAIPCAGRDVYYRRHRAQWLAKIREAGVRRRAERLYEQLDMLQHLRQQARRELLAESRKHTITAKLRQIPYLGPIRVALAVALIQTPHRFRTKRQLWAYSGLALETRTSAEYRFVEGQVRRSKKLLCIRGLNKDHNHDLKGLFKGAATMASVRPGPFQDFYQAALAKGIKPTMARLTLARKIAAITLTLWKKGENFDAEKLKSQAA

SEQ ID NO: 239336 - protein, 410 aa, unidentified
MEVLHPRCCGLDVHKETVVACLRLVIDGKAIKETRTFATTTAGLLALSEWLTETQCTHVAMEATGVYWKPVWHILSDGDFELVLANAAHIKNVPGRKSDVKDSDWISDLLAHGLIRPSFVPDGPTQEMRTLLRTRKQVVREKSSHVLRIQKTLEDANIKLDSVITDIMGVSGRKMIEALIAGEKDPAKLARLADPRVKASKESLREALRGRVTKNHRFLLRLHLRQIDAIDAAIAEIDREVEASIAPFRTAVEQVSTVPGVKSLAAQTILSEIGLDMSRFPSSGHLISWACICPRSDESAGKRRSTRIRKGSPWLKTTLVQCAWAATRTKGSYLQAQFYRIRARRGAKKAILAVAASILTAIYHMLKDGTFYQDLGPDHFDPRTKERHKNRLIKRLADLGYVVELVPQAS

SEQ ID NO: 239337 - protein, 400 aa, unidentified
MISVGIDVSKGKSTVCILKPYGEIVSKPFNITHTHKDLSELSSMLFRLNDEVKIVMEATGIYHLPILTYLQEKGFFVSVINPYLMKSYRNESLRKAKTDKIDSRIIANYGIDHWFKMKEFQTSGEIYEELKLLGQQYRHYMKLHLLSLAELTHLLDLTMPGIKNLLASWNETNRKDKRSDFVERFWHYDIITSMSEQEFTEKYILWAKEKKYVPSQEKAKVIYTLAQESIPTLPSETSSVKMLVTEAVRVLKEVDATLGLILSRMQEIAKTLPEYSVVREMGGVGNTLAPKLIAEIGDVRRFRNGKALVAFAGIDPPPYESGQFVGCNRKISKRGSASLRKVGYETMRSLKMRSRPEDPVYRYVVKKESEGKSKKSAKIAGLNKFLRIYYARVTELYKNI

SEQ ID NO: 239338 - protein, 363 aa, unidentified
MVVLIGADVHKNSHTFVAVDAAGKQIGQITVRATHAGHEKAYRWARKSFIEQDRRWGLEDCRHLTGLLERDLLAHGEPVVRVPAKLMARQRAAARTRGKSDPIDALAVARALAREDDLPAAFTDERAREVKLVLARREDLVAERTRVINRLRWHFHELDPELDPAPRALTHRPAQERVRELIEASEGIVAEIAGMVLADLERLCSSISELDARLRGMVRYLEPELLEIPGCAELSAAKIIAETAGIERFATESKFAMFAGCAPIPVWSGKTEGRVRLNRGGNRQLNCAIHRIAITQTRLEGPGKEYYERLRADGKTVMEALRCMKNQIARRIWRTLTRAHAEALTTTPIPLNPTPTTCLPHAA

SEQ ID NO: 239339 - protein, 361 aa, unidentified
MPIMTDHAAQVIGGVDTHGHSHHAAVVDTLGRQLADKEFPANRAGYRSLERWLRSHGTVLAVGVEGTGAYGAELARTLTQAGLRIVEVDRPDRKTRRRHGKSDPIDAYAAATAVTSGRAAGTPKTRGGMVEAIRALRVPYRSAIKARTQAINQARQLLVTAPEALRAALRDRSATDLAHACARLRPADLTDPTSATKAALRRLGRRILALNEEIDELKIALHDLTARTAPDLLELQGVGPDVAGQLLATAGDNPDRLRSEAAFAHLCGAAPIPASSGRKDRHRLNRGGDRAANRALHTIVLCRMRWDPRTRTYVQRRTQQGLAKKEIMRCLKRYVAREVYKILTTPPRSTSNPTPSHAETA

SEQ ID NO: 239340 - protein, 332 aa, unidentified
MSAPLIPVGIDVSKAILHVAILFPERSKPLYQTFDNSEAGYAGLQGWLEGQGVTSAHVCLEATSIYGHGVATALHQQGHRVSIVNPVRIHGYAKSQLKRTKADRPDATLIAQFCRDLKPGAWQPVTADIEALQAYTRRLDALTHMLSQEKNRLDISPEALKPNIEAHITFLEDQVKALKKQFRTHIGSHESLQTQAALLDSIVGIGPDTAARLLAEIGDIKAFDSARQLAAYAGLTPQEHTSGTSVQGKTRLCKIGNARLRKALYFPAIAFLRCAPELQPWRERLVAAGKTKMAIIGAATHKLIRIVYGVLSSGQLYDPEKLKPQKSAKAVP

SEQ ID NO: 239341 - protein, 334 aa, unidentified
MEKVTTVGIDLAKRVFALHGVDGMGRVVLRRTVRREQLMEIVAGLPRCRIGMEACAGAHDWARRFREFGHEVRLMAAKFVIPYRKNGKNDGNDAEAICEAVGRPNMRFVPVKSAEQQAVLALHRTRQGFVTERTAVINRIRALLTEFGVVLPQSAEVVRRQTSGGAEGLPVLARRMVEDLRAHLRLLDERIAAYDREIEELAKQSEPTRRIMSIRGIGPLTAQAIVATVGDARDFESGRQFAAWLGLTPQQHSSGGKSRLGRITKRGDAYLRGLLVQGARSALHTAARHTDHLSRWSIALQGRRGYRRAQVAVAAKNARIAWALLSKNQELRSV

SEQ ID NO: 239342 - protein, 465 aa, unidentified
MRKEREKTNQADSDMEAQGLPMVRANVAGIDLGSKKHWVCAPKLGGQGREVKAFGATTPELQRMAAWLKERNVESVAMESTGVYWIAPHEVLERHGLEVVLVDTRQLARVPGRKKKTDPVDCQWIQRLHSCGLLMGSFRPDEQVCMLRTLVRDKAILVAETGDWLRRMQKSLDQMNVRVHRAVSDIDGVTGMAIVRAIVGGERDARQLAKLRDPHCHQSEEAIAEQLSGHWRADHLFTLGQTVKMYDAIQERVGEYEREIMAKLAEMEREECRGKEAPKLNNPNKAKAIKKRGEEPLRQALYRISGVDLTGIDAIGVETVQLVLSEYGTDLSMFPTEKQFVSHITLAPHKPTSGGKPVKKQKKRGSASSRVAAGLRMAALSLRNTKTALGAYYRHMAARKSGDVAVFATARKLGTLIYRLLRWGQPYLDEGAAAYEKRYQEGRIKRLTASAKDLGYQLTPKVATA

SEQ ID NO: 239343 - protein, 430 aa, unidentified
MNNNTQNAKIAAISEKTLVVGIDIGSETHFARAFDYRGIEYTKKAFEFSNTEAGFQDFKAFVNDIARAHGKDKIVPGMEPTGHYWFNLGKYLQDNGMKPVHVNPHHVKKSKELDDNNPTKNDRKDPKVIAGLVREGRYSYPYIPTGIYAEIRNASNLRLQADVELTRVKNRLARWFSIYFPEYKNVYGNPDAVSGIMILKVAPLPEDIIALGVEGVNQIWRDAKLRGVGLKRAKTLVEAAEHSIGTREGGSSARMEIKNLLNDYDLYSNRIDEYMTLIEGLLDQIPYIDKLLAIKGVGIRTVSGFVAEVGDIGRFDNPKQLQKLAGYAIMENSSGKHKGETTITRRGRKRLRYLLFEVAMSVVSKNEEFRELHHYYTTRSKNPLKKMQSLIAVACKLIRVFYAILTRGVDYDGQKLMSDIRRPAQYAAAA

SEQ ID NO: 239344 - protein, 482 aa, unidentified
MKAKPQEKNKRATNHPTQHHWHEMNRKQRRETMRKIQSQDLSLEVVHPDAAGIDIGNESHYAAVPPSRDSQPVRCFGCTTAELKAMAAWLQQCRIRTVAMQSTGVYWVAVYDILEQAGLEAYLVNARDTKNLPGHKSDVQESQWLMKLHTYGLLRNSFRPSQEIRTMRTYWRQRNDLVQSASRHILRIQKALTQMNLQLANVLSDISGVTGQAIIKAILAGERNPHKLAEFRDPRVQASEEEIAHYLEGNWQPDLLFVLKQEQDGYEFCQQQMAECDRQLEQYLQSTEDRSQDAPLPEEKRKGRLTKKKGNKPQFDLRKGLFRMSGTDLTRIDSIDVMTATTVISEAGYDMSKWKTEDHFVSWLRLCPDNRISGNKIIGKGRLPTNNPVSIALKMAATTLRQSKTYLGAQFRRLRTKLGAPVAIKAMAAKLARLVYRMLRYGMKYVDQGAAVYELKHRELQVHQLKWKAAQLGYQIVQAPAA

SEQ ID NO: 239345 - protein, 417 aa, unidentified
MRIVRPICCGADIHKDLIVATIAATNQDGITEYIQSSFSSQNFDLVRLKAWLIEHHCFEIAMESTGKYWIPVFNVLEGEIKVFVVHPKYTKAIKGKKTDKKDSKWIADLFKHDLLKFSFIPPKEIRELRELSRYRIKLIAMRSSERNRYQNSMTISNIGLASILSDPFGKSSRAVMKEVIRSSSVTEEKISKLLERNAKKKVKEVLHSLEGSHIESDQRLKMNIASQHMDQIDSHVRRLETEMAIRCIPYATLINLLLDIPGISYLSAMTIIAEIGTDMSVFETSKQLSCWAGLAPANNESANKKKSVRISKAGSYLKPLLVQCALAAINSKSNPYYRIKYNRIKKRRGHKKAIIAIARMILVNIYHILSTGEVYSPCDMEQIINPKPVKKVMTIQNAIEFLQSQGFDTSKLISSSS

SEQ ID NO: 239346 - protein, 367 aa, unidentified
MKKTSTAVARQSRNISRQRLTIGLDLGDRNSWYCVLDETGQIQLEQRVRTTVKALQEVFGAMPGSRIALEIGTHSPWISRLLSELGHEVIVANARKVRLIGESRKKDDRLDAQTLARLARIDPELLYPVKHRSAQAQADLMTIRARAGLVRARTALVNTARGLAKSYGERLRGCNVRNMDPEKAEGLSPELQRALEPLLATIEDLSERIVEYNDRIEALAQTTYPQVELLKQIKGVGTLIALTFLLTLEDPHRFGKSRDVGCYLGLQPGRRNSGQSEPQMHISKEGDPYLRTLLVQGAQHILGPFGVDCDLRRWGLQLAERGGRNAKKRAIVATARKLAVLLHHLWVSGEVYEPLHNNNPTTVAAAA

SEQ ID NO: 239347 - protein, 339 aa, unidentified
MQVTTIGLDLAKNVFQVHGITDCGEVAFNRALRRAQVLAFFERLDPCLIGIEACSTSHYWARELVRLGHEVKLIPPIYVKPYVKRGKSDAADAAAICEAVTRPTMRFVEVKTPEQQAILALHRTRDLVVRQRTQTINMLRGQLAEFGIVFAQGVGHATQFAKRMLDGECPDLPEVAGDVVAELCEQLLFLHGKIAGYTREMTRVAGREERVALLQTIPGVGPITASAIVATVGTGRQFGNGREFAAWLGLTPLNRSSGGKERLGRISKMGDQYIRRLLVIGMMSRMRQIIQNPERYDPWFADILARKPGKVAAVAMANKTARMVWAVLTRNEPYRVRTI

SEQ ID NO: 239348 - protein, 403 aa, unidentified
MKHVIAFDISMGKSYMVIYNAQKQCVFESEIKHSKPEFKKLQEKIHELTDKTGELPKIVFEATGIYSRQLERFMQDNQYTYCLLNPLEAKLQCDSLRIHKTDRSDAHRLALTHFTATRRVFIGTDNLFHQLKSLSRLYSELDSELSIIRGRMHKVIQLTFPELERMFTSKSDLFLNFVQLFPHPDCILGLSKTIIKNRIRVNTNKKISNITAEKKAIQILEIAKTSYPAVSQNDVLCDQLKLYARRYQELLHQKECCINKMIYIAEQRAEYDIILSIPGIGPNTAVRLMAEIGDITRFNNNKQLNAFAGIDIRRFQSGKTFFKDKINKRGNKHLRKLLFLIIQNMIKQRRYGQNHIVEYYDKLKTQPYNKCHKVASIACVNKFLKLLFHLITHDIHYDYRLTA

SEQ ID NO: 239349 - protein, 330 aa, unidentified
MKKWNYTIGIDVSKNTLDIHCAEINQHIQIKNGTEGFRVFLKWCNTHKIILNQSFIIMEYTGGYEYKLIQFCESKQIQYSRIPGLEIKRSMGITRGKTDQVDAGRIAQYGEEKHKQLTPDRPLNKGIIKLKELLGFRKRIVRELGGYKASLKERKAMYPDLKKDLICKTLESKIKENEKVVAKFDKELMDEIHKDEAMKTNYELIRSIKGIGMVNALMTIAYTENFVGFTNPRSYAVYVGVVPFDYSSGTSIKGRKRVSSIANKELKQELTQAARSAIQWDPELKSYATRKMANKSYGVVLNNVKFKLILRIFAVVKRQEMYVDNYKNAA

SEQ ID NO: 239350 - protein, 352 aa, unidentified
MIIGCDFHPSFQQISYVDQETGEYGERRLNHREEAVGFYGSLAGRKVVVGLEATGNDRWFRKLVMESGHELLVGDASAIHASAPREQRTDKRDARHILRLLLENRFPSVWQPSAGNEAQRQLLMHRCRLVRMRTRLKNQLDSIAKSEGLTGSRSWSRQRRGQIEALPLGGWYAQRRADLLQLLDGLELRIKPLDAAVETAASQDAEARLLMTHPGVGPVISLAYVLVVGDWRRFPRGKHVGSYLGLIPSEASSGKRQQQMGHITKQGNTLLRWLLVEAATTAQRHDPSWHRQYVRLSMAKHHGVAKVAIAHKLAVRLYWMLRSGQDYGQMMERGLHARQSECPVGRSKRPIE

SEQ ID NO: 239351 - protein, 397 aa, unidentified
MRSIGLDVHKHFTEIAVLETGQEVHHPARIQTTADALRVFARTLRSTDRVVLEASVNTWPIAELLRAHAGQVIVSNPMRTRAIASAKVKTDRVDSATLAQLLAADFIPPVWAPDPATRALRHQGAHHQSLVQQQTRLRNRIHAVLHRNLIGHSFTDLFGKAGRQWLREVPLPVEERHQVDSALRLLGAVEAELRLATERVAKRALMDRRGMRLMTIPGVGLITAMAVTAVIGDVTRFPRPNQLVGYLGLDPRVRQSGARPAHTGHISRQGQAHARALLVEAAHSAIRVPGPLHAFYQRVRARRGRQIAIVAVARKLAVLAWHLLTHDTDYRWTPPSLAVQKRRQVELKAGAPRRRGRPAGTAGDRCPLPPEQERESLRQVEDTYKAFVASRHGTRKA

SEQ ID NO: 239352 - protein, 355 aa, unidentified
MAVYIGVDFHPYEQTVAFVDEADGEIRYKRFLHSDKTGIKAFYRKCGKDAVIGTEATGSLWWFEKMLFDNGMSLKIGDPRMIRRAALSRHKNDHRDAETILDLLMRGTFPAITPRTEQSREMLDLLNYRQSLVSKRTSVVNQLQAFARSKGLPRFRLPAVKARKKIEQVETTEVERLLVASRFLLCDELTKQIKAIEARLEEEANKEERARLLMTHPGIGLINAMALVHTLGDVRRFRRKEEVVAFVGLDPLEKSSGETRRIGSISKRGSRLARHLLGQAAQASRDKKIRKFYSEVSRRRGRPKAKVAAARKLLINCYVMLRDNISYEEFTRRGEVGLCEGSGEVTGKPAQSLEA

SEQ ID NO: 239353 - protein, 378 aa, unidentified
MPSSVNFWVGLDVHKDSVTAAVFRNRDPEPMRVDRLPYDLRKIRRYFQRLQAEGNVRACYEASGAGYVLQRALTDWGVECQLAAPSLIPRRAGEHRKTDRRDAIKIGRDFRDDRLVLIQVPTEADERVRDLVRCRETFQREIIKSRHYILKFMRRRGLVFLDGNHWTLRHLTWIRQALAPGKLAEEDCVVLSEYLALLEYKLQRRDELDHRIAALALTPRYKPLVDRICCFRGFKAQAAMVIATELGDLRRFENPRQLMAYVGLVPSEHSSGDRRRLGAITKAGNARVRHILIQAAWQYRKRPAIGAPLRRRQRGQDPDVLGHAWKCQHRLHSLFHRLAFKKPTPVAATATARELVGFLWAILRDIDVSSLQEVNAAA

SEQ ID NO: 239354 - protein, 346 aa, unidentified
MSVVRPLLGSCPEQMMGSKSRMQGKDRSEQETKTKSTVGIDVCKLWLDIHILPSEEAFRVPNTKAGSNEIIRRLVHHDVQLIAIEATGKWHRDLHRHLADRGYPVRVVNPLRARLFAEAMGLLAKTDRLDARMLAIFAGSLTETRPPAPEIIEALKELVQARTTAVEEQTSLTNQFKSATTVFLRRQLKLRLTQIAKHIKALEKESLKRIKGEPGLARRYDILVSIPSFGDVVAMTLLARLSELGSCNDKQIATLCGLAPWPDESSDRVGARHIRGGRQLIRNILYLAAITAKSFNPPMKAFFTRLTANGKAKKQALVAVARKLIILANTLVRADRLWHSEAPKCA

SEQ ID NO: 239355 - protein, 341 aa, unidentified
MGYYTGIDVSLEVSYLCVVDPAGKIVKEARVASEPEAIIAWFVELGLEMTAIGLEAGPLSQWLYAAMVEAKLPAVLLETRQVRDAFRSMPVKTDRKDARGIAQLMRLGWYRRVHCKSQVAQENRTLLAGRKMLQTRYIDLEMCLRGLLRGYGLKVGPTNRKTFDGRVRELAASVPGLENTVDALLKARATLLEQFRRLDGLVNSRARQDERAQLLMSVPGVGALISLTFVSAIDDPARFRSSRTVGAHLGLTQRKYQSGETDITGRISKCGDQEVRTALYEAANIILTRPVKGSQLKSWAAKVAARAGMKKAKVALARKLAVIMHRMLCDGTFFDFKLAAA

SEQ ID NO: 239356 - protein, 335 aa, unidentified
MSKPEAGRQYFVGIDVSARELVVAISEEARTQMETVSNDAAGHRQLAARLRQLRAPVKICLEASGTYSLDVALALARAGGRLQLSLVNPRLARRFAESLGERSKTDPVDARALAEYAARMPFQPWQPPSAAALRLRSISRTITALVRMGAQHKNRQHALAASAALPALLVRELAAQAAYTEKRVAKLRREAAHVIQRDAELRRRWQHLLTVPGIGEASGLAILAELAVLPTVLDERQWVAHSGLDPKHHRSGTSIDQKARISKAGNRYLRAALYMPALVAVQHDPSLQSFYARLVGRGKPKLQALVAVMRKLLHAAWGMFQHDQPYDGAKLCPQL

SEQ ID NO: 239357 - protein, 419 aa, unidentified
MKIVYPVCCGVDVHKNVIVATIAITDKSNITQYIVKSFSTINADLYSFRTWLLSYQCFNVCMESTGKYWIPVFNILEEANIKVLLTHPKYVRAIKGKKTDKKDSKWIADLFKFDMVRSSFIPPKDIRALRELARYRYKLVCMRSSEKNRYQNCMTVSNIGLASVLSDPFGKSASDIMKYVLTSNVFDEEHCKKLIQKSAKKKTELILESIRGSRIEPDQRFKMKEAAAHMEYLEQAILRTEAELYTRIQPHYRFVEHISHQLPGVSQLSAALIISEIGVDMSVFESAKHLNSWAGLAPANNESAGKKKSVRISKAGQFLKPLLVQCALAATKSSKESYFATKYQKIKKRRGHKKAIIAIARMMLTCIYHMIQTGEVFNPSDYDSFDKPVERKVTLNDENAIAFLAAQGYDVSSITKIAG

SEQ ID NO: 239358 - protein, 313 aa, unidentified
MAQFTPKAGIDSSVDWLDVHLYPLEIAFRVSNDAPGWRELHRRLRAAQVEIVALEASGGCERAACHFLLERGYSVRLLDALRVRQFAKATGKLAKNDRIDAEVIAHFVAVVATRPMVRDRQRERLAELVGARAQLTDHLTLLRNQAHGHREALLCRLDRQRVARVQADIRKIERRIAEVIAADPDMTANNALLRSMKAVGPVLAFTLQAFLPELGHLTRKQIAALAGVAPFEDQSGKRQGVRYIQGGRASVRGPLYMAALVAARYNPILMQTRDRLRALNKKPKVVIVALMRRMLTILNAILRDGIQWQNKAA

SEQ ID NO: 239359 - protein, 334 aa, unidentified
MEKITTVGIDLAKAVFSLHGVDRTGRMVLRRTLRRDQLVKVVAGLSPCLIGMEACSGAHEWGRRFQELGHTVRLMAPKFVVPYRKSGKNDGNDAEAICEAVSRPSMRFVPVKSAEQQALLAMHRVRPGFVVERTATINRLRGLMSEFGVVLPLRSITVRRQAATAAENLPELARRAIGDLLDQLRVLDERIVGYDREIEAQAKLCEPAQRLMKIRGIGPTTALAIVATVGNAREFKNGRQFAAWIGLVPGQYSTGGKTRLGHISKRGDAYLRNLLVQGARSVLHTAAAHRDPVSRWALELQPRRGYYRTLVAIANKNARIAWALLAKNESLRTV

SEQ ID NO: 239360 - protein, 360 aa, unidentified
MQKQRTELNFKGQNLFVGIDVHLKSWTVTILTETLFHKTFTQPPSVEALHNYLVRNFPGGIYHSVYEAGFSGFWTHYKLKEMGINNMVINPADVPTTQKEHLQKDDPTDSRKLARSLRSGDLEAIYIPDSSTLEDRSLVRLRSTLVKDMTRYKSRIKSFLYFYGISYPQEFQKAGTHWSKRFMKWLNEGISLQHDSGKQALKILVQEAEQQRKLLLEVTRRIRLLTRDEKYASNIELLRTIPGIGFVTSITFLTEMEKIERFENTDHFAGFIGLIPNKHSSGDKENNGEMTFRGQEALRSALIESSWFAARLDPALNMSFQNYIKRMESNKAIIRIARKVLNRMYYVLKNKREYVPCVVK

SEQ ID NO: 239361 - protein, 348 aa, unidentified
MAKTIVDPPRPVTGGVDTHLDVNVAAAVDAIGGLLGVAQFPTTSAGHAQLLSWLNGFGLVARVGVEGTSSYGTGLARFLRRADVEVVEVDRPNRQSRRRTGKSDPADAIEAARAALSGRAHGAAKAKDGNVEAIRALFVAKRSARDTRIKTLNQIRHLGFTAPEELRERLAGLSRTQLAGAAAALRPRQGGDQVAFATKTALCLLGRRVLALDAEKEQLDNLMAKLVEKTAPELLGLYGVGVDTAAALLVAAGDNPGRIRSEAAWAHLCGVAPIPASSGKVTRWRLDRGGDRQANAALYVIVLARMSADKRTKAYVQRRVAEGRTKLEVIRILKRYVAREVYHCLPRP

SEQ ID NO: 239362 - protein, 402 aa, unidentified
MNSVGIDISKGRSTIAVMRPFGEVVISPFEVRHTDSELSELARQLKSLNGETRVVMEATGNYHAPVAKLLHDAGLYVSVINAKLVHGYGNNDLRRVKTDRKDAVKLANYGLDRWLTLPRYVPEEDTRLLLKNCYRQYRQYSKVQTVLKNNLISLLDTVFPNVNRLFSSPIRGDGSEKWVDFVAEFWHCRCVSEKSEKAFTNKYQRWCKTHGYNFSEAKAHTIHAEASGHIGIMPKSETTKLLVEQAVVQLRATSAALIALKREMLTLAAQLPEYPVVMGMFGVGPTLGPQLIAEIGDVRRFYSKKALVAYAGLDAPPNDSGDVTGRHKSMSKIGASSLRRTLFLVMGIYLQNAPLDEPVYQFMDRKRAEGKPFRVYMMASANKFLRIYYATVKAYLESLEQV

SEQ ID NO: 239363 - protein, 370 aa, unidentified
MSKSTLFVGMDVHQDSVVIAVLPEGAAECEEPRTFPNDIAKLKKFFAKLSKRSDVRACYEASGCGYVLQRALTKWGVACEVIAPSLIPKRSGDRRKTDKRDAIKLARLYRAGELTSIRIPDEAEEQVRSLVRCRETFTREILKSRHYILKLLQSRGYVYRAGSNWTLAYWTWLRKITLEGADATTLQIYVELLEHKLIQRDTLDEQIKQIAFADPYRKPVGLLRCMRGIDTLTAMTLICEIGDVRRFASPRHLMGYLGLTVSESSSGGVERRGGITKAGNARARRVLVEAAWHYRYPARSSRTLQKRQEGQSSAVIAHAWRAQKRLHKKFNALAFRMAPTKAVVAVARELVGFVWALLQDDAAKLQQRIR

SEQ ID NO: 239364 - protein, 441 aa, unidentified
MDDCCPECSVSTQAKLVFPSHLLRAAQKGTNSMQVLYPRCCGLDIHKKTVVACVLLTDADGSIRRIVRTFGTMTAELLALGDWLSLHEVTHVAMESTGVLWRPVFNVLEEGRTLLLVNAQHIKAVPGRKTDVKDSEWLADLLRHGLLRPSFIPPPPIRVLRDLTRYRKNLVELRTQEINRVHKVLETANIKLGAVASNVVGVSGRRMLEAIKQGESDPQVLAELAKGRLREKLPALRLALDGRVQAHHQLLLGELLDHLDYLDRAIHRVEINIAALVAKEEKAVELLLTLPATGPVTAAAIIAEIGTDMSRFPSAAHLASWAGVCPGNKRSAGKQLSGASTKGNKQLKTILCEIAATIARTPGTYLHALYQRIARRRGKPRAMMAVAHSLLVSIYYMLRDQVSYQELGPDYFDRLQAQHLERHYVRRLEALGFQVTLKSAS

SEQ ID NO: 239365 - protein, 421 aa, unidentified
MPNIEIGVDFMVKENFIYVGIDLHKETHTAVMIDCYNQKLGEITFPNRPADFPKLVTKVKKCNTDGKEVVYGLENAYGYGRALAVWLIDKGYLVKDVNTAISHRQAKHRGAMYRKSDSDDAKAIALATLNMLDKLPDACPNDAYWSLGQLVHRRDNIMKQRTRLVNQLHEQLCIAYPSYKSFFNDISRPTALYFWEHYPSKKYLKGKSVEDLRAELVPVSHNKCSTKTCEKILDAVASDKVKNNAYQDARDMVTLSIVSDLQHYGSQLTEVDKMLEQMYKMLGCTLTTIPGVNVITAVKILAEIGDIKRFANANKLAQFAGIAPLHLSSSGKGKDVATKQGNRRLQATIYFLAIQMVQLSSKGTPRNPVVRACYEKRKAEGKTSQQALICISRRLISIIYGMLKNGTEYRMPVMENAGENR

SEQ ID NO: 239366 - protein, 315 aa, unidentified
MTPAKFYVGVDVAKDWLDAAQRPEGAPWRVSNDERGIAALVERLVQLRPALVVLEATGGMEMPVVGALVVAQLPTAVVNPRQVREFARATGRLAKTDAIDAQVLAQFGEAVRPELRPFPDAATQELSALLARRRQLVGMLTAEKNRLRTAAKAVRADVQEHIRWLERRLSDLDGQLAQSIRSSPSWRERDNLLKSTPGVGPVLSVTLLAELPELGTLGRKGIAALVGVAPLNWDSGHLRGKRRVWGGRSRVRAALYMAALVAARRNPVLRASYERLVEAGKPKKVALTACMHKLLAILNAMIRHRTPWSVEHHAL

SEQ ID NO: 239367 - protein, 357 aa, unidentified
METAYDGRQVVGIDLHRRRSVLVRMTEDGRRLGTARITNSPQELRREIARAGKSPRVVLEATYGWYWAADTLAAAGAEVHLAHPLGVKAFTYRRVKNDVRDSADLADLLRMGRLPEAWIAPAGVRELREVTRYRQKLVSLRTSCKDQVHGVLAKLGVPVTCSDIFGVAGSAWLDGLGLPQPYAGKVLSLRQLTGELTTEITMLSDVIADLLAGHRGYQVIQQLPGIGPVLAAVIIAEIGEVTRFRNAGQLCSWAGLTPRHRESDTKVTRGRVTKQGSRLLRWALIEAVQHVPADTVTGVLKQRIIARRGNKAKNIAKVAAARHLLTLVFYGMRDGQIRCLSKTPDDSPPVTPQAHAA

SEQ ID NO: 239368 - protein, 356 aa, unidentified
MQQQDNKLDFTNQKIFIGLDVHKNKWVVTIRMNHIELKTFSMEASAGQLIKYLHKHYPQAKCSVAYEAGFSGYWIQRHLSSNGIAAIIVNPADIPTTGKEKDRKDDHKDSRKLARELENNTLKGIYIPDEAIEELRSLNRIRTQYVGEKARMKNRIKSFLFNYGKEFPGRNSRYWSEALLEKIKDIKFSTPIAEESIKNYVEHLSTLQEKVKKLEARLKVISKEFGFDQIIGKLETIPGIGFISAITIFTEIMDIKRFRRLDELCSYVGIVPSTHSSGEKEKIGRLTFRQKRYLKNIIIEAAWIAARKDPALTMSYSRLIKRMEPQKAIIKIAKKLLNRIRYVWKNNIEYQLAVVE

SEQ ID NO: 239369 - protein, 361 aa, unidentified
MNFIGIDLHSNRFNICALSSKNQTFRKTFNLKNEEQMTEFFSFLSTNDHVAFEASTNSFAFNDLLVDKVKKVYVLDPFQFKLICKSGKKNDKIDASKIVTMLKYHVESKSDFLPLVYVPDLNIRKIRSLFTTYKLLKKQIVATKNRIHSILKQNLHPYNNQDIYGSTMREEILNLDINEEDLIQISILYNNLDALETNANKIKKIIIYSGKDFEHPVDILTSISGVSVFIALAIIGDYANNIKRFKNAKHFSSYMRSVPKLDASNKSIKNGNTHKQGRKTSISLILQSLQHILNIDPYLFNYYKRKTMGVKKGKMRMAIARRIFVRIFFILKNNEYYKYRNSFQHERKMKEFKNIINKYEK

SEQ ID NO: 239370 - protein, 319 aa, unidentified
MGAMSEMTVEQFVGIDIAKDTVDVCIGADAEVMHVAYDHQGVATICQRLKAVSPTLIVMEATGGLETRLASELAALGLSVAVINPRQARDFAKATGQLAKTDRVDAAVLANFARAIRPQARAMKDAGTRALDDLVSRRRQLIDMRVQETLRLGTAASKAMLKSLDTHIAWLDKRITDIDTDLTRCLRTSDVWRTKDDLLRGIPGVGAVTSLTMLAKCPELGQLNRREIAALTGVAPLAKDSGKHRGKRFVWGGRADVRAVLYMATVSAIRFNPRIKPFAERLKQAGKPAKVVIVACMRKLLTIMNSIVKNNMPWNPKNA

SEQ ID NO: 239371 - protein, 351 aa, unidentified
METYQNGLVIGIDLGDKYGHVCCLNTETGDLVESRVAMTPRAVKNFFGKLEVRLVAIEVGTHSRWISDTLEKIGLSVIVANPRRVQLISKSDSKNDRNDAELLARLAAVDPKLLAPIHHRSNRAQADLAILKTRDNLIKSRTAMVNQVRGMSKSFGFRLKKCSAASFPHHVISDIPDVLAPAVAPLLDAIEIQTELVKKLDRKVKELCEERYPETKSLLQIHGVGPLTALAFVLVIEDPSRFRNSRSVGAFLGLRPRQKDSGKIQKQLRITKAGDSFLRSLLVQCAQYMLGPFGQDCDLQRWGRSLALRGGKNAKRRAVVAVARKLACVLHRLWTTQDEYQPLRAQAEAAA

SEQ ID NO: 239372 - protein, 396 aa, unidentified
MKPIQSSVCKGNLNQKVQHCPDFTGRDLFVGIDVHKERWQVAVIYDGLILSNTSLEASAQGLLFHLRKYYDGAFFHCVYECGPFGFTLCRALQAAGIECMVVNPADIPDTNRELKSKTDPVDARKLARHLAAGLLRPVHVPSEKLQKQRSLIRFRKKLWGDLVRTKNRLKSELLFNAIIIPKQFDNPHWSHHFLHWIEQQALADQYLKDTLVLMLEEAKLLRQLLLNTERKLREMMRSEDFVRDSTLLRSISGVGPLTSMLFLMEVGDVRRFKSFDALNRFVGFCPDSHSSGERQRHTGITMRKHNQLRTMLIEAAWQLVRRDPAMLDYYRELTKRMKGQDAIIRVARKLLRRIRAVILSQKMYVNGVSGELVCASIGAPALAPPKKRGRPARIDL

SEQ ID NO: 239373 - protein, 311 aa, unidentified
MNKYEVYIGVDVSKEMLELSCFDNKTRAVPNTNVGIQRLIKRIERLGEPVLVCCEATGGYEKLLASALLATGIAIAVVNAKRARDFGKSKGILAKTDPIDAELLASFARVHHPRTLEVREDWQPSLQALLGRREDILAMIKQEKSRLDPLPDASVAKLIRKHIKQMELQLREIEKQVDTLCSESAELQASVERITQVKGMGKLSALALLGFVPELGSISDKQASALVGLAPFNRDSGKFRGQRHTTGGRQKVRRILYMAAVSAKSSNPILREFYNSLITRGKPFKVAIVAVMRKLVCLANQIMADATFQPA

SEQ ID NO: 239374 - protein, 363 aa, unidentified
MRFYGEQRRFYCGIDLHASKMYVCVLDEQGNVVLHRNLRTEPEALKRALAPYRASLVVGAECMFSWYWVADWCRQEGIEFVLGHALYMKAIHGGKAKNDRIDSEKIARLLRGGTFPLAHVYPKEMRGTRDLLRRRNLFVRRRAELLAHVQNTFTQYNVPTASGKGRDRLREGDVGAAFEDASVQVMLDADVEVIEQLDETIARLETHVLKHAKVHDPIRLHLLQTIPGVGKVLSLVMLYEIQDVDRFENIGQFASYARLVSCAKESAGKKQGSGGRKIGNAHLKWAFSEAAALMIRSSPEAKAFMEKMTRQRGKARAVALVAAKIGRVVYWMMKRKQPFDARQFWKCSLPKGKTIVEGAAMTG

SEQ ID NO: 239375 - protein, 330 aa, unidentified
MNLTAPTLGVDIAKQKFDVCLIKPSGRAKHKVFQNTRHGFEHLVSWLASHQVSNHLHTCLEATGTYGEALALFLYEAGFVVSVANPAAVRAFANAGLSRTKTDKVDAELIARFCLAQQPSAWQPPAPELRELQALVRRLESLIEIRVSEENRLSSGVSVDAVRESLETHIAYLVDEIKQTEQLIQKHINNHPDLKEQSELLDSIPGIGETTAALLLAEIVNLKQYTSARQVAAYAGLVPRERRSGSSVKGRVCLSKIGNARLRKALYFPAITALRSSDFFKAWAEPLRTRGKSKMSVIGAAMRKLIHLAYGVIKTGKPFDPNWVKKTEVA

SEQ ID NO: 239376 - protein, 419 aa, unidentified
MTKFNTARQFVQVQPGSLHAGVDLALEKNVVVVINEKAQRLDHFIFPQDRGGYDYFLQRMEGLRQKHQAAGIIVAMEPSNYFWKLLAKELEEKKIPYHLVNAYTVKKHREGNQLDRSKDDRRDAGQIAELSRNGHYTETRLQKGAYEELRQYATLYDQLIQGLRREKNVLWGLVGQVFPELPRVFKDLTGETCQAFLGSFAAAASLRQLNIDDFITQVRKAFSGKKLCVSKLRQVYQLANSSIGVTEGLQAIQLAIQVHLAELHTLQEQLKRVVSAMTASLAPMPETPYLLSMKSLSTVSAAIFLAEVGDPNRYHTAAQWVKLAGIKPTPNSSGKKQRSQTPMSRQGRSRLRTMLYFTCLRLIHQDDHFAQIYSHLQRRSDNPLTKMQALGVLMNKLLHILWALIHNQTFYNPSLGQSI

SEQ ID NO: 239377 - protein, 356 aa, unidentified
MATYYIGADVHSNSIEIAIRTRREVVNRYSIPPSIQAAVEVLSSLEGARHMAIEEGPMAGWLYRNLRQKVDSFVVADPRRNKLISSDGDHDDKIDSAKLALLLEGGYLREVYHSDDDRRVELKHWVSLYHDRVHDAVRHMNKIRARCRMHGIKIPRKVLRQPEHRADWLVKLKQPALAKQLLMLWIGYDATAKQARMAKQHMISLSRKYPVIRLWQQLPGIGTVRAVTVFAYLDTPWRFKRKNKLWKYCGVGLQRTASGTDKKGKPKPARLQMPWAANRTLKDAILGAALTAINQKHNAFKDDYERMVRNGVIPSNARHTVARKLLTVMWGIWKTSCQFDQSKGPLSKSTEQCHCV

SEQ ID NO: 239378 - protein, 344 aa, unidentified
MILIGVDPHKSSHTAVAVDTAGQQVTQRRFVVNAGIFRQLMRWCEQWPDRRFAVEGAGGLGRSLAQQLAAAGENVVDVPSTLSARARLLATGGDRKTDAKDALHVAQAALFRHDLRPVVKEDQTTILRLLTERRDGLVHERTRILNRLHAVLRDLLPGGAPAGLSADKAATLMKGSRPVTATDNCRRDMARDLLADLRRLDRQVKDNEAQMREAIAATRTTLTTLPGLGTVLAAKVIGHIGDVSRFPTEHHFASYTGSAPLDASSGNNVRHRLNTGGNRALNSVLHTIAVCQIRDGGRGQDYYLRKISEGKTPSEARRALKRRLSNVVYRIMKRDQRAHLAQAA

SEQ ID NO: 239379 - protein, 373 aa, unidentified
MPKYSTAFGMDVHLRSTTVCALDADTGEAVARRFPGNPWGEIAGWMDGFPGPSLAAYESGYLGFAPQRELAGLGVECVVAAVSKIPRSAADSASKSDRNDAARMAKAILAHDISPVWVPSPEVEGIRDLAGAYDGATARLATAKQRLLAFLAKRGFAYGGTTPAGKPRKYWTYDFLRWLDKVRPEDDGGIRTLAALRNEVEAAAEARADLLSEYRAAVDASPIAAEVAALQSIKGCAFALAAAFSAEVGDFTRFRSGRQVTAYFGLAPSQRSSGDSVRLGGISGAGNALVRKLAVEGSWCYAAARHQPKLMPRDTGVPLEIRMHGRKGSERLLRRREEMLARGMPAAKANAATAAELVRWLRALGVMCGEGAE

SEQ ID NO: 239380 - protein, 363 aa, unidentified
MVESRTVTVGLDVHARSIRLAAVRADELLEERTLPYDEEAVERLLRRWPGARCCYEAGPTGFGLYRHLSGRGIDCAVVAPGLVPQRPGDRVKTDPRDARKLARLHAGGLLEPIHVPSPELEAVRDLVRAREDARLDRMRDRHRLSKFCLRHGRLLPTSGWTVLRRKWLGEQRFAHTAEQVTFDSYLHTVDLVDARIESLERAIRETAEQEPWRELVGRLRCLRGIDTLTALGLVAEIGDFGRFKTAEELMAFVGLVPSEHSSGERRRQGSITKVGNAHVRRLLVESAWHARRRPTVGYELARRQRGQDAAVIERSWRCQQRLYSRWQRMAGRGKPQQKIVVACARELAGFVWAIATDQPLRSL

SEQ ID NO: 239381 - protein, 349 aa, unidentified
MIRNTPRDAAVYGVDLGKNLFHVVGLDSCGAVVQRVKFRRETLLNFFERAGRAVVGMEACPGSQWLARKLLTMGHTVRIVPAQFVKPYVKSQKNDTIDAEAIAEAVTRPTMRFTQVRTTEQVDLQALHRIRDQLVASRTRLINQVRAFCLEYGVAIRQGAGVFRLDLPRVLANEGNDLTPAMRRMLTELFEDVGRLDQRIATVTREVEGLAARDDRARRLMTIPGIGPLAATALLAAVGDGRQFRRARDLAAWLGLVPREHSTGGKTTLLGISKRGNRYVRRLLIHGARSCVTHLDRTRDRLGGWLDGLQARMHVNKVTVALAAKIARTAWAIITKPGALYERRDPTVA

SEQ ID NO: 239382 - protein, 445 aa, unidentified
MHYKRLLTFIDGVSSYLSVGLDVGADFTWMSIALPNGSFVGKPFKIIHSDSRSRDLAVTKIKEAQETYSLKSRCFLESTGIYHIPLLCFLRDKGFDCSVINPIITKNSTNINIRKLHNDKFDSKKAALVGLNVSLKTSILPDDSVVDLRNLVRDYYYFKDLQSAVALKLTAELKVSFPAYAKVFSKVTTQSSLKLLSSYPLPADMLAASKENIVDIIRSTARFGEAYALRKYDAIIAAAQDAAVFGRALPSNAVRIRLYIDTYQEYQKHLDALLKALHETVEKLQDTLIYDQICLLQSLRGIGFLSAVVLIAEMGNFKLFSSPKKLYAYFGLDPAVKQSGKLNGDKVHMSKRGSSLARRVLHMAALNNVKVDKGSGTPVNPVVYDYYTRKCSGKKKPVAMGAVMHKICNIIFAMLRDNKPFEIITPEEHCRRFATEHPDKIRKAA

SEQ ID NO: 239383 - protein, 435 aa, unidentified
MSTQMFKIVRFNCAGIDIHKNYFVVTVSITDRTTLETTYHTKEFHGFNSELDQLCDFLRSYGVDDVCMESTGKYWIPVVKKLEANNIKFKLVHPKYVKAVSGHKTDKADSKFICRMYACDLCGPGSVILSAKYREIRDLARRYWILGYDLVSEKNRYQNCLTVSNLPLDAIFSDPLGKSALAVMDEILAGHEDDEERILAVVHGRCKNKDKIMEAIRGSSISPDQRFKITDIRSHIEELEQHRDNVFAQIVANLADDFESILLLTSIPGISVQSAILIVSEIGMNMDFWTDGRNLAAWGGLTPRIDQSHGKKKSTRITKAGTYLKPLLVQAALAAIKQKDGYFTRKYNRIKRRRGHKKAIIAIARMILISAYNVLKKKEDFQPSDYDDVMNPTKKAKKVSEQDAIRALENLGYTIDQMNRTITPVSSPVVLHPTT

SEQ ID NO: 239384 - protein, 387 aa, unidentified
MPQPNDLSRSPIALNQDGTLIAIIEMSQSSWLVAGIVPGIARHPLKKLAADAAALLGLLERWRGEATQAGRQITRIAVAFEAGRDGFWLARWLRARGIEAYVIHPTSVAVSREHRRAKTDRLDTALLKRVFLGWLRGEPGHCTMAAIPTLEEEDARRPNRERESLVGERTRIVNRIKANLARLGIRGFKPAVRGASERLEALRTPEGAALPPNTQAELRRDMARLCFIVGQIKEIEDARRERLELRPDQGPPAMVRLLARVIGIGLETADMLVHEILSRNLRDRRAVARYAGLTGSPDESGARRREKGLARAGNARVRRGMVQLAWRFLLFQKDSALAQWYRARTADARGGTRKTMIVALARKLLIALWRFVSTGEAPEGVVLRPAS

SEQ ID NO: 239385 - protein, 398 aa, unidentified
MISVGIDISKRKSTAAILNVQGEVICSPFEFRHTKSGFEELLMYVKDYPQDEVKFIMEATGIYHLALLEFLKSKGYFVHVANPLLIKKFFDAEIRKGKTDRKDALKLSLYGTEKWFKLDDHLISEKIYSELMMLSREYNQLIAIRTKSKIQLNHLIERIFPGIEKILTDYYTELLLDFLLKYPHVSCVVKQSEKVFTKQFVKMAEKKEHTKGPQLAKKVYDLALECVPAISSSRSLEIAVESCIHVLRSTQTSTDAIITQMRLLAKELPEYDMVRSMPGIGDTLAPRLIAEIGDIRRFKNAKSLIAYAGIDAPPYQSGQFEGTRRHISKRGSASLRKCGFEIMFILMRREPSEDKDIYEYIQKKRAEGKAFKVALFAGFNKMLRIYYARTMEIYSKLT

SEQ ID NO: 239386 - protein, 355 aa, unidentified
MNQEKYIGMDVHDATISAAVKNAQGKLLMECVLETKATTILEFIQGLRGTLAVTFEEGTLATWLHDLLKPHVSRLVVCDPRKNALMREGNQNDRVDARNLAELLRTNQVKAVYHGKHGTRALKELGRSYLTLTKDTTRVMNRIKSVYRSWAIACAGTSVYSRRHRAEWLAQLVEPGVRIRAEHLYQQLDSLEPVRQAARRELLREGRQHAAVKLLRQIPAIGPIRSALLVALLQTPHRFRTKRQLWAYSGFAVQTYDSGEYRVVRGKLHRNRERITVRGLNHNHNHDLKNLLKGAAISAIERPGPLQDFYAARVEKGMRPSLARLTLARKIAAITLIIWKKGASFDPKQLQRQAA

SEQ ID NO: 239387 - protein, 408 aa, unidentified
MNAVGIDVSKGKSMVAALRPMGEVALLPQEFLHTEVGLEQMAYAIIALGEDTRVIMEATGRYHEPVAAALHEYGIYVCVLNPLFIKQSGGGSIRKVKTDKADAMKIAKYGLDNWVDLREYTPMDTVRQQLKLCSRQYNLYMKTVVSLQNNLISLTDKTFPGVNELFSSPERADGHQKWVDFVMTFYHCDCICRVSENAFAERYQKWCKRKGYHFSAEKAQDVYLGSCGHFTTLPKNDNTKLLITTAAQQLLAGKMTLAALRTEMTRLAKQLPEYDIVRAMYGVGETTAVQLMAEIGDVRRFPRRSSIVGFAGVDPAVDQSGKHSAKSVPTTQRGSPHLRKTLYQIVCTYLKKSPVDEPVYQFLDKKRSEGKPYFVYMTAAQNKFLRIYYARVKECLEAFDAQQDTSQR

SEQ ID NO: 239388 - protein, 341 aa, unidentified
MIAIGIDVSKGRSTVAVVGEGKKVLHKPFDISHNKTDLAKLVTFVKTFDDVRVVMEHTGIYYQVVAETLAGAGVRVSVVNPVLIHEYGNNTLRKVSTDRTASVKIARYALDNREELREYGTADTLRDNLKSAVRQFNFEDKTLSAHTNRLYSLLERAFPRIDEFFKSPAKSNGQQKLIDFVIEFWHNNCVSDLSLAKFTERYRKFCKKNHYCFKESDVSAIHAISRDNVTTLSKTDFTKMLIADAAEHVLQISIRVEKLRFGMIELAKQLPEYPAVVALYGVGDTIAAKLIGEIGDVRRFESKRSVVAYAGVDPSKDDSGKKVGSSLNRVGSSCFDIYLVL

SEQ ID NO: 239389 - protein, 342 aa, unidentified
MNYYAGIDVSLECSSVCVVDAIGKIVREGKVASEPTALITWFSALGLPLARIGLEAGPLSQWLFPALQAAGLAIELLETRHVRTAFKTMPVKTDRTDARGIAELMRVGWFRPVHCKSMEAQETRAVLTARKLVQSKLHDVEMSLRGILRNFGLKVGKVATRDFAFRVRDLVAGHPNLEQIAGSYLRVREVLLDEFKGFEKRVRMMARRSPRARQLMSTPGVGALVSLTFAAGVDDPARFGSSKKVGAHFGMTPKKYQSGETDQSGRISKIGDRGVRTALYEAAHVILTRPIKGCTKLKSWAMRIAKRAGMAKAKVALARKLAVIMHRMLVTGMPFNAAMAAA

SEQ ID NO: 239390 - protein, 363 aa, unidentified
MIVIGADTHKRTHELAAVEDATGRVRGGRQISADACGHVAALRWARDLDEQRVWAIEDCRQVSGRLEQALIAAGERVVRVAPHRMGASRRGEREPGKSDLIDALAVARAVVEDGPERFAPAYLDERAMEIRLLSDHRRDLVGERTRAQNRLRWHLVALCPELEEAIKPRRLDGVHQLERIDRRMRRLPVTARTRIAREQVRQIRGLTRQINALELELHKLVKAHRPQLLAETGCGTLTAAILIGRTAGVQHFRSDASFARLTGTAPIPCSSGQTTRHRLHRGGDRQLNHALHIIAITRARHDPETKAYLARKRAEGKTYREAIRCLKRHLARRFYRLLTAPVQPPQSHEPISANAPTPMLCLT

SEQ ID NO: 239391 - protein, 349 aa, unidentified
MEYYIGLDAHSRTCTAVVVDEKGEQKLRQTFPTTEANLIDFVSKIQGIKHLTFEECTLSQWLYLTLAEHGDHLLVCNPVYVAKKQGAKTDYRDALHLAQELRMGHLKAVYHDESHWMELRVLTNNYLALVDDIVRAKNRLKAVFRSEVISTDAGSFYKDRDRCKELRNPNSRFVAESLYDQVFELEKLQLEYREKFRKYLKRYRPIRNLTSVPGIDLIRASIITAVVCTPTRFKNKHQFWGYSMLVRHIQMSAGKIYGNKRVHGRKELRDIFLGVAESALRTETSLRDYYDALRARGVAHKEAKMALVRKVASICLCLLKNNETFKGDYDHQQMERIQLRKTLNLESCI

SEQ ID NO: 239392 - protein, 425 aa, unidentified
MPYKIAGIDVHKKMLAVVVADIEKDEYEFERVRFGSAPEELRRLCTWLLEQGVEEVVMESTAQYWKPVWGYLERFWKPGSQPGEEGNGRAGVLHLAQAHSNRGRRGRKRDFPDAERLVKRLVAQELVLSFVPDPTQRLWRTVMRRKQQLIRNRVQLQNRLEALLEEAHLKLSSLVSDLLGASARRMLAAMAEGEKDPAVLAAMADKRLRATAAQLCDALEATAELNPVYRRLLKMVLEELALLEQQVGQLEQEMASLLRPHEDEVKRLAEVPGFGVDSAQQIIAEVGAKAASFPRKEQLSSWVGWCPGEEESAEQNKNGRSPKGNRNMKRILNQCANAAVKAKGSIFELLYHRWIVRLGHKRTIGAIAHKLSNIVWLILHRGVRYEERGPAVSQKARQARTTKMIKELRKLGYRIELSDMQPAVS

SEQ ID NO: 239393 - protein, 317 aa, unidentified
MNETTVERFVGIDVSKESLEVGVRPEGKHWSVANDEEEISSLVQRLGDLKPTLIVVEATGGFQAMVVARLAAAALPVTVVNPRQVRDFAKATGHLAKTDAIDALILAHFGEAVRPEVRVLKDEQTQKLTALMTRRRQIVDLITAEKNRLVTAPKGICKEIRKHIQWLQGRLNVMNGQIDEEIKKSPVWREKDAILRSSPGVGPVLSVSLLAGLPELGSLNRKKLAALVGVAPLNRDSGGYRGARSVWGGRGQIRSVLYMATVSAARANPVIREFYQRLIGSGKKPKVALTACMRKFLTILNAMMKNGTHWNERKVNV

SEQ ID NO: 239394 - protein, 364 aa, unidentified
MRIIGVDLHTRQQSLAMLNTETGELIEKTLEHDGDEVRKFYSALPGQVLVGIEATGSMHWFLKLMEDLEIDCQVGHPSKVRAAEPRKQKHDRRDAALLLKLQVENRFPSIWMPSTALRDLRTLLMHRHQWVRMRTRVQNALQAIALSHGLRRGKALWSQAGQHAIESLPLLPHTAYRRTELQDLYRSLQGQIDVLDKHVNDQALQRPGAKLLMTHPGVGPVTALATDVFLGDPARFEDGKAVVSYVGMIPSEYSSGGQQRLGGLSKQGNPFLRFLWCEAAVHAVRRDPELQCFYRRKLAQKGLGKARVAAARKLGIRLWIMLRDRIDYEEFCRRGQMRQKSGDARAGMPEVGHSPAKCSDCETD

SEQ ID NO: 239395 - protein, 329 aa, unidentified
MKLQHIIGADLSKKSIDLVCHLLNTHIQIENSIAGFKDLLQWLRRQKVNPSEVMIVMEHTGLYSYCFERFLHEHQIAFCKVNALAIKRSMGLVRGKTDKLDATRIAAYGFEKKDKLMIDAPPSDALKRLQMLHSTRERLVRQRSSLLCAIKEYRYIGIPEKDIIMQTQLQLIKSFDKQIEKLMTEIETIINEQEALKQNFHLLQSIKGVGKILALTTIIKTFNFTRFANARKFACFCGTAPFPHDSGTTIKRKARVSHLADKQMKTLLDLSAKSAIQYDKELREYYLKRTESGRSKMSTINVVRNKIVYRMFAVIKRQTPFSENYLQAA

SEQ ID NO: 239396 - protein, 323 aa, unidentified
MNHKVGKDNTVARFIGIDVSKQWLDVASLPERETRRFTNDSAGQEQLSTWLMSLAPELIVMEATGGFETRVATTLAAQGLALAVVNPRQVRDFARAFGVLAKTDRIDASVLAAFAEKVHPPVRPLPDEDRRELIDLVDRRRQLVTMRAEEKTRLSQATASARQDIKEHVDWLDERLRRLDIDLTAKLRTSSLWKAKEEILISVPGVGRVTVFTLLARLPELGALNRRAIAALTGVAPFARDSGQHRGHRMIWGGRADVRSVLYMAAVSAARINPVIRSFYLRLKQAGKPSKVALTACMRKLLTILNTMLRNNQPWQAPSTHTI

SEQ ID NO: 239397 - protein, 347 aa, unidentified
MKFYTQTHQHYCGIDLHARSLYVCILDQQGNKLVHKNIKALPQALMRVVQPYRDDLVIGVECMFSWYWVADLCRDEQIKFILGHALYMKAIHGGKAKNDKIDSKKIAMLMRGGMFPQAYVYPREMRGTRDLMRRRMHLMRKRSELLAHIHNTNSQYNLPEINKDLRYMVHRDGIADRFNDPSVQKSIELDLNLLEVYDQQLGKVERYIYQQAKTCDQHSLVLLRTVPGIGKILSLIILYEIHTIARFPSVQDFASYCRLIKCKKESAGKSYGYSGKKIGNAYLKWAFSEAAVLFLRGNPEAQAWLQRMSNKHNKARALTILAHKLGRAVYFILQRQKMFDQERFLNS

SEQ ID NO: 239398 - protein, 341 aa, unidentified
MKKFIRIGVDLAKNYFQVHALVSDVGPAVTRKLRRSKMHEFFSQIEPSLIGMEACGSAHYWARELKAMGHEVLLMPPAYTKPYVKRGKNDAVDADACCEAMSRPGMRFVPVKSAEQQATLMLHKTRELLVKQRTMSVNALRGHLSEFGIIAAKGIGRVDELLDLVESDTTLPNAARASAKVLAHALEGLDKAIDDLEDEITNAQAQNEMTRLLYKVPGIGKIIASVIAASVPDPSVFKSGRDFTAWLGLTPRQNSSGGKQALGAITKQGNRYIRKLLVLGATSLLNVVGKRKGALRDWIVGLLAKKPARLVTVALANKLARFLWAMMKTGESFRTEMFAKA

SEQ ID NO: 239399 - protein, 295 aa, unidentified
MKIHTIGIDLGKTNFHLVGLNERGEVIVRKKFSRGQLLRFTANRKVHLIGMEACGGSHFLGWALEEQGREVRLIPAQYVKPYVKTNKSDYIDAEAIAEAVGRPTMRFVPIKSDDQLDLQSLHRVRERWVMRRTAVINQIRGLLLERGITVRKGRRYIEAALPGILEDADAKLSRALRLLLAQLKLELDQTALRLEEAEALIEQTVQKNEACQRLVKIPGIGPVTATAVIAAIGNGAAFRKGREFAAWMGVLPREHSTGGKQKLLGISNVGAVICEDCSCNVRVPSCNKRPSRFQA

SEQ ID NO: 239400 - protein, 385 aa, unidentified
MQKLNDLSRSLTPLNPDGTLIAVIEMSQSSWLVAGIVPGIERHPLKKLEPNEGELLRLLMRWRAEATKMGCTITRIAVAYEAGRDGFWLARWLRARDIETYVIHPTSVAVSREHRRAKTDRLDTGLLKRVFIGWLRGEPDHCHMAAIPTMAEEDAKRPNREREGLVRERTRIVNRMKSCLARFGVRNFKPTLRKAPERLATLVTPEGVRLPPNMLLELRRDMARLRFVMDQIKEVEEARAQWLEQAPQEKSHAMVRLLARVIGVGIETADMLVHEILSRSLRDRRAVARYAGLTGAPDESGSKRQEKGLAKAGNARVRRGMIQLAWRFLLFQKDSALAQWYRTRTESGGKKRKTMIVAVARKLLIALWRLVTTGEVPAGVVLRAA

SEQ ID NO: 239401 - protein, 440 aa, unidentified
MKYRHKTKRRSTLKKNSNRTNSDRVGKPGKASEPVQRDTKEVMAELVVKLSQKLEPQLAGTSEEEGRQRGVPGPNRDRLTVGVDLGDKWSNFCIVGLDGETLMEGQLRTTQQDFAEFFKSMVAARVVMEVGTHSAWARDVMAGCGHEVLVANPRQMEGPKRRKRKNDRIDAHKLARVGRIDPQSLFPVKHRSVEVRQDLVAVRARDALVAARTQLINTTRGLVKSMGGRLPKCSSPSFRQKVEEALPAEVREALLPLVRLVETLSDCIAVYDEKIGKLASEKYPHTKLLRQVKGVGPITALAYVLTLENPERFAQSRDVGPYLGLVPKQEDSGDSQPQLRITKMGDMMLRRLLVGSAHYILGPFGPDTDLRRYGLRLSERGGKNAKKRAVVAVARKLAVLLHSLWANGEVYEPLRHALPEATQEEAEHPVQAGATEEEAA

SEQ ID NO: 239402 - protein, 353 aa, unidentified
MIVLGADTHKRSHTIAAVGATSGELLGEQTVPVGRRGFGALLVWARSLDGERVWALEDCRHVSGSLERFLIERGERVLRIPTHLTAKARRSARQRGKSDAIDALNVARAALQEGLDTFPAAHLHGPELDLRLLVDHRERLVRHRVELNCTLLWHLHDLWPELRLPGGALFSKKWATRIGRRLARAEQTMMRVRIARDELRRLRELTQAINQLEREITGLVAQIAPQLLSEPGFGPLTAAKLVGEIAGAQRFATSAKLARAAGVAPIPASSGNTQRQRLDQGGNRQINAALHRVIVTRARCHQQTRDYLERRRREGKSTREAIRCLKTYLARRVWRLLQPPHPAEQNPLSPSIS

SEQ ID NO: 239403 - protein, 317 aa, unidentified
MEISLIFVGIDVSKAQLDVAIRPTGEKESFANDKLGIKALVKRLAKIEPTLIVLEATGGYERQVTRALVSAELPVVVVNPRQVRDFAKATGQLAKTDSIDADVLAHFAEAVRPELRPLPDAVTLELRALTARRRQLLEMIGAENNRLAMTSKAVRKRIDAHIRWLEQDLQRADQDLDRAIEQSPVWKENEDLLRSAPGIGPVTSRTLLAELPELGTLDRKQISSLVGVAPFNRDSGSLKGRRSIWGGRAPVRCALYMATLVATRRNPVIRDFYKRLTAKGKLFKVALVACMHKLLTILNSMIKHKTSWSETFSRQTT

SEQ ID NO: 239404 - protein, 414 aa, unidentified
MDEVHEVFVERCAGLDVHQKTVAATVRLPGPDGGRRTETKTFGTTVKRLTELADWLASFKVTVVGMESTGVYWKPVYYLLEDRFGCWLLNARHLHNVPGRKTDVADSVWIARLVEQGLVRPSFVPPPQIRDLRDLTRYRRALTEERSREVQRLDKVLQDASIKLSAVVSTLQTKSARDMLAGLVAGRPPGDLAGLARGRLKDRQAELAEALSGRFRRAHHGLLVAHILAHMDFLDDQIAQLDARIEDLVSPFEDLVGLVATIPGVSERGAQVLLAETGTDMTRFPDAAHLASWAGICPGNNESAGKTRSGKTRKGSVWLRTELTGAAKAAGRTKRSYLAAHQAQIRARRGHPKAIGATRHDILTAFYFIVRDHIPYHDLGPAWAEQRNATEQRTRRLVTQLEQLGHTVTLTPAA

SEQ ID NO: 239405 - protein, 342 aa, unidentified
MQITTIGLDIAKNVFQVHGIDANEKVVVRKQLRRGKLMAFFEVLSPCLIGIEACATAHHWARELTKLGHEVRLMPAKDVKAYVKRNKNDAADAAAICEAVRRPTMRFVRIKSPEQQGQLMQHRTRDLLMRQRTQVINALRAHLAELGIVAAKGDSGVKELLAIVADDGDERLPIDARASVIVLAAQLGAVQTLIGSIEKRIKMQHRANEASQRVETIPGIGVLGATAIVATVPDPTVFRSGRDFAAWIGIVPRQDSTGGKQKLGPISKQGDRYVRRILIVGAHSVLRRAQENPEKYPWLTQLLARRPFKVVAVALANKMARTAWALLAHGGTYRAPELAQAA

SEQ ID NO: 239406 - protein, 315 aa, unidentified
MTNLKKSKTRINVGVDVGKDFLDIYIHEKGLHWQEENTESGVKRILKRLSHYDVERLVMEATGRYEFNIAQAAHAKNIPVCIVKPLLVRKFAGAMDQLAKTDKIDARIIALFAVKLKPAITPRKSKNLIAIKDLIARRRQLMGLRTQELNRIKIMGKALEVSCKRILRCIDAEIKRMEDKLSKYVDNESEWAAKKLLLKTVPGVGDTLVYTLLGDLPELGDLNKNQVAALVGVAPINKDSGRLRGKRRVQGGRANVRTVLYMATLSATQCNPVIKSFYKRLVAQGKHKKVAITACMRKFITILNAMVRDQVEWGL

SEQ ID NO: 239407 - protein, 344 aa, unidentified
MTITVIGLDLAKNVFQVHGIDENGRVVLRRKIRRSDVLPLFSKLTPVLVGMEACHTSHYWAREIAKFGHDVRMMPAQFVKPYVKSQKNDATDAEAICEAVQRPTMRFVPVKSENQQAALMLHRTRDLLVRQRSSLISSIRAHFAEFGIVVGQGIRNVERLLALLGAEGDNRLPALAAEMLSILAEQLREIAARVREVEIKLLAWHRANPASRRLESIPGVGPITASAIIATVGDPRQFKSGRQFAAWLGLVPQQRSSGGKERLGGISKRGDGYIRRLLVHGARAIVGWRKRSATHVTPWIARLLERRPMNVVTVAYANKLARIAWAIMIREDRYNPARAFAAVA

SEQ ID NO: 239408 - protein, 396 aa, unidentified
MESIGFMGADVSKGHCDFVLTDCNGVKLGSTIKLDDTHKGHDMLKSGLSKAKREHGFDKIVVGIESTGGYENNWYRMLHNCDADHEIEVFRINPTRIYHESRAEGRKSIDDGVSALVIAGHIRKNYGLFLSLKQDFTVNEEKRKHLRSLHKYIGLLSKQQVRVKNSLEKVLYSSIPELMAFKGEKYSKWFLEMLQRFPGKEQIIEGGIAGLTQIKYVTSKRATEVVEAVQKSIGANDSITSELIKDMSGEIVGQNTKIKRLNAELTALARTIFGSSIDLITGINGIGEDTATKLILEIGHVHRFESASKLVAFFGVNPVVKTSGDYAGKAKMSKAGSSVARAVLFMAAQNAIRYNPLFKAIYVRHRGRGKSHKAAIVIVMSKLIRIIYGMLKSNQA

SEQ ID NO: 239409 - protein, 454 aa, unidentified
MRQSKTKKRKRNKQISTINPNAAGIDIGSQFHVVAVPADRDDEPVRTYQSFTGDLHRLADWLVACRIETVAMESTGIYWVPLYEILEKRGIIVIVSNARDVKHVPGRKTDVTDAQWLQQLHEFGLLRGSFHPPADIAALRAYLRQRERLLDYAASHIQHMQKALMQMNLQLHHVVSDITGKTGMLIIRAILDGNHEPTALSKLRDGRCKASIETITHALEGNYRPEHLFALSQSVALYDSYQIHVTECDKHIEALLMRLRAPEPPEDPLPAPRHKTKQPNALNFDVRAALYSMIGVDLTQIHGFGPYLALKLVGECGTDMSKWPTAKHFTSWLCLAPGNKISGGKILSAHTRRSKNRATALLRLCAVNVGRTDSALGAFYRRLAARVGKSKAVTATARKLAVLFYNTLRYGVDYSDPGASYYEERHRTRVLHNLTRRARQLGYILEPAPVEGVS

SEQ ID NO: 239410 - protein, 351 aa, unidentified
MKKIFIGIDVSKKTIDASVIIPSLTDDRPILQVYGKFDNRPSGFRKMVAMVRKASTGIDTSEWVFCCETTGGYDVALCDYITSKQLLIWREHAAEIAKSRRDHGKDDRKDSQLIAEYAWRNQDKVRAYTPKTTEILNLCHLLLYRRQLVEMRKQLITRANELKQIAERCNELKFMYKDSQKLIKDITERIRNCEEKMRDLMSHSGPLAANFSHIMSVTGIGLVSTAAILIYTNNFNDITSYKKFASYCGIVPFYEDSGATVHKRDYIGHKSNSMVRAYLTQAAQVASRYNIDMIDYKIRMTAQGKPLQVIITNIANKLLRTVFSLIKNDCDYEPKHELKRQQRIASGAIAG

SEQ ID NO: 239411 - protein, 416 aa, unidentified
MNAVGIDVSSRKSTVAVLRPLGEVVCLPFDVSHDADGLASLAEKLKALDGETRVVMEHTGRYYEAVEKALHEAGLFVCAVNPLLIKEYGANSLRRVKTDKADAVKIARYALDNWADLRDFTPMDAIRYDLKTLNRQFQLASKQRTASANNLIALLEQSFPGIRKCFDSPVRSDGTQKWVDFAHSFWHVDCVRKQPFPAFCERYRKWCKLHAYFFKLRNAEEVYALAKRAVVLTPKSKVVKVLVQEAANQLISISRSVEVYRAEMDRLAAMLPEYPVVMAMYGVGKSYGPQLMAEIGDVRRFERKQALVAFAGIDPMPNQSGDKNVRSNKSSKRGSPYLRKTLFNVIRTYLQCAPQDEPVFQFLNRKRAEGKPFYVYMLAAANKFLRRYYAKLRDYFASLDTLQPVAPIPTILKATL

SEQ ID NO: 239412 - protein, 320 aa, unidentified
MSVYAGLDIGAYAVDLVTRQADKASKARRYKQTPEGHNALIAQLKKAKPTLIVMEATGIYYFDLAVALVEAGLPVAVINPKSFRHFAELKLQTSKTDAIDSDLLAEYGQRMAPGPWTPPDQHHQALRSLGRQINRLVGCRAQARNRLHALKATRSTPSLLIEDEQEGITMLERRIDRLRQAALELLAEAPELQRRYQHLLAAKGIGEATALSLLAELCVLPTSLKSGQISRHAGLDVRQHQSGASVNRPARISKAGNVYLRSALYMPALSAVRYDPNVKAFYEALVAVMRKYLTGLWACLKTDTPFDSTRLFQTAGLQKA

SEQ ID NO: 239413 - protein, 420 aa, unidentified
MKDFSVDDFAAIVGIDWADKKHDICELPAGTENYQWSVISSKPDDLHNWAMALEKRYPGQSIAVACELKKGPLIYALSQYRNLVLFPINPSSLAKYRKAFFLSGAKDDPGDAFLQTEMLEKHMDRLKPIEAESAEVRALAQLLEYRRKLVQDRVDLTNGISATLKNYYPQVLDWFNEKDTHIFCDFVTKWPSLPQAKRARKNTLIEFFNAHNARYRQVNLGRIDAIKAAVALTDDAAIIEPNVMLVEILVPQLKHLLNGIKRLDLEIHRRYLALDDRYLFDSLPGAGPQYAPRLLVAFGTSRDRYQVAAELQKYSGVAPVIEKSGQKSWTHWRYSCPTFLRQTFVEWAGLTVRYSFWARAYYQQQEARGKPHNTIVRSLAFKWIRIIFRCWKDHKPYDESKYLEALRRRKSPLLKYAVTT

SEQ ID NO: 239414 - protein, 400 aa, unidentified
MNIIGIDVSQGESHATLITEEAEEITFKFKHNKSGFQILNSYIKPDTIIVFETTGVYSAQLTTYLKNKKVKFYELNPLEAKLRMASLRRNKTDKNDSFKLALLGETQLAEIKNHCNKQSDSLYESLRILSLRYKQLIKCRTRILNFLRSSLELTFPELNQIFKNAYAVLALQMFRMYCHPDFLVGLTLKEMTNRVYQSVSRRIHKDVIQSYCAQVWLAAKDSYPAVPADSLEIEIISEYCDEIENYNKEIAYIQNRLIKTAVGLNDFKVISSIPGAGQLNSALLLGFTGDLARFDNYKQLNAFLGLDLNRYQSGKYIKGDTINRRGSSQGRAVETDMIRSMLRNQGKIQNHLIDYYYKLKKPPFNKHDKVALIACANHLNRTIINLVHTHQLYNYSKAIH

SEQ ID NO: 239415 - protein, 406 aa, unidentified
MLFVGDDWAEDHHDVHLMDEAGAVIARRRLPEGLAGIRALHELIADHAETPAEVVIGIETDRGLWVQALVAAGYQLYAINPLAVARYRDRHNVAGAKSDAGDAKVLADLVRTDRHNHRLLAGDSADAEGVKVLARGHQSLIWSRNRQTNALRSALREYYPAALVAFDDLAHHDCLAVLAKAPAPADGARLTIGQITAALRRGGRQRNLQRRAEEIHAALRGEQLAAPAAIVDAFAATTKAAVAIIAELNRQIQQLEASLTDRFEQHPDADIYRSLPGLGVVLGARALGEFGDDPDRYANAKSRKNYAGTSPITIASGKKTSVLARHVRNRRLYDTIDQWAFCTLTNSPGCRDYYDQRRAVGDLHHQALRALGNRLVGILHGCLRHHTPYDEHTAWAHPSPHQQTAA

SEQ ID NO: 239416 - protein, 522 aa, unidentified
MATSRTRKRSRPRPQVLQKPSGVIHPRVQKVGPEHFGIVSVDCAKARSKWMLCDFYGNVFVPPTVVEHDRAGLGAAVSQVQRALQKHALHDFLVAVERTGRYHRPVQRAFAAAGFEVRIVHPFATKQFRQPSDPGYKTDDTDLAAIHRAAVNGFALIDTPLDETWKTLQLLIRHRRDLVFKTSLVCCQVREHLEASFPGFAACFDKLWDSACAWHLVRRFAAPQDLAAAGIARLCRSLDEAGVRYQCRTVQRVLEWAAGAAAPDLAAAQHRLIALALNDDRARKTQEILALERDIAARLVCTPYILLLSFPGINVVSAADYAGEMGPMEHYANARAITGRAGLRPCRYQSDQVDHANGPLVKNCNRKLRAAILGIADNLICCNHHFNVLGHHWKVVGKDPRDIRIRVAHRFCRISFHMVAGRQVFRHPCLQGRHYILHKLTAFHQEHETPGPNLLRDLQAAIAHVPHKERQAEARPLHEELKKIQAGRRRGPQLLGDILPIVLARLGVGAVQSTASGEQDPR

SEQ ID NO: 239417 - protein, 341 aa, unidentified
MAAIGIDTHKRTLAACAVDGVGSVVDERTFDTDRAGIAELAAWAARVAPGATIGVEGSASYGAVAARHLVAAGFAVREVPPHLSRRERDRSRRPGKSDPGDALAIARVTLRETDLPPVRLEDQATELGLLLDAREDLVRTQTQTRNRLHAHLVVLVPGYTVTAARLVRAPQLEAIERALRPLVGIRADLARELLAEIRRLGRRAAEFEQLIGSRVDGHPLLGLSGVGSLTAARLLAETGDITRFRSSDAFAMLAGVAPIPASSGEVRRMRLNRHGNRKLNRALYTIAQSQALHHLPAKAYLARKRTAGKSRPEALRCLKRQLVRRVFGLMLTGQSAQPMAA

SEQ ID NO: 239418 - protein, 365 aa, unidentified
MPHVTSIGLDVHARSVAAAAFNPFTGEVVHRDFGTDAAEIAEWALGFEEPRACYESGPTGFHMARELRALGLDCAVAAVSKMQRPAADARRKNDRRDAEFIARMLATHNIVEVPLPDMAVEAARALDDATRELRRSRQRLNMFLIRLGHVWDERNADGARKKAWTRAHWRWVSEIRLEGPQRDALEYYVTAARCAESDRRQLERRVVALAGTDRWRATVEALSCIKGVDTLTAFRLAAEAGSFSRFRSAPAFASWCGLTPSEHSSGESERRGGITKAGNALARTALIESAWHYSTCSPRPKAPAPGTDVPPAIRSRADDCTARLHRRREALAAAGKSACKANAAVARELACWVWEIGCRSEGTVL

SEQ ID NO: 239419 - protein, 374 aa, unidentified
MNDHSEAFVGFDTSKLRHAVAIAEGGRTGEVRFLGEIDNADEATTKLVKKLASRHRRLTFCYEAGPTGYGLHRLIESLGHDCIVVAPSLIPKKPGERVKTNRRDAVALARLLRAGELTAVWVPNARHEAMRDLVRAREAAVDDLKSKRQQVLSLLLRLGWRYAGKRTWTRMHWNWLMSQKLDHREQRIAFEEMLQAVREAQERIARLDQAIRAAVPDWSLAQAVTALMALRGLDLVSATIFLAEIGDLTRFATARELMGYLGLVPSEHSTGDRVKRSGITKAGNARARRILVECAWSYRHPPRLGKEKRARVEAAPKAVREIAWKAQARLCARYRALTRRGKRPTVVVTAIARELSGFIWAVGHAVARPATQAL

SEQ ID NO: 239420 - protein, 377 aa, unidentified
MDQQTGEIISQPVSFSNDKEGFDFLVQKIKSYPKDSILIGMEDTGHYHFALLKYLLDLQYTVALINPKTTDFNRKMQGGITKNDKLDTINICDVLDTPERKKQYRITKVNNFDLYEQKQLTRQHHNLKEELNVYKNRLQKSIDIVFPEFNSLFKSKYGTVYMNILKTFGSAENIANTDIRTIRKCFEIEGRGNRISLTPERLKECASSSIGISSSAEVIQIKHLTAQIELIEEQLTEIDKKIEEFSIQNNSPILSIPGISHFSGTSILAELGDISNYSKPSQIIKFAGVAPLHYESSQFNAQHTAITKKGSKYLRKTLYQIILPVIRHNPVFNKYYQLKISQGKGHRCAQGHCVRKLLRIIYHLLKTNQQFDPQLLR

SEQ ID NO: 239421 - protein, 340 aa, unidentified
MNATTYGLDVAKLVFQMYWVDAQSGEITNRRFRRDELLVFLAQRSAGRVALEACGSAHWWARKIKALGHEVVLLHPKFIRPFVQTNKTDAADARAIWTAVQQPEMRTVAPKTEDQQAMLGLHRMRSLLIKFRTMQVNQLRGLLYEFGVSFRTGRVAGLNEIRTRMAELEDTLPGTMISSLQDQLKRIDSIEQDIDQLENKISVWHKQEAACQAIAAIPGIGKLSATALVATIGDASTFRSGREFASFIGLVPRQSGTGGKVWLGGISKRGDPYLRTLLIHGARSVMCHTKVPGDWQKAIQERRPGNVVAVALANKMARTVWAILAHGSTYDKHHVSIKPA

SEQ ID NO: 239422 - protein, 387 aa, unidentified
MQKPHDDSKACLTAFIQDNTIVVVLELSLSSWLVAGMIPGLSREPLKKIAPDPELLLRLLYRWRDEAIKAGKEITRISVGYETGRDSFWLARWLRARGIDAHVVHATSVAISREHRRAKTDRIDTAMLRRGFLGWLRGEPGHCSMAIVPTLAEEDAKRPHRERESLVQERTSTINRMKSILIQFGVRDFNPVLRKAAQKLHAVQTPEGVPLPPNAASALRRNVERLRLINEQIKAIERSRVQHLKRDPTDKFNAMVFLLVRIIGLGVETAEQLVREILSRNLRNRKAVARYAGLTGSPDESGARRREKGLSRSGNGRVRSILIQLSWRLLQFQPDSELVLWFNKRTAGAKGSRKPMIVALARKLIITLWRYVNTGMVPNGFKLRSAG

SEQ ID NO: 239423 - protein, 355 aa, unidentified
MKTQAVHYLGLDVHQATTVVSMRNEQGTIVMRATVRTNADAILGLVHGAGKRVRVAFEEGTQAQWLHDLLQSHAEQVVVCNVRGRSEVANKSDRLDADDLSEKLRLGSLKAVYHGAPSVLTLKELVRNYNSLVEDATRVMLRIKALFRARAIPTPGTSVYRAARRKEWLDQLTTPGARVRAATLLEQLDLLLKLRPKAKAAMIAEARKMPGWKPLRSIPFFGDVRTAQLLAIMATPYRFRTKRNLWPYAGLAVVTRSSADQDFAGGQLRRRAKAPRTRGLNRNHNPMLKSIFKGAATAAAAKAGPLKDIYEACVARGAKPEMAALTLARKIASIALRLWKKGELWDPAKLMMQTT

SEQ ID NO: 239424 - protein, 450 aa, unidentified
MSARKLSKTRKMKLPKHLQHINPHAAGIDVGGRSHFVAVPEGSCEQPVREFSSFTDDLHRMADWLLACGVSTVAMESTGIYWIPVFEILESRGLEVRLVNARHVKNVPGRKSDVLDCQWLQRLHSYGLLEGAFRPTEQVCTLRAYVRQRMNLVRYAAAHIQHMQKALAQMNLQLSNVVADITGATGMRIIKAVLAGERDPLVLAGLRDRRCKNSESTIARSLQGNFRPEHLFSLKQAVDLYEFYQGQIAECDRQILSQLAGFDALAGNGPDAEPPDSLEEALQRMSGADLTRIDGIDTNNALKIIAEIGTDMSRWKSAKHFASWLGLCPGTKVSGGKVLSAKSKPVANRAAAALRMAAFSLFNSKSALGAYLRRQRARLGAPKAITATAHKLARLVYTMLKHGTAYVDAGQEYYEKRYRTRVVENLKRKAQKLGFSLVEIAGQQPQNATS

SEQ ID NO: 239425 - protein, 343 aa, unidentified
MKLRVLGIDLGKTVFHLVGLDSTGRVVIRKKCSRTQLLAFTANLQVQLIGMESCSGAHFLGRALREQGHQVRLMPAQYVKPYVQTNKSDFLDAEAIAEAVQRPRMRFVPIKTEEQLDLQALHRVRERWVMRRTAVVNQIRSLLLERGLTLPKGRGYVDRQLPRILEDGELRLSGSFRVLLAQLKIELEQLTARIEEMDRVIQKTAKENEACQRLTEIPGVGPVTATALIAAVGNGSTFQKGRNLAAWMGIVPGEYSTGGKQKLLGISKRGNKYLRTLFIQGARSVLQQRDKQAPGLSSWLAQLLARAHQNVVIVALANKMVRMAWAVLCKNERYRALVLAMSA

SEQ ID NO: 239426 - protein, 403 aa, unidentified
MNAVGIDVSKGRSTVAVIRPFGEIARSPFDINHTPKELAELANFILSLEGESRVVLENTGKYSDPIIKVLSEAGVFVCPVNAKLIHDYGGDTIRRARTDKIDSLKIAGFCLDKWVKLERHSPTDELRKTLKTFNRQFDEYMKIKVMLKNNLISLTDQTFPGINNLFTSQARESDGHEKWIDFLAHFWHCDCVTSLSEYAFEERYKKWCKKHGYNFASAKTSQIYEAASNRQAVLSKNDFTKTLILQAVEQMNNLCSSIAKLKAEMTKISQTLPEYETVISMHGVGKTLAPQLIAEIGDIRRYPKRASLARFAGIEPPENQSGTYNQHSRRISKQGSPQLRKALFQVMRCILQNSNPDEDIFRFISRKRSEGKPFKVYMIAGANKFLRIYYARVKECFDALTTA

SEQ ID NO: 239427 - protein, 341 aa, unidentified
MKTLYFLGIDAAKHKIRAALSAGRDTLLFEKDLPVTATGLSQLLAMLKERVKEPEQLLVLIEATGVLHLNWSAALTEAGYAVAVINPLIACRLYRVENSIRDNKSDPIDARGLCAIGVLHGEKLLAHYRFALKPEQFALQRLQRVRKALRSSLTNLKKTYVSLLDLQFPELGQLLELDGVGIRALLALKQIAHLASTTLDQKTRALLETLPGFGPINVVKILAWLPKEILHSGSNRKVSTRLQAFMGNDPRLRQSGQWKGHTKMSKRGVEMLRTAFFQSASSAAQHDPELRAYYQRKRAQGKRHEVALSHLMRILTRRLVAVLRSEKPYSPNYNLTPQNAA

SEQ ID NO: 239428 - protein, 345 aa, unidentified
MIIGCDFHPSWQQIAWLNTETGETGEQKLVHAAGNAKLFYQQLAAPVLIGMEATGNSQWFIELVQDLGHEIWIGDAAQIRASYVRKQKTDKRDAAHILKLVVESRFPRLWTPDREQRDLRQLVLHRHKLVEIRSRVKNELQHLSLNKGIQRKAKLWSQAGQKLLRELTLKPWAACRREDLLGLLAMLNQQIEKLDQAVQQAADEHPQAQLLMTQPGVGPNTALAFVLTIGDVSRFPGGKQMASYLGLIPREESSGGRQKLGAITKQGNRLVRSLLVEAAQIAVRFDPGMKKQYLHRCHQKPKGVAKVAAARKLAVRLYWMLRTQKPYPEIVRIESSPRVPLVGAS

SEQ ID NO: 239429 - protein, 371 aa, unidentified
MNRTTLQMKPTTNFPTLYLAMELSEKSWGLLFSDGEKLSAHNVKVGDVAAVLAHAKSSIKRFGLPADAQLVCCQEAGRDGFWIHRALEASGARSLVVDATSIEVDRRMRRAKTDRLDAERLMRLLIRYCAGETQALRVVRVPSEEEEDARRDGRERERLVHERTGHICRIKALLVLHGVRDAELDLLGEVTCANGKPLPQRLLRELEREYERLALIKEQLKEVETERKEMLEKPSRLTQSITMLMQLRGIGPQAAWLFSEEFFGWRTFENRRQVGSAAGLVSMPFNSGHGERDQGISKAGNKRVRTMAVQLAWGWLRWQPDTAISKWFRKKFETTKRSKRVGIVAVARKLLIALWRMLKTGEVPTGALMTS

SEQ ID NO: 239430 - protein, 347 aa, unidentified
MNYIGVDCHISSLDFAVINERGAVTQKAKVNTGVKEFMTFVKSIPKPRKIFIEEGELAGWMLETSLKFGEELIITDPKINKWIGKAGQKNDPIDAEKLAQLARGKYIKEIYHPVNNRRRFKELVFAYHDTVKSRTRIKNKIKANFRRNGIKCSGETVYSDKYRDKWREMLSKNKITHLIIEELWVQLDQLGESKEKLKRNIRIQSKQYPEIKKFRKVPGIGLIHASTISAIIETPHRFANKKKVWMYAGIGLMERSSGETVYSRKLTREYNRPLKNAIKKAAEAAILSKDNQFRRQYLRLTIEKGIASHRAKLTVARSMLAALYGMWKKGEEYDPEIANKREKGDKK

SEQ ID NO: 239431 - protein, 359 aa, unidentified
MKTYYIGADVHSNSTELAIEHNGNIVRRHSVPTAIPAIKEILTSVGGKIHLTFEEGPMAGWLYRNLKGAVEEIIVCDPRRNNYVSCDGDADDKIDSGKLAALLRGGFLRAVHHSDDEGRDEFKQWVNLYHDRVRDAVRMINKIRARCRMYGIAIPGTVIRDKLQRPQWLATLQNRTLAKQLAMLWIGYDATALQVRHAKRQLCTLSKNYPIIKIWSDLPGIGSIRAVTAFTFLDTPWRFSRPNKLWKYCGVGLQRSASGTDKNGKPKPARLQLAWAVNRLLKSVILGAVHTAIHQNKNVFKDYYERMLYGGIMPSNARHAVARKMLTVMWGMWKTNSRFDEKKVESVAMTAGSSRSAKR

SEQ ID NO: 239432 - protein, 370 aa, unidentified
MKQPSPLDVGLDVHQDSMAVAYVVQDHGAEVVSLGNIGTRPCDINQLIRRLQSKSPHLVLVYEAGPCGYWLYRYLTHKGQVCWVVAPALIPNKPGDRVNTNRRDAIKLARLRRSGDLTPVDVPKVEEDAMRDLCRAREEAIRALKTAKFRLNAFRLRQDIRDTGRATWGPAHRRWLSEVGCPTPAQPMVFQEYVRAVTEHTERLQRLEQELHEQVSTWRLQPVVEALQSLRGVQFTVAVTLVAELGDLTRVDHPRPLMSALGLIPSDYSSGDRRRQGGITKAGNTHARRVLIEGAWAYRYPAKVSRHLQLRRETLPQPLQDISWKAPVRLCQRDRRLIGRGKNPHQVVVAIARELSAFIWAMAREVPLTP

SEQ ID NO: 239433 - protein, 358 aa, unidentified
MQRNKNSFKGQKIFIGIDVHKRNWDVAIAPAVGNVKRHTQKASARELFDFLKKHYPDGDYLAVYESGFSGYSTFYALKEVGVECLVTHAADVPTTQYEEVMKTDKIDSVKLVRSLKAGLLKGIYIREKENIDDRSVVRIRKTIQRQLSGYKARVKHMLHCNGVSLPGCFEKPGSHWSKAFIKWLKEDVRLLSSTRNSLDLLIRQVETIRMTLLEATKMMRNLSQTERYKRKFDLLMTVPGIGVAVSMCILTEVYDVKRFHNENQFAAYLGLIPTSHSSGEKVAHGEKTFRGNRQLGPMIIEAAWITVCKDAGLGSLYLRYKERMKPQVAIVRIARKLSNIIFAVLKNEKEYVPYHTAN

SEQ ID NO: 239434 - protein, 358 aa, unidentified
MKILAIDLGKSKSVACVYSVETAESRFCKVGTTPGQLHELILKVRPDRIVIEVCSAAGWVADLVGTIGIELQVANTAAPAWRWSNTKRKTDRDDALRLAQLSALEQLPRVTIPKRDVRQWRALIRYRHHLVRRRTQLRNRIRALFDREGLTLPTGKQCWTNAGIAMLREWARSLDEAPAQELWRGELACELEILQMAELLIARVEAKLDRLAEANTACQLLQSIPGVGPRLAEIVVAVLDDARRFQKGKQVGSYAGLTPRQYQSGDCDRQGRISHQGNPLLRSLLVEVSWVGLQYNPWMRAVYEQVRRGSPSRKKIAIVAVARRLLIRCWAMLRDGVPWRPPKTEPIPSRTCGVVGAH

SEQ ID NO: 239435 - protein, 346 aa, unidentified
MEQIIRIGMDTSKHIFQLHGVDAAEQPVLRRQLRRKQMVEFFAKLPPTVIGIEACGAAHYWARELSKLGHEVKLIAPQHVKPYVRRNKNDGRDAEGLCEAMSRPRMRFVPVKTAEQQAALMLAGVREQLIARRTQLSNTIRGYAAEFGITTAKGLDKIEPLLAQIAQGESVPALARELFALQGREYAQLQVELKAIEVKLRAWHRANADSRRLAQIPGVGPIGATALVMKTPDPRAFPSGRHFAAWLGLTPKDHSTAGKTRLGKITRAGDERLRSVLVAGATAVIQQAKHGRGHPSPWLLALLKRKPAKLAAVALANKIARIAWKLMVTGESYDGARMPGASALAA

SEQ ID NO: 239436 - protein, 368 aa, unidentified
MKNITTYVGVDAHKKDLFIAMLVGDHTTPVSWQVANEPNAVRRLVRKLEREAPGPVRMCYEAGPCGYALQRQVTTPRVSCQVIAPALIPRKPGERIKTNRRDARKLAELHRAGLLTEVRPPTPEEEAIRDLCRARDDAREDFQRCRHRLGKLLLRRGLHYSGRNWTRAHRRWIDSLEWTQPAERVVVDDYLLAIDHLEARLIEFDARLTEVAQTEPYREKVAWLRCFRGIDTLTAILILAELHDFRRFQTPRALMAYVGLVPGEDSSGEKQRRGRITRTGNALVRRLLVETAWHYQHRPGVGPALTRRRKGQPGRVIAIADKAQQRLCRRFRRLAEQHKPAPKVAVAIARELAGFLWAALQPAPVSAS

SEQ ID NO: 239437 - protein, 362 aa, unidentified
MDDATTPICEGNVTVGLDRGDKYTQVCVLDHEGDIIEEARVRTTPAALRRRFAEMSPARLVLEAGAHSPWASRLLKGCGHEVYVANPRKLRLIYQNDSKSDRVDAQYLARIGRLDPALLAPFPHRQADTQTDLALVRSRDVLVRTRTRLINHVRGAVKSVGGHLVTCSSVTFATKALPDLPPELEPALCPLLEVIATLDEQIRTYDRRIEELATERYPETALLRQVPGVGALTALTYVLTLEDPGRFPDPRAVGSYLGLRPRQADAGDLSPQLHITKAGDEMLRRLLVSSAHYILGPFGPDTDLRRWGLGLRERGGSREKRLALVAVARKLSVLLLRLWATGEAYEPLRNADQHGRSLPCSA

SEQ ID NO: 239438 - protein, 437 aa, unidentified
MKRSRIQVGFDISKKKLDMCILEPDGQVVVRHRSFANTVTGYQAVKQTLIPFLGSDSWDGMDLGGESTGYYWLPFFMQLREDADLTNYDLDTYLLNSRQVHWFKKGYAEDDKTDQKDSFYVTEKLRTQRRNHAWHPDLDWLRLRFYTRYRFHLGQNLTRMKNYFWAHMFLMCNTYSKGKPFSDGLGACGRALVRMYPDWHELQELPTETLIEQLASWSGDRLPDPVQEAQELRKIIQQSFSLHPDLCIALHDLLSMTIDHIAFIEKQIVQVEKSMENEIRRHHPEVLHLIDIKGIGIVFAAGIAAEIGGLERFFRGQKWDHRKKRFRNKNLRDVEDAVAKFAGIWWPRKESGDFIGQERRMNKKGNRYLRYYLVEAADKLRQYLPEYQAFYQRKYAETKKHQHKRALVLTARKSVGLFVGLLHRNEPYRSQEVNLTI

SEQ ID NO: 239439 - protein, 337 aa, unidentified
MNYCGIDLHSNNCVVIVSDENDRMVYQKRLPNELTQIAAALEPYQHELAGVVVESTYNWYWLADGLMDTGYRVHLAHPAAIRKYDGLKHSGDFADAAYLAQLLRLGLLPEGYVYPREERGARDLARKRMQLVRYRTAQILSIEGILMRQTGSRINGEAVKRLTAGQVDEFAFTPDVALAVEANRAVSQALGQQIEALEKRLRERVSLRAEYRLLRTVPGIGDTLATTIMLETGSISRFAQVGNFSSYCRCVDSLRESNGRKKGEGNTRNGNKYLAWAFVEAANFAMRYCPQARSFYDRKKSRTNRVLAIKALAHKLARACYHMLRDQKPFDVHLCFG

SEQ ID NO: 239440 - protein, 339 aa, unidentified
MQDITRIGLDLAKNSFHVFGVNQFGKQVVSKKLSREKMVPFFSNLSPCTVAMEACSGAHYWANKFQSMGHIPKIISPQYVKPFVKRNKNDAVDAEAIYEASIRPNMHFVPIKSMEQLEIQAVHRIRERLISARTATTNQARGFLSEAGIVVPKGIHNIRKFLFFITSDDQSQISISLRDILSNIALELIDLEENIKKQTKILASICSQSPVCSKLRKIPGIGPITATAIIAAAGDGAVFKNGRQFAAWIGLTPRQHSTGGKTTLLGISKRGDSYLRKLLVHGARAVLYHSANKKDKTSLWMQQVLIRRGKYKAMVALANKTARIVWVVLTTKEPYKMAA

SEQ ID NO: 239441 - protein, 391 aa, unidentified
MIFVGIDVAKDKHDCFILNSEGTVLADVFTIANDRIGFETLLSRIQSCSQGESKIKVGLEATGHYSYNLLGFLLDSGLATYVINPLHTNLYRKSLSLRRTKTDRIDARTIAMMLMSDVDLKSYSNTAYHNEELKSLTRYRFDKVKERAKLKSSVARLVNILFPELEKLVSSLHIAVVYALLSNYPGASYIANANTEELAEILCTASKGRYTKSKTAEIQVAAGVSIGSKMPAKSMELKHTIALIRELDKEISEVESAIDKITSQMDSPIFTIPGIGRHMGAMILAEVGDFSNFASADKLLAYAGLSPSTYQSGQLQNCYAHMEKRGSRYLRYALFNAAKYGCLWCPTFSAYLEKKRSEGKHYNVAISHAAKKLVRLIFAMQRSGKAFLADY

SEQ ID NO: 239442 - protein, 361 aa, unidentified
MDTINIGVDLHKHQFTNYYLCKNDGVYGKFSTDEKGFSSFKIELKQMLEKGFKVRLAVESTGNTRFFKNEIEKLGVEVFVVNTLKFKVVNESVNKTDRHDAKTLAEFLSKDMLPLVTLSSEKSEKLRRLVNVRRELVKTRVKMKNMIHGMLLSFGIETKAGLLNSKKGLDKVIGLISDEENKIIAETIINAIKKLSEQIIEIEEKMKKMAEGDRAVEILESLSGTGFLNAITVRSYIDDIKRFSHYNKFSGYCGLVPWVSCSDKTEHYGKITKRGPIELRTAIVQMVIGMLRCKDEKNNRIMTSYRNMKKNKGSGKAIVATARKLTRIIWTMLTNNELYKKEKLNVALNDETLKNVSDKAA

SEQ ID NO: 239443 - protein, 310 aa, unidentified
MDVIIDKGCGLDVHKETVVACVMGSGIKKEIRTFSAMTGDLLRLKGWLIDLGITHVAMESTGPYWKPVFNILEDSFEVILANARHIKNVPGRKTDVKDSEWICKLLRSGLLTASFVPPQAIRDLRDLTRYRQKLIQAVSAEKNRIQKVLEDANVKLSSVASDTFGVSAGKMVRAIISGNVDPVSLADLAVGRLKGKKEKLKEALQGHFRNHHGFMIQASLDHIEYMEKTIAKLDQQINEKLKDYHRERELLASIPGVKEQGSSLILAEIGADMNVFPSEGHLSAWAGMSLGNNESAGKKKVERQPTAIKI

SEQ ID NO: 239444 - protein, 312 aa, unidentified
MASLYLGLDVAKASVELASEPAGLGGQFATNPSGLAALVTQCQAQAVALIVLEATGGYEAPVAAALASAGLPVAVVNPRQVRDFARALGRLAKTDRIDAQVLALFGARLQPVPRPLPDEATQELEAVLLRRRQLLEMLHAERQRLPRARGREVRRNLRVHIRWLERSVIDTDATLAALIQASPLWRVQDQLLQSVPGVGPMLARPLLALLPELGHLDRRQVAALVGVAPLAQDSGTQRGRRHCWGGRPALRTGLYMAALVAARWNPVLRPFYQRLRAKGKPAKVALVAVARKLLTILNAVMRDQRPWQSAYA

SEQ ID NO: 239445 - protein, 387 aa, unidentified
MPQPNDLSRSLIALEQDATLIAVIEMGQSSWLVAGVVPGVERQPLKKLAVDQAGLLQLLHRWRNEAVRAGCSIKRIAVAYEAGRDGFWLARWLRAHGIEAYVIHASSVPVSREHRRAKTDRLDTELLKRAFLGWLRGEPNHCSMAAIPTLEDEDAKRPSRERESLVRECTRIVNRVKGNLARLGIRGFKVSLAHAAERLGALRTPEGATVPPNTLAELRRDMAHLRFVKQQIKEIEAARAERLEQGSAQGRNGMVRLLARVVGVGIESADMLVQEVFSRELRDRRAVARYAGLTGAPDESGKKRRERGLAKAGNARVRRGMIQLAWGHLLHQKDSVLAEWYRRRTADARGGTRKTMIVALARKLLIALWRLVTTGEAPVGLLLRPAT

SEQ ID NO: 239446 - protein, 343 aa, unidentified
MAQQTIIGIDLAKHVFQVCMVTPQGTIKTNTTVARGKLLTLMARQPPALIFMEACGGAHDWARRFRAMGHEVRLLAPQYVTPFRRGQKNDPNDALALTEAGQRPNIPTVPIKTIEQQDLQALHRVRERLVKHRTAVVNQVRGLLLEYGIVIPQGMARLRKRLPRVLEEADNGLSFLMRDLLQSLQSELSALDTRITEVTSQLTRLSHELEACQRLQAMEGIGPLSATALVAALGHGHDFQTGRQVAAWLGLVPRQHSSGGTTRLGSITKGGNSYVRRLLIHGARSVISHVRDKPDAKSAWIRQLVTRLGVNKACVAVAHKMARVAWALLHTGEQYRKPAVLSI

SEQ ID NO: 239447 - protein, 344 aa, unidentified
MYHCAALDVSLRSIHICVMDQDGKIKSEGQVVSEVDDVLAFIDALDLKIKSIGFEAGTLTQYLSYGLQAAGHDVVCMEARQVKAALSAMRNKTDKNDARGIAHVLRSGWYSRVHVKSLESHQVRALLSSRKAVLSKCVDLENEIRGLFKVFGIKLPPKLGHGSFDDYVRDTIESDSGLSHALLPLLDARLVLYRTFRELDNRTRKMAHQDPICQRLMSVPGVGFVTSLTFKAAVDDPTRFKRSRTVAAHFGLTPRRFQSGEMDNPGRISRAGDPDVRATLYVAANSMMTRSSKWSSLKLWGMQLAKQRGHRRAVVAVARKLAVILHRIWIDDTQFRWGSQGVTQ

SEQ ID NO: 239448 - protein, 447 aa, unidentified
MADRVRPQTLEIAHPNAAGIDIGSGSHFVAVRPDADDTPVREFLSFTEDLEALAQWLTKCGVDVVAMESTGVYWIPLYELLESRGFVVHLVNARHVKNVSGRKSDVLDCQWLQQLMSYGLLSGAFRPQEEICVLRAVSRQRDMLVQYQAKHIQHMQKALTQMNVQLDNVISDIVGETGQKIVRAILNGERDALGLAKLRHGRIRASEADIVKSLQGNWRAEHLFALKQAVNLYDSYQTSIAECDSQLAEVLGRLAIHDESPEPPKSGRGRRPLKVEKFDLRKALYRACGVDLTRIDGIDVGTALKMIAEVGPDLSRFKTVKHFASWLGLCPGTKISGGKVLSGASKRTANRLAQALRMSAVAAGRSHSALGAYHRRLSARLGKAKAVRATAHKLARLIYTLMTKGEQYVDKGQNYFEEQHQQRVMKNLKKKALAMGFSLIPLDAAAA

SEQ ID NO: 239449 - protein, 342 aa, unidentified
MESAVTMGLDLGKSVFQVHGVDAGGAVVVQRRLTRGKLLHFFGKQAPCLVGMEACAAAHHWGRELRKLGHRVRLIPPRYVKPYVKRQKNDAADAEAICEAVTRPSMRFVEIKTCEQQGTLVLHRVRLMLTRQRVQLSNAIRGHMAEYGLVAPVGRNGLQRLIAILGNPDDERVPTVARASLAPLVAQFELLNGQVLENDRRVRASARATELGCRLMEVPGVGPVLASAIVATVPDPAAFKSGRDLAAWIGLVPRQNSSGGKEKLGGITKQGDRYLRQLLVAGALAVIRYAQRHGTKRPWLVQLLSRRTPKIAAVALANKMARMMWAMMMTGERYREPTVAAA

SEQ ID NO: 239450 - protein, 336 aa, unidentified
MKVTLIGIDLAKTIFQACGVNQAGKAAFNLQVRRAKLLPSLQLYPEATIAMEACSGSNYWGRELKRLGFNVMLIPPQHVKPFVKGNKNDRNDTFAICEATRRPGITTVEPRSLSQTDTMVIHRIRERKTGMRTAVINQIRGLLNEYGIVVAQGKTRLQTELPYLLEDAENGLTPMARHYLQHAFQEWQALDQSIAELDHDIAIQVKQDDQASRLLNIRGVGPMIASAASALAGRGECYRNGRHFAANLGLVPRERSSGGKQKLGRITRRGNQYLRKLLVQGAWSVIRYAHRSDDRLSRWTRQLIERRGKQVAAVAVANKLARIIWAMSYHQSEYRP

SEQ ID NO: 239451 - protein, 408 aa, unidentified
MEVIHERCAGLDVHKETVVGCLRVADRGEVRHEVRRFATTTAGLLELADWLRQAGCTHVAMEATGVYWKPVWHILEGEFELVLANPAHIRNVPGRKSDVNDATWIADLLAHGLIRASMVPPGPIQELRDLTRTRKQLMREVVQHKQRIQKVLEDANVKLASVVSDVFGPSGRRMLNALIAGQSDARKLAALGSEQLSASRETLAQALHGKVTAHHRFLLKQHLQMIEQLEKTVSEFEAQIEAALEPFRAAVERLMTIPGVSATAASVIIAEIGVDMSRFATAGHLRSWAGLCPQLNESAGKIMSRRLRYGAPWLKTVLVQCAWAATRSKHNYLHAQFLRLRARRGPKKAILAVTASILTAAYHVLRDEVPYRDLGPLYFAHLDQDRTAQRLARRIQELGYEVQIRRAA

SEQ ID NO: 239452 - protein, 351 aa, unidentified
MPRTTTVHAVTAIGIDMGKNTLHMIGLDSRGAIVLREKVSRGRITSRLANLPPCLIGIEAGMATHYVARELTALGHDVKQVPPAYAKPFRQGHKNDFRDAHAVAEAVQRPTTRFVPAKTNEQLDLQALHRVRSRLVGERTAVINQIRCFLLERGIIVRQGLRFLRQALPDILAKRTDVLSPRMVRIVADLASDWRQLDERIEPVTDEIETLAKSDDSCRRVMTVPGIGPIISSAMVAAIGSGTAFARGRDFSAWIGLVPKQMSTGDRTILGRITKRGNGYLRTLFMQAARVILLRPASWPKHGFGVWLARAAQRLHPNVLAAALANKLACIAWTVLAQERSYEARIMKAAA

SEQ ID NO: 239453 - protein, 342 aa, unidentified
MDHFAGLDVSVKETSVCIVDDMGKVVREVKVTSEPEALLAVLKNPAYHFKRIGLEAGPLSQWLFSGLAEAELPVVCVETRHMQAVLKAQINKTDRNDARGIAQMMRVGLYRPVHVKTLRSQKLRMLLTHRKLLQSKAIAIENDLRGTLRNFGLKVGMVGKVRFEARIEELVENFPDLAELVEPLLIVRRALREQTVILHRRLLAVVWDDEVCRRLMTVPGVGPVVALTYRATVDVPARFRKSKSVGAVFGLTCSKYQSGEIDRSGRISRCGDEMMRVMLYEAAQSMLRSKKWSWLKAWAMQIARRRGMKKAIVALARRLAVIMHRIWVDGTEFRWTREVVAA

SEQ ID NO: 239454 - protein, 344 aa, unidentified
MKQKYVIGIDVSKSKLDIAILNNQLELLQERVILNNRKSIRAFIKAVLNTYRITRGEVLVCCENTGIYNRPLEVVCSELDVPLWVEHALKIKWATTDMRGKDDRKDALRIAQYAIRYNDKLIPYREATEVIKQLGVLNKVREAMLGQKTALENRLKEAKTHDAFEYQILSKSFKQVLNALVKSIKQTEEKIEQLIANDPEISQTKALITTIPGIGPQCAVNLIIATNNFTSFQSARHLACYAGVVPFKNQSGTIVKKERVSKMANKNIKKLLHLAAMASIRFDEEIKEYYQRKVSEGKNKMSVLNAVRNKLVHRIMSVVNRKQAYLSKNEYRSQKTLDFTCLIT

SEQ ID NO: 239455 - protein, 412 aa, unidentified
MRVHHKVCCGIDVHKSSVTACLMWGPADQEPQSEIRRFGTMSGELKQLREWLKQAHCEVAVMESTGAYWKPVWNILETDIKLILANAKHVRSLPGEKTDNKDGRRLASLLRHGLIRPSFVPPREIRELRDLTRYRKKLLGNGAAERNRIQKILEDANIKLGTVLTDVFGVSGQRMLHALVENETVDVEQVAGLAHWSLEPKMDALKKALEGRVTAHHRFMIDICLDHMSYIERQIIRLDEQIAKHLVPYQKEYELLQTIPGIAQTGAASVLAEIGPDMSAFDHDDDHLSSWAGLCPGNNESAGKKFNGKTRKGNLQLTSTLVECAWGAARTKNCHFKSKYHRLKQRRGSQRAIVAVAHALLRTAFVVLMTGKPYQEPVRPPLSETKRLRRAQHLCRQLRSLGYEVTVKTKAA

SEQ ID NO: 239456 - protein, 343 aa, unidentified
MQTVTTIGLDIAKSVFQVHGVDAAGQVLIRRQLKRRYVLAFFQKLTPCVVGLEACASSHYWSRELQAVGHTVRLMPPAYVKPYVKRQKNDMADAEAICEAVTRSNMRFVPTKTPEQQSGQVLHRTRHLLICQQTSVINALRAHLAEFGITAPVGRRGVEELLRVIADPKDSRVPELVRACLAALGHQLLGLKKQILEFDRMILAWHRSNERSKRLNCIPGVGPVLATALVASVGDPKSFRSARHFSAWIGLVPKQHSSGGRERLGSISKQGDRYLRSLFVGGALAVIRYAKLHGTNHRPWLTGLLARRPTKVAAIALANKLARIAWALMARGERYNYPVALRP

SEQ ID NO: 239457 - protein, 356 aa, unidentified
MTRLAETVDGVIGVDTHRDTLAAAATDRVGGTLAQTSAAADLAGYQELLGFAQAQVPGRRCWAVEGAGSYGAGLTAFLQARGERVVEVGRPKRLARRTGAKSDALDALRAAREALACDHPVAPRGRGDRQALQVLLATRHSACRAKVSAIDQLKALIVGAPEELRAELRGLATKRQITRCASLRDRPARSLEHRMTVRALRLTARRIQLLAAEAAALWAELEQLVAAVAPWLLELPGVGPISAAQVLVSWSHVGRLRSDAAFAALAGANPIPASSGQVTRHRLNRGGDRQLNRALHTIVLARLRDDPITRAYAVRRRAEGTSARDIRRCLKRAVARQLFKLLERHDRHGVEVVKVG

SEQ ID NO: 239458 - protein, 322 aa, unidentified
MSHVTQPIAVFGVDIAKDEVVTQRYGESSPQRLRNTPKPLMAWLVGLPAGALLVMEATNTYHELLATLAHASGVQVVVLNPRCTWHYARSLGVRGKTDRVDTETLADFGATQWKRLHRWEPPTAGNARVAKLLRRRGKLVHARVALRQSLSSVKELNTLRRQTERALTQIIERIDLLIVKAVSQDDQLAPLYRLLQTIVGVGPILATQLAQALTRVRWTNQDAFVAYTGLDPRPKDSGKHRGRRQLTKYGPPMLRHLLFMGAMSASKTALYKPMYHALRQRGLQTTQALVVLARRIARIAFAMFHTGEVFNPTRLSPAPKNA

SEQ ID NO: 239459 - protein, 416 aa, unidentified
MPFALPEALFFTGIDWAAETHAVCVLDAAGKIAAEFTIEHSADGIATLVRRLARYGEAGDMPVAIERPDGRLVDLLLEAGHPVVPVSPNAIKTWRDGEVLSGAKSDAGDAAVIAEYLRLRAHKLKVAAPYSDQTRALRTVVRSRGDLVEMRVAATNQLSALLEAHWPGAKAIFADVESPISLEFLTRYPTPASALHLGEKRMAAFCVKHGYCGRRTAAELLTRLRDAPAGTGLESLAEALRDAVLAAVGVLTALNASVKSLDRSIAAHLGEHPDGAIFTSLPRSGQVNAAQVLAEWGDCRPAYEHPDSVAALAGVTPVTSQSGKHRSVYFRWACNKRFRVAVTTFADNSRHASPWAAKIYNDARAGGKDHPHAVRILARAWIRVIYRCWLDGVPYDPAKHGAAAALARQTSEQIAA

SEQ ID NO: 239460 - protein, 403 aa, unidentified
MSNYFAGLDWASKAHALCVIDERGGVVDRFEIGHDAFGLGELQRRLRRLDSPPIAIERPSGLLVDTLVEAGLTVVPIHPNAVKASRPRYRSHGGKSDASDAYVLADLLRTDGHRFKALTPQGDEIKALQALVRGRDDLVATRVQLANQLRTLLESFWPGAACVFADIDSPIALAFVERYPTPESARTLGLKRMAAFCAQHAYCGRRSAVDLLDRLHQAPTALCAELEMEAKGELARSLARTLKCLVEQIRLLSGRIEHHVASLEDGKIIMSFPRAGRICAAQLLAELGSVRERFLSDEHLAAEAGVAPVTYASGKSKAVVFRWACNHRLRAALTCLADNSRHANDWAAHVYAKAKARGCDHPHAVRILARAWLRVIWRAWTDRKTYDPAQHRAAQLLLKTAGG

SEQ ID NO: 239461 - protein, 443 aa, unidentified
MSDLAVLDPRAAFVDVGSEKMHVSIAGGSPAVFGTVTSQLHALRDYLAEHQVRSVAMEATGVYWLPLYGVLEAAGMEVVMVDGRQTRNLPGRKTDMKDCQWGATLHAHGLLRAGFVPPANIRRLQDYLRLRGDHIAAAAGHVQHMQKALERMNIKLHEVISSLTGASGLAVIRAILAGERDPQVLLGLCDIRIRNVKAERVVESLRGDWAQEHLFALAQAVQSWDHYQGLIAACDRQIAVVLRQMTDAKAPPSAASTKTGKPRTRPGVNAPDIADLREILAHICGAKDLTTLPAHSEYSVLQLIGEVGTDLTKWRTEKHFTSWLGLAPGSAQSGKRKASVKRRRNRAGQIFCVMARALARSKHVALGGFYRRMAARRGGLVANKALARKLATLFWRVMVKGLDFVETGVAQYEAKVLETKHRILHRLARQLGHQIVPNPAAVV

SEQ ID NO: 239462 - protein, 408 aa, unidentified
MLNAVGIDVSKDRSTVAVLQPGGVVIHKPFDVSHKSSDLRDLARYLGSLNGETRVVMESTGRYHEPICNALSKAGLFVCAVNPHLIRNYGNNTLRKVKTDPADAKKIARYTLDNWASLREYSVMNTTRTELKTLNSQFAFFMKQKTAAKTNLIALLDMTYPGVNKLFTSPVRPDGSEKWVDYADSFWHVDCVLDSGPKVFTERYQSFCKHHGYDYQPDRPEKIYVQAKELVPTVPKDPVYKEMIRDSIAQLNLMSKHVEELRRKMDELASSLPEYQTVRSMYGVGPSLGPQIMAEIGDISRFNHREALTAYAGVDPGKNDSGELVHKSGHASKCGSARLRKALFQVMEAMLQLGPRDDDPVSQFLFKKKAEGKPYLVYMTAGANKFLRVYYGKVKECIRNLPAADSED

SEQ ID NO: 239463 - protein, 367 aa, unidentified
MKKVSTAATKQSRNISQQRLTIGLDLGDRNSCYCVLDETGRIQLEQRVRTTAKALQEVFGAMPRSRVALEIGTHSPWISRLLSELGHEVIVANARKVRLIGENRKKDDRLDAQTLARLARIDPQLLCPVKHRSAQAQADVMMIRARASLVRVRTGLANAARGLAKSYGERLLGCNVRNMNPEKAEGLSPELQRALEPLLSAIEEVSERICEYNDRIEALAQTSYPQVALLKQIKGVGTLIALTFLLTLEDPHRFRKSRDVGCYLGLQPGRRQSGKSDPQMHITKEGDPYLRTLLVQGAQHILGPFGVDCDLRRWGLKLAERGGRNGKKRAIVATARKLAVLLHHLWVSGEVYEPLHNSNPRTIAAAA

SEQ ID NO: 239464 - protein, 339 aa, unidentified
MNVVIGIDPHKASHTAVAIDEAEDELSSIKVRATRRQVDQILGWAEPFEKRTWAIESAGGLGYLLAQQLVARGEVVLDVPATLASRIRVLATGRSNKNDPNDALSVAIAAFRAPNLRSVEAADHAEVLRLLAKRNGDPGSHRTRVVCRLHALLAELAPGGIAKELYVSDAERLLAKIRPETPAEQVRYDLALELLDDVRRLDAQTKESHRRIRVAVKASGTSLTELFGVGPIIAAQLIGYAGDVRRFANRDAFASYNGTAPIELSSGGRVVHRLSRRGNRQLNHAVHMAAISQIRQSGSEGRAYFERKVAEGKTKKEAVRSLKRQVSNAVYRQLLLDAR

SEQ ID NO: 239465 - protein, 465 aa, unidentified
MKPPKSASKGQRNPSKIEERDLESLPPLHLNAAGIDVGSAEHYVAVPAARDPQPVQKFGSFTGDLHRLAGWLKACRVDTVVMQATGVYWIGLYQVLEDYGFVVQVVNARHTKTLPGRKTDVQECQWLQQLHTFGLLNHSFRPAEQIRILRSYLRQRENLVAAGSTCIQHLQKALTEMNVQLANVISDLSGTTGMAILHAIVKGERDAYKLADLKHSLIRASREEIAQSLQGNWREELLFVLQQNLELYEVYQKKVRECDQQIEAHLKTMPAMVNVSEHPIPPPRRVSWSRKRQPGFDLRGELYRLTGVDLTQVDGLDVQTIQTVLSEVGLDMSAWKTEKHFGSWLGLSPDNRISGGKVLKRGTRKVVNRAATALRLAAWNLIRSQSALGAKFRRLRTRLGAPKAITAMAYHLARLVYRMLKFGHAYVDKGIEYYETKHRQQQFAWLKKQAAALNLQLIPLTEVPA

SEQ ID NO: 239466 - protein, 310 aa, unidentified
MREQQSNRRDRTTIGLDLGDRWHRFCVLGESGQVVEEGSVANNRVALSELSSHYPGALIVMEAGCHSPWVSRHLEQAGCEVIVSNPRKTRAIYQHERKSDRRDALMLARIARMEPALLYPVRHGSEEAQQDLLRIKLRDSLVRVRVGLINSVRFTLKSLGYAMANPSTERFHKASKSALPESIVQMIAPSVQAIEELSLRIKLLDQEIRTLAHSKYPETTWLEQIPGVGPITALYFVLKIGDPARFKRVRDVGAFIGLCPRRDQSGESDPQLRISKRGDAYLRRLLVSSAQYILGAFAPPPRPEPRSVPW

SEQ ID NO: 239467 - protein, 333 aa, unidentified
MENFYFIGVNVSKKKLDFCVMFEGKVVHEEETANHQSAIMSLLHHFEEDYGIDNTRMPVCAEHTGQYTFPLACACKTVECKLWLENAAEIKYSSGVQGGGKNDKVDAKRIAIYASRFQDKVRYYEHPTEDIERLKQLESERTLYVTDLTKYKGQMKDQKDYMPKALYERKMKRLQALMDDLKEAIQAITDEMDEVIASCPVLFRQQELLMSIDGVGRVVATNMIIATEAFTRFDDPRKFNCYAGVAPFSYSSGSSQHSKARVSHRADKVMKRLLHLAAVAVTHRVGGELKKYYERKVAEGKNKMSVINALRAKIVARMFAVIKRNEKYKPILS

SEQ ID NO: 239468 - protein, 313 aa, unidentified
MAKLEVFVGVDVSKERLDVHLRPSGETLSVSNDAEGIAALVSALKPHRPVLIVVEATGGWEAHLVAVLGARQLPVVVVNPRQVRDFARATGELAKTDRIDAAMLSLFGERLRPEVRPLPDEATRDFEARLTRRRQVVEMLVAEKQRLTLARPAVKKQIKAHIRYLQRQLSDIEGDLERAIAASPLWRAKEDLLRSAKGVGPVLSRTLLADLPELGTLNRKQIAKLVGVAPLARDSGTRRGKRQVWGGRSHVRSVLYMATLSALQSNPAIAAYYERLIARGKPRKVAIVACMRKLLITLNAMLRTGTPWSPAHA

SEQ ID NO: 239469 - protein, 429 aa, unidentified
MTQDGIAVWLGIDWADEKHRWAMRINGESRIHQGELEHTPEAVEQFVSGLAIRFPGRQVAVALEQSRGALIFMLGKYAHLVLYPIHPNTVDHYRKSAFPSGAKSDPGDAVLILDLLYRHAERLRPFHPDTVETRTLQLLVEARREAVDDKTRYLNRLTAQLKMFYPQVLDWFSTPDTVVVGRFLLKWPTLEKLQRARAGSIADLLSEHRIPDSRIETLMELIAQAVPAVKDAAVLESSVLIVRRLVQQLEVLHEAIADHDKKIAALAKSHPDYGIFSSLPGAGPAMAPRLIAAFGTQRDRYATASAIQRYAGIAPVTESSGKQKWVHWRWACPKFLRQTFHEWAWMSTKKSTWARSFYDQQRNRNKSHHAAVRALSFKWIRIVFRCWKDRVPYDETRYTLSLQKRSTSKNVEIRVKNFYGFAQFDGLSC

SEQ ID NO: 239470 - protein, 322 aa, unidentified
MRYIGIDVSKATFVVAYSSDKGGEIRTFNNTTTGIKQFIGALPKDGSIHCVMEATGNYSAMLLYLLNVAGIAVSMENPLKIKNFARAMLSTVKTDKIDARLIALYGEKMNPQPFKIQGEAILRLRQKRTVIRQLTKQITAMSNLRGSLACLPVPDKGATHTVDETIEFLEKKRDRLQSELTDLVEVEFSRQLALLTTIKGIGITLATALIITTGGFTYFQNAKQVSRYLGICPTYEQSGTSVNIRGHINRNGDVYTRGLLYVAAWTASRFNTKCGETYTRLRQNGKPGKLAMIAVANKLVRQAFAVVTHDKEYVDGFVSNRP

SEQ ID NO: 239471 - protein, 417 aa, unidentified
MKKHNNSRKKSEPTSKRAKSRRPVPQDTKEVLAELVGKLRGKLDRKVAAGSTREREEHPRGELRPNVDRLTVGVDLGDQESHYCILGLEGETLAEGQLRTTQEDFATFFQGLNAARVVVEVGTHSAWVQEVICGCGHEVLVANPRLMDGSKRRKRKNDRIDAHKLARLGRVDPESLYPIQHRSREVRQDLVMLRARDALVAARTEIINTTRGLVKSMGTRLPKCSSRSFAQKGEEAVAVEMREALLPLVRLAATLSADIKEYDKKIEELGREKYGHTALLRQVKGVGPITALAYVLTLENPKRFAKSRDVGPYLGLVPKQEDSGESQPQLGISKAGDTMVRKLLVGSAQYILGPFGPDTDLRRYGLRLCERGGKNGKKRAAVAVARKLAVLLHRLWVSGEVYEPLHHAKSVPIAAAA

SEQ ID NO: 239472 - protein, 371 aa, unidentified
MKEFSKYVGLDVHKETIAVSIAEAGGGEVRYFGEIANTPEAVAKLARQLKKGDARLSFCYEAGACGYGVYRQLRELKHDCVVVAPSLIPRKAGDRVKTDRRDSLSLARLHRAHELTPVWVPEGAQEALRDLTRGREDMKHAQRQVKQRLLAFLLRHGKRYSGKSRWTQAHFRWLETVKCEHPVQQIVFQEYVDTVSALTQRVKAFDQHIESAARESVFWLVIEALMALRGVNLLAATTVVAEIGDLRRFASAPQLMAYLGVVPSEHSSGGKRSRGGITKTGNGHVRRVLVEAAWTYRHPARKSAVLQRRALCTSEVVQAIAWKAQTRLCQRYRLLEGKAKLKVQVCTAIARELAGFIWAIGQALPQTAAHG

SEQ ID NO: 239473 - protein, 399 aa, unidentified
MFVGWDWASTAHDVTVIDSAGELVHRMAIPHTEDGIARAVAKLADYGDPGELPVAIEATRGLVVDRLLGVGHPVIAVHPNAFHAVRPRWGAARAKNDPGDSFKLADYARTDIHRLPMLVPTLPETLELQALTRQRDCQLALRIAAVSQLAALLDQYWPGGKTIFAQLHSPIALDFLDRYPTPRAAASLTPARIEAFCHRRGYSGRRSGAELLDRLRSAPISASRLGEPVVAQMIRGQVAVVRALQAGIDALDIVIAEKVTAHPYAGLLADLPRIGTLNLAQIIGEVGPILERATSFDQLAAETGLAPVTRSSGKTHTVAFRYATNRRARQALHTWLDNSRRSSDWAAQRYAAARARGQRHPHALRTIGRAWLRIIWACWRTKTAYDPARDERAKQPTAA

SEQ ID NO: 239474 - protein, 356 aa, unidentified
MSKTNSVKIIIGVDTHKDIHAAVAINEIGARLGTLTIPVRPKGYRDLEIWARAFGVIHAFGIEGTGSYGAGLSRFLQAKGHSVVEVNRPNRQLRHQNGKSDSLDAENAARAVLGGQANARPKSADSSVEMIRHLKVARDTAVKSRTQAMITLKTIIINAPAALRQALDRIIGKMALIRHLAALRPGPILSATASAKAALRAIARRWLMLDAEIRVHDADLEALTASCAPAMLEAHGISTGTAAEMLILVGDNPERIRSEAAFAKLCGACPIPASSGKTNRHRLNRGGNRQANAALYRVVIVRMRSHQPTLDYVKKRKADGKGKMEIIRCLKRFIAREIFGYLCGARQSLTSLPKTT

SEQ ID NO: 239475 - protein, 362 aa, unidentified
MGKNNTVGTQDGKKKRLTIGLDLGDRSSRYCVLDQQGEVVSESSVSTTRKGLAQAFGSKPRSRIALEVGTHSPWVSRCLKDLGHEVIVANARRVRLIAESNRKNDRLDARTLARLARIDPELLSPIQHRGEQAQADLMVIRARAALVEVRTRLVNCARGMSKSYGERLPSCGTPVVREELAEALSEPLREALKPLLAEVESVSRSIREYDERIEDIAQSRYPETELLKQVHGVGTLTALTYVLTVEDPHRFQRSREAGAYFGLRPKQRESGGCQPQLGITKEGDAYVRKMLVQCSHHILGPFGPDSDLRRWGLKLAERGGKNAKKRALVAVARKLAVLLHKLWVTGEVYEPLRVGKARHMAA

SEQ ID NO: 239476 - protein, 348 aa, unidentified
MRFIIGCDFHPGYQCIAMLDTETGELVKKRLVHEGEEVRKFYAGLPAPALVGIETSGHSQWFEKQLGELGHEAWIGDAAKIRAAEVREQKTDWRDALLILGLLQQGRFPRIWVPTPEERDARQLLLHRHKLVRMRTQVKNQLQALALNQGVRRKSRLWSVLGRAQLESLALLPWAARRREDLLKLLDDLGPRILELDRAVAQQAWARPTARRLMTHPGVGPVTALAFVLTTGPVSRFRRGKQVASYFGLIPRERSSGGKQRLGHISKQGNAFLRGLLVEAAQSAVRHEPELRRDYQRLAQRKCRALAKVAIARKLAVRLYWMLRTDSDYAQLLQGSHAGQPESSCGRS

SEQ ID NO: 239477 - protein, 357 aa, unidentified
MTRISAGVDVSKNRSTVCIMDQDGKVIMRPFLVWHSTEELDFLADTLKRLNGEVRVIMESTSIYQDPIALHLKEKGIFISIVNAYKVNKFANTDFRGGKTDKKDSRTIASYGISYWDKLVEWQIPKDTSFNLDLLNRTYMNAKKHRQIILQELQHYIDCAMPGMDKELHSLNLNTKKDFMLDFVEKFWHRDEIVNMTEAEFTEVFTAWAKEKGYRPGKGKAAKIYAIAKSCIPYYPANPTVKTILQCIVDKLSGVNRTLVTIVTQMIEEAKKLPEYQIVREMPGVGDPLAARFFGYAGDIRRFKNSKALVAYAGIDSPPDESGDLSSTHRHITKKGSKVFRDTGYEIMMALRSQKRT

SEQ ID NO: 239478 - protein, 317 aa, unidentified
MIHLGIDIAKLKFDVALLAQGKFKTKVFANDSAGISACLKWLGTHADGPVHTCLEATGSYGEALACALHDAGHTVSVINPARTKAYAQSLGLRQKTDAVDAKMLARFVQTQQPAVWTPPPAELRALQALLRRLDALVEMRTQEKNRLGVAEPTVSASIAQHLDYLQSQIDALKAQIENHIDQHPGLKQQQDLLDSIPGIGAATSAWLIGELNLTRFDSARQAAAFVGLTPRKDDSGTSVRGRPRLSKQGNSLLRKLLYFPALTAMTHNPLVRALCLRLKAKGKHNMAIIAAAMRKLIHIAFGVLKSGKPFDPTLADT

SEQ ID NO: 239479 - protein, 343 aa, unidentified
MQTVTTIGFDIAKSVFQVHGVDACGQVVIRRQLKRRSVLAFFQKLPPCLVGVEACASSHHWSRELQTLGHTVRLMPPAYVKPYVKRQKNDMADAEAICEAVARANMRFVPTKTPEQQSCLMLHRTRHLFIRQQTALINSIRAHLAEFGIVAPVGRKGVTELLCVVADPGDTRVPEVARACLAALGSQLLALKEQILAFDRMILAWHRSNQTSKRLHYIPGVGPMLATALVASVADPRTFRSGRNFSAWIGLVPKQHSSGGKERLGSISKQGDRYLRSLFVAGALAVIRYAKIHGTGHRPWLTALLGRRPTKVAAIALANKIARMAWAMMAKGERYKQPAALAR

SEQ ID NO: 239480 - protein, 311 aa, unidentified
MDAIYVGIDVSKDRLDVHVRPAMTLFNVPRTDKGIEALIARLLELQPKLVALEATGGFERVVTANLARVGLPVVVVNPAQVRAFANALGKRAKTDPIDAAVIAHFVEATKPQRRELPSKDTLKLANLISRRRQIVDMITADSQRAHRADADAKASIARTIAGLRLELARIDSNIDDLVKGSEIWCEDEKLLVSVPGVGETTARTLMSHLPELGKIDGRKLAALVGIAPFTQQSGAWRGKSAISGGRTAVRCALFVVAMTATRFNPVFKEAYKTLLARGKPKKVALIAIARRLLVTLNAIMRDRKPWQLKEA

SEQ ID NO: 239481 - protein, 400 aa, unidentified
MLSIGIDVSKGKSTVCGMKPGGEIVYTPFEVQHTREGMSELVSLLRSSGEEVRAVLESTGSYHCPVVAALLENGIFVSVVNSLRMKRFCSQSIRKVKTDRIDAMQIALYGLAYWQELQPARLPEDTYRELQLLARQYYQMTSMLIKAKVDFNAICDQVLPGMQELMNDHAGRHKLSDFVLRYRHTTHILEMGETRFRKDYCKWAEKKGYRNCERMAALIFATAQNGIPVLPNAPSTQIVITEAIRVLHTVEASRDAILTQMQALAKTLPEYSLVREMPCIGDTLAPRLIAEIGDVRRFHSKRALIAYAGIDAPPYQSGKFCANNRHISKRGNRYLRKTGYEVMQSYVMHKPANDPIFTFIEKKRGEGKSGKLAMVAGLNKFLRVYYGKVTELYRSLPAIE

SEQ ID NO: 239482 - protein, 414 aa, unidentified
MDVLHERCAGLDISKKDAKACVRSPSTKRRGSFTTQTTTWGSTTNAVLALRDHLLAAEVTLVVIEATSDYWKPFYYLLAEDLNVILVNARQVKNLPGRKTDVSDAAWLAQLGAHGLVRPSFVPPAPVRELRDLTRARTQMTRERGQIVQRLEKLLEDTGIKLAAVASDIMGVSGRAMLEALISGEHDPQTLANLAKRKLRNKIPELTEALTGRFRAHHAFLARLHLDHYDQLTGAIGQLDERIEEAMAPFRGALDLLDTIPGINQAVAEVIIAETGGDMTRFPSAKHLASWAGVCPGHHESADRTKNTKVRPGNPYLKGALGLAAFGAVRTNNTYLQARYKRLTARRGPLRALVAVEHSIITAIWHMLTDNVPYHELGGTYFVQRDPERATRRAITALNQLGYTVTLNPIEDAA

SEQ ID NO: 239483 - protein, 340 aa, unidentified
MDITTLGIDLAKSVFQLHGVDAQGVIVLQKKLRRGAVVKFLSKLEPCLIGIEACATSHYWAREIAALGHDVKMIPPAYVKPYVKRQKNDAADAEAICEAVTRPNMRFVPVKTEEQQAVLVLHRSRDLLMRQRTMILNAIRSHCAEFGIIAAQGARKVSELVTKLRNDDTRGVPEVGVSALLSLASQLDCLEQEVRKIEHQLLAWHRQNAASQRLETIPGIGLITATALAASVPDPAVFKSGRQFAAYLGLVPRQNSSGGKDRLGRISKMGNGYLRRLLVVGATSVTRRAPTIDTRTGTWVRSLLEHKPTRVVTVAIANKTARTAWALLSKGESYKAVPAI

SEQ ID NO: 239484 - protein, 424 aa, unidentified
MKRTQNEKILQIKFETLVVGIDIGKDTHYARAFDCRGIELSKLLRFSNTNQGYEALEDWMQEIMKDKGKTEAIVGFEPTGHYWFTLGDHLQRKGHRLAIVNPFHVKCTRELDDNSQTKNDKKDPKTIAMLVKDGRFRDVYIPEDVYQELREAVSERERLVEQMISLSNQVIRWLDIRFPEFNQVFKNWRGEAAWLILRYFPTPAKVAAAGALSIVSTWRKKMKKPSLKKAEKLVNLAISSIGRTAGNEAAEAALQNLLTQYEMVMQQKQDIEQLMQELLIKVPNASKLVGIKGMGMVAAAVIASEIGDISRFNDPRQIQKMAGLSLRENSSGKHKGKTTISKRGRRRLREGLFRAMITMLATNSEFRQIHQRNLSREQNPLNKMESIVALCGKLIRVIFAILTKGNDYDADRMLNDMKRSMKAA

SEQ ID NO: 239485 - protein, 411 aa, unidentified
MKFFCGIDWAEAHHDVAIIDGDGQLVAKKRITDDPTGLAQLVELLAAVGDSAEYPIPVAIETPRGLLVASLRATGRSVYAINPLAVARYRERYSVARSKSDHADAMTLANILRVDAHLHRQLPADSELCLAIAVLARAHQNAIWRRIKAHNELRATLREFFPTFLAVFARRFALGISSPEARAVLAIAPTPGAATKLSVSQIAAALRRGGRSRNIDQAAIKIRTALREPQLRQPPQVEVAMGQQTLALLAELDAACTSVNDLGQAAAELFQTHPDHAIITSFPGLADSTGARVLAEIGDDRNRFVDARALKAYAGSAPVTRASGRSISITHRRIKNDRLAAVGWVWAFAAATHCQSAREHYRRRREHGDRHSAATRHLFNKLIGQLHHCLQHREPFNEAKAFQQITTPAAA

SEQ ID NO: 239486 - protein, 405 aa, unidentified
MNAVGIDVSKGKSMVAIMRPFGEVVASPTEVAHTDSELGKLANSLKRLKGETKVIMECTGHYFQPIARTLREAGLFVSAIHAKLIHDYGNNTIRKVKTDKADSIKIANYGLSNWLDLPEYAPEDDIRQMLKAFSRQYTKYGKVKTMLKNNFISLTDQTFPEVNGLFTSPPRKSDGHEKWMDFAMKFWHCECVRGLTLKAFSERYQKWCKKEGYQFSHNKASDIHSRSCGSVPVMPKNESARLLVDQAVRQINSVSEGMAAIAEEMKRLAGMLPEYPIVSEFFGVGDILGPQLMAEIGDVRRFRSKGSLVCYAGLEAPPYQSGMFESNDRSISKKGSPHLRKTLFQVMGCYLLNAPSDEPVYQFLVRKRDEGKHYYSYMTAGCAKFLRIYYARVNERFAQQDALEQ

SEQ ID NO: 239487 - protein, 375 aa, unidentified
MKEKVRFLGLDVHAETIAVAVAEPDGEVRSLGTIANREESIRKLIKKLGSADQLRACYEAGPTGYVLYWQLTQLGVECVVVAPTLVPTKAGDRVKTDRRDALKLARSHRSNDLTAVWIPDGDSEALRDLVRTREAAKQDQLRARHRLSKFLLRMGRRPAVGMKAWTEPYMAWVRQVQFERPAQQATLEDYLHEVDHMAARIKRLEQGITEVVKLASPQIQEVVKGLQALRGIAEISAVTIVAELGNIARFDTPRQLMGYSGVVPSEDSSGKRKRQGSITKTGNAHLRRIVVEAAWSYRHRPAVGPRLRKRQEGVPEPIKEIAWKAQVRLSKRYARLAAAGKDQRKIVTAVGRELLGFIWAIGTRAEATVKQQMAA

SEQ ID NO: 239488 - protein, 411 aa, unidentified
MDVLYERCAGIDVHKKMVVVCLITPDATGTPTKETRTYGTMTADLLEMVDWLVGAGCTHVAMESTGVFWKPLYNLMEGTLEVLVVNAAHMKNVPGRKTDVKDAEWIADLLRLGLLRASFIPDRPQRELRELTRYRTSLLQERSAEVNRLQKTLEGANIKLSSVATDIMGKSGRDMLAALVAGRTDAAALAQLARGKMREKLPQLEKALRGQFAAHQRFLVAQQLAHIDGLDDIIERVSAEIAERVRPFAQEIEQMDTVTGIGRRTAEVLVAEVGTNLMRFPTHRHLTSWAGLCPGNNESGGKHHSGKTRKGSPWLRAALIEAARAAGRSKKTYLGAQYRRIAARRGAKRAAVAVAHSILVIVYHILTKHEPYHDLGVTYFDERDRQAVERRLVKRLQALGYDVSLRPLTAA

SEQ ID NO: 239489 - protein, 428 aa, unidentified
MDYTQNAKIAQVTEKTLIIGVDIGSESHYARVFNWRGLEYGKKVFRFNDDVAGYKAFKGWVEMHKSQVGAEKVMIGIEPTGHYWFTFGRYVKLSGMTLVLVNPYHVKQIKELDDNSPKKTDFKDPKTIAKLVVDGRYSIPYVPEGIYAELRQAVSSRDRIVKEQNALTNRIKRWLKIYFPEYLKVYKKFSAESGLLLLEKAPLPAEVLALGVDGITQIWREHKLRAVGKKRAETLVEAAKDSVGIEGGACAKLELQLLLEDYRSRQAQMAQVTEILEAEVLKIPHVEKILAIKGIGLITVAGFLSEVGEIGRFDSPKQIQKLAGLELKENSSGKHKGQTSISKRGRKKLRKILFQAVLPLIRSNAEFNDVYRYYTTRQKNPLKGKQAVIAVGCKLIRILYTLLTKGVEYDAGRMRSDIIRPADGGQAA

SEQ ID NO: 239490 - protein, 373 aa, unidentified
MPRYSTAFGMDVHLRSTTVCALDAETGEAVTRRFRGNPWGEVAEWMSGFPGPSLAAYESGYLGFAPQRELSGLGVDCVVAAVSKVPRSAADLSSKNDRNDAARMAKAILSHDVTPVWVPSPEIEGLRDLAAAHDAATARLAAAKQRILAFLARRGYVYGGTTPAGNPRKYWTYGFLRWLDGIHPADDGGIRALAALRNEVEAADETRGALLAEYRAAVAAGPLSAEVEALQSIKGCGFALAAAFASEVGDFSRFRSGRQVTSYFGLAPKQRSSADSVRLGGISGAGNALVRKLAVEGSWCYAQAGHQPKLMPKGSGVPLEIRMHGRKGSERLLRRREEMIARGMPQAKANAATAAELVRWLWALGAMCREGAE

SEQ ID NO: 239491 - protein, 395 aa, unidentified
MLYLGIDIGKNNHEAGLVDGEGKQRGKSLRFANDQQGFSALTSFLEQKVGPGEELCVGMEATGHYWLPLYSFLHGKGFRLHVINPIQSDSLRNFHIRVAKTDSIDCFLIAHTIRFGNFSETRLADEDVLSLRNLARFRESLKDSCANYKRQVVTVLDQVFPEYDALFSNMFGESSKAFLKTCGTPEQTVELDTKSLAALLRKASRGRHGTKKAEEIKDLAERSVGVPFCKDAFAFQLKILIEQIEFTEKQIGEIDKKLAKLLKKLNSVILSIPGVGPATGAVILGEIGDINRFDNPKKLVAFAGIDPTVMQSGNFSGSHNRFSKRGSPYLRRAIWMAAVVAARFDPVFKAFYEKKRSEGKAYGTAIGAVARKLTYTIFAILKADKPYEVRLNPEG

SEQ ID NO: 239492 - protein, 424 aa, unidentified
MQNTVAKKRKQVPEGYLFVGVDPHKKRHAAVAITQDFTTQAKFKFDNTREGLESMLDRARVEMVKSGCRGVIFAIETGGHYWRNVAYFLDEQGIPFRFINQFTLKRRREGKDLNRRKNDYRDSEVAAQLLCTGEFTESKLPQGVYAELRTAHNAYRRLVKERTRITNLVKGLLDALFPEFTQVFKDPGGLTALSVLSTCPIPRVIAGMTEDEFEAIIEARHRGRRLMRKKLKALHYSAKTSIGIDAGARSLSSEIAFLVDKFELIRRQICIMEGTLIRLVDETEEGKYLLSIRGLNYIAVAGLLAELGCFKAYRSAKQMIKMAGSNPTESESAGKKKSRTPMSKQGRPVLRYCAWTSVIPMLRFNPDFRAWAKQRRERPVHANPLGGREVVGAALNRLFRLAFALVKNQTYYQVSKPELTLVAV

SEQ ID NO: 239493 - protein, 368 aa, unidentified
MKKETITSDGISGESLVNDVNRVLNLGLDMHYRQVTVAMQEDGGRIKAAGKMGHADFLNWVPKKLEEGWEIYSCYEAGASGYWLHRELEKLGVKNLVVVPKAMGQGGKKQKTDQRDAGELCDSLDRYLRGQKKALSEVAVPTEEQEEKRALIRYHRQIMADRGRCEARGKGLLCAQGIQVRGRWWRGDSWLELTSDPRLKDWMKEQLVGWRNKILSTDEEQSALRERIAALAPAILPKGVGAYSAAVLHYELRGFEHFKNRRQVGSITGLCPGVHLSDGRGKEGSINRCGIGIVRWTLVEMVWRLMIWQPQYPPVRRLAAGLVKSKRARKRLVVQAARRLAIDLWRLSTGQTTPEKLGLVMQSNATGN

SEQ ID NO: 239494 - protein, 419 aa, unidentified
MSGKREIACGVDVHNKFIVATILSSDGLKLQNRFETFLEDLLKFKNWLKENGCHKVALESTGNYWLPIYHVLEGSVNFILANAYQIKHIPGRKTDSLDSEWIAELCLKNLISPSRIFTKDHRELRSLTRARESLIKIRTKIKNRVTHELEAACIKLSSVIADVFGKSGRHIVDGLLNGMDLEKILESIPSGRVRKNKEEIRGIIQANLSSSQIFLLRSHLNMIDAVTKQIEEIDAKISDQVSLRNEDMRIALSMPGMGFISASTILAEIGDFRDFSSANKLAAYCGLVPSVYQSAGKLINGHITKHGSPHIRRIIIEVAHAIILTKRLSKLKKFFLRIKARRGAKIGIVALARKVLCILYHLLVRRELYQDDLLSKPRCIKNPRLHPKTAMDLDEMIRTIIKAGYEVRKNELIEGGQSR

SEQ ID NO: 239495 - protein, 407 aa, unidentified
MTVFVGLDWAAATHAVCVIDDTGGVRWRGTVPHTAAGLTELVERLTRFGPPASLAVALERPSGLVVDTLLDAGFRIVPIHPNVVKASRPRYSAAGAKSDPGDAYLLADLLRTDGHRFRPLRPLADETRALRALVRGRDALVAQRVALANQLRALLERFWPGAATIFADVDSPIALAFLRRYPTPQSAERLGERRRAQFLRRHAYCGRRTPADLLARLHSAPRHRTGDAESEASGELVLALVAVLTPLVAQIQQLAAAIAASLDQHPDGPVLQSLPRSGQVNAAQILAELGDDRGRFPTAEHLAGEGGVAPVTHSSGQHRGVAFRWACHKRLRQALTTFAHNSRHASGWAAAVYARARARGCDHPHAIRILARAWVRVLWRCWQDRRPYDVTCHRAAQPLLALQPARG

SEQ ID NO: 239496 - protein, 397 aa, unidentified
MDAAGRRLAAARLPEGVAGITRLHEMIGAHLGEDAGAGEDAGAGEVAIGIETDRGPWVSALVAAGYTVYAVNPLQAARYRERHGVSGAKSDKADAHTLADMVRTDAHQLRPVAADSPQAEAIKVVARAHKTLIWERTRHTLRLRYVLREYFPAALEAFDDLAAPDTLELLAKAPDPASAAKLNRSQIRAALKHARRRDIDMKTTRIQAALRSQQLGRAPVITAAYAATTRSIAAVLATLTEQINTLRGQVETHFGRHPDAEIILSQPGTGVLLGARVLAEFGDAPGRYADAKARKNYAGTSPITRQSGKRKITHARFVHNDRLVDALMSQAQSALLASPGARAYYDKQRARRLDHHAALRQLANRLVGILHGCLKTRTLYDEATAWSHHNQDQRTAA

SEQ ID NO: 239497 - protein, 373 aa, unidentified
MIAAFKPTKKRTEVNNEMAVYVGIDVHKKYCQAALMNDNGRILQELRFDNTTEGTNCLLDLAKSVDPQIKAVLEPSANFWIRIYDKLEEEGVEVKLSNPLRTKAIAEARIKTDRIDAKTLAFLLRGDLVAESYVPTRKNRERRALIRHRASLMRMRIELKNRIHALLDKHELTHSYSDLFGKEGTEWLRSLQLPTPDHQILQSNLQVLETVNAEVRNADIQIAKDATTEDQAKLLMTMPGVDYYAAMVLLSEIGDVHRFNSDEKLVSWVGLAPQVHQSGETNWTGHITRKGSKRARWILGQCAQSARQHDPRMREFYERIERKHGHQKAIVAVARKMLAIMYVMLIRNEPYHGENPQLTEQKHKRLDTLANSA

SEQ ID NO: 239498 - protein, 374 aa, unidentified
MRSPNNMLYVGLDVHKEIIAPAYAPEEPGSEVVALGKIGTRQCDIDKLLKQLQSKGRHLRIVYEAGPCGFWLQRYLHKRGLECQIVAPSLIPKRSGDRVKTDRRDALQLARLHRAGELTPIHVPDIRDEAVRDLSRAREDAQRDLKSAKFRLKAFLLRQDIRYEGQARWTPAHLRWLARVVCPTPAQQIVFQEYLRTINEQNERLARLEQALREQVEHWWLAPVVAAIQALRGVQFTTAVTLIAELGDLNRFVRPRQLMSYLGLTPSEYSSGSKRQQGGITKSGNSHARRVLVESAWAYRHPAKVSAYLQKRIGHLPKELLDLSWKAQVRLCKRYRSLCARGKHVNEVVVAIARELAAFIWAIAKTIPVTQHAR

SEQ ID NO: 239499 - protein, 351 aa, unidentified
MLLIGVDYHPSFQAIAFLIEETGECGDQELNHSDGQAEKFYRDLKERGISVRVGMEATGYSRWFERLLAELGFELWIGDPAEIKAKRVKKQKFDREDARLILRLMRENNFPQIWVPGPENRDLRQLLWHRHRLVQMRTRIMNQLQALAMNEGYRWKKKLFSEQGRAQLEKLALAPWASRRRHELLELLDRVNPTIEELTIAVEREARKRPEAMRLMTHPGVGPLTALAYVLIIGTPTRFQRGKQIGTYVGMIPCEESSARKQRLGHISKQGSSLLRFLLVEAAQAAARIHPDWRRRYVRLAMRRHRSIAKVAMGRKLAVRLYWMWRNGCEYSPSLEFGSYAGQLGTRNGVK

SEQ ID NO: 239500 - protein, 369 aa, unidentified
MGEYSEAFVAFDVAKIKHAVAVAEGGRTGEVRFLGEIENREGPIERTVKKLAGRYGRLHFCFEAGPTGYGLYRQLQALGHDCMVVAPALIPKRPGERVKTNRRDAVTLARLHRAGELTGVWVPDAVHEAVRDLVRAREAAADDLRRKRQQLLSFLLRHSRIYSGSGHWTLAHRRWLANQAFEHAAQQIVFQDGIDAIEDAIARLRRLEEQLVAIVPSWSMAPVVEAYQAMRGASFLVAVTFAAEIGDVRRFDNPRQLMSFLGLVPAESSTGDTVRRKGLTLAGNRRARRALVEAAWTYRYPARVSETLRARLEGLPKAVRDIAWKAQIRLCARYRRLSATGKKLPVVVAAIAREMAAFLWAIGREVAPG

SEQ ID NO: 239501 - protein, 404 aa, unidentified
MEVIHKRCAGGDVDAKRIVVCVRIARDRRVHRETRTFETTTKGLLALADWLEESRCTHILLESTGVYWRPVYHILSERLTVVLANAAEVKNVPGRKSDVNDATWIADLMAHGLMRGSFVPPRSTQEQRDLTRTRKQLVREVVQHTQRIQKVLADANINISSIVTDTLGRSGRAILDAIAVGETDPEKLVCLLNVRVKKDRLTAREALSGRVTEHHRFMVQLHLRQIDALQAAIGGLDTRLQQVFTAHRDEMQRLTDIPGVSQRTAEIILSEIGTDMRRFETAGHLRSWAGLCPRLDESAGKRRSTRVRNGNVWLKTTLVQAAWAAMRKKDTYLRTQFLRLQTRRGPKKAAVAVAASILTISYNLLRDGSTYQDLGPNYFDERDRSRVAKRLLRRLTDLGLDVHV

SEQ ID NO: 239502 - protein, 392 aa, unidentified
MADMNHPIAALHWVAIDVARYWNAVLVETASGQRQRFRMTNSAADMQRLTDFLLSLGGRCRVALEPTGDYHRPIAHRLLRAGFEVVSISSVAQSRFREAMFNSWDKNDPKDAAVILEMLKQGRTQRYVDPMLAGHHDIQELSKTYYQISRARTKVQHAIINHHVPLYFPEMHKYWTSTRNEWWVKFMIEFPTPAHVRQHTCQEFINLASPVVGRRVHRVAKLTEIWECCADSGALPHDPQSVAVQTFLFTLRHYQHLNDMRRQLEEQTQKLLASDADYINLMSLPGVGPINALTILAEAGNLRRFGHHRQFLKYCGFDLAKSQSGVQRGREQLSKRGNARLRLAFWLAAVVAIRARENSFREKYDRYVSSNPKDPDLKRKALTVDSSAQLSQ

SEQ ID NO: 239503 - protein, 387 aa, unidentified
MQIADRSKAPTAIRTDLGAIFVSLELSRSTWLITSLSPGSGEKMSKHSVRGGDIAGLLKRFTQLQEKTQARTGKSFEIIVIQEAGLDGFWIHRLLQSKGIDSHIVDPASIATSRRRRRAKTDRIDGEALVRALLAYKRGEPRVCAMVKVPTPEEEDRRRLCRERKVLIAEQIEHINRLKGLLFSQGVSGYEPLRRNRWTRLEELRTGDGRLLPKHLKAQVRRELDRLELLLEQIKAVEVERDALLAAEETSAPAPAAILLDIKGIGPEFAAVLWSEGLFRHFDNRRQVAAYAGLAPTPWQSGAVDREQGVSKSGNPRLRTTLIQLAWLWVRHQPRSALTLWFEARVKRNGGRLKKTTIVALARKLLVALWKYVTAGVLIEGAAMKAA

SEQ ID NO: 239504 - protein, 345 aa, unidentified
MSIVGGLDIHRKQITFDCLDTDTGELRRGSIVPADRQHLADWLAEHSAGGAEAHLAFEGCTGWRDVAEELGRAGVYGHLAEAADTAALRGPKRHAKTDRADSQHLRQLLFDGRLPECWIPPAHIVEARALLETYHDLRVEHTAWVQRIHAVLFHQGAHRPGVGLRSVEGQAELAVICTTELSAAGRLQVATALDMLTALEDHLHRLHRELIDAARHLNGAKVLSARLYGVGPVTGLALTCWLGGAGWFSSARKAVQFAGLDVTVHSSDGKRSAGRLSRQGPAVLRWCLYEAGKTHARGSAPDHDYYAQAQQRIDGKRAALSEARKIVRQACHILAELGDDALTNV

SEQ ID NO: 239505 - protein, 422 aa, unidentified
MSYCPVAGIDVSKRFSDMCILSPDNKIFAQEKIYHDETSINRANALLQKAERLFFSKPVIVMESTSHYHLILFQFFSEHGYDVIVVNPLQSNSMKDFSIRKRKTDRVDAFKLAMMYRTKTLRPSQIPQTATRALRQLCRHRAELLNDVSSYKNRLTALLDQTFPGYNKVFSDVGGVTSCAVLVRFPTPTILFVEEESELVEVIAAASKSGYSFAKKKAGLLISAAQKAQTLGIHSCADETLIVCTIQMLRTLSESVLQIETAIDNLLAQIKEMRNNVSLLQSISGVGSHSAAFLLGEIGDISLFKKPKQLAAYLGLDPTERQSGSFRGTKNKLSKRGFPYARAALHMGVVNSICKRGKDSAANPVLLSYYEKKCKNKPAKVAQAASMHKLVFIVFAVLRDQMPFELKTPEQHAVEQGFVKAA

SEQ ID NO: 239506 - protein, 335 aa, unidentified
MYCILDEAGRILLEQKVATTPEAMKQIFEKIPRSLIAMETGTHSPWVSRLLTELEYKVIVAHAQKVQLITKSNRKDDRHDARTLARLARIDPELLGPVRHRSAQAQIHLTVIRARAELVSVRTALVNAARGLAKSYGQRLPKCGTQQVSRQLGAGLRAELREVLEPLLKEIESLNERIKEYEVRMEKIAKESYPHVELLKQVKGVGTQIALTYVLTLDDPQRFPKSREVGCFLGLRPGRRDSGESQPQMRISKEGDRYLRTMLVQGAHYILGPFGADSDLRRWGLKLAARGGANAKKRAVVAVARKLAVLLHRLWVSGEVYEPLRNSQKAMRAVA

SEQ ID NO: 239507 - protein, 333 aa, unidentified
MPERLLVHRMEKVTMAEQERADEVLVGIDVGKDFLDVMCTGDGAPSRCRNDEEGIGRLVSQLCDRAPSLVVMEASGGYQRRLLIALVEAGIAAVAVNPRQVRDFAKAVGLLEKTDAIDARMLLLFAERMRPEVRALPDETTRLLEELLGRRRQMVEMLVSEKNRLHQALSSRVRKDIEAHIVWLKKRIKDNDEELGRQVESSPSWNAKVQLLDDLKGVGRLTALMLLASVPELGTLDRKKIAKLVGVAPLACDSGRHSGHRRTWGGRSAARLALYMATLVATKHNATIRTFYQRLIAAGKAKKVALVACMRKLLIITNAMLRTHLEGQRPALA

SEQ ID NO: 239508 - protein, 363 aa, unidentified
MDSIQSYCGIDLHKLSLTVTVVNREGERIALETIPTKCVGRIRRFVGRLPGPVACAIESVGMYRWLWDLLKPLCGKLVLADATELAWRRGRRRPKTDPKDAEHLAGLLRDGTVPAAYVPEGPEYDLRRLGRHWHGHSRLAARLKVRLRSLLNQANQRGPKNLDGPAVRRWLLAHGNALDETAHLCAEDLLETIEHVELQQFQRKRRMQAICRRHFPALTELLKSVPGIADVLAAVLIGEIGSFERFDTAEAFACYTGLTRRVHESAGRIAATGISRAGSATLRWALYEAATTLCRCDRHWKTCYDALAEKMGSKKKARTAAARKLASCLFGMAKTGECFRRGPSTHPTRAANRARLLARPEAA

SEQ ID NO: 239509 - protein, 404 aa, unidentified
MQGRCIGMDVHRDFCEVAIWDAGEVVRAPRVPSRPGQLQEFALQLRPTDRVAMEATGNALAIARIIGPHVAAVEIVNTRRLKAITASKQKTDRHDAKTLAQLLAAGMFAGSWQPDEATRMLRRRVARRARLVVHRTRSKNEILAVLHRNLKPRPPMSDPFGVAGRAWLARQELPVDEQDTVNAALRQIDFLNDEIATIETELARFATGSAEAKQLMTVPGVGLVTATAFLAQVGEVTRFPNPNQLVSYLGLNPSVRQSGDNDAHTGRISKEGSALVRHVLVEAAQTAIRSPGPLRAFFERVRARRGHAVAIVAVARKLAVLFWRLLVSGQDYAYSMPTPTAKKLRAVELKAGAPSRRGGGSQHALNREARRKLERRSAEHAEAAYRRNVADWHRQQAKGARTAT

SEQ ID NO: 239510 - protein, 316 aa, unidentified
MIQQIFIGIDVSKTKLDIAVRPTRDQWSTANAPTEISALAKRFEELQPTLIVLESTGGLEIPLVSELAKKFLPVVVVNPRQVRDFAKATGKLAKTDSIDSEVIARFGEAIRPEPRLIKDEQARELDAVMVRRRQIVDMLTMEKNRLRCSSKHVRKDLEAHIKWLEKRLQNVDGDLQKLIQQSDVWRANDKILQSVPGVGPVLSLALLAGLPELGQLNRKQVAALAGVAPLNRDSGFFRGSRKIWGGRAQIRSVLYMSALTAARCNPVIKAFHKHLIARGKKPKVALTACMRKLLTILNVMVKKQTTWSPAPVEQTC

SEQ ID NO: 239511 - protein, 462 aa, unidentified
MTIPTKKGSTKTTTASPTSLPVIRPRVAGLDVGSSQHWVCGPPSADGTANVRVFGTTTDQLHELATWLRDQGVQSVAMESTYIYWIPIYELLESQGIEIVLVNARQLHNVPGRKTDFSDCQWLQLLHSCGLLRGSFRPGEAITRLRALQRQLANLVAERTRCVQWMQKALDQMNMQVHRAVTDLTGVTGMAIVRAIVGGERDPVRLATHRDRRCRHSQNEIARYLTGTWREEHLFNLASALRLFDALATEIAAYDARLLREIEALQPPERHEEPVPAHPNPAKEKALKARGEQPARTTLWRFAGVDLTRVDGISAGAAQVILTEVGPQLAAFPSEDHFVSWLRLCPRTPISGGKPVKKRRNGLGANRIAGVLRMAATSLQRSKTALGASFRRIARHKGGAVAVFATARHLARLVYRMLRYGHDYVDIGEEAYDHHFQVRRLAALTETAKSLGYTLVPNVATA

SEQ ID NO: 239512 - protein, 315 aa, unidentified
MYYLGIDVSKKTIDCCLTTDSIFYERRFDNTEDGFRQLDDWIKEYTVEVVYCCCEATGIYHEAISDHLRQNHIVSIVNPSKIKGFREAEQTRTKTDRQDARLIAEYCRRMQPQAWQPPTEEQKYLQAITDYIARLKQQRAAEQTKYQTAPDVIRNHIQTTIDHLNRLIAIVQTELKDFYRQNPKYNEKKNRLKTIDGIGESAASVLLAKLTRYDFANQNQFAAYLGLDPKIKDSGTSVKGKSRISKQGQKNARKALYMPALVAYRMNAFPGFIARLKAKGKPPKLIIVAIMRKLAVIAYQLYKTGKDYDRSRYRK

SEQ ID NO: 239513 - protein, 315 aa, unidentified
MAEREKAVFVGIDVSKEKLDVAVRPSGQLISFSNDEDGISMMADFIKPFLPLLIVFEATGGLETAAVGMLIAKGLPVVVINPRQVRDFAKATGKLAKTDAIDAHLIARFAEAVRPEVRPLKDEETQKLTALITRRRQIVEMITAEKNRLCRTTPWTFKDIQSHIAWLEKCLEKADKNLNNLLRKSPVWREKDEILQSTPGVGPVLSMTLLANLPELGTLNRKQIAALVGVAPLNRDSGLFRGKRMVWGGRGNIRSVLYMSVTCAIRFNPPLKKFYQRLRDAGKFHKVAMTACMRKLLVILNTMIKNRTYWGACHD

SEQ ID NO: 239514 - protein, 324 aa, unidentified
MIDGILGIDVCKNTLDVSISSYTKVRTKSFTNSPDGWRHLLDWLIAQKIQRVHACLESTGRYSLGIACALYEADHVVSIINPAQIRDFVRTKLGRNKTDGVDASHIREYCELFKPSPWAPPSEAHRRLGELQTIRSGIIAGLTEWKNRKNSGIVDAEAQALADATISHFTSQLGAVDKAIALTIDNDCDLQSKRDLLLSISGVGETLAGVVLAELPGPDVLRSSAEVVAYAGLNPRQHQSGTSIDRATRISKIGNAVLRAALYMPALSAMRYNSAIVALVARLKSRGRLKPKQIVVAAMRKLLVLCFGVLKTGRPFDAAIAMGG

SEQ ID NO: 239515 - protein, 400 aa, unidentified
MLHVASRAGAKEGAKPRPKPRPAKRRRTADRLRPDARVDVVAEPDRRSSCIANPNSRLNGPSTPSSNPQGRDATMQHDSSSHDSSSQPVVGIDVSKKTLDVFIDRLNQRFRLDNSESAIAGLIDRLRAAQVRLVVIEATGRYHRRVAATLLAAGINTSVVNPQRSREFAKAMGKLEKTDAIDALVLAEFARRIDPKPDQIEQKNQTILADLVSRRRTLVQLRVAETNRSHDELPKLAANQSKALLRLIEQQIEDLDREIARLIEADDDWHNKSQIIDSIPGIGPNSANQLVVDLPELGKLNRQEIAKLAGVAPLNCDSGAFRGQRHIRGGRHDVRITLYMLAHNAVLYCPRFKLFFDQLIARGKKHKVAMTACMRKLLITLNQMVKTNTTWNAQLHPELT

SEQ ID NO: 239516 - protein, 327 aa, unidentified
MLYSGIDIHPKVSYCVVGTANGEIVKEEKIKSDKNKIEEFYSGLGKVKVVFEATTNYEYFFEVFEALGCEVVLAHPFKTRAIAAARIKTDKISARILMDLLRADLIPASYVPQKDIRDLRKLTRHRIFLGRYRTQMKNRIHAELIKKALRYPGPDVFTLKGIKWLKQLNMPLIDSYVSIFKSIDKELKLAENKIKISGKNYPQVRLLVTIPGISWYSAMIIYSEIGDITRFPSEQQLFSYAGLVPTVHQSGDNCYYGSITKQGTKNLRWILAETLLVHIQCCPDSKITQFFYRLKKHKPTNVARIAAAKKLLQVIYHMLKNETVFQN

SEQ ID NO: 239517 - protein, 394 aa, unidentified
MCQHYQTEASMTKHNILFIGLDTHKTFTEVSYIEDQRGAKSIHLGKILSNKTAFKKLARQLQSKYPDATLHFVYEAGPCGYWIYRLLTSLNHCCYVIAPSLIPKKPGERIKTDKRDALKLAKLLKSEDLTPIYVPEPEDEAVRDLSRARETGMKDLKDGKYQLKALLLRNNINSKVKDNWSLQHLRWLTELILPHPCQQIVLQEAVSTITERLKRLKRLDNELTHQVKKWRFYPVVKAIQALRGVRLLVATGVIAELGDLSRFDHPRKLMSYLGLVPSEHSSGGKRHLGAITKCGNSRARRLLVEGAHSYKHNANISKEMQLRQEGLSKEVIDMAWQAQLRLCRRYNRLMHKGKHRNVAVTAIAREMIAYIWAISREVVLPKVDVKLRISRMPA

SEQ ID NO: 239518 - protein, 444 aa, unidentified
MEQSTRFVGMDVHKETIVVAVTATGEVGKATAYGTFPNTGAGLEKLVKRLRQAGSGPIKFCYEAGPCGYGVHRTLTRTGEDCMVVAPSMIPRKSGERQKNDERDAAGLAVLHRGGLLTAVGVPDAAHEAMRDLIRARLAAVRAVRAARQQLSAFLLRHERVYPGNRTCWTKTHRGWLADQAFAQPAQQIVLEESVEAVRLSEQRRHRVDGHLRAQIPTWSLFPLVQNLCALRGLDMIAAAGLAAAIGDPSRFATAPHFMAYLGMVPSEHTSGPKRRIGAITKAGEVHARTLLIEAAHSYRYPARIGRHKLTAVDAVPEAVRAIAWKAQTRLCQRYRQMTAKGKPNQVVVTAIARELAGFVWSIACITSDPVVSGNVVTEAYDEGTILWNEVTIASEEVARQIQQITPDTGRPRAPRHQSLKGTARRASKTGQTRAGSVDRSRTG

SEQ ID NO: 239519 - protein, 346 aa, unidentified
MENIALDVHKHYTWARVENREGQQLYASRLAHGRGCIKNFVQRWTPGSPVAVETVGNWYWVVDEIEAGGGKPQLVNARLAKLMIGNVNKSDKLDAKGLNMLQRTGTLPTVWIAPSGVRDARELPRTRMVFSRQRTQLKNRVHSTLSKYGYVVDEVSDAFGKRGRQIIEELSNKLPPHTKQALDHVLDQLDEVMENLKAIETDMIQVFAPCPQTSWLQSLPGVGQILAVVIWTEIGSIERFNRAEQLASYSGLVAREHSSGGKFHYGAIRRDVNVYLKWAFVEAAGSAIQNRERCGYQHIGQLYERIKPRRGHNRAKVAVARHLAEASFWMLKKGEPYREPRLSTQR

SEQ ID NO: 239520 - protein, 390 aa, unidentified
MRRIGLDLGVRHIAYCEVANGKVVARYSVKSLDELARQLGPGTEPALVAFEACREGWFVHDKLVEWGHDAKMLDTTRIRQMGVGQHGRKNDPIDAEAIAKALDSGHIAEAHVLSPMRRALRAQLSVRGALVETRAQYVTTIRGLARAAGVLLPTCDTSSVVGKIDGWKLDAATRALVAPLVAMLKTLEIELVRVEATLAAMAEKDPILTLLATAPGVGLIVAATFVSVLDEATRFKNAHSVGAYLGLVPSESTTGGPTKRRLGSITKQGNRVARSMLIQAAWTIYRLRDTNDPLKRWVTHVAETRNKRVAVVGLARKLAGMLWAMWRDGTFYDPREHAEKSARGVEREARQKLGRAKALQRAAAKLRRPSKIAKAPAVTSPRKTSKGSAM

SEQ ID NO: 239521 - protein, 358 aa, unidentified
MNTRRVQDFVVKGKEVFVGLEDSKTTWKIAVRCDKMLIHQAAMEATYPVLKRYLDNKLPQCGIHLMYEAGFKGFNLYDRLTEDGIDCTVIPPHLVTEPKVNKVKTDKRDARRLALVLQNHDFRDACHVPDNERRADRQISRTLIAVQKDIIRTRNRTRKFLDFHGIEVPFAEEGRWGRKEFMALKELPVREPLKISLNVLLTILEQLWNQMTTLRASLRELCRKERYRKAFEIARSLPGIGWYTAIRLVLELGEDMTRFGSGKKIAAFVGLTPGEHSSGETTWKGRITGMGSGFIRSVLIENSWVAIRKDPALMAKFMRVRKSSGSKKKAIVAVARVLIVRLRACMVSGTPYATGVIR

SEQ ID NO: 239522 - protein, 358 aa, unidentified
MPLLSRRFVGIDLGKRTYELRLFDRSGSVTGWNGTTSPDGRKSLYERLLPADKVAVEVCALAFVIADEIAESVGCEVVILNASKLAIIYRTTKKTDKEDALKLARLIKIYQNEDLPIVHPPSKQEIYRRRLLAEHRQLKQDKTRCINRLHALFVHSGITSIAKKDLAGRKRRIASVELLSGFLKESALRILDSLALLDSQIKIIEDQIDTIASQDERIQSVQTIPGVGPVTATAFVSYVNADNFSNLSQVASFLGLVPKIDCSSSINRYGSITKCGNSYLRSLLIQASWALVRSPSGGYLKDQYLYMTKTKGKLKKKAIVAIARKLSQFMFAILKSAQPYQPRRFVSPASLASAALSG

SEQ ID NO: 239523 - protein, 325 aa, unidentified
MDIVGIDISKAKFDTALLLGERVRHAVFSNTEAGFQQLLAWLAKHRPDPTVPLRVCMEATGNWGLELADFLHAQGVRVSIVNPARIKAYGESELARNKTDKLDAGLIARFCRAHVPPAWVPAAFHLRELRELVRRCDALKVARVQELNRQKSGFASPVVARSIAAHIGWLDEQIEAVMDEARHLITADPTLSKNLALVRSITGFGEVSATILLAELPNIADFTPKALAAFVGLSPSEHSSGASVRRPGKVSRIGTERLRSTLYMCALSAKRTNKPLAAFVARMTAAGKPPKVILVAVARKLLVYAHAVIRTQKTFESSPDARFPA

SEQ ID NO: 239524 - protein, 370 aa, unidentified
MKQQTKSSNITVGLDLGDRRHRFCALDERGEVVEQDSICNDRVSLRKLAGRYHGALGVMEAGAHSPWISRFLEALGWRVVVSNPRKVRAIYQHERKSDQRDALMLARIGRMDLALLYPVRHGTAEAQQDLLRIKLRDSLVRARVAVINSVRFTLKSLGYTVRNPSSARFHKVVMEEVPESVREMITPSVQALAELTARIKMLELEINTLAQMKYPQSAQLQQIPGVGPITALYFVLKIEDPNRFAHVRDVGAYAGLCPRRDQSGESDPQLRISKRGDAYLRRLLVSAAHYILGPFGPQSALRAYGLMLAADGTARAKKRATVAVARKLAVLLLSLWKSQQPYQPFSRSLPKWRARGPTIWNDCAASHGSD

SEQ ID NO: 239525 - protein, 362 aa, unidentified
MRIIGCDLHARQQTLAMLDTTTGEVVEVTLKHEGDNVREFYSSLPRPVRVGIEATGSMQWFLNLMEELGIECLVGHPAQIRAAEPRKQKHDRRDADLILKLLAENRFPAIWLPSKELLDLRALLRHRHQWVRMRTRIQNALQSIALANGLRRGTSLWSQDGQSRIAALPLAPHTAYRRSELQALYEKFEAEIEKLNQRVQEQASERSGARLLMTHPGVGPVTALATEVFLGNPARFADSKALASYVGLIPREYSSGGRQRLGGLTKQGNPLLRFLWGEAGAHAARKDAELQRFYRRKLVQKGLGKASVAVARKLGIRLWIMLRDQIEYNEFCRRGQKQQKSSEACAGMPETRNGAKSHRPID

SEQ ID NO: 239526 - protein, 403 aa, unidentified
MYYVGIDVAKEKHYVCILGDDREVASKPFWIYTDILGLQKLEKRLAELSNNKDEFIIGVESTGAFSENLYEYLTDSDYKVILLNSYQTAKFRDFSTMKKIKNDAIDALVIAELLATGKYKESHISNDAYHSVKVLGRLKASLDKKIKSIKREISTVMATVNPEIAKVFPNIFTKTGLAIIKEYPTATDIASATPKKLTRLFRHIRGNNFSEDKAKLLIELAKSSVYAGRASEARALMITTNIRILELYCQEKLQIEAQIKELIESEIDAIDNTVENIKSIPGVSIKTIASLLGECGDLRRFDSAKSFIGYLGLYPTQYQSGNSLSVGRLAKRGIPIAKHALYMAAIGSVLHNPQLKKLFYDKISSGKSKKEALIILSKKLATIIFAIAKHNKPYDPNRVFIPN

SEQ ID NO: 239527 - protein, 370 aa, unidentified
MLDTTTFVGLDVHARSIKAVSLDVMTGEVRCATFGYDAGAVAGWVRSVDPKARCVYESGVTGFDLQKRLSGLGVDCVVGAVSKMIKPSADRRRKNDRNDAEFLARMLSVGNVVEVWVPDDECEAARDLTRALEDARDDLSRSKQRLSKFLLRHGLVFDERTPTGRRKGNWTRAHWSWIESIRFAEGADNEALAYYVDAVRRAAEDKARLEGLVEAEARKPRWRKRVDSLRCLKGVDTATAADLVFEAGEFSRFRNARSFAAWVGLTPSEHSSGESDRRGAITKAGNKHLRKALVEAAWHYLTCSGRPKDLAKGQAPDRGARRHAAKGVRRLVERREALLARGVHNNKANVATARELACWVWAVGLMAEEA

SEQ ID NO: 239528 - protein, 458 aa, unidentified
MRQRGRRTKGMEEAHPFAGMSQVNQDAAGVDIGAEEIVVCVAGAESTQIVKAFGNYTVDLQNIGRWLQEHQVKTVAMESTGVYWIPLFEELERQGLECLLISSRSLRRVSGRKSDIQDAQWIQTLHRYGLLESSFRPQGELVALRTLLRHRAQLLEHRSPHIQHIQKALLQMNVQLSQALSDVTGETGLAIIRAIVAGERDPHKLAGLRDRNCKKSAEEIGKALTGTWRAEHLFVLKQALELYDFYTQQVEACDAEVDRMYAMTRPDWEAGELKALPQKKRNSHSKNAPQKQAEIRKHLQRISGVDLSVVDGFGVSLAQTVIMEVGTEMGKFPSEKHFCSWLPKVAPKHEISGAKVLKNKTLKTKNRAGQAFRMAAQSVKRADCVFGSFYRRLKSRLDKAQATVATAHAIARVVYRRLKYKVEYEKINVEEYEQKYKDQQIKYMQKKAEKLGFQLVPA

SEQ ID NO: 239529 - protein, 341 aa, unidentified
MNKVAIAAIDLGKHSFHLHAQDDRGHELYRKKFTRVTLAQHLANLEPCTVVMEACGGAHFMAQEVAKLGHTPKLIAPHLVRPYVKSNKNDFADAEAICEAATRPTMRFVPPKNQAQQALAMLNSTRDSFIKDRTATANRIHAALLEVGISLAPGFKSIKELPAWLEASSLSERFKKILMKLHEHFNHLDEQVKTLDKDVESQAAEDDLAARLMTMPCVGPITSSALAAELGDGKQFKCGRNYAASIGLVPKQHSTGDKTVLLGISKRGDRNQRRLLIQCARVYLMQLERQRGWLADWVRQLLAHHHSNHVVCALANKMARIAWAIAAHHTEFDAGPAAMNT

SEQ ID NO: 239530 - protein, 355 aa, unidentified
MNQEKYIGMDVHDATISAAVKNAEGKLLMECVLETKAATILEFIQGLRGTLALTFEEGTLAAWLHDLLKPHVSRLVVCDPRKNALMRDGNQNDRADARNLAELLRTNQVHGVYHGKHGIRALRELGRSYLTLTKDSTRVMNRIKSVYRSWAIPCAGTSVYSRRHRDQWLAKLVEPGVRIRAEHLYQQLDSLEPVRQAARRELLRESRKHGAVKLLRQIPSIGPIRSALLVALLQTPHRFRTKRQLWAYSGFAVQTYDSGEYRVVRGKRQRNRERITVRGLNRNHNHDVKNLLKGAAISASERPGPLQDFYAALVEKGMRPSMARLTLARKIAAITLIMWKKGVSFDPQQLQRQAA

SEQ ID NO: 239531 - protein, 342 aa, unidentified
MKSATTIGIDLAKNSFSVYGVDDKGKTVLSRTLTRAGVVRFFANLPSCLVGMEACASSDYWARTIESLGHEVRRIHPQYVKAYLLGAKNDTNDAAAICEAVQRPNMRFVPHKSPEQIDIQCIHRTRQGYIKSRTALVNQARGLLAEYGIIICQGISAIRNQLPLIIADEENALSGLMRRNIASLYESICFFDSQILEQDKLLKTVAKENEACQQLMQVPGIGIMTATILLTVAGVASNFKNGREFAAFVGLVPRQNSTGGKTRLLSISKRGDCYIRTLFIHGARSAITRILAGQTPKYRPNPWVIELIARRGRNKACVAMANKTARIAWSMLAQGTEYRHAA

SEQ ID NO: 239532 - protein, 365 aa, unidentified
MDNYIVSCDAHKRYSLFGTLNPSTQAHAHTRVEHAPGAIRTFLAKFPEGTPVALETVGNWYWIVDEIEAAGCVPLMANAGKAKLMMGHVDKTDKLDADGLLTLLQVGTLPTVWLPPGPVRDSRELYRTRMALCKQRTGLKNRVQATLAKYALSVDDETDIFAGKGRKQLELTIQSLPAETGRCVQQELQVLDYLQTQIRAMEKRIRECVKLTPTMQWLKTLPGVGDILAIVIGLEMGPADRFARAEQFCSYCGTVPRVKSSGDTTHYGHTRKQCNHYLKWAFFEAANVAARHRNARSWREKHVVRLYERVRKHKGHGVAIGAVARHLSEAAYAVTLRSEPYREPDPSRACPSRGKREAKLAPREP

SEQ ID NO: 239533 - protein, 274 aa, unidentified
MSQPGSLCVDIDVSKAILDIAASSAIEQFSVGNDSDGFDAIIAELRMYAIALVLMKATGGLETAIVCALQAEGFELAVVNPRQARDFARAMGYLAKTDSIDARVLSQMAEVLNRHPERERFIRALPDTECQVLTAMVVRRRQLITMLVAERNRLHPAHPLNRKSINIIIKALEDELARLDADMNSHIHSHFKELAKRLSSIKGVGTMTAAALLAEVPEQGNLSRREISALVGMVPVNRDSGTMRGRRTIFGGRAGVCQRRMKSDPLISPPTAQY

SEQ ID NO: 239534 - protein, 370 aa, unidentified
MEKDTTYVALDDSKRKIVAGILRPNDTVPELREIANDPHHIRRLLTRLQRERPVSACYEAGVSGYDLYRQLRALGVACHVIAPALTPRRPGRRIKTDRRDAAKLVHLYRAGELTAIHVPDEVEEGGRDLIRCRDDIRRDVLRWRHRLLKLLTRHGRMYVAGRNWSQAHWRWIREQRFDVPPLQRAFEATLFTLEQALARQAELDKEIEALAATVPYREPVGWLRCFRGIDTLSAMILLAEVIDFQRFHRPRELMAYLGLVPSEYSSGETQRRGALTKAGNAHARRVLVEAAWHYRHRPTIGHALATRSQGQPPAIVAQAWRAQQRLHRRYRHLVVGHGKRPPVAVAAIARELVGFIWAAMTGHESRLQTA

SEQ ID NO: 239535 - protein, 339 aa, unidentified
MQVTTVGLDLAKNVFRVHGVTDGDEVAFNRALRRAQLLPFFERLEPCLVGIEACGTSHHWARELIKLGHTVKLIPPIYVKPYVKRGKSDAVDAEAICEAVTRPTMRFVEVKTPAQQAILALHRTRDLIVRQRTQTINMLRAQLAEFGIVFPQGVGHATQFAKRVLEGEQPDLSEVAGDVIAQLSEQLLFLHGKVAWYSLEMTRVAKREDRVALLQTIPGIGPITASAIVATVGTGRQFNNGRDFAAWLGLTPLNRSTGGKERLGRISKMGDRYIRRLLVIGMMSRMRQIMQNPERYDPWFADILARKPGKVAAVAMANKTARMVWAVLTRNEPYKVRTT

SEQ ID NO: 239536 - protein, 401 aa, unidentified
MPRQGFIGLDVAKDTFTAAFLIVDALSGQILHEQIATFSYDHPGWQRFLATWEPLHADFWWIGLEASGPYSALLEAHLLRLHRPNVSLHRLSPLQVRDFARARSRRRTKTDRLDACTIALFLRQPLTVQALPAPLQDHTPLRALAHLDQHLAQELTRTQNQVRQLLHFLFPELERAYARFPKALRTLLRHFPSAHAIAQAPLQDLHALLPPRHRLDLEALQALARASFGLHDPIRAQTLQLLLDRWAFLETLRARCFAALQQAVRPHHPQAWRLLRTIPGIGPRLAALFLALTGPLDRFPDRKALIADAGLDVTLHPSGRFAGRCRLSKRGDPLLRHVLYLIAAALKRYTRRFAQAFAYYRHQGRAVRETLVILSRKALGMLYHLLRHQVPFQDLPQPAPV

SEQ ID NO: 239537 - protein, 371 aa, unidentified
MTEGITYVGLDAHQETIHAALLRSREGKALEDSLANTPEAIRRFVRRVQRRAPGEVVCCYEAGPLGYGLMRELEALGLRCVVVAPALIPVRPGDRIKTDRRDARKLAELLRAGLLTAVHAPTAAQEAVRDLTRAREAVKRDQIRMRHRLSKFLLRRGLRWTLGRKAWTRAHLEWLRGRRLEHAADQAILDDHLLGLEQIESRLEALDAKLEATAQEAPYREPVGWLRCFRGIDTLTALAIVAELHDWRRFDSPRALMAYLGMVPSESSSGGQERRGAITKAGNVRLRRLLVEAAWHYRHRPGVGLRLRARRVGQPARAIAIADRAQHRLHARYARLTARGKTHNKIVVAVGRELVGFVWAALDAKSLAPTA

SEQ ID NO: 239538 - protein, 358 aa, unidentified
MKKIRHWILDGKVVYVGLEDAKKTWKLCVRSGKTVVHETSMPALYEGLKHYFRNRFPSCKIRLMYEAGFRGFELHDQLVADGWECVVTPPHTVTQERCSKQKNDRIDCRRLAKNLENGDYKSCHVPDRQRREDRQVSRLSVQVQRDIARVCNRIRRAIDFHGLEWHFPAGNWSARHYREAEEKLTKIGLSESLQFTYQMYFRQLRELRSMKLQVLRQLRAFGRSDRYRKSVEILESAPGIGMLTAIRLALEWGDVTRFSRKEEFGKFIGLTPSDYSTGEQDHKGHITKQGNQQVRAWLIESAWVAIRHDPVLLEKYNRVISHCGSSKKAIVAVARKLSIRLRAMLIRGEPYQIGLLEC

SEQ ID NO: 239539 - protein, 386 aa, unidentified
MQKLNDLSRSLTALELDSTLIAVIEMSLSNWLVAGIVPGIERQPLKKLAVDESALLKLLHRWREEAEKAGRRIERTAVAFEAGRDGFWLARWLKAHSIEAHVIHAASVAVSREHRRAKTDRLDSELLKRAFLGWLRGERDHCKMVAIPSIKDEDAKRPNRERESLVGEQSRIVNRMKAALIRLGIRGFNPKLKRAAGRLDGLHTPEGEPIPPNTLAELRRDMERRRLVSNQIRQIEEARLERLEQAPSDGPHAMVRLLARVIGVGTETADMLVQEVLSRNMRDRRAVARYAGLTGSPDESGRKCREKGLARSGNARVRRGMIQLAWRLLMFQKNSALAQWFRARTENARGTRKTMIVALARKLLIALWRLVREGVVPDGVVLRPAQ

SEQ ID NO: 239540 - protein, 419 aa, unidentified
MKNENYAALVALDWGDKTHAFARQPAGSERIEQGQIEANPEALHAWLEQLGQTYGGQPVALAVEAGRNALLHALLEYPWLRIYPVHPATSARFRTAFTPSGAKDDGPDALVILTLLRMHRAQLTPLVLDTPATRELAALVLARRSAVDQRTGTANQLASVLKGYFPQALKLAGDDLTAPMALAFLRRFPELAAVKRVRPKSLETFYREHNARSAERIAERLALAAKARALIADRAVIEPSLLEVALLVDLLEVHARHIGRLEAGIAAAFAAHPRAELFAALPGAGPALAPRLLVAFGDRPERYPTAAALQKYAGVAPVVEKSGQKKWTHWRWSAPTFMRQSFVEWAGQTVVHCDWAHAYYQQQRRAGKAHHAILRALAFKWIRILWRCWHDQKPYDESRYLASLRRHGSTLTPALQKTA

SEQ ID NO: 239541 - protein, 316 aa, unidentified
MDGSITSFVGIDIAKRSLDVCLLPEGKHLSLSYDTAGLKQLFSWLPEAGSCLIVVEATGGYQRRVVAQLADAGHRVAVVNPRQVRDFAKGLGILAKTDRLDAQVIARFGQHVRPRTLAKTHEKQDELAQLVTRRRQLIELRTAENNRMETLVSKPVRKSVQQVVDLLNKQLKRIEKEILALLESDDEWKDKGEIIQSAPGIGPVTTATLLAELPELGLLNRQEISALVGLAPFNRDSGRFHGKRSIWGGRASVRSALYMAALTARRCNPVIRSFAQRLEAQGKPYKVIMTACMRKLLVILNTLVKTNSPWNPDYAQ

SEQ ID NO: 239542 - protein, 402 aa, unidentified
MIFINCLGIDIGKSESVVAHYKDEVLVKEMVIQNNQNGYRYLKNYIKHLDSLFILFESTGIYSRGMKRFCEIHKIDYLEMNPLEAKFKTRSLRSWKTDKSDAHKLALVAFRMKDSKVQRHPEEIYFELRERARFHLEMEINQNRLKVELVETLHQTFPGLEKLFTNRYSKIALNIAKAFPHPDFVSTLTHDELVEKVLHSTDKGISVNKAHKYVQKLIEIKNNSFPNVHKSSFLLQKVQYLCDKLLIGIEEMKEFDQEMIDLAKNTTEFENIISIPGIGELTAALLIGELGNIREFKTNKQLNAFVGIDIKRYQSGTSKSRDTINKRGNKKARRLLYLIIMNIIRGRNHYQSHIVDYYYKLREQPHGKTHKTAVIASINRLLKTIHYLIVNNKLYDYQKAPH

SEQ ID NO: 239543 - protein, 373 aa, unidentified
MAMMQHRQVRYIGLDVHRASIAVAIADEGAPSSYGNIANDPSAIRKLMTRLGGADVELRVAYEAGPTGYALHRQLASMRIQCMVVAPSLIPKRPGDKVKTDRRDALKLARLLRSGDLTPVWVPDEAHEALRNLVRARADAKADQLRAKHRLSKFLLRQGCWPPVGVRNWSVRYFQWLRQLHFEHVADQIVFSDYLAVVTAAGERIKHLEAALHQCAQDSSQVAVIRALQAFRGIGFLSAVAIVAEAGDLQRFRTAPQFMAYTGCVPSESSSGRTQHRGPITKTGNGLLRHILGEAAQHARHAPRVAGTLKQRQADVPQPIVDLAWRAQLRLHARYRHLGCRIGTHKALTAVARELAGFIWAAGQLLEEAPAAA

SEQ ID NO: 239544 - protein, 362 aa, unidentified
MNINIGVDLHKTQFTVYFRTGTGSYREYATNEQGYGSFLMYINTLREKGHTVRVGVESTGNTRFFKNYLEREGIEVKVINTLKFKVINESVKKTDRHDASTIAEFLEKDMLPEARLCSEKSEELRRLLKVRKTLVRTIVTIKNQIHGLLTGLGMEDTRSSLQSKRGRQAVLDALYTTGNGLAVQPLFEIINHLQADVKEIEKKIEELTARDSAVETLLTIPGCGPITAWTIRAFTDDITRFTEPKRYASYAGLTPWVQCSNLISHYGRITKRGPEELRTALVQLVMGMNRSRMTQDYRIMNQYRTMKKSKGSGKSIIATARKLSKIIWFMLTYNKPFNPGLMLDMNLYDKADDMRTAVKKTA

SEQ ID NO: 239545 - protein, 429 aa, unidentified
MSEEKAIELRVSVDVGSRRHSVAMGLSSGEVLEEFEIEHRPEGFAEFFSRIEKHQKTKSCAVAVAMEGYNGYARPLDSMVRQHGYRLYNLNNLKFARFKEIFPGGAKSDRIDARKGLELFQLSDHLPLAKEVLQEVKGTPQENEILKRLSRRRRRLVNERVRMVNGLQADLQAVCPGLLEITAEASNQWFLNFLLSAQTLPQLSRLRHSTLMKIPCVGVKCAAKIEDWQKRAHFSDEVEWVGEMIQEDARRCLELDEKIKRLRNKIAEIATDSKIAKTLRSIPGFGAVCTSELAGEISTVERFTSEGSLALYLGMATLDNSSGKYQGTKAPKQVNTRAKAAMMIGVDRHRKYVPESQQYYEKKRAEGKKHNQAIRALGRHLCRIIYRMLKDEREYEVRPGKGNTKTKVGPTACVKTQIRRPKISGKKKK

SEQ ID NO: 239546 - protein, 375 aa, unidentified
MEHHSEAFVALDTAKLRNAVAIADAGRNGEIRYLGEIDNTEAETRKLVAKLASKHARLTFCYEAGPTGYGLYRLIKSIGHDCLVVAPSLIPSKPGDRVKTNRRDAVNLVKLLRAGELTAVWVPDERHEAMRDLVRARDAAVKDYRIKRQNVSSLLLRLGRHYPGKKTWGRTHLNWLTGLKLEHREQRIAFEEMLLAVRQVRERIERLEQAMREAVADWSLAPVIEAVQAMRGIDMVGAVAFLAELGDLSRFENPRQLMAYLGLTPSERSTGENVKRGGITKAGNARARRLLIEAAWSYRFPPRVSKDMQTRIGAAPRTAREIAWKAQMRLCGRFRTLTRKGKRPTIVVTAIARELSAFIWAINREVVLSHAQANQ

SEQ ID NO: 239547 - protein, 328 aa, unidentified
MCTLGIDVSKNKIDLCLLTAGPGGKKKHKVLTNEPAVARKVVDWLNAQKCVPESVTGVLEATGIYHENLAYGLHEAGVSVCMANPCRVREFAHGMDILNKNDAVDAFVLACYGELKSPAVWVPPSPEVRKLRALLRQRDALREDVQRTVNRLEKANSTSTPQEVIRSLERTKSWLNEELARIEKLITDHTDNDPGLKADLDLLKSIKGVKDQVGREMLALLKDGMFKSASQVAAYLGLTPVEKTSGSSVRGRPHMSKTGPSGVRAKLYVAALTASRWNKQAKAIYERLVAKGKAKKAALGAVMRKLVHLCFGVLKTRLPWDENYVATA

SEQ ID NO: 239548 - protein, 434 aa, unidentified
MWKDALLVVFQKASDEFLGGAAMEVVYPRCSGLDVHKRFVVACLSLIQNGERHKEIRQFSTMTSDIQALKEWLKAAGCSHIAMESTGVYWKPIFHVLEGEFEICLVNAQHMKAVPGRKTDVKDAEWIADLLQHGLLKASFIPSSEQQAVRDLTRTRTRLIQERNRLVNRIQKVLEDANIKLASVVSDIMGMTGHAILTALVAGQEDAECLAHLAQGKLIKKQDQLKAALQGKLISHHRVLLGELLQLIATLDRSIAHLDREIAERLRQHDGLIDRIDEVTGLSRRSIEVLLGELGWDMSRFPDAAHAASWVGICPGNHETGGKRLSGRIRQGNRWAKTVLIQAAHAAAQTQTYLGEQYRRIRTRRGAKRAAVAVGHSILVIFYQMVKTGESYHEKGSDYFITAHKQKIQQRLVRQLERLGNTVILQPKGETALA

SEQ ID NO: 239549 - protein, 320 aa, unidentified
MNQVANPLHVLGCDVGKDKVVIFDSVTGVIAEVCNTQKALAKAIADCGMKSDSLIVCEATGGFEAPLLAAAATANIPAHRADPRKAAAFIRSLRSHGKTDAIDAEALARYGLERGDRLPRWQLPTKAQSDLAQLVRLRADLVQTHGDYTRRAKAPGRGRSEKHLKATIRVLTTRIAAVEADISEVVLADKQLSQTVDTIQEIQGCGPKTALLLTALLPEIGQLNRKQVAALAGVAPHPRQSGKADGYRRITGGRPAIKRGLFMAAMAARQHNPKLRAFFEHLRAAGKPKLVAMMALARKLVTIANAKVRDAIFAPKSELC

SEQ ID NO: 239550 - protein, 445 aa, unidentified
MLEGLPPLNLNAAGIDVGNAEHMVAVPPGRDAQPVQSFGSFTADVHRMGRWLKACRVDTVVMQATGVYWVALYQILETYDLDVKVVNARYTKTLPGRKTDVLECQWLQKLHTFGLLNNSFLPNEETRVLRTYFRQRENLVAAAGTCMQHIQKALTEMNVQLANVLSDLSGATGMAILRALLRGERDPQRLAKLKNQRVQASREEIARSLEGNWREELLFVVEQSLAMYDTYHEKIAVCDQRIAAHLKTMEAKVDVEAQPIPEARRGKWPRKHQPRYNLRGELYRVTGVDLTQMDGLDVLTAQTVISEVGVDMSPWRTEHHFSSWLGLCPDNRISGGKVLKRGTRQVVNRAATALRLAAQSLWRSQSALGGNFRRLRARLGAPKAITAMAHKLARLLYRMLKYGQAYVDKGIAYYEEKYRQHQVKWLQKQAAALNLQLVPSTGVVS

SEQ ID NO: 239551 - protein, 427 aa, unidentified
MAGIETGGQEPQFAAFVGIDWADQKHVWCLQSWDSTKREIGELKHTPEAVEAWVAQLCQRFGNRPIAVALEQSRGSLVFMLAKYEPLHLFPVPSTMSASMRKALYPSGSKDDPRDADVLLDLLLQHRNKLRRLSPDTEPTRRIQNLVEERRKLVDEKTEHTNRLTSHLKIYFPQMLNWFEHLDTGLVCALLERWPTLEELQKVPPAKLRTFFGKHHCRDQELIEWRILAIRQSIPAIQDRAVIEAKSAAVKVIVQLIRILLEGIADLDERIEEAAAAHPDFFIFKSLPGAGPALAPRLLAAFGSQRERYRNAGEVQTYSGVAPVIEKSGKKQWIHFRWACPKFLRQSFHEWAGHSIGYSVWARAYYRQQRGKGVDHHGAVRALAFKWIRIVFRCWKERVAYDESKYLAALTRRGSTLVALVATAKAL

SEQ ID NO: 239552 - protein, 457 aa, unidentified
MSQTKRSCKSRGLSPVHPAAAAIDIGAALHVAAVGPDRDKEPVRTFQTFTDDLHRLADWFAQCGIRTVVMESTGVYWIPVFEILEQRGFEVMVVNARDAKHVPGRKTDVSDAQWLQRLHEYGLLRASFRPQAEIAGLRTYLRQRERLLDYAAAHIQHMQKALMQMNLQLHHVVSDITGVTGMTIIRAIVAGERDPNVLASHRDRRCHASVETVCQALVGNYREEHVFALTQALELYEVYQTKVTACDEQIEAILKRLKKNAPPPASKLLPVRQRTHQPNAPAFDARGALHAILGVDLTQINGLGPYLALKLVGECGTNLAAWPTAKHFTSWLGLAPHNKISGGKVLSSKTRRTSNRAASLLRLAAGTVGRTDTALGAFYRRLSARVGKAKAITATARKIAVLFYNTLRHGMAYADPGATYYEDRYRQRVLNNLQRRAKSLGFVLREAGLDAARADVS

SEQ ID NO: 239553 - protein, 316 aa, unidentified
MLEAVKKCVAGLDIHKKTVMCTILTEKEGGNLRKTTREFRTFRDDLTCLAKLIYDSKVELAVMESTGIYWKCVYEEIEAMGTPCYVVNARHIKNVPGRKTDVSDSEWLAELARCGLLRPSFVPPKDFREIRMLTRYRKKVISMQASEKNRLHKILESAGIKLGAVVSDIDGVSAREMIAAIIKGSHTLEEIVQMARGRLKMKEDDLAKSLKGRISDRHRFLLKKIKNHMEWLENHINEIDSQVEQAMIPYKKEWQLLQTIPGVDKISAAMLLSEIGVNMKCFGNKDRLSSWAGMCPGNNQSANKKKVVAQGTAINL

SEQ ID NO: 239554 - protein, 328 aa, unidentified
MFYLGIDVSKAKLDCCLLVDAEQLKRRSKSLANNASGIAELITWVHKHGVACDDLHVVMEGTGAYHEQAATALYDAAVQVSIVNPAQVRNFAKGLAVQNKTDAVDSFVLARYGALLKPATWSPPPVHARVLRSLLARRDAIAQDLQRERNRQEKAQACETPALVQQSLDQGIAFLEKQLAQFEQDIDDHIDRHPDLKGDLTLLTSIPAVGPKVGHHMLSVMHCHHFESAEQLAAYVGLVPVQRQSGTSLMGRARLSKTGPAHIRAVLYMGAVVAIRCNPHIQALYERLLRSGKAKKSALGAAMRKLVHLCFGVLKNRQPYQADFAKNT

SEQ ID NO: 239555 - protein, 416 aa, unidentified
MDDEVYYERCAGIDVHKNFLVVCLRIGRKAEVRTFGTLTHEIRDIVAWLKDNGCQMVAMESSGSYWKPLYNIFEQEGLPAMVCNAYHIKNVPGRKTDMNDAQWIAKCLSLGLLNPSFIPDREQRELRDMTRFRKSQIEERSRNLNRLQKFLEGANIKLGSCVSEIEGKSATALLELIIEKPDFTIDDVAERMHRGLKSTAEELYFALEGSITPTQREFFTHVMSVIREQSAQIEKTDLMIQRSLNDNYKEAVEALCVIPGIGKISSEQILAEISPDMSRFKNQHSLSKWTGVCPGNNESAGKRKSGRTPPGNKTLKSTLTQCAQSAKKNKNSFFSAQYARLVTHRGKNRATMAVAHSLLIAIYFVLNGYEFKDLGADYYLKFNREKKINSHVKQLSKLGVTFPEDVLMDAIYPPVA

SEQ ID NO: 239556 - protein, 326 aa, unidentified
MKNTVMDIDISKDKIDYCLINSESHQVIQRGEVVNDRKELLQFLNKIDLQQTSFAMEHTGQYGAMLSWVLSEKKAFYYLLNPLELKRSLGVHRGKTDAIDAYRIANYAIKNSHAHKAFELPCENLRKLKAMVSTKHQIVKISVQLQNSIKANVILSKTLDIKRMIKEQKAQLKSVKKLINSLAEQMQAVIDSCEQLKKSYRKITQVIGVGPLTAIKCISETDNFTRFINARKFSCHCGLAPFPYQSGSSIKGRTRTHYLKNAALKSILFKAATSAIQHDPQLRNYYNRKLDEGKHKLSVLNAVANKIVLRIFAVVNRDETFIKLNA

SEQ ID NO: 239557 - protein, 346 aa, unidentified
MKKIFIGIDFSKEKFDATLIKAEGLKECAPSMHEVFDNKTSGFRRLVRWVKAQSEGLPIDTWLFCGENTGAYSIGLSNYLYASGYDMCLECAYKIKHSAGILRAKNDKADSNVIAEYAMRNYDKIRLHKPQSASLTCLREVFLYRHSLVRQKVALSVRRDEKRLTQEKSDARAFMSFTSKHLITEINKAIYKCDQKIKETIAADDELREIFDIITSMPGIGVQNATCLMVYTDNFQKFDMDSRKIACYYGIAPFGRQSGTSVNSRPKVSPFANRMIKSLLSQAALAAIKSDINIHSYYQRLIERGKHPLLVHNNIKNKMLHALVAMVRDRIKYNPDYVYQTNKSVA

SEQ ID NO: 239558 - protein, 361 aa, unidentified
MFPQALGIDISKAWFDVVLLPRDDGSSGNRGRLSASAPSVITPAKPLHKRFANVPEGFRQLAAWLTRTGADQVHACLEATGTYGEAIALFLHEQGHTVSVVNPAQTYHFAQSQLSRTKTDKADAELIARFCQLHRPPAWTPPAAELRELQALVRRLDALLDLRQTERNRLAAGPSAETVRESIQAVLTFLEGEIASLRRHIRAHFDSHPELREQRDLLTSIPGIAEISATAILAEVGDVAQFTGARQVAAFAGLAPKLRQSGSSVRGRATLPKRGSSRLRHALYFPAVTALRCNPVIRAMAERLKGNGKAKMAVLGAAMRKLLHLAYGVLKSGKSFDPAHPVASVIDAAVRKSIIHVAAGT

SEQ ID NO: 239559 - protein, 340 aa, unidentified
MEKYIGLDVHATTCTFAVISQGGRRLKSDVIETNGRALVSYVKQIAGRKHLVFEEGTQSAWLYEILRPHVDEVAVTVPKERLRSKSDESDALALAEALRVGGLKTRVHKDRGALGSLKELTLVYSKLLQDSVRAQNRLRAMFRSRGIDSEGLTSFRDEKEWNAWAAKLPPRMRSPARMLCEEMVVIDALLAQARTAMVNEAKKHRAWRILQTCPGLGEIRTAMLMAIVISPSRFRTSRQFWSYCGLAVTTHSSADWRRDREGQWRRREPMTRGLNRAHNRELKEVFAGAAMTVAAKLPKVSVPRSPSYGGQDSSGGGIVIGPSSRQVWSGSSLPIVRFQL

SEQ ID NO: 239560 - protein, 341 aa, unidentified
MQITTIGLDIAKNVFQVHGIDAAENVIVRKQLRRGQIIAFFEALAPCLVGMEACATSHHWARELTKLGHEVRLMPAKDVKAYVKRNKNDAADAEAICEAVRRPTMRFVRIKSAEQQGQLMLHRARDLLMRQRTQLINALRAHLAEVGITAAQGREGIKELLAIIAQDEGSRLPVDAHASLTVLAAQLQAVQTTIGSIEKRIVAQHRSNEASKRLETIPGIGVIGATTITAVVTDPKAFRSGRDFAAWIGIVPRQDSTGGKQKLGPISKQGDQYLRRILIVGAHSVLRRARQQPEKYPWLTQLLARRPFKVVAVALANKMARIAWALLARGGSYRAPQLVAV

SEQ ID NO: 239561 - protein, 402 aa, unidentified
MLDTREIAVFLGLDVGKGDHHGHGLTTAGKTVLDKRLPNSEPRLRAVFEKLRAKFGPVLVIVDQPASIGALPLTVARDAGCHVAYLPGLAMRRIADLYPGEAKTDARDARVIADAARTMPHTLRALDLADETAAQLTMLVGFDEDLIGEATRTSNRLRGLLTQFHPSLERVLGPRLDHPAATHLLERFGSPQALRKAGRRQLVNLIRPKAPRMAERLVGDIFDALDEQTVVVPGTSTLDVIVPSLAKSLAAVHEQRRALEAQISELLEAHPLSKVLTSMPGVGVRTAAVLLVTVGDGTSFPSAAHLASYAGLAPATRSSGSSIHGEHAPRTGNRQLKRAMFLSAFAALHDPASRTYYDRCRARGKTHTQALLRLARHRISVLFAMLRDGTFYEPRVLEPAAA

SEQ ID NO: 239562 - protein, 383 aa, unidentified
MSTQHKYVGFDVHKDTIVITVAESGRTGEVRNYGTISSDLQAVERAAAKLRGDGATLHVAYEAGPTGFVLYRRLQQLGIDCIVVAPSKTPQPKGGRQKTDRRDAELLARLLRAGELTAIAVPDEVDESIRDLARARSDAVDDLARAKQRLKSFLLRLGYHYTGPGNWSAPHQRYLRALRLPLPAHQAVLEEYLLAFDQGIKRVARLDDLLGAQVPRWIHYPAVQALMNLRGFQLIAATVLVAEIGDIHRFAHPRYLMAFLGLVPREATTGDARRLGSITKAGNVHARWMLIETVQSATKPPKVSAPLAARQEGQPADRRELAWKVQCRLYKRGWHLLNRGVLKPKVTVALAREMAGFVWAMLHLVPAPAAPTAGPAGPVLRRA

SEQ ID NO: 239563 - protein, 347 aa, unidentified
MLAGIDTHKDTLAVAVIDDAGRPLVVTELANTEAGFDSLEQLLTAHAVTRVGIEGSGNYGRGAAVHLVLTGSAEVVEVPPSLTSRERSGRPGQGKTDPVDAVAIARITAREPTLPPVRLAVGQAADLRALADYRAQLVAERTALANRAHSELHGLLPGYQAQIPRLTAPSFITKAKDLLAGQTSVRALLTRRRLTRLAELTVEIREVADLITAAVAEVDTRLTELYGLGTVGAATILGEVADVRRYRSRHAFAAANGTAPLPASSGRTNRHRLNRSGNRTLNRVLYTMAITQIRADTEGRAYYLRKRAEGKTGREALRCLKRRLSDVVYKTMHEDLAAGRAPTAIGR

SEQ ID NO: 239564 - protein, 400 aa, unidentified
MRTVFGIDVSKASSEVAILVNGEKVYAYTMPNDIIGFSRLLDDLKTVSNPEIIFEATGVYSRRLQAFLEEYSYDYTRLNPLEAKKQLDGLRVRKTDKIDAEKLASSQFVLNRKPTYVQEEVYQNLHDLSRFYQNLTEDIVRTKNRLHKVLQIAFPEIENLLSTPTGEQYWNLVSIFPTKHWVLELSEAELKEAIRNSTSKRISENRVGNLTEKLVGLAKQSYSGISKTSPMVEEVKYDAQELIRLTNRREQVLQQLIALAEPLPEYEILLSIPGIAETTATSIIGELGDIRRFKSANQINAFIGIDLKHYESGDFLGQEHITKRGNPYARKILYKCIHNIASASHTNPCHIADFYEKRKRQSQITSTKPHTIASIHRLIRTMYYLIMHNKLYDYTLAQSH

SEQ ID NO: 239565 - protein, 459 aa, unidentified
MNRKQRREMIRKIQSEDLSLEMVHPDAAGIDIGNESHYVAVPQTRDSQPVRRFGCTTAELKAMAEWLKQCKIRTVAMQSTGVYWISVCDILEQAGLEVYLLNARDTKNLPGRKSDVQESQWLMKLHTYGLLRNSFRPSQEIRKMRTYWRQRNDLVQSAGRHIQRIQKALTQMNLQLANVLADVSGMTEQAIIKAILGGERDPHKLAAFRDPRVKASEEQIARSLEGNWQEDLLFVLKQEQDGYEFCQQQMAECDRQLEQYLQRREDRSQGASLLEEKRKTRLKKKNGNKPQFDLRGELFRMTGTDLTLIDGIDVMTATTILSEAGWDMSKWKTEDHFVSWLRLCPDNRISGDKTIGKGRLPTNNRINIALKMAASTLRMSNTYVGAQFRRLRTKLGAPVAIKAMAAKLVRLVYRMLRYGMKYVDRGAEFYEAQHRQRQINHLKWKAAKLGFQVIDAPAA

SEQ ID NO: 239566 - protein, 337 aa, unidentified
MQRRYVGIDLHRRRSVVVTMDEAGEVLSAVRIANDPVAMSIAVAEAGEGAEVAFEATYGWYWLADLLKADGHHLHLAHPLAMRGMTSHRRVKTDWKDATLLADVLRMGSFPEGWIAPPELRELRELVRYRAKLVALRSGLKAQVHAVMAKNGILPARVEMFGPGGQAQLDSLDVPMNFTIRIESLRDLVEIYDREVAMLEREIHRQLKDDRGYQAIQKIVGVGKVIGAIFVAEIGDISRFSSPERLCSWAGLTPKHRESDLTKFQGDITKQGNKLVRWAAIEAISGYRGGAKLRADYERIAERRGKYRPRAAVAHKLMVLIYYGLRDGEIRCLERAG

SEQ ID NO: 239567 - protein, 342 aa, unidentified
MQIAVLGVDLGKNSCSLVGLNEAGHVVLRRRMRRETVLSFGASLPPCVIAMEACCGAHHMGRVLAAQGHSVRLMSPEYVRPYVKAQKNDDRDAEAIAEAATRPTMRFVTLKSEAQLDIQTLHRVRDQLVGERTALMNQIRSILLERGHVVAQGRAKLAAHLSGLLDADAEPGLTPRILALVAEVRERWQALDQRISDLDAEFAEQARSDTNARRLTTIPGIGALNATALVAAIGDVSTFARGRDLAAWLGLVPRQVTTGGRPRLLGITKRGSKYLRKMLIQGARSAMPTLCKSDTRLGSWLRGLLSRAHTNTAVVALAAKMARTVWALLRHERVYDSAAGAA

SEQ ID NO: 239568 - protein, 267 aa, unidentified
MIIIGADFHPEFQQIAYVDTSTGEYKERRLQHPEEAEKFYRDLAAQAISVRVGMEASGHARWFERLMAELGLELWVGDAAKIHAKRVRKQKTDRQDAQHILQLLLKDDFPKIWVPSWENRDLRQLLWHRHRMVQARTRIMNQLQAVALNEGLRCKKRLWRERGRQQLEAFRLAPWASRRRRDLLELMDRLNPMIADLSQEIERQASASAEVQRLKTHPGVGALTALAFVLIIGEAGRFHCGKQVASYIGLVPLEDSSGNRRRLGHNY

SEQ ID NO: 239569 - protein, 435 aa, unidentified
MVRYVGLDVHPKEVEACILDGTGRVALRARVACTREALGAFARRQLARQDRVVLEATCNTWSVASLLRPYVADVVVSNPYKTRLIAHAKVKTDKVDAYVLAQLLKSGFLATVWAPPDDVLKRRRLVSRRSGLVSDRTVVKNRIHAILHQRLITAPFSDVFGVGGLEWLKKVPLDPEGREAVDSDLRLLETLDQEIEPMDEALAKEAYGDPRVKLLMTMPGVDVGVAMALLAAWGDISRFPEPDKAAAYLGLVPRVQGSGDKCYYGPITKEGRSHARWMLVQAAQKMDANPGPLGHFFRKLLRKKNRSVAVVATARKMAAIAWQMLTHNEPYRYALPVQTQMKLSRLRVVATGEKRPSGRPKGTKLPNFGSGIRTKTIPSLSEVYEKEGLPPTREFEKLTAAEQRGMQKMGVEVFARDIRKPHTVIITKEKAQKEP

SEQ ID NO: 239570 - protein, 312 aa, unidentified
MDNFIGIDLSKTHLDVAVEPGGQGWRLSNDLQGRQTLLRRLHRLQPALVVLEASGGLERAVAQCLRQAGLPVTVVNPRRVRDFAKALGLLAKTDQLDAKVLAQFAASVRPPVRDWADASTQQLQALLTRRRQLLDMVAAEKNRLPLAHPSVQPQIQAHIAHLEEQLRQLDEQAQQLQQGNAAWQTRIQLLQSVPGVGPVLTSTLLGCLPELGSLNRRQIAALAGLAPFNCDSGQFQGQRHIWGGRPLVRWALYMATVSALRCNQVIQRFYRHLKAQGKASKVALVACMRKLLSILNAMLKHQSPWQPRPLAP

SEQ ID NO: 239571 - protein, 351 aa, unidentified
MEFVGIDWAYRRAAWCAVSASGAIVGEGVVPADEDGLARLVIDGGIEVCGVVEMMSGAIWVRDQLAAAGWEMKIAHARKVRDVAPLACKTDKVDARVLAELCRRDLVPELWVPSFSDRELRERLRRRAHLVRMRASAMNRIFGLLTQWGTRLSLDRLRKPDGMRLLEQRGIPAVWRRSIREAIDVIDLLDSRIAPLEQELTPLARGDARVALLDTIPGVGDLLGLTLASEIGDVSRFASPRKLIGYAGLSPKINQSGDRSRTGALSKAGSRTLRWAAVEAAQHAWRETNPWHRLYTDLAGRAGKNPTKAAVARKILIAAWHILSRQQPFKPPQPVADPAVVSASSRCFLAA

SEQ ID NO: 239572 - protein, 425 aa, unidentified
MNQALSPSPLEGISAYVGIDWADQKNDVVLRSAAEPNKVEYKVIAHKPEALMDWVSQIHQRFGAKGKVVVCLEQTRGGLIYHLMGYEFFELYPINPRQLASFRETFAPSGAKDDRPDADLLCELVRSHRDRLRAWKPDSELTRKLATLTEGRRKAVDQRTELSNEIKSQLKLYLPLVLQLVDNDCSTALAADLLLQWPMLELLQKLSVHKLRKFFYGHNSRSEQKMLERLKLIKEAKPLTRDRAVIEPAALRVKMLAQQLKSLLPFIALYEKEIAQLFDAHPDSFLFRDLPGAGAALAPRLLSAFGSDRDRFKSAAELCTFSGVAPIRIASGKKACAKFRRACPKFLRQSFHEFAACSIRCCPWASACYEAHRARGKGHHAAVRAVAFKWIRILFACWKHRIAYDPDRYLSVLENRGSQYAKAAP

SEQ ID NO: 239573 - protein, 418 aa, unidentified
MKKHSKSSQRSEPTLKRTKARGPVQRDAKEVLAEVLGKLTGKLDAPAVSTSAKENRRRNTVGPNRDRLTVGVDLGDRWSQYCILGLEGETLAEGQLRTTQEDVREFFQALTVARVVIEVGTHSAWVQDVVTEWGHEVLVANPRLMEGSKRRKRKSDRIDANKLARLGRVDPQSLYPIRHRSREVRQDLVVLRARDALVSVRTELINTTRGLVKSMGTRLPRCSSPSFAEKVKDAIPVEVQEAMLPLVQLVETVNDCIERYDQKIEELGREKYGHTALLRQVKGVGPITSLAYVLTLEDPQRFSSSRDVGPYLGLVPKQEDSGDSQPQLGISKAGDRMLRRLLVGSSQYMLGAFGPDTDLRRYGLRLCERGGKNAKKRAVVAVARKLAVLLHHLWVTGDVYEPLHHTGAETRTAQATAA

SEQ ID NO: 239574 - protein, 335 aa, unidentified
MKNYELFVGIDVSKLKLDISLIQRSNPSASKHFVIANTTKGLQELLSRLKKLKIDLNRVFFSFEDTGVYSMPLCYFLSKKELDYRMIPAMEIKRSKGITRGKTDKADSKDIALYALTHQHKLKLGSLPDETLQEIRLLYTEREKLKKAIHLFERTVENINYLPKKLLTDLLKNNASTLRKLKTNLKKLDKKIQELLSQNEGLKEKDRLIQSIPGVGPQTSIYLLLVTRGFSSFENSRQLACYGGVAPFAYSSGSSVRGRTKVSNLADKKLKSLLNMCALNAKSWDYELKQYYERKVKEGKPKMLILNNIRNKILGRVFAVINRGTPYVNVRKYAA

SEQ ID NO: 239575 - protein, 428 aa, unidentified
MTASAPRVAFPQLFRQQVGEGALVAVPGQVDVWIGLDVGKQAHFADVLDNDGERLFAQAVANGQGDLEALLDRAAGHGTPGLVIDQPGSIAQLALAVAAGRGVPVAYVPGLVMRRAADLYPGEAKTDRRDAYVLADTGRTRRKQVHWLDAGSDELLASLRVLNGFDIDLAADQTRLANRLRDALTATSPALERALGERLHQPGVRDLLARYPTLTALRAASQSRIERTIKARSPRIAGKVTIAIAAVLAAQDVTVPAEATTGRVIAELAAELDRVCSRREALAAEIEETFLAHPSGELLASLPGIGPQTGARILAEIGDGSAYANGSKLAAYAGLAPVTRQSGTTLNAETRSRRGNHRLKNAMFLAAFASLRDPASKAFYDRKRAEGKRHNAALICLARRRCDVILAMLRTHQPYQPTRPASGLADAA

SEQ ID NO: 239576 - protein, 318 aa, unidentified
MPESIVIGIDIAKQTFDAALGVSGSIKTFANDDAGFDTLLANLAGQAVDLIVMEATGGLESNLACALQAAGFAVAVINPRQARDFAKAMGYLAKTDRIDAKALAELAQVLARSPERDRFVTALPTPEQQALQALVARRRQLVAMQVAERQRLSVSHAAARKSIEAMIMAIRTQLDEVETELAKHIETHHADLALRLSSVRGIGPTTVATLIAEVPELGQLSRREISALIGLAPFNRDSGQMRGKRALFGGRGQVRRGLYMAALAAIRFNAVIKQFYDRLVAAGKPKKVAIVACMRKLLTILNAMVRTGKAWDDSLHTA

SEQ ID NO: 239577 - protein, 370 aa, unidentified
MQKILYVGLDVHKTSISVTSAEEGRDGAVRFIGAIPNTPADVIKLAKRLAREGHRLEFCYEAGGCGYGIYRQLLDLGHGCTVAAPTLIARKPGERIKTDRRDSQKLALQHRFGDLTAVWVPDPVHEAIRDLVRARMDAVMQLMRARQQCLAFLLRHGRHYGPGKKNWTLRHRRWLATQLFEQTTHQIVFQDYVESVWSAQDRRDQLEARITTMLPEWAMAPLVEAPRTIRGIDLISSVIFMAAVGDLGRFETPRQLMAYLGLVPSEQSSGNRVRRGGITRAGNGEARRMLVEAAWSYRYQPRVSSGKTDLVERQPKPVRDIAWKAQVRLCGRYRKLAAGGKKPTVVVTAIARELSGFVWAIGQTVRPAMP

SEQ ID NO: 239578 - protein, 337 aa, unidentified
MDVHTTNYTLCIFEPSFEHDGTVHCITQVKPEVKNIIHVIETFKKKHENEELNIVCGYEVGCLGYSLYHELKEKGIECVILAPTTMKTEKGGRKLKNDYRDAKMIAECLAYGGYSAVHVPTELDNSVKEFIRMRDDIKENLKSIKQQIIAFLTRNGKQFEGKSFWTRKHIDWINTVSFSEPLLQDTLKEYMIEYNHLCDRVETLDKQIEEISLKEEYVEKVQQLQCLIGIKTHTALSLIVETSDFNRFKKGNMSSAYLGLIPGDDSSGGQENKLGITKAGNSHLRKLLVEAAQGYTRGKVGFKSKVLKSRQENCSSEVVAYADRANERLRRKYYRMT

SEQ ID NO: 239579 - protein, 434 aa, unidentified
MTLINFVAANQKYYAFNLLSVFIMVFWSVQYLLQHLLVQTQLSDQLLQRLILILQLPQTPQFRHARPGKFFLPVNGMDYLLPLRLTVRNVLTRRITMNIVFLGIDLAKNVFQLCGLNQAGKPVYTKRTGRKELLQTLANIPACLIGIEASTGAFYWQREFEKLGHKVKVISPQYVKPFVRGQKNDGNDAQAIAVALMQPTMQFVPPKSPEQQDIQALHRARQRIVNHRTATVCQIRGLLLDRGIPIGSAVSRARRAIPLILEDAENGLSSRMRRTIAELYDLFNDLERRIHFFDKEIETVFRQSEACQRIAKVKGIGPKTATAVAAAIGKGTEFKNGRHFAAWLGLVPRQHSSGDRQVLMNMTKKGDKHLRTLYIHGARAVVRVATNNNDGHMNQWVNQLKERRGFNKTTVAVANKNARIIWSMLRNETEYQVV

SEQ ID NO: 239580 - protein, 372 aa, unidentified
MQTQSIRSTLFVGVDVHKDSHTAVGLSPFGEKLFEMTVGNEEADFIALVEKTKSEAESAGLIPSFGLEDVHSWGERLSEFLVSEGLPVVAVAPIFVDRLRQLTPHPEKNDALDAKGVAEVMIRKIDSLPAYTVTEEAKKAKQIRELSVEREWLVKERARLKNQLHILLHRIHNTSYRTLFKDVFSKKALRHWMKSIPKDCDTILAQRTKRALRRVLDLWEEIGEIEKELSVLITASGHTLSTASGCGTVVAAELIGEIKDINRFKSPGSLAKYAGCAPKEHSSGKTTRWRKTKSGNRRLNRAFHRMALCQISRMGNESAKTYFKRKITEGRSKAQALVCLRRQMVTIVWMMMKHKTEYKPALSAGRFKTHQT

SEQ ID NO: 239581 - protein, 349 aa, unidentified
MKIIGCDFHPGYQQIAMLDKSTGEVMEKRLSHNNAGEEAKKFYSQLTGPVLVGLEASGQSQWFERLLGELRHTLWIGDAAKIRASTERKQKTDRRDANLLLELLEQQRFPRIWVPTPAERDTRQLLLHRAKLVRVRTQVKNQLQALALNQGMQRKRKLWTAVGRKQLENLPLLPWASRRRAELLKLLDELEGSITALDDAVCQEAHQRPAVRRLMSHPGVGPITALAFTLTLGPTERFRRGKQVASYFGLIPSEHSSGGKQRLGHISKQGSSFVRGLLVEAAQSAVRHEPQMRREYQRLVQRKCRALAKVAMARKLAVRLYWMLREEVDYAQWLQGSHAEQPESSRGRN

SEQ ID NO: 239582 - protein, 389 aa, unidentified
MKKIKSNVVCGGMDVHYKFSNVTFRDKAGRVVHREHLKHPQRAELRERLNRWPNGVPIVLEASFGWGWLSDLLIEAGLEPHLSNCYKLEQMRKARGWVKTNKKDADMLSLLPFETTDWWEVWLAPREVRNRREQMRFRGDLVALQTVVKNRIHAIFHRHGTFHEFSDLFAGKGRKFLVELCLDNPTNLSSEALLAMRGQVKLLDHLRRQLADIARILHKQLVKTPLIKRLKTIDGIGLILAHVLVAEIGRIERFRSHKALASYSLLAPRSHDTGQDDPGRSPLGRHLGTHGNRTLKWAFIEAAHGAVRSGGRWRAMFDRVTDGGKKDRNRGYIKVARELVKVVYVVWKKDVAYCDVPPQRPGARRKKNSFGNGPALTPYGPCLEGIETS

SEQ ID NO: 239583 - protein, 343 aa, unidentified
MCSVTSPTVFVGLDYHAATVQVCVMDSDQRVLLNRSCANDWRAVMGAVHQHCGPQVRVQAAIESCCGAANLADELISRGWLVQLAHPGYVARMKQSPDKTDYGDARMLADLQRVGYLPRVWLAPEEVRELRRLVHYRQTLTKERKNLKLQIGATLREARQKAPSNANPWTKAWLAWLESSAQLSPNARHITKRRLRRLATLQEELRQVDKRLERQTREDPLVQHLLTIKGIGLVTATTLRAEIGRFDRFRTGKQLSRYCGLSPRNASSGQRQADAGLIRAGNNELRTLLIETAHRLIRTDERWTALAARLSQRGKPTGVVIAAVANRWVRWLFHQVQPSCLAA

SEQ ID NO: 239584 - protein, 358 aa, unidentified
MTTVSKKQKWFNTIRLTKDDELYVGVDTHKASYHVALWLNDAPAIDFVMPPDNAKLIDSLDKLRIALRLVVYEAGPTGYSLARAIKDAKLPVSVVAPSKTPRQSAPDSKTDSLDARKLAEYAAKGLLRHVTIPTRHQEHQRQLTRLRQQIVAKQTRVKLQIKGFLLQHGINQPAGLSHWSRAAVEHLKNIVLSTPLRFCLDTLLEELLFITKQLKTAEQKIEEAFSEKPLSTTVNILATHPGVGQTIAAQFAAEIFNPKRFTDKTQLAKYVGLAPSIRQSGQTQRDGPILKTGRPQLRCSLIQGAWVWVHKDLNARKIFYRLVHNTGEKNKAITAMARKLAIHLWMMARDNKPYDCNA

SEQ ID NO: 239585 - protein, 318 aa, unidentified
MTNIIHTFNIGIDISKKKLDISFNDNETASYDNDLTGFKKLLKRITNKKITRVVMEATGGYERPLVSFLQEKDIAVSIVNAKRVRDYAKALGKLAKTDKIDSHVIRLFAEAINPNVTEKLTESQQSLDSLTLRRNQLVKQRAMEKHHIETVTNKNAKQSINRSIKFFDKEIVRIEEQINELIDLDIKIKEKVNRLATLKGFGSVASVTCVSDIPELGTLSNKEISALVGVAPFCRDSGTMRGKRTIWGGRSQVRSILYMATLSAVQHNPAIKVFYERLLSKGKPKKTALVACMRKLIIIANSMIRNNIDWDPEYGKLA

SEQ ID NO: 239586 - protein, 393 aa, unidentified
MRSIGLDVHRDFCEVAIFEDGKVSRHPRVPARKAALVAFARSLEPTDQVGLEATGNALAIARLIEPHVARVVIANAAVTKGIGAARAKTDQLDARTLAQLLGTGFFPQVWLAEEPTRLARRRMSRRAQLVRERTGLKNQVHAVLHRNLIERPPASDLFGVKGLRWLATVELPEDERETVSSCLRQLRFLGDELHRLDQVIAQSALEQQSIGLLLTVPGVNLITAAAFMAAVGDISRFETPSQLVSYLGLDPTVRQSGLSPARHGSISKQGSAGARWALVESAWVVAGAPGPLHAFAERIRARRGANVATVAVARKLAVLFWHMLTKNEEYAFGRPSLTAEKLRRIELTAGAPSIRGKRGGGRVYASAEQRQREQQIAVHAETAYRQFVSQRRS

SEQ ID NO: 239587 - protein, 380 aa, unidentified
MWHTDAYGFNIAPMVGANHKGQRRTDMTNRITVGVDLGDQSHSICVLDADGNVIERKTLANTAAALRKYFEALPPALVAMEAGAHSAWVSQLLSGLNHNVVVGNPRKMAMIWNSYDKSDITDAEKLARMARFDLRLLHPIHHRGKAAHADLAIIKSRDMLVKSRSMMIAHARGLVKSVGQRISKCSTESFHTRLNDEMPEELRPALEPLVKIIEELTARIRHYNNLIDKKCREDYPETEALLAISGVGPVTALAFVLTLEDHKRFNNSREVGAFLGLVPRRDQSGNTDKQLRITKAGDSYLRRLLVGSAQYILGPFGPDCDLRRFGLKLAARGGMNGKRRAVVAVARRLAVMMHHLWKTGKTYDAFHRQTSKKGNRGDAA

SEQ ID NO: 239588 - protein, 461 aa, unidentified
MSKRIYLGIDVSKGYGDFLLLDSEKGKIMDSYQLDDTFEGHAKLYKLLSMEFKDNPKLEIFAGVESTGGYENNWYHSLRNFQADFNLKVARVNPNKVKHTREAELPKNVTDTISAKAIAYYLINRGDKINYETDDKYAPIRSIWTHLNMQIKQNTEMLNHFESLLYSAHPELIQYCKSGVKEWLLKLVSKYPSALELSRARVETISKIPYVSKERAIELKKLAKQSISSANDDFYALLLSDLAKQILNKKEIIKRWKKELETKCQFPEIKLLQTIPGIGIHGAIGLMLNLGSIEKFRNHKALSSYWGVHPEMKESGDIQRVPRMSKKGRRVPRSLLFMAVLTSLRGDNHIRQLYDYYVEERGKSKMSAIGILMHKFTRIIYGMLKSKTEYDENIDKTNQDMGRILKEKPMMKDKTRRFQKYDSAAPISGRQSKKREEQIKSHDAFASISGSNICSNENLIL

SEQ ID NO: 239589 - protein, 451 aa, unidentified
MSKKQMTLEVVNPNAAGIDIGSRSHWVAVGQNAEDVKEFGVYSEDHHQLCEWLTLHGVTTIAMESTGTYWQNLFASLVGFGFEVILVNGKQTKNIKGKKTDIKDCQWIQKLHCLGLLSQSFLPDSTTDVIRTYSRHRQNILRQSARTVLKVQKYLRLMNMRLDVVVKDIVGETGTKIISAFIEGERSGKKLAENRHYTCRKSEDEIAKALQYNGRDDIMFALKHEWETYLHLQNQLGEVDLQINRLLSNIIDRDENKKQHVASKKQHKRKNKNTLRDTDMNQMAYQYFEGIDLMAIEGVNDATILAIISEVGLEGIKKFGTAKQFAAWLRLAPNNKISGGKVLSHHLPKGSSRLKIALRNAANAIGNLKEGHLADFFRRICYKRGRATAVSATARKLAVIIWNMLVKGIPYNPPSQYLFLDEKRKQGLVKRIKKQIDKFEIQPEQLGFVTN

SEQ ID NO: 239590 - protein, 326 aa, unidentified
MQGKEASEQETKAKSSVGIDVSKDWLDVHVLPDDERLRVPNTGVGIRQLKRWLTRFDLALVVVEATGKWHRHVQRSLAASAIAVAVVDPFRVRMFAKAHGIFAKTDRLDARVLALFAATMSPAVRPPAPQALADLAELVTARLTAVEAQTALKNQRAAATVKVLQRQLDRRIGRGDQDIAALDAAIERHIQQDQGLARRYAILTSIPGFGFLTAAILVACLAELGSITAKQCSMLAGLAPIADQSGKRDGARVVFGGRPRVRRILYLAALSAARFNADMHAFYQRLLTAGKSPKAALIAVARKLVVLANTLISQDRMWQPQAPQYA

SEQ ID NO: 239591 - protein, 412 aa, unidentified
MEGETVIAGVDTHKDVHVLCLLDGLGRKIRSGSFRADPEGYDRLAEAIGDPGGCLVVGVEGTASYGAGLTRRLAELGYNVTEVLRPKRDKARPGEGKSDPLDAERAARKAASGRGCSVPKSQDGWVEAVRQLYVARRLAVATSTSCVACAKSMLTTAPSALRERFRGSERPKDLMPLLARRRKAGDALEESALASLRSVAAVWKEARSQVESLDERIRALLEANAPALLGVEGCGTTTAAALVVAAGDNPGRLKGEAAFSMMCGASPIPASSGKTDRHRLNRGGNRQANWALYEIAIKRMAYDEGTRRYVAKRTSEGKSRREAIRCLKRYIAREVYHVLMDPNPDGAAPEGPELAKMRKAMRVTQKRAAAELGLSTATLGHLEHGRRRSTKLERRYYELLCELERALPQTAS

SEQ ID NO: 239592 - protein, 334 aa, unidentified
MRFYTNQHKYYCGIDLHTRKMYVCILDEKGEIREHRNMKTDRDAFLKAVAPYREDIVVAVECIFTWYWVADLCHKEGIPFVLGHALYMKAIHGGKAKNDKIDSQKIAVLLRGGMMPMAYVYPAKMMRKRSALYAHIQNTNSQYNLPDPFGPISRHQNRDGMAECFEQPAVQKSIAMDIEMIRTYDGILLQLERSIIKLANNHDPVSYALLQTIHGVGKIIALILLYEIENIRRFASVQDFASYSRLVKCAKESNGKKCGSGGSKIGNAHLKWAFSEAAVFFLNGNDPAKKYLDRLTKKHGKSKALSILAHKLGRAVYFMLKNKEAFDQKKFLNL

SEQ ID NO: 239593 - protein, 372 aa, unidentified
MTSIIYVGMDVHTTNYTLCCYSMEDDRSFAEVQVEPDAKNILKYLARIEKQQSRDCRIVCGYEAGCLGYSLYHQLHAHGIDCVILAPTTMMTKPGKRIKTDRRDARLISKCLAFHTYSPVYIPTEVDDAVKEYIRMRDDANSALARVKQQIIAFCIRHGKIHDGKSYWTNKHLEWLSSLDLGNKILSEVLQEYLIRYYQLREQVDMYDMRINELAQAEPYRQKVEKLGCFRGIAAHTALSFCVEVGDFRRFATAQQFASYLGLVPGECSSGDKQQYTGITKAGNSHLRKLLVETAQVFGRSATKSGKSVALKERQAKCDSLTVAYADKANARLKKKYFKIAMRSKVNIAKTAVAREMACFIWGMMTDNISCA

SEQ ID NO: 239594 - protein, 402 aa, unidentified
MRFFVGIDWASRAHAVCIIDQTGRVRWQDSVPHTAEGLPELVGHLRRFRGRGGLRVALERPSGLLVDTLVDAGFEVVPIHPNALKATRPRYSAAGGKSDPGDAFILADLLRTDGHRFPALRPPSDETRALRALVRGRDDLVTQRVALANQLRALLERFWPGAAAIFVDVDSAIALAFLARYPTPHSAARLGEKRLAQFLGQHAYSGRRPVVELLARLRTAPASQVGEAEAEASGDLVRALVAVLTPLVGQLQQLSAAIEAALAQHPDGRLVQSLPRSGAVNAAQILAELGDDRARFPSDEQFAAEGGLAPVTHASGQHKAVVFRWACNKRLRRALTTFADNSRHASRWAALVYQRARARGCRHQHAIRILARAWVRILWRCWQDRAPYDVSRHRAAQALAAA

SEQ ID NO: 239595 - protein, 438 aa, unidentified
MAMRVSKSVIGVDVAKIELVTYQADSDLLALIPNEKPAIKRWLKTLPRPAALAVEATNIYHVDLVELAYQAGFDVYIIDGFQLSNYRKGVGGRSKTDASDARLLARFLKNESECLRPWTPPPAVYGKLQSLLRRRASLIQAKTSLTQSWANDASLKASFAAFLKSIERLDLLVKKKLKDALREAGLLEQVARCQAVEGIGFLTATALVMAYSRGDFNSSDSYIAFLGMDLRVTDSGQKNGRRSLTKRGCSEIRRLLHNAAMSASRTSAWKEFYNHHRSRGKATTEVLVMLARKLARVAFALRANINPEGALWLDQNHRISHTSDAPTGLLLHRSGPGDASLDLRWIGFPVGADLSAKRTVHSRKVVALPKPSRTSPLVWLDLKGWWDEQFASDCSNSTDRGRPRPTPSTKSADKECFVQATIETSLRLWVKPLQAVKP

SEQ ID NO: 239596 - protein, 353 aa, unidentified
MKRDKYMGMDVHQATTVVAVIDVEGKTVLETIVPTAGGPIRRLIESITGPVHVTLEETTQAEWLHDLLQGFVAEVVVCDPRRNKLLVEGSKGDKADARKLAELLRTGMVRSVWHGRKTTRGLKEVVRAYETFAVDTRRTMMRIKALYRSRGIATTGSAVYQKKEREGWLKQLTEAGMQQRAAWLYEQLDHVRELRKRAKAAVLSEGQEHQAVQLLRTIPQVGPIRAAQIVATAGTPYRFRTKRQFWSYSGLAVVTHTSAEYEMREGRVVRRNKPVATRGLNANCNRRLKSVFISAATAGGSSHPWQPYLNHLKEKGMKPDMARLTLARKIAALVLAIWKKGESFDPKKLNWTN

SEQ ID NO: 239597 - protein, 408 aa, unidentified
MKTLHQRCAGLDVHKQEVVACLRLVTQGRVHREVRRFPTTTRGLLELAAWLEAARCTIVAMEATGVYWKPVWHILDGSFELVLANAAHIKGVPGRKSDVNDATWIADLLAHGLIRASFVPPQPIQELRDLTRTRKQLSREIVRHTQRLQAVLEEANVKLASVITDILGASGRRILKAMITGETDPSHLAELGSRRLGCSRDTLVEALDGRVRDHHRFLLDQHLKTIEQLEETMAAFDARIEAALAPFRDTVERLTQVPGLSTRAAEVVIAEIGLDMSRFPTAEHLLSWAGLVPALDESAGKRRSTRVTKGAPWLKPVLVQCAWAAANKKNSYFEAQFLRLKGRRGPKKAAVAVAASILTTVYHMLRDGTCYQDLGPNYFARRDPARTARKLADRIRSLGYVVEIRSAA

SEQ ID NO: 239598 - protein, 451 aa, unidentified
MAKRKEKQERRSMVLEPDAAGIDIGAEEIYVAVPPDRAEESTRRFSSFTCDLHALADWLGQCRIQSVAMESTGVYWIPLFQILEERGFKVYLVNAHYLKSVPGRKSDVSDCQWIQYLHSVGLLRASFRPPEAICAIRTLWRHRGSLLEMAAEHILHMQKALSQMNLQLHHVLSDITGTSGQAILDAILSGQRDPVALAQLCHRRVQSPRDKVAQALVGDYRPEHLFTLRQSLEGYRYYQKLILELDQETARLMQALPSATEHPMPPRTKATAYHRQGNDPRFDLRSELYRIAGVDLTDIPGISAATAQVMLTEVGTDVSRFRHASAFASWLGLCPEKRISGGKVLSCKTRQVKHRAATALRMGANSLCRAKGYFGEFFRRMRAKLGTAQAITATAHKIARILYHVLLTKEPYSETVFHRCDEQAQQRAEMRLRKQAARLGFQLLPIPATGQ

SEQ ID NO: 239599 - protein, 448 aa, unidentified
MKKHNTEHGLPIIHARAAGIDIGSRFHVVAVPTALAEEPVQTFQAFTAGLERMAAWLVELGITTVAMESTGVYWIPVYEILETHGLQVILANARDARAVPGRKTDVNDAQWIQRPHACGLLRASFHPEREIAALRSYLRLRERHLDYAAAHIQHMQKALTHMNLQLQHVVSDITGATGMRIIRAIVAGERNATMLAAMRDLRCQSSVETIQRALVGNYQPEHVFALSQALAMYDAYQAQISLCDEQIAQSLQQLSRGKPRPSKALPKPRHRTRQPNALNFDVRTLLYQLVGIDLTQIHGIGPYLAQRLVAECGTDLSRWRTAQHFTSWLTLAPGCRISGGKVLSAHTRKTKNRVTAHLRLAAVTIGRTNTALGAFYRRLSARIGKAKAVTATARKIAVLFYNAMRFGMEYQDPGADHYEQQYRDRVVKGLHRRAAEFGFTLQAIEGVS

SEQ ID NO: 239600 - protein, 388 aa, unidentified
MEVRLAATTPTAADDALVSILIAIELSKSNWVVGIQTPLSNKPSQFRLAAGDWQELLKLIDRTRQSVERELGRPVEAISCYEAGYDGFWLHHLLEDHGVRNYVLDPASLLVNRRARRAKTDRIDVIMMLRALGRHLRGELDACSVVRVPGVEQEDARRLHRERDRLIRERVQHVNRIKGLCATQGVYDYEPMRPDRKTQLEGLYTGDGRPLPPRLKAEIKRELQRLELVLQMIAEIEAERDAIVKDEASQHVNAGKIQALAQLKSIGAEFATKLVGEVFYRSFDNRRQVGSFVGLAPSPYSSGSMERDQGISKAGNPKARSTAIELAWMWLRHQPGSALSIWFRERVGDAKGRVRRIAIVALARKLLVALWRYLETGLVPTGAVFKAR

SEQ ID NO: 239601 - protein, 326 aa, unidentified
MTASHSVDNIFIGIDVGKANLDVRWHRGDGAQYANRPDAIASLVQRLQGGPGVTRIAIEPTGGYEKPLVAALRQANLPVELVHTSRFKGYRMMVGANAKSDSSDARLLAAYAAAPDDVRGRKADRVELPEDAVREELRELASRRDQLKHMIHAESCRMAITRHAALRQSILAHLETLRAEDKQVLQMMRALVRQRLDLRRDQQLLRTIKGLGTVSVLTLIGAVPELGHLDNKQAAALIGVAPFVHKSGNMIAPARIRGGRAAVRRVLYMAAVTASRHNPVLKAFYERLIAKGKPAKLALVALMRRLVVFANAVLRSGQPWKGATHA

SEQ ID NO: 239602 - protein, 445 aa, unidentified
MYSLFFMEPYRKEHIMHNKNYISVGIDVGSAFSFMTILAPDETVILKPFKITHNNKDSLERAVSEIKKAEELYSLESRTFLEFTGIYHFPLFCYLVDCGFNASIINPIITHSTKNGNIRKVKNDKIDSKGIAKLGLSKDVPVSQFPEKLVLELRSLTRKYYDLTDERSAHINKLKGDLHTVFPQYLDIFCDVTGKTSTMILRQYGTPDKILRGHKKTMIEKISKASRKGLAKASERYEKLCAAANAAKTFGCQIDSIYFNISLTLDLVEKLDSALDSILNRIRQLITFNKNEKFIRQIKLLNTIPGVGFLTAVTIMCEIGDFSAFRNPKQLFAYFGLDPEVSESGKFVGTQLHMSKRGSRIARRAIFAVALASIRTKRNGEGINPYLRKYYELKSVQKPKMVAIGAVVHKVCNVVFAVLRDKKAFELRSPEEHCKQYQRAALAAA

SEQ ID NO: 239603 - protein, 334 aa, unidentified
MENIALIGIDLGKNSFHIHCQNRHGKAIYRKKFTRQKLYEFLATCPATTIVMEACGGAHFMVRKLSELGHTPKLISPQFVRPFVKTNKNDFIDAEAICEAASRPSMRFVKPRTESQQAMHALHRVRESLVSDRVKTTNQIQAFLLEFGVSARKGPTLIKGLAEIMETNNLPPYMTSLLQKLREHYDYLVAQIKDPEIQLQLSLDEDEAGQHLLSIPCVGPLTASLLSTQLGDGKQYGSSRDFAASTGLVPRQYSTGGRTTLQGISKRGNKRLRALLVQCARVYLRTLEHRTGKLADWVRELLLRKNNFVVTCALANKLARIAWALTARQQSFEA

SEQ ID NO: 239604 - protein, 297 aa, unidentified
MAKDTIGIDVSKDRLDAFWHSRDEMRSLPNTAEGFEQLCSWLEQNDDVLFVFEATGAYHRGLERHLSLAAQPFIKVNPKQARRFAQAISRLAKTDGVDARMLARMGIALDLAPQDVESEDIHDLRELLTARRALVKDQITAKTRLATALNPVVREQLGRRIDDIAADIQALDKVIAQIARQRGTLEDRICRLMTIPGIGRLTATTMLIDMPELGHFDNKKIAALAGLAPMTQQSGKWQGKERITGGRSSLRRAIYMPALVAIRFNHDLHRKYQQMLKAGKAKKVAITAIMSSASRLG

SEQ ID NO: 239605 - protein, 346 aa, unidentified
MTIVEDKRAITGGVDTHADVHVAAALDPIGGLLGVQEFPATAAGYAGLLGWLAGFGTVALVGVEGTGSYGAGLARHMAAAGVPVVEVDRADRQDRRRKGKSDPLDAVSAARAAQSGRAAGAPKGRDGAVEAIRALMVAKRSARNERTQAINQARSLIVTGPDDLRARFARHTVAALVAELAALRPRRGDVPGYATRIALRELGRRAQFLDAQLERLDELIVPLVGTRAPSLLALHGIGPDTAALLLIAAGDHPERLRSEAAWAHMCAVAPIPASSGKVRRHRLNPGGNREANHALWRIVITRMSSHPATRAYVDRRTEEGLSKKEIIRCLKRYAAREVYPHLRAAG

SEQ ID NO: 239606 - protein, 320 aa, unidentified
MTPECFVGIDVSKDRLDVALRPTGERFSVDNTDPGVERLIRRLVEVSPALIVLEATGRYHRLALGELLAAGLPAIAINPRQARDFARAIGVLAKTDRIDAAVLAEFADKIRPEVRTIADEDTQQLEAVCTRRRQLILMLTAEQNRYPIASKAVRPKIKKHIHWLEAELEDLDEELKMRIRSSPAWREKEDLLSSFKGVGKVTSHSMLAYLPELGRLDRRQIAAIVGVAPFNQDSGKRRGQRHIRGGRRRLRNVLYMATLVAIRHNPTIREFHRRLANAGKAPKVAIVACMRKLLTILNAMLRSKSRWQPDFPLVSQDSLS

SEQ ID NO: 239607 - protein, 358 aa, unidentified
MSMHPDPRRRRVIVGVDTHKYVHVAVALDAVGGVVDARSFTANRAGYDQLISWAAGLGQKLTFAIEGTGSYGAGLTAAVRRRGIGVVEVMRTDRRDRRLRGKSDTLDAENAARAVLSGKAAAVPKAADGTVEMIRQVKVAKDVAVKARTAAMISLKQVIVTAPPELREQLQDLPKMALISRCAGLRPGPVTTVPAATKHALRSIAQRWQQLNHEIKAHEKLLAQLTGQLTPQLVAAFGIGPDTAAELLIVAGDNIGRVRSEAAWARLCGVAPIPASSGITTRHRLNRGGHRQANSALYRAVIVRMQHHEPTKAYAARRTAEGKTKPEIIRCLKRLLARETWALMRPLRLTATTHQKAT

SEQ ID NO: 239608 - protein, 346 aa, unidentified
MLYAGLDLSRQRLDVHVLDEEGRTVEVSAVRPDADALRTLANRILCQGQEVSAVIESMTGARFVHDTLERLGWEVAIADPVKAKGLAPLAAKTDKIDARVLAELARRDLVPEIWLPTPGVRAERERARFRLHLVRHRSALKCRIHATLMSFGHPVPVTDLFGTSGRELLARLELPEPWATTLATSLAMVDELDERIDDCGREIARLGADHPYIPLLLTVPGVGPLLAYTIASEIGDIRRFASSKKLTGYTGLCPLVRQSGNRDVRGPLAKNGPKYLRWALIEAATHAARDVHYRDRYERNKKRLGRQRGAKVARVDIARQLAEAIWHVLTKNESFAPAGPAIKLVA

SEQ ID NO: 239609 - protein, 341 aa, unidentified
MQDVTLIGIDLGKHTFHLHAQDRAGHAVWRKKCNRSQLMALLANTPACTVVMEACAGAHQMARDLGRFGHTIKLISPQFVRPFVKTNKNDFIDAEAICEAASRPSMRFVTPKTEAQQCLGAWHRVRESLVRDRVQVTNQIHAFLLEFGISLPKGPAVIKRLPSVLAEQRLPARLIVLLERLRDQYRALDAQIAEIEQDLAAQLQEDESGRRLLSVPGIGPITASLLASELGDGKQYGGARDFAASLGLVPRQHSTGGRAQLMGISKRGDKNLRRLLVQCARVYMQHVDRQTGRLADWVRDLLQRRHSNVVACALANKFARIVWAMTAKRVDFERLGEALPA

SEQ ID NO: 239610 - protein, 322 aa, unidentified
MTAGPCLVGIDVSKTTLDVAILPGTSVLHLANSPAGWDHLIARLVGVPSPCIVLEATGSYHVGVTLALAAAGIPASVINPQRIHAFRRSEGIRTKTDRRDALLLASFAQQKHPASTPVLAENVRNLKELVGCHDDLVKMITMETNRKQVSTAISHGFHQAVIDDVKRHKRLVDLAITELIAADPDLTAQDRLLQSVPGIGWYISAAIIGGFSELGTYSRKAAAAVAGLAPHPCDSGQASGARRISGGRADIRRVLYQMANTAVVWNPVVRQHYQQLIQRRPRKVALIACARRMLGILRIMLRNHITWQETRVATTFAPRNVS

SEQ ID NO: 239611 - protein, 460 aa, unidentified
MSKSQNPTKEVIPIMKKRIYRRIPVNDFQPQTISHADLAGKLVFAIDVAKVDMVAAVAAADGHVLHTICWKAPEQNPTVLSILRGFRTAGVTVEAVMEPSGTYGDVLRHQLERDEFPVFMVTGKRTHDAKEIFDGVPSLHDAKAAAIIARLHAEGLSTRLRDEGPDRRQLRAALAIMALHQERYLQLVHRLESWLARHWPELPTLIELTSSSLMALLARIGGPADVAAAPDQATKLLLGISHRLIADDKVAAVIASAKASVGVPLVGMERDALMAIAEDAYRAHRAFTTAKTQVDQLAATTPAAALAPVVGHTTAAAIFAEVGDARSFPCARAFLKAMGLNLKEKSSGTVQGQIKITKRGPSRVRQYLWLAVFRWIQEDPIANAWYQRKKQRDGGRASRAAVALMRKLAKGLYHVGRGGSFDSSKLFDTRRLQVGDVARSFVVKGAKPSPSMLNAQISEG

SEQ ID NO: 239612 - protein, 387 aa, unidentified
MPQPNDLSRSLVALDQNSTIMAVVELSQSSWLVAGMLPGIERQPRMKLEPSPERLLALLHRWRAEAVRAGRTITRIALAFEAGRDGFWLARWLEARGVEAHVIHASSVAVSREHRRAKTDRLDTELLKRGFLGWLRGERGHCSMARVPTIAEEDAKRPNRERDCLVGERTRIVNRIKSTLARLGIRNFKPTLRKAAERLATVRTPEGMPLPPNTLAELQRDMARLGFVVSQIREIEEARQKRLEQQHETGPDAMVRRLARIVGVGIETADLLVHELLSRPMRDRRAVARYAGLTGSPDESGARRREQGLARAGNARVRRAMIQLAWRFLMFQKESGLALWYRARTADSRSGTRKTMIVALARKLIIALWRFVTTDEPLEGVVLRPVS

SEQ ID NO: 239613 - protein, 373 aa, unidentified
MPKYSTAFGMDVHLRSTTVCALDADTGEAVTRRFPGNPWGEIAGWMDGFPGPSLAAYESGYLGFAPQRELAGLGVECVVAAVSKIPRSAADSASKNDRNDAARMAKAILAHDISPAWVPSPEVEGIRDLAGAYDGATARLATAKQRLLAFLAKRGFVYGGTTPAGNPRKYWTYDFLRWLDKVRPEDDGGVRTLAALRNEVEAAAEARADLLSEYRAAVDASPIAAEVAALQSIKGCAFALAAAFSAEVGDFTRFRSGRQVTAYFGLAPSQRSSGDSVRLGGISGAGNALVRKLAVEGSWCYAAARHQPKLMPRDTGVPLEIRMHGRKGSERLLRRREEMLARGVPAAKANAATAAELVKWLWALGMMCREGAE

SEQ ID NO: 239614 - protein, 377 aa, unidentified
MKKNIRFIGLDVHGETIAVGVAEPSGEVRSLGVIPNRPESVRKLVKKLGSASSLRACYEAGPCGYVLYWQLTQMGVHCDVIAPTLVPTKSGERVKTDRRDAQKLARSYRSGDLTPVWVPDPEHEALRDLVRAREAAKKDQLRARHRLQKLLLRRGLRPAEKMKSWTMRHLAWIRSLHLQPPALEATLLDYLSEVDHEGERVKRLERAIDQAIAAAPPATRAIIEGLQALRGIARISAATIVAEVGLLSRFARAKQLMGYSGVVSREHSSGDRIRRGAITKTGNAHLRRILVEAAWSYRYRPNLGSTIRKRQANASPEVREIAWKAQHRLHYRYARLAGRGKPKQQVVTAVARELAGFIWAVGVQIEKQLAIGEVRAA

SEQ ID NO: 239615 - protein, 365 aa, unidentified
MRIDIGVDLHKTQFTVYTQGGEKSGVNGQYPTNEEGYTAFLGKLGQRKRSGHDIRIGVESTGNTRYFKHRMEERGYPVVVINTMKFKVINESVKKTDKHDAATIAEFLSKDMLPESRLCSESSEQLRRLLKVRRTLVRTRVTVKNQIHGLLVSMGMEDTRASLQSKRGRQRILDTLAGAAKGLVVQPLFETIDRLTENVKAIESEIEKLVAGDKVVELLETIPGCGPVTACTIRAYTDDIGRFSNHKKYASYAGLAPWVQCSNETEHYGRITKRGPEELRTAFVQLVVGIKRSRQSASWRLMERYEAMKTVKGPGKSIIATARKMSKIVWFMLTREEKFNVGLMTDSSLEKKIDSMRTALDEMSA

SEQ ID NO: 239616 - protein, 384 aa, unidentified
MLKTEKPATAIQTNLAAIFVSLELSRSTWLLTSLIPGNGEKMSKHSVDAGNIAGLFDLFVTLRERSRVRTGNEWPIITIQEAGLDGFWIHRLLADNGIESHVVDAASIATSRRRRRVKTDRVDGETLLRVLLAFKRGEPRVCSMVRAPSRQEEDERRIGRERKVLIGERIAHVNRIKGLLFSQGISAYEPIRKDRRRLLDELRTGDGHPLPAHMKAQISRELDRLELVLEQIGAVEAERDALLAAQTAAQMPPSGKMLLELKGIGPEFAYILGSECFFRHFDNRRQLAAYAGLAPTPWQSGSIDREQGVSKAGNARLRTTLIQLAWLWLRHQPDSGLAKWFKARVLHNGGRMKKAAIVALSRKLLVALWKYATAGVIIEGAVTA

SEQ ID NO: 239617 - protein, 343 aa, unidentified
MEYYVGLDVSLKQTSICVVDRTGAVVREGVVDSDPDAISVYVRSKAPDAVRIGLETGPTSTWLWTELKRRGLPVICIDARHAKAVLKMQINKSDRNDAIGIGRIMQTGWFKEVHVKDIDSHSVRALLASRALLVKIKRDLENHVRGLLKNLGLVIGRATFNVFAVRAEELIEGRPELIAAIRPLLEARNAVGQQVSELDRKVMRLARHDAQVRRFMTVPGVGPITALAFKATIDDPARFARSRSVGAYVGLTSRRHASGEVDWSGRISKCGDAMLRSYLFEAAGVLLTRVPKWSAVKAWGVRLAKRNGLRKAKVAVARKLAVILHRMWIDGTEFNWSKKEIAA

SEQ ID NO: 239618 - protein, 437 aa, unidentified
MLPTINHHAAGIDAGSTRFFVATPEGVVASFESHTAELYRLRDHLQQHGVTTVAIEATGVYWLCLYDILAEAKIEVCVVNGADVKALPGRKSDVQDCQWLQQLHAHGLLRASFVPPDQVRALRSYVRLRDDHIRAAGMYVQLMQKALDQLNVKLHTVISQLNGVSGLAIVRAILAGERNAAKLAALCDARILSKKRAAVEHSLEGRWKDEHLFALRQALAGWEFCEAQVKECDAAIGRQLDALNAGRPPGGPATPPAKTGRHHVPDVPRLHSHLLGLHAGHDATVLPGFTDTTWLKLTAELGTDLSRWPNEKAFCSWLALSPGKNQSGGRQRRARRRPKTTAGQIFRLAAQSVGKSSHLALGGFYRRIRARSNAAVATVATARKIAILFYRAMRQGLAFVERGLAAYEAAYRERQRRYLTKAAAELGLQLIPTPQSN

SEQ ID NO: 239619 - protein, 368 aa, unidentified
MKKLTTTMMQQQTLNKQDRRLTVGLDLGDRSSFYCVLDEAGDVLMEQRLSTTPKAIKEIFGAMPRSRIALETGTHSPWISRLLSELGHEAIVAHARSVRLIGESRRKDDRIDARTLARLVRIDPQLLCPVKHRSAEAQADLTVIRARAALVRTRTMLVNAARGLTKSYGERLRGCNARGMKPKAAQDLSPELKSALEPMMREIESVSERICEYDHLLESMTRNRYPKAERLKQIKGVGTLIALTYMLTLEDPHRFRKSRDAACYVGLQPGRRNSGQSEPQMHISKEGDPYLRTLLVQAAHHVLGPWGVDSDLRRWGMKLAEHGGKRGKKRAVIAVARKLAVLLHRLWVSGDVYMPLRPGGRATLPAVA

SEQ ID NO: 239620 - protein, 445 aa, unidentified
MDVIFTHCAGLDVHQKTVMACRVTPDPTGQQAEGSIDVQEFGTLTRDLLALSDWLAAAGITPGAMESTGEYWEPVDNILEGDFTVFLVHAAHVTQVPGRKTEKADARWLATLMRAGWLQASCIPPLEQCDWRDLTRYRTKLGQEHSREVNRGPGVLERANIKLAAVATDIMGGSARAILAAWVEGRADPATMAALAKRRLRSKMPLREQALTGLVRVHHRQLLAMQLAHSDFLDEQIEALSAEMTRRLATLRGDEPPVRPPGPAGEAGHATTPEATGAPMTFAQAVALLDTMPGVNQRGGELLVAEWGVDMGRFGTAARLAAWAGVAHGHDASAGKKRSGKPRTGNQALRPGLTQLAHAAARAQGTSLSALYQRLAARRGKKRAIIAVAHSIVVSAFHMLSRHEPYRELGVHYFDERRREHLVDQLTRRIERLGYRVTLEPVAAA

SEQ ID NO: 239621 - protein, 416 aa, unidentified
MNAVGIDVSSRKSTVAVLRPLGEVVCLPFDVTHDIAGLASLVEKLKAIDGETRVVMEHTGRYYEAVAKALHEAGFFVCAVNPLLIKEYGANSLRRVKTDKADAIKIARYALDNWADLRDFTPMDAIRYDLKTLNRQFQLASKQRTASANNLIALLEQSFPGIRKCFDSPVRSDGTQKWVDFAHSFWHVDCVRKQPFPAFCERYRKWCKRHAYLFKLSNAEEVYALAKRAVVLTPKSKVVKVLVQEAANQLISISRSVEVYRAEMDRLAAMLPEYPVVMAMYGVGKSYGPQLMAEIGDVRRFERKQALVAFAGIDPMPNQSGDKNVRSNKSSKRGSPYLRKTLFNVIRTYLQCAPQDEPVFQFLNRKRAEGKPFYVYMLAAANKFLRRYYAKLRDYFASLDTLQPVAPIPTILKATL

SEQ ID NO: 239622 - protein, 402 aa, unidentified
MAGMTAGIDWASEAHEVCVSEEGEVLERFSATHDERGIAGLARRLTRLGVVRVAIERPEGILVERLLAAGLEVLAIHPNQVKATRARFAVAHGKSDRFDAYVLAELARTDAHRFRALVPDSEETKALRALTRAREDLVGIRVELANQLRAQLQAFWPGALIFAAVDSPISLAFIKRYPGPADTRGLGAGRMAAFLTRNSYSGRTDPAELVERLNAAPKGTAGPAEQKARRAVVLGLVSSLEPIVSEIAALDAQIRERLAAHPDAAIFAPLFRDPKTTICPATLIAELGDARGRYPTEAAMAADAGMSPVALESGKLRVATFRRTCDKRLRSAVATLADSTRHWHPWAKEIYRRARARGQDHPHAIRTLGRAWIRVLWRCWQDGVPYDATLHGNSNRLQPAGG

SEQ ID NO: 239623 - protein, 425 aa, unidentified
MVVAPALIYFSLGRVLTMDVVFNHCCGLDVHKKSITACAITPKGKEIETFGTMTNDLFQLVDWIKNKRCTHVAMESTGVYWKPIYNLLELEEIQPMVVNAAHIKAVPGRKTDVKDAEWIAKLLRHGLLQHSYIPNREQRELRELVRYRRSLIEERAREISRIQKVLEGANIKLSSVATDIMGVSGRAMIEAIINGINDPQTLSSLAKRGLKKKKGDLERALVGSVGPHQKMMLKTQLSHIDFMDQQIELLSEEVQQRMQPYEEDIELLDSIPGIGRSHAEQLLAEIGIGIDISNQFPSAPHLCSWAGMVPGNNESAGKKKSGKTRKGNKKLRAALVEAAHSAARTKNTYLASQYQRLAARVGKKRAAVAVGHTILTIAYHMLNRRVPYIELGADYFDRRKKEIVIKQSIKRLETLGCKVTVEAIA

SEQ ID NO: 239624 - protein, 408 aa, unidentified
MERYYLGVDWADEFHQVWVSDPEGKKVIEKKVIEDVEGLTEFGRWLDETRAKGIELWAAIEKPHGRIVEFLLDHGVVVYPVNPKALDRARDRFRMSQSKSDSFDAYVLAEFVRTDHGHLRALEPNSDPAQELKLLTRDQYRLVRQKTRLLNQLSRTLKEYYVRPLEIFSDLETNIALDFLQQYRTPQALAKLTRRQWNRFSKREHHLGEDHCKELWEKLNQPQLEVPEHVVRAKARLLAVLVVQLKTLRDAVESYNKRVKSFFACMPAAELVRMLPGAKTGTIVATLWAELGDAKSRWESFRHLQAEAGVVPVTKASGKSRVVQFRFSCNKIMRHAAYWLAFVSLNRSEWANQYYRDQRAKGHSHHQALRALGAKWLKIIFVMWRDHKPYDENIHLANITRQKMRQAA

SEQ ID NO: 239625 - protein, 450 aa, unidentified
MAQRSGLTRGDRRRNDRIEGLRRVVTPDRAILAIDLGEDKQVAVLLDHDGRVLGRRTVLVKAYALGGLLAWAAGQAGRHGFARVVVGCEPTGHRWRSVMQLADDAGMGFVCVQSLRVHLAREADDYTRDKTDHKDAVVIGKLIARLECYLPERADADWARLRHLGARRARLVTEATSCQQQIADLLGCCWPAALACAAKPLESTTWLACLSVVVDAGVDLTTLAAAGLDAFTTAARARLSRFGATRLYHRIVRGFHTALTDPAGVTAQRPGALERAGLVLADWQHARTRLTDVECRMVGVLDAMSLTALVTSIPGLSAAGAAVILAETGDLSRFASARSVVKHAGLNPAENTSATFRGVTRLSRRGRPGLRLAAWRAVWGALPHNRVLHAKFTHLTRRDTDRLAPAQARAACAATLLRWLYAIVVRRRPFQPDIATGLLRAGQHTPAVAA

SEQ ID NO: 239626 - protein, 410 aa, unidentified
MRVIGMDIHRVFAEVVALLDGVLTRLGRVDMRRDRLEAFARSTLTHDDHVVVEATGNAAAVVEVLSPHVGRVIIANPKQVRLIADAKVKTDKIDAAVLAQLYASGFLPEVWVPDARTEAMRRQVTRRTQLVRQRTRLKNIVQSILHAHLVPPCPHADLFGKAGRGWLAGQWLPEDERAAVERHVRELDRLGEELSGVERDIARRALEDEVVKRLMTVPGIDMVVAVGLAAAIGDVSRFAAPERLVAYLGLNPSVHQSGDGPVRHGRITKQGRGQARGMLVEAAWAAARAPGPLRAFFLRIAARRGQHVAAVATARKIAVIVWHMLRDGKDYTWGRPALHAKKLRDLQLRAGHPSRRGQRGAAHAYNKAGTREAERRGAAEGEAAYERLTKGWQPRGPRRARMDAATEERP

SEQ ID NO: 239627 - protein, 416 aa, unidentified
MSLTQTPAAVEPPRPTGGVDWAKDDHAVAVVAPDGEQTHRFSITHDAAGLRSLAKRLLAAGVAEVGIERPDGPVVDALRQAGLVVYVIPPGQLRNLRSRYGSAGNKDDRFDAYVLADVVRTDRRRLRPLLVDQPATTALRQSVRARKDLVGHRVAVANQLRAHLQICFPGAVGLFADIDSEISLRFLERFPTPEKAAWLSPKRWAAWLSSVGYSGRTLPDTLHQRLSAAPAGATGPAADTTAAVTAAFVAVLRTLTAQIDALGARIAEQLQLHPDAPIFTSLPRSGRVRAARLLAEIGDARGRFPTADSLACLAGVAPSTRQSGKIEVVSFRWGADKQLRDAICDFAADSRHANPWAADLYQRARNRGHDHPHAVRILARAWVDIIWACWTTHAPYDPDKHRALQRILNQDQPAAA

SEQ ID NO: 239628 - protein, 313 aa, unidentified
MLGIDVSKETLSICHWNARQGCAEATWEVPNSLQGVGQLLAMTPPQEPLALEPTGRYGELLVREAQAQGRRVLLAPPRAAKQFLASVQPRAKTDRVDARGLAQYAASVSLQPFVLKGAQMEQLSQLLNARKLLVLSRAAYRQQAAALVHVRTVLQPAIEATTAQIKQIDRELATRAKQEPALRRLQKVPGIGPIAAAALFVRLKSTAFAGYDQFVAYVGLDLRVVDSGLHRGRRKVSHHGDAELRRLLYLCAQASARTKGSPFAFQYQRELAKGLASTQALCAVARKIAKVAWALVRSGADYDPNRVYAHLTH

SEQ ID NO: 239629 - protein, 340 aa, unidentified
MGHYCGIDLHGNNSLIAIIDETDRIMFEKRLPNDLEAILFVLEPFRTDLVGIVVESTFNWYWLVDGLMENGYKVHLANPAAIQQYDGLKFSDDKSDAKWLAHLLRLGILPEGYIYPKAERAVRDLLRKRGQLVRYRTSNLLSVNNLVARNNGGSISAQRIKQMEKEGVGELFRSKENILAVNANLAVLRCLDEQIKLIEKEVRKRAKLRPEFNLLHTVIGIGDILALTIALETGDISRFPTVGDFSSYCRTVNSERITNGKKKGKGNAKCGNKYLAWAFIEAANFAGRYNEQARKFIQKKSAKSKPVVARKALANKLARACYYIMRDKVPFDNERLFTTK

SEQ ID NO: 239630 - protein, 355 aa, unidentified
MASDSRMSMGFTIGLDMGDRRSDLCVLDPTGAVQARLQAATTEPALVAALRRYPQARVVLEVGTHSPWVSRLLERHGHEVIVANPRRVRRIAGLEDKSDRIDAELLARLGRVDPSLLRPIAHRGEDVQRDRALLRVRDALVRSRSALVTQARCLGKSLGQRFPRCDAHSFARRMREKQLDGAFPGFPALLAMVAELTAQIRVLDGAIERLGREQYPDTLGLRQVPGVGPITALAYVLTLEDPQRFARGRAVGAYLGLRPKKRQSGEHDPELRITKAGDPYLRRMLVQSAQYILGHFGPDTALRRFGERLIARGGRSARKKAAVAVARKLAVLLHRLWVTSERYEPLRGVPVEAVA

SEQ ID NO: 239631 - protein, 339 aa, unidentified
MPTTVGLDIAKRYFQLHTVDPETGEIRKVKLRRVEVIPFFANHAASIIAMEACGSSHHWARALRALGHEVRLIATKFVRPYVKNNKTDAADARAIWEAAQRPEMRFVPVKTEHQQAILSLHSMRDGLVKARTAQVHQIRAVFYEFGIELPEGRHWCVKSLPAAFERLEGKIPAMVIDALQLQLSLIRDLSAKVDEIERKLEAYKQSEERCQRLLKVPGVGLLTATAVVAAVADAHEFRSGREFAAWLGLVPRQTGTGGRVRLLGISKRGSSYLRVLMIHCARAVVARQKQHSAWLERLLATRPWNVAVVAQANKIARTVWAMLAHGRSYDHGYCAAQPV

SEQ ID NO: 239632 - protein, 470 aa, unidentified
MKKHQERKTKFKGSKPIHDSQPDAAGIDVGANEIWVAVAADRSQAPVKRFGAFTQELKAIVQWLLDCRVRSVAMESTGVYWIPLYQLLEDAGLKVCLVNARHVKNVPGRKSDVRDCQWLQYLHSVGLLMGSFRPPQAICAARSIYRYRQNLLSMASQHTQHMQAALDQMNIKLHHVIDDLSGVTGQAIIEAILAGQRDANQLAKLRDKRIQASEVTIVKALEGDWRSEHLFVLAAALENWKQVQQQIQKCDQQLLVYSRQFEACTTVAQPIKVMHLKPELEGAKRGEARAQKPRKKTSKNQPEGSWREELERFFGVDLTAIPGISVLSGLTLMTELGNDLSAFKTAHHFASWLCLCPDNETSASKVLRRRTRRSQNRVRQALRMAASTLHHNKSYLGEKYRRLRAKLGAPKAITAMAHQLARIIWTLITRRLPFDLSIFALEQRANEQRRLKGLSKTARQMGFQLIPIPA

SEQ ID NO: 239633 - protein, 372 aa, unidentified
MDQHSRLFIGLDVSKLKISVAVAEGERGGEVRFLRDIPSDPASVSSIVQRLAKRGAKLHFCYEAGPTGYELYRQLTAMGHDSVVAAPALIPERPGDRVKTNRRDAVSLARLHRAGELTAVWVPDRGHEAMRDLVRAREAAQEAQKRARQQLQSFLLRHGRVYSGCSSWSLAHRRWISTLTFEHPAHFIVLHEYCQAIEDAEVRLERLTDLIAETVKSGTMAPVVEAYQALRGVSLMAAVVFVAEIGDIRRFENPRQLMAFLGLVPSESSTGEHVERGGITKAGNSRARRMLVEGAWTYRCAARVSRTKQAQLEGLPRSVREIAWKGQLRLCSRYRTMILAGKHKAIAITAIAREMAAFLWAIGQEVQPAHHA

SEQ ID NO: 239634 - protein, 351 aa, unidentified
MTIVANTYLNVIGIDTHARTHTVTAITAATGARGDTAAFPTNARGLSRAVAWIGRQCSHMATLVVIEGIGSYGALIAHAARQAGYRVVEPGPIPKAWRSGRGKSDPIDAELIARSVLPADVDELRDPRHDEGIRAAVAVLLAGREQLTRHRTASINALTALLRLHDLGIDARHPLKTSQIATVAAWRDRVEDVATATARAEARRMAHAIIQADLELADNHDRLHALVLASPVAILLDEVGIGPINAAIILTAWSHPGRIRSEAAFASLAGVCPIPASSGNTTHHRLNRGGDRRLHRALHSIVLTRKRIDPVTRDYVARHTTDNRSNRDITRSLKRYLARRIYRLLAHAPTP

SEQ ID NO: 239635 - protein, 399 aa, unidentified
MAGPSLWAGIDAGKLDHHCVLIDASGERLLSRRVRNDEAALTALIDDVIALADGGLVQWAIDLNAGGGALVISLLLARDQHLLYIPGRIVHHASAAYRGDGKTDAKDAAIIADQARMRRDLLEFCHRDEFTVELRTLCARRTDVAADRNRAINRLRAQLLEYFPALERAFDYSHRRGALILLTGYQTPEALRRTGRTRLEKWLRGRNAYNPVAIADRAIAAANAQHVVVTGQRLGSTIVTRIAQQILDIDAELSDLDDMIEERFTQHQQAAVIRSMPGFGPLLGAELIAATNGGLDSFHSADRLAAVAGLAPVPRDSGRISGNLKRPRRYDRRLLRVFYLAANNSIKTCPQSRAYYDRKRAEGKHHRQAILSLARRRVNVLWAMQRDNTAYQSTAKTAA

SEQ ID NO: 239636 - protein, 344 aa, unidentified
MEYFAGLDVSLRSCAICVVDGKGAVLHERDLPCEIEEIAGYLAALPVSVERIGFESGTLSQHLFYGLKAEGFDVVCMEARQVSAALSAMRNKTDRNDARGIAQILRTGWFSPVHMKSWEAHGVRALLSTRKALLSKTIDLANEVRGLLKIFGIRLPKTVKHGSFDGVVRPMIEMDEVLAHAMLPLLDARLVLYQHFLELDRRVKRAASRDAVCMRMMTVPGVGPIAALTFKAAVDDPTRFKRSRTVAAHFGLTPRRYPSGEQDNPGRISKAGDRDVRATLYAAANALLMRTMAESQIKSWGMRLMRTKGRRRAVVAVARKLAVLLHRMWADGTEFRSEKMEGMA

SEQ ID NO: 239637 - protein, 355 aa, unidentified
MADKYILAQDRLLAAGLDVDRHGSAVTLLDPGSGEIVYEGRLAHDVQTWQRFLARLPGCRLAAFYEAGPMGYTLSRRLHSLGVDCRVVAPSQVPKASNLQQTKTDRRDAFTLAQLYFHPPRSFVRVPSEQEEARRQLVRLREQLLEDKQRVMRRIKSLLLNYGFDPPADSGKSWSKPWRQWLRDLDPGFEELRFTLDIMLDELDGIEEQLARINERLRQLAKHPDYREAADRLMQIPGVGPLLTMTFLLELFHPEAFTRAEALAAHCGLTPCEYSSGGKTRRGHITRWGPPALRRLLVEATWIWVSKDSQARQRFHTIRAGKSPKVAVVGMARRLAVALWAMTVKKQAFAYHWKQ

SEQ ID NO: 239638 - protein, 445 aa, unidentified
MTHRTIGIDLAIRGDHVAQIFDDGHPSGRPIRFRHDPASLNSLVLRARDKLNESDRVQAIMEPTGMSWFPIAHQLVDAGVEVARVKGKRVKALRRYLSEHAKTDLADAQVLAAIPGFGGPRLDPVHIPAARSHALQRLTKQRSRFQDDLSSAKRRLLDLVRWASPALEAVLPDLATRLSLASLQRWLDPEAVLSVRRPTLRKFIAEHASGNHPHSGPFVEALIDGLRDAARQAQALHGRHVDFAELQAEVALEIDIMLTKMAAVSALEQRIAALYDELDPQSLLRSIPGIGEHLAPTILGVLHTARRFHSERHMRGFCGLFPKRSDSGGTERPGQQITQGGNDRIKRALMLAADTARRIDPELAEIYWRLMTAKGHHHKQALCAVANRLTNRIFSVLRRGKPYVLRDKDGNALTIEQAKAIVRTSYTVPNAVRASRRANRSPPAA

SEQ ID NO: 239639 - protein, 345 aa, unidentified
MEQISRIGMDTSKHVFQLHGVNAAEVVVLRKKLRRKEMVAFFEKLPPTVIAIEACGASHHWARLLQSFGHTVKLIAPQLVKPYVKRGKNDAADAEALCEAMSRPTMRFVPVKTAEQQATLMLVGVRDRLIRNRTQLANAIRGHAAEFGLTAAKGMAHLAPLLERIQADESLPALARELFAMQAKEYEQLQAQIEEVDAKLVAWHKADECSQRLAKIPSVGPIGAMLLRTKTPDPALFESGRQFAAWIGLTPKDHSTAGKVRLGGITRAGDEGLRSVLVVGATAVIRHALSSGKASPWLLELLKRKSPKLAAVALANKTARIAWKMMLTGETYSAKPAAAASVGAA

SEQ ID NO: 239640 - protein, 413 aa, unidentified
MTEENFAWFAGIDWGSERHQACLVDAQGRIVGEREFPHGGKGLADLCDWLLSMCGAAETVAVGIEVPHGPVVDTLIDRGFVVHAINPKQLDRLRDRHSVAGAKDDRRDAYVVGDGVRTDRRLFRRVHVTDPRLVELRAWSRLAEELTEERVRLSNRVHHELWRYYPQMLKIADGDVAATWVLDLWDLAPTPAGAHRLRAAPVEKLLKHHHIRRIDADAVLRNLQEPAIKVGKGVAEAASVHLRSLFTRLRVVNRELRQADAKLDALCAAIGETDADSGEGLQRQDVMILRSMPGIGRINLATLLCEGSGPLSRRDYPALRTLCGAAPVTKRSGKSHIVIMRYASHVRLRNVVYHWARVATQHDPKSRERYAALRRRGKSHGRALRGVADRLLGLACVLLQRQTPFDPNFAQAK

SEQ ID NO: 239641 - protein, 399 aa, unidentified
MGEGMVAGIDWASEVHVACVMDGDGAVASRFSFTHDGAAIRAMAGRLRAAGVAGVAIERGDGPVVEELLSAGLAVFVVPSRQIKGLRTRYGSAGNKDDRFDAYVLADTLRTDGHRWKPLRPDTGPTRALRAACRSRKDLVETRVQVLGQLRANLELAFPGTIGLFTKLYSTISLAFLQRFPTAAKAAWLSPKRLASWLASVGYTGGVSAGILYDRLATAAPGLTGAEGEARGQITLALVSVIGALNTQIAALDAEIGRLFAAHPDRHIFASLPRSGTIRAATLLAEIGDCRQRFPTDDALAALAGACPSTRQSGKRTQAVFRWSCSKKLRAAVMDFANGSRMADPWAAAIYAAAIARGCRHPHAIRILARAWLRIIWRCWQDGAAFDPALHRSRQTATA

SEQ ID NO: 239642 - protein, 314 aa, unidentified
MTPGRFIGIDVAKRQLDVAERPSGEAWSVGNDGAGIAALIERLRNSDPIALIVLEATGGYEIPVVAALTAACLPVVVANARQVRDFARALGKLAKTDTIDAAVLAQFAEAVRPEVRALPDELTQTLQSWLARRRQVLEMLLAEEQRLTMAVRGLRPQIQQHIEWLRRQLRDIDTELQNLIRDSPIWREQENLLRTVPGVGPVLATTLLADLPELGRLNRKQIAALVGVAPLNRDSGLQRGARHIWGGRAPVRTALYMATVSAVRCNAVIRIFFERLCAAGKPKKVALTACMRKLLTILNAMMLTRTGWRPAGAA

SEQ ID NO: 239643 - protein, 350 aa, unidentified
MRTKPIPETTAFGIDIGKKVFHVVALNAVGAVIQRAKFSRDTLMAFFDAAPKGLVGMEACPGSQWLARRLVAMGHDARIIPARFVKPYVKSNKTDTVDAAAIAEAVTRPTMRFVEVRTPGQVDLQALHRIRDRLVGQRTALMNQARAFCIEYGLAMRVGSGGFHADIRRHLANAENDLTPAMRVLLEELLDDLAYVEGRIKAVNVKVEAYASEHEAVSRLVTIPGIGALGATALVAAAGDGRQFKKARDLAAWLGLVPAEHSTGGKRTLLGISKRGNRYVRRLIIHGARSCLLHLNRANHALGGWLSALEARTHRNKAVVALANKLTRIVWAILTKPGTVYLQSKGAAAS

SEQ ID NO: 239644 - protein, 335 aa, unidentified
METVYFLGIDISKKKFDAALTQDGCNMHELVVANNRAQIRVAFRELKKKFGFSFNQLVICLEHTGIYCQPLLDFVVEHSIKVCMESALQIKQSQGMVRGKNDRIDAKRIAGYAFKNRGQLKFWRPQRQVVQKLKALLVARERLVKVKVQLQTPLTEAEEFIEESIRQTMVKCCKKTIRALSEDIDKIEHEIDLLQAQDQTLNSQMKYATSVTGIGKITAANVIVSTGEFKRIADAKKFACYSGIAPFEHTSGTTIRGKTRVSKLANMTMKKLLHLSAMAAIRHSDELRLFYARKVAEGKNKMSVINAVRNKLISRVFACVKNQRTYEKTYQHALA

SEQ ID NO: 239645 - protein, 321 aa, unidentified
MTGIICGVDIGSSSLAARIGQDGAAATFANTPEGIAELAAFCKTHQVALIAMEATGGYEQRAFAQLCGHGLPVAVVNPRAVRQFAQSMGWLEKTDAIDAGMIAWYAETKKSQPLCLAPPTQLELRARVTRLRQLTEVRTAQLNQQRLVTNEAVQKSFGAMLTFLAGQIRELEQAIAALIQADPLWRELNQAFRTIKGVADRTVARIMAEMPEIGTLSNKTISKLAGLAPLANDSGKHQGKRAVRGGRAAVRDILFLVGSVVARYEPDFLCFQQRLRAAGKPPKVVRIAVAHKLLVRLNAKAREVRQQSAHTQLSCSASQQP

SEQ ID NO: 239646 - protein, 422 aa, unidentified
MLEQAQDREQIIERVAALDIGKASLTCCVRVPDSQRLGRRLQEVGTYSTMTRSLQQMADRLMDLGVTRVVMEATSDYWKPPFYLLEAHGFETWLVNARDVRHLPGRPKTDRLDAVWLCKVAERQMLRPSFVPPPRIRRLRDLTRYRSALVSDRSAEKNRVEKLLEDAQIKVSVVASDIFGVSGRQMMAALINGERDPRVLANLARGALRTKLPTLQEAFTGRFSDHHAYLLSRMLARIDALSAEIADLDARIEAEIAPFARAVARLDEIPGVGVSAARVIIAEIGVDMTRFPTPGQLASWARFAPGVSESAGKTKGTGATGHGNRYLAHVLGEAAVGASKTPTFLGERYRRIARRRGARRAVVATGRSLLTIVWHLLSDDSTTYNDLGPDFYDAHHNRDRKRNQHIRELQALGYKVTLEPAA

SEQ ID NO: 239647 - protein, 321 aa, unidentified
MAVMIGVDPHKRSHTAVAIDREDVELDAIEVRASARQVAELLAWAAGFEERTWAVEGAGGVGYLLAQQLVGAGERVLDVPATLAARVRVLGSGRSNKNDPNDGYSIAVAALHAPRLAVVTGADHASVLRLLAKRNQELSSARTRTACRLHALLVELVPGGITKEITVSRAAQVLASVTPSGPVETTRHELALEHLEDLRRVEEQIRASKRRLTAAVEASATTVSEVFGFGPVGTAIAIGHTRNIGRFPSRDHFAAYNGTGPIEMSSGGRVVHRLSRRGNRQLNTRSISRRSPRSATRTHPAAATTTANSPKERQPKKRSAH

SEQ ID NO: 239648 - protein, 345 aa, unidentified
MEHYAGIDVSLESASLCVVDAIGRIVREAKVASEPEALIKWFRSLGFPVARIGLEAGPLSQWLYAGMRDAGLTVELLETRHVRDAFKAMPVKTDRKDARGIAQLMRLGWFRPVHCKSLPAQEVRALLTARKLLQTKNHDVEMSLRGVLRGFGLKVGPTTPRTFTDRIRELVDGHTTLSAVAEALLAARSTLFEQWQKLEKRLRSLAREDSRARLLMTAPGVGTIVALTFASAIDDPGRFRSSKAVGALFGLTPRKYQSGETDVTGRISKIGDGGVRTALYEAANVILTRPVKGSTLKSWGMRLAARAGMRKAKVALARKLAVVLHRMLADGTSFVADKAAATAVR

SEQ ID NO: 239649 - protein, 341 aa, unidentified
MQITTIGLDIAKNVFQVHGIDAGEKVVVRKQLRRGQVMKFFAALPPCLVGMEACATAHYWARELTKLGHEVRLMPAKDVKAYVKRNKNDAADAEAICEAVRRPTMRFVQAKSAEQQGRLMQHRTRDLLLRQQTQVINALRAHLAELGIVAAQGREGLKQLLAIIADEKDTRLPIDARASLIVLAAQLQAVHTMIGSIERRLTVQHRANEASKRLQSIHGIGIIGASAIAATVTDPKAFRSGRDFAAWIGLVPRQDSTGGKQKLGPISKQGDRYLRRILVVGAHSVLRRAKQNPEKYPWLTQLLARRPFKVVAVALANKMARIAWALLASGGHYRPARLAAA

SEQ ID NO: 239650 - protein, 356 aa, unidentified
MGNSNKLDFTGQPIFIGLDVHKKSWSVSIHSAVCEHKTFSQPPEVDILVNYLRRNFPGATYRSVYEAGYSGFWVHDQLIEKGVACTVANPADVPTKDKERRKKRDRVDCRKLARSLRAGEIEGIYVPCREKLEDRSLVRTRQSMVRKQTRCKNQIKSLLLFYGIAIPEDWAERRWSGPFVRWLESLPMERASGEVTLRIHVEELKHLRQILARLDREIRVLAQTGEYRVQVWLLRTIPGISTLTAMILLTELQEISRFRSLDELASYVGLIPDTHSSGETEHTGDITQRRHAQLRASLVEAAWVAVRKDPALLMAFQESCQRMRKTRAMVKIARKLLNRVRFVLKNQTPYRMGVVQ

SEQ ID NO: 239651 - protein, 461 aa, unidentified
MKLLYRRCAGLDIHKKSVSVCVRRRVSGKPEVEIEEAVFGTFTQDLVHLREWLRERKVREVAMESTGVYWIPVWNVLEAGKHPLHLTLVNPAVVRALQGRKTDRIDARRIAEYMQYGLLRGSFIPPRPIRQLRELTRMRVHVQQDRNRVINRIGRLLETVNIKLSSVASHIAGKSGRAMLAALARGVRRPEVLAEKALGHLRGKIPDLILALDGRPDPHFQWMLTDLLRKLEWLDAELAKLDARLCEQMAEHAELIELLSTIPGVERTTARVLIAELGIDMTQFATPAHLASWAGLCPGNAESAGKRFSGKTRKGDRYLRRILVQSAWAAARTKDCFLAGLFYRIAARRGMKKAAVAVAHRILAIAWKIIRDGVPYQEQGRDAFDRRNPLRTARKLARRLENIGFRVQLTPSPAAEAPSPPPIVSPDVCARCAQWKLSNCIHLIKRPKRRKTNVAPAESVG

SEQ ID NO: 239652 - protein, 338 aa, unidentified
MELYAGIDLHSNNSVVTVLDEQDRTVYAKRLPNDLGCIVAALRACAGEVRGVAVESTFNWYWLVDGLQAAGFTVHLVNTAAVKQYDGLKHGGDFSDARHLAHLVRLGSLPGGHIYPREERAVRDLLRKRSQLVRQRSSQILSIENLIARNLGARASGNEVKRWDAKFIDAMELLDEHKQAVKANLVVMNCIDGQVVELERCILAKVKLREDFKGLKTVSGIGQILALTIALETGDIARFAGPGHFASYARMVDSRRESNGKKKGVGNAKCGNKHLAWAFIEAAHFAVRFDATIKRWYQKKCASSLSVVAIKAVAHKLARACYHVIKDGAPFDAAKAFG

SEQ ID NO: 239653 - protein, 318 aa, unidentified
MSQPNQHCIGIDVAKLSLDIAGTTEFSPFAASNDEDGFMAILKALKEWNISLILMEATGGLEASVACCLQAAGYEVVVINPRQARDFARSMGYLAKTDKLDAAMLAQLAQIIDRHPDRSRYIRALPDEARAVLTAMVVRRRQLNNMLVAERNRRYPSHPQSRKSIDNIINALESELEHISQEMKQHVKVFFMEQAELIGSVKGVGEVTVASLIAELPELGKLNRREISALTGVAPLNRDSGKMRGRRTTFGGRAGVRATLYMAALVATQFNPAIKMFYQRLLTVGKPKKLALVACMRKLITILNTMVRKGEKWDASFR

SEQ ID NO: 239654 - protein, 350 aa, unidentified
MHYQPKSCAVFGIDIGKTLFHVVGLDASWSPIQKAKFRRETLLQFFEQAEPTLVGMEACPGSQWLARKLKEIGYDVRIIPAQFVKPYVKSHKNDVIDAEAIAEATTRPTMRFVGVKEAHQIDLQMLHRIRSRLVKSRTNLICQMRSYCLEHGVALRQGAGVFKLDIARALEDTENDLTGRARIVLQELQADLLRLEERIRSVSTEIKNIADRNETARRLMTIPGVGPLGATAILASIGDPSRFKKARDVAAWLGLVPQQHSTGGKQTLLGIAKRGSSYLRTLLIHGARSVLMHLDRTKDRLGQWADELRGRMHVNKVTVALAAKLARIIWVVLSKPGATYERRSPVVVSA

SEQ ID NO: 239655 - protein, 333 aa, unidentified
MNKIINYVGIDMAKASFMAAFNETDEPWQFENINHGINSFFNHLKQLGFNQAETILGVESTGSYHLKLSVACQSNSYQIKVINPLIVKKYNQTTLRRVKNDRKDALLIRYCLSQGYGYPFNTTQDEFILKALIRQRNSLTNTKIQIHRQDQDIQLKQSAIKTKINSIYKDIKKTIDKKIKTIEKQLKDFDQPVQALLKTIPGVGPITAASFVSEITNIQRFKQPKHLTAYIGIDPRVYQSGESIKGKGYITKRGNKILRTILFNAASVAVLHNNMFQRFFQKKRSEGKPYRVALVATMRKMAHVIHAVWSNNSPYQDNYRQYYLSTQEGLTGI

SEQ ID NO: 239656 - protein, 342 aa, unidentified
MDEYDVRQFVGIDLHRQRSVIVRQSESGDQLSAVRIVNDPAALRLELERAGTDPEVVLEATYGWYWAVDVLRDCGAQVHLAHPLGVKGFRYRRVKNDVRDAGDLADLLRMGRLPEAWIAPPQTRELRELVRYRAKLVAIRSGLKAQVHAVLAKAGVLIAVSDLFGVGGRQRLAKVPLGAAYAERVRSLLELIDVLDGHEARFAGLIAKRLCNHRGYQALQQVPGIGPVLAAVFVAEIGDVHRFTSPAHLCSWAGLTPKHRESDTVVHRGHITKQGSKLVRWAAVEAIQRYPTTSKIALDRTRIESRRGKNIAKIAAARKLLTLVYYGLRDGHIRALDRPRAA

SEQ ID NO: 239657 - protein, 406 aa, unidentified
MYYVGIDVAKEKHYVCILDEDTQIVSKPFWIYSDVLGLKELIKRLLDLSLNCDDFLIGVESTGAFSENIYEFLSDLDFKVILLNSYQTSKYRDFSTMKKVKNDSIDAYIIAELLSSGKYKQSHISSDDYHRLKVLGRLKKSLDDKIKTVKREISTVIATVNPEITHVFKNIFTKTALVIIKEYPTSVDLKKTTLKRLLKLFRGIKGNNFSEVKAMQLIDLANSSIYNGRAHDARSLMIKTNIKILELLCQEKENIENQINTLIEENQDDDFSSSIKNLKTIPGVADKTISAILGECGDLKRFDSVKSFIGYLGLYPTQYQSGNSLSVGRLAQRGIPIAKHALYMSAVSSVLHNDELRKIFRDKVSAGKSKKEALIIIAKKIAGIIYSIFKYNQPYNPNRVLVPYRK
